(19) United States
(12) Patent Application Publication
(10) Pub. No.: US 2011/0296543 A1
(43) Pub. Date: Dec. 1, 2011

(54) NUCLEIC ACIDS AND PROTEINS AND METHODS FOR MAKING AND USING THEM

(75) Inventors: Hwai Chang, San Marcos, CA (US); Eric J. Mathur, San Diego, CA (US); Michelle Cayouette, San Diego, CA (US); Dan E. Robertson, Belmont, MA (US); Philip Hugenholtz, Berkeley, CA (US); Falk Warnecke, Berkeley, CA (US); Jared R. Leadbetter, Altadena, CA (US); Natalia Ivanova, Clayton, CA (US); Peter Luginbuhl, San Diego, CA (US); Don Hutchison, Encinitas, CA (US)

(73) Assignees: The University of California, Oakland, CA (US); California Institute Technology, Pasadena, CA (US); Verenium Corporation, San Diego, CA (US)

(21) Appl. No.: 12/324,436

(22) Filed: Nov. 26, 2008

Related U.S. Application Data
(63) Continuation-in-part of application No. PCT/US2007/070284, filed on Jun. 1, 2007.
(60) Provisional application No. 60/810,493, filed on Jun. 1, 2006.

(51) Int. Cl. A01K 67/00

(52) U.S. Cl. 800/13

(57) ABSTRACT

The invention provides polypeptides, including enzymes, structural proteins and binding proteins, polynucleotides encoding these polypeptides, and methods of making and using these polynucleotides and polypeptides. Polypeptides, including enzymes and antibodies, and nucleic acids of the invention can be used in industrial, experimental, food and feed processing, nutritional and pharmaceutical applications, e.g., for food and feed supplements, colorants, neutraceuticals, cosmetic and pharmaceutical needs. Polypeptides of the invention can be used in food processing, brewing, bath additives, alcohol production, peptide synthesis, enantioselectivity, hide preparation in the leather industry, waste management and animal degradation, silver recovery in the photographic industry, medical treatment, silk degumming, biofilm degradation, biomass conversion to a biofuel (e.g., a bioethanol, biomethanol, biopropanol or biobutanol, a biodiesel, etc.), biodefense, antimicrobial agents and disinfectants, personal care and cosmetics, biotech reagents, in corn wet milling and pharmaceuticals such as digestive aids and anti-inflammatory (anti-phlogistic) agents.

### CROSS REFERENCE TO RELATED APPLICATIONS

[0001] This application is a continuation-in-part of and claims the benefit of priority of Patent Convention Treaty (PCT) International Application Serial No: PCT/US2007/070284, filed Jun. 1, 2007, which claims the benefit of priority under 35 U.S.C. §119(e) of U.S. Provisional Application No. 60/810,483, filed on Jun. 1, 2006; and this application expressly incorporates by reference Table 1 from the priority document PCT/US2007/070284, particularly for the express purpose of defining function(s) of biological sequences of the invention. The aforementioned applications are explicitly incorporated herein by reference in their entirety and for all purposes.

### STATEMENT AS TO RIGHTS TO INVENTIONS MADE UNDER FEDERALLY SPONSORED RESEARCH

[0002] This invention was made with government support awarded by the Department of Energy through LDRD LB06010 under Contract No. DE-ACO2-05CH11231. The government has certain rights in the invention.

### REFERENCE TO SEQUENCE LISTING SUBMITTED VIA EFS-WEB

[0003] This application is being filed electronically via the USPTO EFS-WEB server, as authorized and set forth in MPEP §1730 II.B.2(a)(A), and this electronic filing includes an electronically submitted sequence (SEQ ID) listing. The entire content of this sequence listing is herein expressly incorporated by reference for all purposes. The sequence listing is identified on the electronically filed .txt file as follows:

| File Name | Date of Creation | Size (bytes) |
|---|---|---|
| 220002074020seqlist.txt | Nov. 25, 2008 | 206,596,887 bytes |

### REFERENCE TO TABLES SUBMITTED VIA EFS-WEB

[0004] This application is being filed electronically via the USPTO EFS-WEB server, as authorized and set forth in MPEP §1730 II.B.2(a)(A), and this electronic filing includes electronically submitted tables. The entire content of the tables is herein expressly incorporated by reference for all purposes. The tables are identified on the electronically filed .pdf files as follows:

| File Name | Date of Creation | Size (bytes) |
|---|---|---|
| Table-4.pdf | Nov. 26, 2008 | 5,886 bytes |

### FIELD OF THE INVENTION

[0005] This invention relates to molecular and cellular biology and biochemistry. In one aspect, the invention provides polypeptides, including enzymes, structural proteins and binding proteins (e.g., ligands, receptors), polynucleotides encoding these polypeptides, and methods of making and using these polynucleotides and polypeptides. In one aspect, the invention is directed to polypeptides, e.g., enzymes, structural proteins and binding proteins, including thermostable and thermotolerant activity, and polynucleotides encoding these enzymes, structural proteins and binding proteins and making and using these polynucleotides and polypeptides. The polypeptides of the invention can be used in a variety of pharmaceutical, agricultural and industrial contexts, including the manufacture of cosmetics and nutraceuticals.

[0006] Additionally, the polypeptides of the invention can be used in food processing, brewing, bath additives, alcohol production, peptide synthesis, enantioselectivity, hide preparation in the leather industry, waste management and animal degradation, silver recovery in the photographic industry, medical treatment, silk degumming, biofilm degradation, biomass conversion to a biofuel (e.g., bioethanol, biopropanol, biobutanol, biopropanol, biomethanol, biodiesel, etc.), biodefense, antimicrobial agents and disinfectants, personal care and cosmetics, biotech reagents, in corn wet milling and pharmaceuticals such as digestive aids and anti-inflammatory (anti-phlogistic) agents.

### BACKGROUND

[0007] The invention provides isolated, synthetic and recombinant polypeptides, including enzymes, structural proteins and binding proteins, polynucleotides encoding these polypeptides, and methods of making and using these polynucleotides and polypeptides. The polypeptides of the invention, and the polynucleotides encoding the polypeptides of the invention, encompass many classes of enzymes, structural proteins and binding proteins. In one aspect, the enzymes and proteins of the invention include, e.g. aldolases, alpha-galactosidases, amidases, e.g. secondary amidases, amylases, catalases, carotenoid pathway enzymes, dehalogenases, endoglucanases, epoxide hydrolases, esterases, hydrolases, glucosidases, glycosidases, inteins, isomerases, laccases, lipases, monooxygenases, nitroreductases, nitrilases, P450 enzymes, pectate lyases, phosphatases, phospholipases, phytases, polymerases and xylanases. The invention also provides isolated, synthetic and recombinant polypeptides, including enzymes, structural proteins and binding proteins, polynucleotides encoding these polypeptides, having the activities described in Table 1, Table 3 and/or Table 4, and in another aspect, with or without signal sequences as described in Table 2. The enzymes and proteins of the invention have utility in a variety of applications.

### SUMMARY

[0008] The invention provides isolated, synthetic or recombinant nucleic acids comprising a nucleic acid sequence having at least about 50%, 51%, 52%, 53%, 54%, 55%, 56%, 57%, 58%, 59%, 60%, 61%, 62%, 63%, 64%, 65%, 66%, 67%, 68%, 69%, 70%, 71%, 72%, 73%, 74%, 75%, 76%, 77%, 78%, 79%, 80%, 81%, 82%, 83%, 84%, 85%, 86%, 87%, 88%, 89%, 90%, 91%, 92%, 93%, 94%, 95%, 96%, 97%, 98%, 99%, or more, or complete (100%) sequence identity to an exemplary nucleic acid of the invention, e.g., including SEQ ID NO:1, SEQ ID NO:3, SEQ ID NO:5, SEQ ID NO:7, SEQ ID NO:9, SEQ ID NO:11, SEQ ID NO:13, SEQ ID NO:15, SEQ ID NO:17, SEQ ID NO:19, SEQ ID NO:21, SEQ ID NO:23, SEQ ID NO:25, etc. and all nucleic acids disclosed in the SEQ ID listing, which include all odd numbered SEQ ID NO:s from SEQ ID NO:1 through SEQ ID NO:108,699, over a region of at least about 10, 15, 20, 25, 30, 35, 40, 45, 50, 75, 100, 150, 200, 250, 300, 350, 400, 450, 500, 550, 600, 650, 700, 750, 800, 850, 900, 950, 1000, 1050, 1100, 1150, 1200, 1250, 1300, 1350, 1400, 1450, 1500, 1550, 1600, 1650, 1700, 1750, 1800, 1850, 1900, 1950, 2000, 2050, 2100, 2200, 2250, 2300, 2350, 2400, 2450, 2500, or more residues, or over the full length of a protein coding sequence (transcript) or gene, encodes at least one polypeptide having an enzyme, structural or binding activity, and the sequence identities are determined by analysis with a sequence comparison algorithm or by a visual inspection. In one aspect, the enzymes and proteins of the invention include, e.g. aldolases, alpha-galactosidases, amidases, e.g. secondary amidases, amylases, catalases, carotenoid pathway enzymes, dehalogenases, endoglucanases, epoxide hydrolases, esterases, hydrolases, glucosidases, glycosidases, inteins, isomerases, laccases, lipases, monooxygenases, nitroreductases, nitrilases, P450 enzymes, pectate lyases, phosphatases, phospholipases, phytases, polymerases, proteases, peptidases and xylanases. In another aspect, the isolated, synthetic and recombinant polypeptides of the invention, including enzymes, structural proteins and binding proteins, and polynucleotides encoding these polypeptides, of the invention have activity as described in Table 1, Table 3 and/or Table 4, and in another aspect, with or without signal sequences as described in Table 2.

[0009] In one aspect, the invention also provides isolated, synthetic or recombinant nucleic acids with a common novelty in that they are all derived from a common source, e.g., an environmental source, mixed environmental sources or mixed cultures. The invention provides isolated, synthetic or recombinant nucleic acids isolated from a common source, e.g. an environmental source, mixed environmental sources or mixed cultures comprising a polynucleotide of the invention, e.g., an exemplary sequence of the invention, including SEQ ID NO:1, SEQ ID NO:3, SEQ ID NO:5, SEQ ID NO:7, SEQ ID NO:9, SEQ ID NO:11, SEQ ID NO:13, SEQ ID NO:15, SEQ ID NO:17, SEQ ID NO:19, SEQ ID NO:21, SEQ ID NO:23, SEQ ID NO:25, etc. and all nucleic acids disclosed in the SEQ ID listing, which include all odd numbered SEQ ID NO:s from SEQ ID NO:1 through SEQ ID NO:108,699 over a region of at least about 10, 15, 20, 25, 30, 35, 40, 45, 50, 75, 100, 150, 200, 250, 300, 350, 400, 450, 500, 550, 600, 650, 700, 750, 800, 850, 900, 950, 1000, 1050, 1100, 1150, 1200, 1250, 1300, 1350, 1400, 1450, 1500, 1550, 1600, 1650, 1700, 1750, 1800, 1850, 1900, 1950, 2000, 2050, 2100, 2200, 2250, 2300, 2350, 2400, 2450, 2500, or more residues, or over the full length of a protein coding sequence (transcript) or gene, encodes at least one polypeptide having an enzyme, structural or binding activity, and the sequence identities are determined by analysis with a sequence comparison algorithm or by a visual inspection. In one aspect, the enzymes and proteins of the invention include, e.g. aldolases, alpha-galactosidases, amidases, e.g. secondary amidases, amylases, catalases, carotenoid pathway enzymes, dehalogenases, endoglucanases, epoxide hydrolases, esterases, hydrolases, glucosidases, glycosidases, inteins, isomerases, laccases, lipases, monooxygenases, nitroreductases, nitrilases, P450 enzymes, pectate lyases, phosphatases, phospholipases, phytases, polymerases, proteases, peptidases and xylanases. In another aspect, the isolated, synthetic and recombinant polypeptides of the invention, including enzymes, structural proteins and binding proteins, and polynucleotides encoding these polypeptides, of the invention have activity as described in Table 1, Table 3 and/or Table 4, and in another aspect, with or without signal sequences as described in Table 2.

[0010] In alternative aspects, the isolated, synthetic or recombinant nucleic acid encodes a polypeptide comprising an exemplary sequence of the invention, e.g., including sequences as set forth in SEQ ID NO:2, SEQ ID NO:4, SEQ ID NO:6, SEQ ID NO:8, SEQ ID NO:10, SEQ ID NO:12, SEQ ID NO:14, SEQ ID NO:16, SEQ ID NO:18, SEQ ID NO:20, SEQ ID NO:22, SEQ ID NO:24, etc. and all polypeptides (amino acid sequences) disclosed in the SEQ ID listing, which include all even numbered (amino acid) SEQ ID NO:s from SEQ ID NO:2 through SEQ ID NO:108,699, and enzymatically active fragments thereof. In one aspect these polypeptides have an enzyme, structural or binding activity. In one aspect, the enzymes and proteins of the invention include, e.g. aldolases, alpha-galactosidases, amidases, e.g. secondary amidases, amylases, catalases, carotenoid pathway enzymes, dehalogenases, endoglucanases, epoxide hydrolases, esterases, hydrolases, glucosidases, glycosidases, inteins, isomerases, laccases, lipases, monooxygenases, nitroreductases, nitrilases, P450 enzymes, pectate lyases, phosphatases, phospholipases, phytases, polymerases, proteases, peptidases and/or xylanases. In another aspect, the isolated, synthetic and recombinant polypeptides of the invention, including enzymes, structural proteins and binding proteins, and polynucleotides encoding these polypeptides, of the invention have activity as described in Table 1, Table 3 and/or Table 4, and in another aspect, with or without signal sequences as described in Table 2.

[0011] In alternative embodiments, nucleic acids (polynucleotides) of the invention encode a polypeptide of the invention having at least one conservative amino acid substitution and retaining its enzyme activity, binding activity and/or structural activity; wherein the at least one conservative amino acid substitution comprises substituting an amino acid with another amino acid of like characteristics; or, a conservative substitution comprises: replacement of an aliphatic amino acid with another aliphatic amino acid; replacement of a Serine with a Threonine or vice versa; replacement of an acidic residue with another acidic residue; replacement of a residue bearing an amide group with another residue bearing an amide group; exchange of a basic residue with another basic residue; or replacement of an aromatic residue with another aromatic residue.

[0012] In alternative embodiments, the nucleic acid (polynucleotide) of the invention encodes a polypeptide of the invention having an enzyme activity, binding activity and/or structural activity, but lacking a signal sequence, a prepro domain, a dockerin domain, and/or a carbohydrate binding module (CBM), wherein optionally the carbohydrate binding module (CBM) comprises, or consists of, a xylan binding module, a cellulose binding module, a lignin binding module, a xylose binding module, a mannanse binding module, a xyloglucan-specific module and/or a arabinofuranosidase binding module.

[0013] In alternative embodiments, the nucleic acid (polynucleotide) of the invention encodes a polypeptide further comprising a heterologous sequence, wherein the heterologous sequence can comprise, or consist of, a sequence encoding: (i) a heterologous signal sequence, a heterologous carbohydrate binding module, a heterologous dockerin domain, a heterologous catalytic domain (CD), or a combination thereof; (ii) the sequence of (ii), wherein the heterologous signal sequence, carbohydrate binding module or catalytic domain (CD) is derived from a heterologous enzyme; or, (iii) a tag, an epitope, a targeting peptide, a cleavable sequence, a detectable moiety or an enzyme; or the heterologous carbohydrate binding module (CBM) can comprise, or consist of, a xylan binding module, a cellulose binding module, a lignin binding module, a xylose binding module, a mannanse binding module, a xyloglucan-specific module and/or a arabinofuranosidase binding module; or alternatively the heterologous signal sequence can target the encoded protein to a vacuole, the endoplasmic reticulum, a chloroplast or a starch granule.

[0014] In alternative aspects, the enzyme, structural or binding activity comprises a recombinase activity, a helicase activity, a DNA replication activity, a DNA recombination activity, an isomerase, a trans-isomerase activity or topoisomerase activity, a methyl transferase activity, an aminotransferase activity, a uracil-5-methyl transferase activity, a cysteinyl tRNA synthetase activity, a hydrolase, an esterase activity, a phosphoesterase activity, an acetylmuramyl pentapeptide phosphotransferase activity, a glycosyltransferase activity, an acetyltransferase activity, an acetylglucosamine phosphate transferase activity, a centromere binding activity, a telomerase activity or a transcriptional regulatory activity, a heat shock protein activity, a protease activity, a proteinase activity, a peptidase activity, a carboxypeptidase activity, an endonuclease activity, an exonuclease activity, a RecB family exonuclease activity, a polymerase activity, a carbamoyl phosphate synthetase activity, a methyl-thioadenine synthetase activity, an oxidoreductase activity, an Fe—S oxidoreductase activity, a flavodoxin reductase activity, a permease activity, a thymidylate activity, a dehydrogenase activity, a pyrophosphorylase activity, a coenzyme metabolism activity, a dinucleotide-utilizing enzyme activity, a molybdopterin or thiamine biosynthesis activity, a beta-lactamase activity, a ligand binding activity, an ion transport activity, an ion metabolism activity, a tellurite resistance protein activity, an inorganic ion transport activity, a nucleotide transport activity, a nucleotide metabolism activity, an actin or myosin activity, a lipase activity or a lipid acyl hydrolase (LAH) activity, a cell envelop biogenesis activity, an outer membrane synthesis activity, a ribosomal structure synthesis activity, a translational processing activity, a transcriptional initiation activity, a TATA-binding activity, a signal transduction activity, an energy metabolism activity, an ATPase activity, an information storage and/or processing activity, and/or any of the polypeptides activities as set forth in Table 1, Table 3 and/or Table 4, and in another aspect, with or without signal sequences as described in Table 2.

[0015] In one aspect, the sequence comparison algorithm is a BLAST version 2.2.2 algorithm where a filtering setting is set to blastall -p blastp -d “nr pataa”-F F, and all other options are set to default.

[0016] Another aspect of the invention is an isolated, synthetic or recombinant nucleic acid including at least 10, 15, 20, 25, 30, 35, 40, 45, 50, 75, 100, 150, 200, 250, 300, 350, 400, 450, 500, 550, 600, 650, 700, 750, 800, 850, 900, 950, 1000, 1050, 1100, 1150, 1200, 1250, 1300, 1350, 1400, 1450, 1500, 1550, 1600, 1650, 1700, 1750, 1800, 1850, 1900, 1950, 2000, 2050, 2100, 2200, 2250, 2300, 2350, 2400, 2450, 2500, or more consecutive bases of a nucleic acid sequence of the invention, sequences substantially identical thereto, and the sequences complementary thereto.

[0017] In one aspect, the isolated, synthetic or recombinant nucleic acid encodes a polypeptide having a enzyme, structural or binding activity, that is thermostable. The thermostable polypeptide according to the invention can retain activity under conditions comprising a temperature range from about −100° C. to about −80° C., about −80° C. to about −40° C., about −40° C. to about −20° C., about −20° C. to about 0° C., about 0° C. to about 37° C., about 0° C. to about 5° C., about 5° C. to about 15° C., about 15° C. to about 25° C., about 25° C. to about 37° C., about 37° C. to about 45° C., about 45° C. to about 55° C., about 55° C. to about 70° C., about 70° C. to about 75° C., about 75° C. to about 85° C., about 85° C. to about 90° C., about 90° C. to about 95° C., about 95° C. to about 100° C., about 100° C. to about 105° C., about 105° C. to about 110° C., about 110° C. to about 120° C., or 95° C., 96° C., 97° C., 98° C., 99° C., 100° C., 101° C., 102° C., 103° C., 104° C., 105° C., 106° C., 107° C., 108° C., 109° C., 110° C., 111° C., 112° C., 113° C., 114° C., 115° C. or more. The thermostable polypeptides according to the invention can retain activity, in temperatures in the range from about −100° C. to about −80° C., about −80° C. to about −40° C., about −40° C. to about −20° C., about −20° C. to about 0° C., about 0° C. to about 5° C., about 5° C. to about 15° C., about 15° C. to about 25° C., about 25° C. to about 37° C., about 37° C. to about 45° C., about 45° C. to about 55° C., about 55° C. to about 70° C., about 70° C. to about 75° C., about 75° C. to about 85° C., about 85° C. to about 90° C., about 90° C. to about 95° C., about 95° C. to about 100° C., about 100° C. to about 105° C., about 105° C. to about 110° C., about 110° C. to about 120° C., or 95° C., 96° C., 97° C., 98° C., 99° C., 100° C., 101° C., 102° C., 103° C., 104° C., 105° C., 106° C., 107° C., 108° C., 109° C., 110° C., 111° C., 112° C., 113° C., 114° C., 115° C. or more. In some embodiments, the thermostable polypeptides according to the invention retains an aldolase activity at a temperature in the ranges described above, at about pH 3.0, about pH 3.5, about pH 4.0, about pH 4.5, about pH 5.0, about pH 5.5, about pH 6.0, about pH 6.5, about pH 7.0, about pH 7.5, about pH 8.0, about pH 8.5, about pH 9.0, about pH 9.5, about pH 10.0, about pH 10.5, about pH 11.0, about pH 11.5, about pH 12.0 or more.

[0018] In another aspect, the isolated, synthetic or recombinant nucleic acid encodes a polypeptide having an enzyme, structural or binding activity, which is thermotolerant. The thermotolerant polypeptides according to the invention can retain activity after exposure to conditions comprising a temperature in the range from about −100° C. to about −80° C., about −80° C. to about −40° C., about −40° C. to about −20° C., about −20° C. to about 0° C., about 0° C. to about 5° C., about 5° C. to about 15° C., about 15° C. to about 25° C., about 25° C. to about 37° C., about 37° C. to about 45° C., about 45° C. to about 55° C., about 55° C. to about 70° C., about 70° C. to about 75° C., about 75° C. to about 85° C., about 85° C. to about 90° C., about 90° C. to about 95° C., about 95° C. to about 100° C., about 100° C. to about 105° C., about 105° C. to about 110° C., about 110° C. to about 120° C., or 95° C., 96° C., 97° C., 98° C., 99° C., 100° C., 101° C., 102° C., 103° C., 104° C., 105° C., 106° C., 107° C., 108° C., 109° C., 110° C., 111° C., 112° C., 113° C., 114° C., 115° C. or more. The thermotolerant polypeptides according to the invention can retain activity, after exposure to a temperature in the range from about −100° C. to about −80° C., about −80° C. to about −40° C., about −40° C. to about −20° C., about −20° C. to about 0° C., about 0° C. to about 5° C., about 5° C. to about 15° C., about 15° C. to about 25° C., about 25° C. to about 37° C., about 37° C. to about 45° C., about 45° C. to about 55° C., about 55° C. to about 70° C., about 70° C. to about 75° C., about 75° C. to about 85° C., about 85° C. to about 90° C., about 90° C. to about 95° C., about 95° C. to about 100° C., about 100° C. to about 105° C., about 105° C. to about 110° C., about 110° C. to about 120° C., or 95° C., 96° C., 97° C., 98° C., 99° C., 100° C., 101° C., 102° C., 103° C., 104° C., 105° C., 106° C., 107° C., 108° C., 109° C., 110° C., 111° C., 112° C., 113° C., 114° C., 115° C. or more. In some embodiments, the thermotolerant polypeptides according to the invention retains an aldolase activity after exposure to a temperature in the ranges described above, at about pH 3.0, about pH 3.5, about pH 4.0, about pH 4.5, about pH 5.0, about pH 5.5, about pH 6.0, about pH 6.5, about pH 7.0, about pH 7.5, about pH 8.0, about pH 8.5, about pH 9.0, about pH 9.5, about pH 10.0, about pH 10.5, about pH 11.0, about pH 11.5, about pH 12.0 or more.

[0019] The invention provides isolated, synthetic or recombinant nucleic acids comprising a sequence that hybridizes under stringent conditions to a nucleic acid comprising a sequence of the invention, e.g., an exemplary sequence of the invention, including SEQ ID NO:1, SEQ ID NO:3, SEQ ID NO:5, SEQ ID NO:7, SEQ ID NO:9, SEQ ID NO:11, SEQ ID NO:13, SEQ ID NO:15, SEQ ID NO:17, SEQ ID NO:19, SEQ ID NO:21, SEQ ID NO:23, SEQ ID NO:25, and all nucleic acids disclosed in the SEQ ID listing, which include all odd numbered SEQ ID NO:s from SEQ ID NO:1 through SEQ ID NO:108,699, or fragments or subsequences thereof. In one aspect, the nucleic acid encodes a polypeptide having a enzyme, structural or binding activity. The nucleic acid can be at least about 10, 15, 20, 25, 30, 35, 40, 45, 50, 75, 100, 150, 200, 250, 300, 350, 400, 450, 500, 550, 600, 650, 700, 750, 800, 850, 900, 950, 1000, 1050, 1100, 1150, 1200 or more residues in length or the full length of the gene or transcript. In one aspect, the stringent conditions include a wash step comprising a wash in 0.2×SSC at a temperature of about 65° C. for about 15 minutes.

[0020] The invention provides a nucleic acid probe for identifying a nucleic acid encoding a polypeptide having a enzyme, structural or binding activity, wherein the probe comprises at least about 10, 15, 20, 25, 30, 35, 40, 45, 50, 55, 60, 65, 70, 75, 80, 85, 90, 95, 100, 150, 200, 250, 300, 350, 400, 450, 500, 550, 600, 650, 700, 750, 800, 850, 900, 950, 1000 or more, consecutive bases of a sequence comprising a sequence of the invention, or fragments or subsequences thereof, wherein the probe identifies the nucleic acid by binding or hybridization. The probes of this invention can comprise an oligonucleotide comprising between about 10 to 100 consecutive bases of a sequence in accordance with the invention, or fragments or subsequences thereof, for example, 10, 15, 20, 25, 30, 35, 40, 45, 50, 55, 60, 65, 70, 75, 80, 85, 90, 95 or 100 bases or more, or, any desired length in between. The probe can comprise an oligonucleotide comprising at least about 10 to 50, about 20 to 60, about 30 to 70, about 40 to 80, or about 60 to 100 consecutive bases of a sequence comprising a sequence of the invention, or fragments or subsequences thereof.

[0021] The invention provides a nucleic acid probe for identifying a nucleic acid encoding a polypeptide having a enzyme, structural or binding activity, wherein the probe comprises a nucleic acid comprising a sequence at least about 10, 15, 20, 30, 40, 50, 60, 70, 80, 90, 100, 150, 200, 250, 300, 350, 400, 450, 500, 550, 600, 650, 700, 750, 800, 850, 900, 950, 1000 or more residues having at least about 50%, 51%, 52%, 53%, 54%, 55%, 56%, 57%, 58%, 59%, 60%, 61%, 62%, 63%, 64%, 65%, 66%, 67%, 68%, 69%, 70%, 71%, 72%, 73%, 74%, 75%, 76%, 77%, 78%, 79%, 80%, 81%, 82%, 83%, 84%, 85%, 86%, 87%, 88%, 89%, 90%, 91%, 92%, 93%, 94%, 95%, 96%, 97%, 98%, 99%, or more, or complete (100%) sequence identity to a nucleic acid of the invention. In one aspect, the sequence identities are determined by analysis with a sequence comparison algorithm or by visual inspection. In other embodiments, the probes can comprise an oligonucleotide comprising between at least about 10 to 100 consecutive bases of a nucleic acid sequence in accordance with the invention, or a subsequence thereof, for example about 10, 15, 20, 25, 30, 35, 40, 45, 50, 55, 60, 65, 70, 75, 80, 85, 90, 95, or 100 bases or more, or, any desired length in between.

[0022] The invention provides an amplification primer pair for amplifying a nucleic acid encoding a polypeptide having a enzyme, structural or binding activity, wherein the primer pair is capable of amplifying a nucleic acid comprising a sequence of the invention, or fragments or subsequences thereof. One or each member of the amplification primer sequence pair can comprise an oligonucleotide comprising at least about 10 to 50, or more, consecutive bases of the sequence, or about 12, 13, 14, 15, 16, 17, 18, 19, 20, 21, 22, 23, 24, 25, 26, 27, 28, 29, 30 or more consecutive bases of the sequence.

[0023] The invention provides amplification primer pairs, wherein the primer pair comprises a first member having a sequence as set forth by about the first (the 5′) 12, 13, 14, 15, 16, 17, 18, 19, 20, 21, 22, 23, 24, 25, 26, 27, 28, 29, 30, 31, 32, 33, 34, 35, 36 or more residues of a nucleic acid of the invention, and a second member having a sequence as set forth by about the first (the 5′) 12, 13, 14, 15, 16, 17, 18, 19, 20, 21, 22, 23, 24, 25, 26, 27, 28, 29, 30, 31, 32, 33, 34, 35, 36 or more residues of the complementary strand of the first member.

[0024] The invention provides polypeptide-, enzyme-, protein-, e.g. structural or binding protein-encoding nucleic acids generated by amplification, e.g., polymerase chain reaction (PCR), using an amplification primer pair of the invention. The invention provides polypeptide-, enzyme-, protein-, e.g. structural or binding protein-encoding nucleic acids generated by amplification, e.g., polymerase chain reaction (PCR), using an amplification primer pair of the invention. The invention provides methods of making a polypeptide, enzyme, protein, e.g. structural or binding protein, by amplification, e.g., polymerase chain reaction (PCR), using an amplification primer pair of the invention. In one aspect, the amplification primer pair amplifies a nucleic acid from a library, e.g., a gene library, such as an environmental library.

[0025] The invention provides methods of amplifying a nucleic acid encoding a polypeptide having an enzyme, structural or binding activity, comprising amplification of a template nucleic acid with an amplification primer sequence pair capable of amplifying a nucleic acid sequence of the invention, or fragments or subsequences thereof.

[0026] The invention provides expression cassettes comprising a nucleic acid of the invention or a subsequence thereof. In one aspect, the expression cassette can comprise the nucleic acid that is operably linked to a promoter. The promoter can be a viral, bacterial, mammalian or plant promoter. In one aspect, the plant promoter can be a potato, rice, corn, wheat, tobacco or barley promoter. The promoter can be a constitutive promoter. The constitutive promoter can comprise CaMV35S. In another aspect, the promoter can be an inducible promoter. In one aspect, the promoter can be a tissue-specific promoter or an environmentally regulated or a developmentally regulated promoter. Thus, the promoter can be, e.g., a seed-specific, a leaf-specific, a root-specific, a stem-specific or an abscission-induced promoter. In one aspect, the expression cassette can further comprise a plant or plant virus expression vector.

[0027] The invention provides cloning vehicles comprising an expression cassette (e.g., a vector) of the invention or a nucleic acid of the invention. The cloning vehicle can be a viral vector, a plasmid, a phage, a phagemid, a cosmid, a fosmid, a bacteriophage or an artificial chromosome. The viral vector can comprise an adenovirus vector, a retroviral vector or an adeno-associated viral vector. The cloning vehicle can comprise a bacterial artificial chromosome (BAC), a plasmid, a bacteriophage P1-derived vector (PAC), a yeast artificial chromosome (YAC), or a mammalian artificial chromosome (MAC).

[0028] The invention provides transformed cell comprising a nucleic acid of the invention or an expression cassette (e.g., a vector) of the invention, or a cloning vehicle of the invention. In one aspect, the transformed cell can be a bacterial cell, a mammalian cell, a fungal cell, a yeast cell, an insect cell or a plant cell. In one aspect, the plant cell can be a cereal, a potato, wheat, rice, corn, tobacco or barley cell.

[0029] The invention provides transgenic non-human animals comprising a nucleic acid of the invention or an expression cassette (e.g., a vector) of the invention. In one aspect, the animal is a mouse, a rat, a pig, a goat or a sheep.

[0030] The invention provides transgenic plants comprising a nucleic acid of the invention or an expression cassette (e.g., a vector) of the invention. The transgenic plant can be a cereal plant, a corn plant, a potato plant, a tomato plant, a wheat plant, an oilseed plant, a rapeseed plant, a soybean plant, a rice plant, a barley plant or a tobacco plant.

[0031] The invention provides transgenic seeds comprising a nucleic acid of the invention or an expression cassette (e.g., a vector) of the invention. The transgenic seed can be a cereal plant, a corn seed, a wheat kernel, an oilseed, a rapeseed, a soybean seed, a palm kernel, a sunflower seed, a sesame seed, a peanut or a tobacco plant seed.

[0032] The invention provides an antisense oligonucleotide comprising a nucleic acid sequence complementary to or capable of hybridizing under stringent conditions to a nucleic acid of the invention. The invention provides methods of inhibiting the translation of a polypeptide, enzyme, protein, e.g. structural or binding protein message in a cell comprising administering to the cell or expressing in the cell an antisense oligonucleotide comprising a nucleic acid sequence complementary to or capable of hybridizing under stringent conditions to a nucleic acid of the invention. In one aspect, the antisense oligonucleotide is between about 10 to 50, about 20 to 60, about 30 to 70, about 40 to 80, or about 60 to 100 bases in length, e.g., 10, 15, 20, 25, 30, 35, 40, 45, 50, 55, 60, 65, 70, 75, 80, 85, 90, 95, 100 or more bases in length.

[0033] The invention provides methods of inhibiting the translation of a polypeptide, enzyme, protein, e.g. structural or binding protein message in a cell comprising administering to the cell or expressing in the cell an antisense oligonucleotide comprising a nucleic acid sequence complementary to or capable of hybridizing under stringent conditions to a nucleic acid of the invention. The invention provides double-stranded inhibitory RNA (RNAi, or RNA interference) molecules (including small interfering RNA, or siRNAs, for inhibiting transcription, and microRNAs, or miRNAs, for inhibiting translation) comprising a subsequence of a sequence of the invention. In one aspect, the RNAi is about 15, 16, 17, 18, 19, 20, 21, 22, 23, 24, 25, 26, 27, 28, 29, 30, 31, 32, 33, 34, 35, 40, 45, 50, 55, 60, 65, 70, 75, 80, 85, 90, 95, 100 or more duplex nucleotides in length. The invention provides methods of inhibiting the expression of a polypeptide, enzyme, protein, peptide, e.g. structural or binding protein in a cell comprising administering to the cell or expressing in the cell a double-stranded inhibitory RNA (iRNA, including small interfering RNA, or siRNAs, for inhibiting transcription, and microRNAs, or miRNAs, for inhibiting translation), wherein the RNA comprises a subsequence of a sequence of the invention.

[0034] The invention provides isolated, synthetic or recombinant polypeptides encoded by a nucleic acid of the invention, and enzymatically active fragments thereof. In alternative aspects, the polypeptide can have an amino acid sequence as set forth in SEQ ID NO:2, SEQ ID NO:4, SEQ ID NO:6, SEQ ID NO:8, SEQ ID NO:10, etc., and all polypeptides (amino acid sequences) disclosed in the SEQ ID listing, which include all even numbered SEQ ID NO:s from SEQ ID NO:2 through SEQ ID NO:108,699 (the exemplary sequences of the invention), or subsequences thereof, including fragments having enzymatic and/or substrate binding activity. The polypeptide can have an enzyme, structural or binding activity.

[0035] In alternative aspects, the enzyme, structural or binding activity comprises a recombinase activity, a helicase activity, a DNA replication activity, a DNA recombination activity, an isomerase, a trans-isomerase activity or topoisomerase activity, a methyl transferase activity, an aminotransferase activity, a uracil-5-methyl transferase activity, a cysteinyl tRNA synthetase activity, a hydrolase, an esterase activity, a phosphoesterase activity, an acetylmuramyl pentapeptide phosphotransferase activity, a glycosyltransferase activity, an acetyltransferase activity, an acetylglucosamine phosphate transferase activity, a centromere binding activity, a telomerase activity or a transcriptional regulatory activity, a heat shock protein activity, a protease activity, a proteinase activity, a peptidase activity, a carboxypeptidase activity, an endonuclease activity, an exonuclease activity, a RecB family exonuclease activity, a polymerase activity, a carbamoyl phosphate synthetase activity, a methyl-thioadenine synthetase activity, an oxidoreductase activity, an Fe—S oxidoreductase activity, a flavodoxin reductase activity, a permease activity, a thymidylate activity, a dehydrogenase activity, a pyrophosphorylase activity, a coenzyme metabolism activity, a dinucleotide-utilizing enzyme activity, a molybdopterin or thiamine biosynthesis activity, a beta-lactamase activity, a ligand binding activity, an ion transport activity, an ion metabolism activity, a tellurite resistance protein activity, an inorganic ion transport activity, a nucleotide transport activity, a nucleotide metabolism activity, an actin or myosin activity, a lipase activity or a lipid acyl hydrolase (LAH) activity, a cell envelop biogenesis activity, an outer membrane synthesis activity, a ribosomal structure synthesis activity, a translational processing activity, a transcriptional initiation activity, a TATA-binding activity, a signal transduction activity, an energy metabolism activity, an ATPase activity, an information storage and/or processing activity, and/or any of the polypeptide activities as set forth in Table 1, Table 3 and/or Table 4, and in another aspect, with or without signal sequences as described in Table 2.

[0036] Exemplary polypeptide or peptide (amino acid) sequences of the invention include SEQ ID NO:2, SEQ ID NO:4, SEQ ID NO:6, SEQ ID NO:8, SEQ ID NO:10, etc., and all polypeptides disclosed in the SEQ ID listing, which include all even numbered SEQ ID NO:s from SEQ ID NO:2 through SEQ ID NO:108,699, and subsequences thereof and variants thereof. Exemplary polypeptides also include fragments of at least about 10, 15, 20, 25, 30, 35, 40, 45, 50, 75, 80, 85, 90, 95, 100, 150, 200, 250, 300, 350, 400, 450, 500, 550, 600 or more residues in length, or over the full length of an enzyme. Exemplary polypeptide or peptide sequences of the invention include sequence encoded by a nucleic acid of the invention. Exemplary polypeptide or peptide sequences of the invention include polypeptides or peptides specifically bound by an antibody of the invention.

[0037] In alternative embodiments, a polypeptide of the invention can have at least one conservative amino acid substitution and retain its enzyme activity, binding activity and/or structural activity; wherein the at least one conservative amino acid substitution comprises substituting an amino acid with another amino acid of like characteristics; or, a conservative substitution comprises: replacement of an aliphatic amino acid with another aliphatic amino acid; replacement of a Serine with a Threonine or vice versa; replacement of an acidic residue with another acidic residue; replacement of a residue bearing an amide group with another residue bearing an amide group; exchange of a basic residue with another basic residue; or replacement of an aromatic residue with another aromatic residue.

[0038] In alternative embodiments, a polypeptide of the invention can have an enzyme activity, binding activity and/or structural activity but lacking a signal sequence, a prepro domain, a dockerin domain, and/or a carbohydrate binding module (CBM), wherein optionally the carbohydrate binding module (CBM) comprises, or consists of, a xylan binding module, a cellulose binding module, a lignin binding module, a xylose binding module, a mannanse binding module, a xyloglucan-specific module and/or a arabinofuranosidase binding module.

[0039] In alternative embodiments, a polypeptide can further comprise a heterologous sequence, wherein the heterologous sequence can comprise, or consist of, a sequence encoding: (i) a heterologous signal sequence, a heterologous carbohydrate binding module, a heterologous dockerin domain, a heterologous catalytic domain (CD), or a combination thereof; (ii) the sequence of (ii), wherein the heterologous signal sequence, carbohydrate binding module or catalytic domain (CD) is derived from a heterologous enzyme; or, (iii) a tag, an epitope, a targeting peptide, a cleavable sequence, a detectable moiety or an enzyme; or the heterologous carbohydrate binding module (CBM) can comprise, or consist of, a xylan binding module, a cellulose binding module, a lignin binding module, a xylose binding module, a mannanse binding module, a xyloglucan-specific module and/or a arabinofuranosidase binding module; or alternatively the heterologous signal sequence can target the encoded protein to a vacuole, the endoplasmic reticulum, a chloroplast or a starch granule.

[0040] In one aspect, the polypeptide, enzyme, protein, e.g. structural or binding protein, is thermostable. The polypeptide, enzyme, protein, e.g. structural or binding protein can retain activity under conditions comprising a temperature range of between about 1° C. to about 5° C., between about 5° C. to about 15° C., between about 15° C. to about 25° C., between about 25° C. to about 37° C., between about 37° C. to about 95° C., between about 55° C. to about 85° C., between about 70° C. to about 75° C., or between about 90° C. to about 95° C., or more. In another aspect, the polypeptide, enzyme, protein, e.g. structural or binding protein can be thermotolerant. The polypeptide, enzyme, protein, e.g. structural or binding protein can retain activity after exposure to a temperature in the range from greater than 37° C. to about 95° C., or in the range from greater than 55° C. to about 85° C. In one aspect, the polypeptide, enzyme, protein, e.g. structural or binding protein can retain activity after exposure to a temperature in the range from greater than 90° C. to about 95° C. at pH 4.5.

[0041] Another aspect of the invention provides an isolated, synthetic or recombinant polypeptide or peptide including at least 10, 15, 20, 25, 30, 35, 40, 45, 50, 55, 60, 65, 70, 75, 80, 85, 90, 95 or 100 or more consecutive bases of a polypeptide or peptide sequence of the invention, sequences substantially identical thereto, and the sequences complementary thereto. The peptide can be, e.g., an immunogenic fragment, a motif (e.g., a binding site), a signal sequence, a prepro sequence or an active site.

[0042] The invention provides isolated, synthetic or recombinant nucleic acids comprising a sequence encoding a polypeptide, enzyme, protein, e.g. structural or binding protein having any of the activities as set forth in Tables 1, 2 or 3, and a signal sequence, wherein the nucleic acid comprises a sequence of the invention. In one aspect, the isolated, synthetic or recombinant polypeptide can comprise the polypeptide of the invention comprising a heterologous signal sequence or a heterologous preprosequence, such as a heterologous enzyme or non-enzyme signal sequence. The invention provides isolated, synthetic or recombinant nucleic acids comprising a sequence encoding a polypeptide, enzyme, protein, e.g. structural or binding protein having any of the activities as set forth in Tables 1, 2 or 3, wherein the sequence does not contain a signal sequence and the nucleic acid comprises a sequence of the invention. In one aspect, the invention provides an isolated, synthetic or recombinant polypeptide comprising a polypeptide of the invention lacking all or part of a signal sequence.

[0043] In one aspect, the invention provides chimeric proteins comprising a first domain comprising a signal sequence of the invention and at least a second domain. The protein can be a fusion protein. The second domain can comprise an enzyme. The enzyme can be a non-enzyme.

[0044] The invention provides chimeric polypeptides comprising at least a first domain comprising signal peptide (SP), a prepro sequence and/or a catalytic domain (CD) of the invention and at least a second domain comprising a heterologous polypeptide or peptide, wherein the heterologous polypeptide or peptide is not naturally associated with the signal peptide (SP), prepro sequence and/or catalytic domain (CD). In one aspect, the heterologous polypeptide or peptide is not an enzyme. The heterologous polypeptide or peptide can be amino terminal to, carboxy terminal to or on both ends of the signal peptide (SP), prepro sequence and/or catalytic domain (CD).

[0045] The invention provides isolated, synthetic or recombinant nucleic acids encoding a chimeric polypeptide, wherein the chimeric polypeptide comprises at least a first domain comprising signal peptide (SP), a prepro domain and/or a catalytic domain (CD) of the invention and at least a second domain comprising a heterologous polypeptide or peptide, wherein the heterologous polypeptide or peptide is not naturally associated with the signal peptide (SP), prepro domain and/or catalytic domain (CD).

[0046] The invention provides isolated, synthetic or recombinant signal sequences (e.g., signal peptides) consisting of or comprising a sequence as set forth in residues 1 to 14, 1 to 15, 1 to 16, 1 to 17, 1 to 18, 1 to 19, 1 to 20, 1 to 21, 1 to 22, 1 to 23, 1 to 24, 1 to 25, 1 to 26, 1 to 27, 1 to 28, 1 to 28, 1 to 30, 1 to 31, 1 to 32, 1 to 33, 1 to 34, 1 to 35, 1 to 36, 1 to 37, 1 to 38, 1 to 40, 1 to 41, 1 to 42, 1 to 43, 1 to 44, 1 to 45, 1 to 46 or 1 to 47, of a polypeptide of the invention, including the exemplary polypeptides of the invention (including SEQ ID NO:2, SEQ ID NO:4, SEQ ID NO:6, SEQ ID NO:8, SEQ ID NO:10, etc., and all polypeptides disclosed in the SEQ ID listing, which include all even numbered SEQ ID NO:s from SEQ ID NO:2 through SEQ ID NO:108,699). In one aspect, the invention provides signal sequences comprising the first 14, 15, 16, 17, 18, 19, 20, 21, 22, 23, 24, 25, 26, 27, 28, 29, 30, 31, 32, 33, 34, 35, 36, 37, 38, 39, 40, 41, 42, 43, 44, 45, 46, 47, 48, 49, 50, 51, 52, 53, 54, 55, 56, 57, 58, 59, 60, 61, 62, 63, 64, 65, 66, 67, 68, 69, 70 or more amino terminal residues of a polypeptide of the invention.

[0047] In one aspect, the enzyme, structural or binding activity comprises a specific activity at about 37° C. in the range from about 1 to about 1200 units per milligram of protein, or, about 100 to about 1000 units per milligram of protein. In another aspect, the polypeptide, enzyme, protein, e.g. structural or binding protein activity comprises a specific activity from about 100 to about 1000 units per milligram of protein, or, from about 500 to about 750 units per milligram of protein. Alternatively, the enzyme, structural or binding activity comprises a specific activity at 37° C. in the range from about 1 to about 750 units per milligram of protein, or, from about 500 to about 1200 units per milligram of protein. In one aspect, the enzyme, structural or binding activity comprises a specific activity at 37° C. in the range from about 1 to about 500 units per milligram of protein, or, from about 750 to about 1000 units per milligram of protein. In another aspect, the enzyme, structural or binding activity comprises a specific activity at 37° C. in the range from about 1 to about 250 units per milligram of protein. Alternatively, the enzyme, structural or binding activity comprises a specific activity at 37° C. in the range from about 1 to about 100 units per milligram of protein.

[0048] In another aspect, thermotolerance comprises retention of at least half of the specific activity of the enzyme, structural or binding protein after being heated to an elevated temperature such as a temperature from about 0° C. to about 20° C., about 20° C. to about 37° C., about 37° C. to about 50° C., about 50° C. to about 70° C., about 70° C. to about 75° C., about 75° C. to about 80° C., about 80° C. to about 85° C., about 85° C. to about 90° C., about 90° C. to about 95° C., about 95° C. to about 100° C., about 100° C. to about 110° C., or higher. Alternatively, thermotolerance can comprise retention of specific activity in the range from about 1 to about 1200 units per milligram of protein, or, from about 500 to about 1000 units per milligram of protein, after being heated to an elevated temperature. In another aspect, thermotolerance can comprise retention of specific activity in the range from about 1 to about 500 units per milligram of protein after being heated to an elevated temperature, as described above.

[0049] The invention provides the isolated, synthetic or recombinant polypeptide of the invention, wherein the polypeptide comprises at least one glycosylation site. In one aspect, glycosylation can be an N-linked glycosylation. In one aspect, the polypeptide can be glycosylated after being expressed in a P. pastoris or a S. pombe.

[0050] In one aspect, the polypeptide, enzyme, protein, e.g. structural or binding protein can retain activity under conditions comprising about pH 6.5, pH 6, pH 5.5, pH 5, pH 4.5, pH 4.0, pH 3.5, pH 3.0 or less (more acidic) pH. In another aspect, the polypeptide, enzyme, protein, e.g. structural or binding protein can retain activity under conditions comprising about pH 7, pH 7.5 pH 8.0, pH 8.5, pH 9, pH 9.5, pH 10, pH 10.5, pH 11.0, pH 11.5, pH 12, pH 12.5 or more (more basic) pH. In one aspect, the polypeptide can retain an enzyme, structural or binding activity after exposure to conditions comprising about pH 6.5, pH 6, pH 5.5, pH 5, pH 4.5, pH 4.0, pH 3.5, pH 3.0 or less (more acidic) pH. In another aspect, the polypeptide can retain enzyme, structural or binding activity after exposure to conditions comprising about pH 7, pH 7.5 pH 8.0, pH 8.5, pH 9, pH 9.5, pH 10, pH 10.5, pH 11.0, pH 11.5, pH 12, pH 12.5 or more (more basic) pH.

[0051] In one aspect, the polypeptide, enzyme, protein, e.g. structural or binding protein of the invention has activity at under alkaline conditions, e.g., the alkaline conditions of the gut, e.g., the small intestine. In one aspect, the polypeptide, enzyme, protein, e.g. structural or binding protein can retain activity after exposure to the acidic pH of the stomach.

[0052] The invention provides protein preparations comprising a polypeptide of the invention, wherein the protein preparation comprises a liquid, a solid or a gel.

[0053] The invention provides heterodimers comprising a polypeptide of the invention and a second protein or domain. The second member of the heterodimer can be a different enzyme, a different enzyme or another protein. In one aspect, the second domain can be a polypeptide and the heterodimer can be a fusion protein. In one aspect, the second domain can be an epitope or a tag. In one aspect, the invention provides homodimers comprising a polypeptide of the invention.

[0054] The invention provides immobilized polypeptides having enzyme, structural or binding activity, wherein the polypeptide comprises a polypeptide of the invention, a polypeptide encoded by a nucleic acid of the invention, or a polypeptide comprising a polypeptide of the invention and a second domain. In one aspect, the polypeptide can be immobilized on a cell, a metal, a resin, a polymer, a ceramic, a glass, a microelectrode, a graphitic particle, a bead, a gel, a plate, an array or a capillary tube.

[0055] The invention provides arrays comprising an immobilized nucleic acid of the invention. The invention provides arrays comprising an antibody of the invention.

[0056] The invention provides isolated, synthetic or recombinant antibodies that specifically bind to a polypeptide of the invention or to a polypeptide encoded by a nucleic acid of the invention. These antibodies of the invention can be a monoclonal or a polyclonal antibody. The invention provides hybridomas comprising an antibody of the invention, e.g., an antibody that specifically binds to a polypeptide of the invention or to a polypeptide encoded by a nucleic acid of the invention. The invention provides nucleic acids encoding these antibodies.

[0057] The invention provides method of isolating or identifying a polypeptide having enzyme, structural or binding activity comprising the steps of: (a) providing an antibody of the invention; (b) providing a sample comprising polypeptides; and (c) contacting the sample of step (b) with the antibody of step (a) under conditions wherein the antibody can specifically bind to the polypeptide, thereby isolating or identifying a polypeptide having an enzyme, structural or binding activity.

[0058] The invention provides methods of making an anti-polypeptide, anti-enzyme, or anti-protein, e.g. anti-structural or anti-binding protein, antibody comprising administering to a non-human animal a nucleic acid of the invention or a polypeptide of the invention or subsequences thereof in an amount sufficient to generate a humoral immune response, thereby making an anti-polypeptide, anti-enzyme, or anti-protein, e.g. anti-structural or anti-binding protein, antibody. The invention provides methods of making an anti-polypeptide, anti-enzyme, or anti-protein, e.g. anti-structural or anti-binding protein, immune comprising administering to a non-human animal a nucleic acid of the invention or a polypeptide of the invention or subsequences thereof in an amount sufficient to generate an immune response.

[0059] The invention provides methods of producing a recombinant polypeptide comprising the steps of: (a) providing a nucleic acid of the invention operably linked to a promoter; and (b) expressing the nucleic acid of step (a) under conditions that allow expression of the polypeptide, thereby producing a recombinant polypeptide. In one aspect, the method can further comprise transforming a host cell with the nucleic acid of step (a) followed by expressing the nucleic acid of step (a), thereby producing a recombinant polypeptide in a transformed cell.

[0060] The invention provides methods for identifying a polypeptide having enzyme, structural or binding activity comprising the following steps: (a) providing a polypeptide of the invention; or a polypeptide encoded by a nucleic acid of the invention; (b) providing an enzyme, structural or binding activity substrate; and (c) contacting the polypeptide or a fragment or variant thereof of step (a) with the substrate of step (b) and detecting a decrease in the amount of substrate or an increase in the amount of a reaction product, wherein a decrease in the amount of the substrate or an increase in the amount of the reaction product detects a polypeptide having a enzyme, structural or binding activity.

[0061] The invention provides methods for identifying a polypeptide, enzyme, protein, e.g. structural or binding protein, substrate comprising the following steps: (a) providing a polypeptide of the invention; or a polypeptide encoded by a nucleic acid of the invention; (b) providing a test substrate; and (c) contacting the polypeptide of step (a) with the test substrate of step (b) and detecting a decrease in the amount of substrate or an increase in the amount of reaction product, wherein a decrease in the amount of the substrate or an increase in the amount of a reaction product identifies the test substrate as a polypeptide, enzyme, protein, e.g. structural or binding protein, substrate.

[0062] The invention provides methods of determining whether a test compound specifically binds to a polypeptide comprising the following steps: (a) expressing a nucleic acid or a vector comprising the nucleic acid under conditions permissive for translation of the nucleic acid to a polypeptide, wherein the nucleic acid comprises a nucleic acid of the invention, or, providing a polypeptide of the invention; (b) providing a test compound; (c) contacting the polypeptide with the test compound; and (d) determining whether the test compound of step (b) specifically binds to the polypeptide.

[0063] The invention provides methods for identifying a modulator of a enzyme, structural or binding activity comprising the following steps: (a) providing a polypeptide of the invention or a polypeptide encoded by a nucleic acid of the invention; (b) providing a test compound; (c) contacting the polypeptide of step (a) with the test compound of step (b) and measuring an activity of the polypeptide, enzyme, protein, e.g. structural or binding protein, wherein a change in the enzyme, structural or binding activity measured in the presence of the test compound compared to the activity in the absence of the test compound provides a determination that the test compound modulates the enzyme, structural or binding activity. In one aspect, the enzyme, structural or binding activity can be measured by providing a polypeptide, enzyme, protein, e.g. structural or binding protein, substrate and detecting a decrease in the amount of the substrate or an increase in the amount of a reaction product, or, an increase in the amount of the substrate or a decrease in the amount of a reaction product. A decrease in the amount of the substrate or an increase in the amount of the reaction product with the test compound as compared to the amount of substrate or reaction product without the test compound identifies the test compound as an activator of enzyme, structural or binding activity. An increase in the amount of the substrate or a decrease in the amount of the reaction product with the test compound as compared to the amount of substrate or reaction product without the test compound identifies the test compound as an inhibitor of enzyme, structural or binding activity.

[0064] The invention provides computer systems comprising a processor and a data storage device wherein said data storage device has stored thereon a polypeptide sequence or a nucleic acid sequence of the invention (e.g., a polypeptide encoded by a nucleic acid of the invention). In one aspect, the computer system can further comprise a sequence comparison algorithm and a data storage device having at least one reference sequence stored thereon. In another aspect, the sequence comparison algorithm comprises a computer program that indicates polymorphisms. In one aspect, the computer system can further comprise an identifier that identifies one or more features in said sequence. The invention provides computer readable media having stored thereon a polypeptide sequence or a nucleic acid sequence of the invention. The invention provides methods for identifying a feature in a sequence comprising the steps of: (a) reading the sequence using a computer program which identifies one or more features in a sequence, wherein the sequence comprises a polypeptide sequence or a nucleic acid sequence of the invention; and (b) identifying one or more features in the sequence with the computer program. The invention provides methods for comparing a first sequence to a second sequence comprising the steps of: (a) reading the first sequence and the second sequence through use of a computer program which compares sequences, wherein the first sequence comprises a polypeptide sequence or a nucleic acid sequence of the invention; and (b) determining differences between the first sequence and the second sequence with the computer program. The step of determining differences between the first sequence and the second sequence can further comprise the step of identifying polymorphisms. In one aspect, the method can further comprise an identifier that identifies one or more features in a sequence. In another aspect, the method can comprise reading the first sequence using a computer program and identifying one or more features in the sequence.

[0065] The invention provides methods for isolating or recovering a nucleic acid encoding a polypeptide, enzyme, protein, e.g. structural or binding protein, from a sample, such as an environmental sample, comprising the steps of: (a) providing an amplification primer sequence pair for amplifying a nucleic acid encoding a polypeptide, enzyme, protein, e.g. structural or binding protein, wherein the primer pair is capable of amplifying a nucleic acid of the invention; (b) isolating a nucleic acid from the sample or treating the sample such that nucleic acid in the sample is accessible for hybridization to the amplification primer pair; and, (c) combining the nucleic acid of step (b) with the amplification primer pair of step (a) and amplifying nucleic acid from the sample, thereby isolating or recovering a nucleic acid encoding a polypeptide, enzyme, protein, e.g. structural or binding protein from a sample. One or each member of the amplification primer sequence pair can comprise an oligonucleotide comprising an amplification primer sequence pair of the invention, e.g., having at least about 10 to 50 consecutive bases of a sequence of the invention.

[0066] The invention provides methods for isolating or recovering a nucleic acid encoding a polypeptide, enzyme, protein, e.g. structural or binding protein from a sample, such as an environmental sample, comprising the steps of: (a) providing a polynucleotide probe comprising a nucleic acid of the invention or a subsequence thereof; (b) isolating a nucleic acid from the sample (e.g., an environmental sample) or treating the sample such that nucleic acid in the sample is accessible for hybridization to a polynucleotide probe of step (a); (c) combining the isolated nucleic acid or the treated sample of step (b) with the polynucleotide probe of step (a); and (d) isolating a nucleic acid that specifically hybridizes with the polynucleotide probe of step (a), thereby isolating or recovering a nucleic acid encoding a polypeptide, enzyme, protein, e.g. structural or binding protein from a sample. The sample (e.g., an environmental sample) can comprise a water sample, a liquid sample, a soil sample, an air sample or a biological sample. In one aspect, the biological sample can be derived from a bacterial cell, a protozoan cell, an insect cell, a yeast cell, a plant cell, a fungal cell or a mammalian cell.

[0067] The invention provides methods of generating a variant of a nucleic acid encoding a polypeptide having an enzyme, structural or binding activity comprising the steps of: (a) providing a template nucleic acid comprising a nucleic acid of the invention; and (b) modifying, deleting or adding one or more nucleotides in the template sequence, or a combination thereof, to generate a variant of the template nucleic acid. In one aspect, the method can further comprise expressing the variant nucleic acid to generate a variant the polypeptide, enzyme, protein, e.g. structural or binding protein. The modifications, additions or deletions can be introduced by a method comprising error-prone PCR, shuffling, oligonucleotide-directed mutagenesis, assembly PCR, sexual PCR mutagenesis, in vivo mutagenesis, cassette mutagenesis, recursive ensemble mutagenesis, exponential ensemble mutagenesis, site-specific mutagenesis, gene reassembly, Gene Site Saturation Mutagenesis (GSSM), synthetic ligation reassembly (SLR) or a combination thereof. In another aspect, the modifications, additions or deletions are introduced by a method comprising recombination, recursive sequence recombination, phosphothioate-modified DNA mutagenesis, uracil-containing template mutagenesis, gapped duplex mutagenesis, point mismatch repair mutagenesis, repair-deficient host strain mutagenesis, chemical mutagenesis, radiogenic mutagenesis, deletion mutagenesis, restriction-selection mutagenesis, restriction-purification mutagenesis, artificial gene synthesis, ensemble mutagenesis, chimeric nucleic acid multimer creation and a combination thereof.

[0068] In one aspect, the method can be iteratively repeated until a polypeptide, enzyme, protein, e.g. structural or binding protein having an altered or different activity or an altered or different stability from that of a polypeptide encoded by the template nucleic acid is produced. In one aspect, the variant the polypeptide, enzyme, protein, e.g. structural or binding protein is thermotolerant, and retains some activity after being exposed to an elevated temperature. In another aspect, the variant the polypeptide, enzyme, protein, e.g. structural or binding protein has increased glycosylation as compared to the polypeptide, enzyme, protein, e.g. structural or binding protein encoded by a template nucleic acid. Alternatively, the variant the polypeptide, enzyme, protein, e.g. structural or binding protein has an enzyme, structural or binding activity under a high temperature, wherein the polypeptide, enzyme, protein, e.g. structural or binding protein encoded by the template nucleic acid is not active under the high temperature. In one aspect, the method can be iteratively repeated until a polypeptide, enzyme, protein, e.g. structural or binding protein coding sequence having an altered codon usage from that of the template nucleic acid is produced. In another aspect, the method can be iteratively repeated until a polypeptide, enzyme, protein, e.g. structural or binding protein gene having higher or lower level of message expression or stability from that of the template nucleic acid is produced.

[0069] The invention provides methods for modifying codons in a nucleic acid encoding a polypeptide having an enzyme, structural or binding activity to increase its expression in a host cell, the method comprising the following steps: (a) providing a nucleic acid of the invention encoding a polypeptide having an enzyme, structural or binding activity; and, (b) identifying a non-preferred or a less preferred codon in the nucleic acid of step (a) and replacing it with a preferred or neutrally used codon encoding the same amino acid as the replaced codon, wherein a preferred codon is a codon over-represented in coding sequences in genes in the host cell and a non-preferred or less preferred codon is a codon under-represented in coding sequences in genes in the host cell, thereby modifying the nucleic acid to increase its expression in a host cell.

[0070] The invention provides methods for modifying codons in a nucleic acid encoding a polypeptide having an enzyme, structural or binding activity; the method comprising the following steps: (a) providing a nucleic acid of the invention; and, (b) identifying a codon in the nucleic acid of step (a) and replacing it with a different codon encoding the same amino acid as the replaced codon, thereby modifying codons in a nucleic acid encoding a polypeptide, enzyme, protein, e.g. structural or binding protein.

[0071] The invention provides methods for modifying codons in a nucleic acid encoding a polypeptide having an enzyme, structural or binding activity to increase its expression in a host cell, the method comprising the following steps: (a) providing a nucleic acid of the invention encoding a polypeptide, enzyme, protein, e.g. structural or binding protein, polypeptide; and, (b) identifying a non-preferred or a less preferred codon in the nucleic acid of step (a) and replacing it with a preferred or neutrally used codon encoding the same amino acid as the replaced codon, wherein a preferred codon is a codon over-represented in coding sequences in genes in the host cell and a non-preferred or less preferred codon is a codon under-represented in coding sequences in genes in the host cell, thereby modifying the nucleic acid to increase its expression in a host cell.

[0072] The invention provides methods for modifying a codon in a nucleic acid encoding a polypeptide having an enzyme, structural or binding activity to decrease its expression in a host cell, the method comprising the following steps: (a) providing a nucleic acid of the invention; and (b) identifying at least one preferred codon in the nucleic acid of step (a) and replacing it with a non-preferred or less preferred codon encoding the same amino acid as the replaced codon, wherein a preferred codon is a codon over-represented in coding sequences in genes in a host cell and a non-preferred or less preferred codon is a codon under-represented in coding sequences in genes in the host cell, thereby modifying the nucleic acid to decrease its expression in a host cell. In one aspect, the host cell can be a bacterial cell, a fungal cell, an insect cell, a yeast cell, a plant cell or a mammalian cell.

[0073] The invention provides methods for producing a library of nucleic acids encoding a plurality of modified polypeptides, enzymes, proteins, e.g. structural or binding proteins, active sites or substrate binding sites, wherein the modified active sites or substrate binding sites are derived from a first nucleic acid comprising a sequence encoding a first active site or a first substrate binding site the method comprising the following steps: (a) providing a first nucleic acid encoding a first active site or first substrate binding site, wherein the first nucleic acid sequence comprises a sequence that hybridizes under stringent conditions to a nucleic acid of the invention, and the nucleic acid encodes a polypeptide, enzyme, protein, e.g. structural or binding protein, active site or a polypeptide, enzyme, protein, e.g. structural or binding protein, substrate binding site; (b) providing a set of mutagenic oligonucleotides that encode naturally-occurring amino acid variants at a plurality of targeted codons in the first nucleic acid; and, (c) using the set of mutagenic oligonucleotides to generate a set of active site-encoding or substrate binding site-encoding variant nucleic acids encoding a range of amino acid variations at each amino acid codon that was mutagenized, thereby producing a library of nucleic acids encoding a plurality of modified the polypeptide, enzyme, protein, e.g. structural or binding protein, active sites or substrate binding sites. In one aspect, the method comprises mutagenizing the first nucleic acid of step (a) by a method comprising an optimized directed evolution system, Gene Site Saturation Mutagenesis (GSSM), synthetic ligation reassembly (SLR), error-prone PCR, shuffling, oligonucleotide-directed mutagenesis, assembly PCR, sexual PCR mutagenesis, in vivo mutagenesis, cassette mutagenesis, recursive ensemble mutagenesis, exponential ensemble mutagenesis, site-specific mutagenesis, gene reassembly, and a combination thereof. In another aspect, the method comprises mutagenizing the first nucleic acid of step (a) or variants by a method comprising recombination, recursive sequence recombination, phosphothioate-modified DNA mutagenesis, uracil-containing template mutagenesis, gapped duplex mutagenesis, point mismatch repair mutagenesis, repair-deficient host strain mutagenesis, chemical mutagenesis, radiogenic mutagenesis, deletion mutagenesis, restriction-selection mutagenesis, restriction-purification mutagenesis, artificial gene synthesis, ensemble mutagenesis, chimeric nucleic acid multimer creation and a combination thereof.

[0074] The invention provides methods for making a small molecule comprising the steps of: (a) providing a plurality of biosynthetic enzymes capable of synthesizing or modifying a small molecule, wherein one of the enzymes comprises an enzyme encoded by a nucleic acid of the invention; (b) providing a substrate for at least one of the enzymes of step (a); and, (c) reacting the substrate of step (b) with the enzymes under conditions that facilitate a plurality of biocatalytic reactions to generate a small molecule by a series of biocatalytic reactions.

[0075] The invention provides methods for modifying a small molecule comprising the steps: (a) providing a enzyme encoded by a nucleic acid of the invention; (b) providing a small molecule; and, (c) reacting the enzyme of step (a) with the small molecule of step (b) under conditions that facilitate an enzymatic reaction catalyzed by the enzyme, thereby modifying a small molecule by an enzymatic reaction. In one aspect, the method comprises providing a plurality of small molecule substrates for the enzyme of step (a), thereby generating a library of modified small molecules produced by at least one enzymatic reaction catalyzed by the enzyme. In one aspect, the method further comprises a plurality of additional enzymes under conditions that facilitate a plurality of biocatalytic reactions by the enzymes to form a library of modified small molecules produced by the plurality of enzymatic reactions. In one aspect, the method further comprises the step of testing the library to determine if a particular modified small molecule that exhibits a desired activity is present within the library. The step of testing the library can further comprises the steps of systematically eliminating all but one of the biocatalytic reactions used to produce a portion of the plurality of the modified small molecules within the library by testing the portion of the modified small molecule for the presence or absence of the particular modified small molecule with a desired activity, and identifying at least one specific biocatalytic reaction that produces the particular modified small molecule of desired activity.

[0076] The invention provides methods for determining a functional fragment of a polypeptide, enzyme, protein, e.g. structural or binding protein, comprising the steps of: (a) providing a polypeptide, enzyme, protein, e.g. structural or binding protein, wherein the enzyme comprises a polypeptide of the invention, or a polypeptide encoded by a nucleic acid of the invention, or a subsequence thereof; and (b) deleting a plurality of amino acid residues from the sequence of step (a) and testing the remaining subsequence for an enzyme, structural or binding activity, thereby determining a functional fragment of a polypeptide, enzyme, protein, e.g. structural or binding protein. In one aspect, the polypeptide, enzyme, protein, e.g. structural or binding protein activity is measured by providing a polypeptide, enzyme, protein, e.g. structural or binding protein, substrate and detecting a decrease in the amount of the substrate or an increase in the amount of a reaction product.

[0077] The invention provides methods for whole cell engineering of new or modified phenotypes by using real-time metabolic flux analysis, the method comprising the following steps: (a) making a modified cell by modifying the genetic composition of a cell, wherein the genetic composition is modified by addition to the cell of a nucleic acid of the invention; (b) culturing the modified cell to generate a plurality of modified cells; (c) measuring at least one metabolic parameter of the cell by monitoring the cell culture of step (b) in real time; and, (d) analyzing the data of step (c) to determine if the measured parameter differs from a comparable measurement in an unmodified cell under similar conditions, thereby identifying an engineered phenotype in the cell using real-time metabolic flux analysis. In one aspect, the genetic composition of the cell can be modified by a method comprising deletion of a sequence or modification of a sequence in the cell, or, knocking out the expression of a gene. In one aspect, the method can further comprise selecting a cell comprising a newly engineered phenotype. In another aspect, the method can comprise culturing the selected cell, thereby generating a new cell strain comprising a newly engineered phenotype.

[0078] The invention provides methods of increasing thermotolerance or thermostability of a polypeptide, enzyme, protein, e.g. structural or binding protein, polypeptide, the method comprising glycosylating a polypeptide, enzyme, protein, e.g. structural or binding protein, wherein the polypeptide, enzyme, protein, e.g. structural or binding protein comprises at least thirty contiguous amino acids of a polypeptide of the invention; or a polypeptide encoded by a nucleic acid sequence of the invention, thereby increasing thermotolerance or thermostability of the polypeptide, enzyme, protein, e.g. structural or binding protein. In one aspect, the polypeptide, enzyme, protein, e.g. structural or binding protein specific activity can be thermostable or thermotolerant at a temperature in the range from greater than about 37° C. to about 95° C.

[0079] The invention provides methods for overexpressing a recombinant polypeptide, enzyme, protein, e.g. structural or binding protein, in a cell comprising expressing a vector comprising a nucleic acid comprising a nucleic acid of the invention or a nucleic acid sequence of the invention, wherein the sequence identities are determined by analysis with a sequence comparison algorithm or by visual inspection, wherein overexpression is effected by use of a high activity promoter, a dicistronic vector or by gene amplification of the vector.

[0080] The invention provides methods of making a transgenic plant comprising the following steps: (a) introducing a heterologous nucleic acid sequence into the cell, wherein the heterologous nucleic sequence comprises a nucleic acid sequence of the invention, thereby producing a transformed plant cell; and (b) producing a transgenic plant from the transformed cell. In one aspect, the step (a) can further comprise introducing the heterologous nucleic acid sequence by electroporation or microinjection of plant cell protoplasts. In another aspect, the step (a) can further comprise introducing the heterologous nucleic acid sequence directly to plant tissue by DNA particle bombardment. Alternatively, the step (a) can further comprise introducing the heterologous nucleic acid sequence into the plant cell DNA using an Agrobacterium tumefaciens host. In one aspect, the plant cell can be a potato, corn, rice, wheat, tobacco, or barley cell.

[0081] The invention provides methods of expressing a heterologous nucleic acid sequence in a plant cell comprising the following steps: (a) transforming the plant cell with a heterologous nucleic acid sequence operably linked to a promoter, wherein the heterologous nucleic sequence comprises a nucleic acid of the invention; (b) growing the plant under conditions wherein the heterologous nucleic acids sequence is expressed in the plant cell. The invention provides methods of expressing a heterologous nucleic acid sequence in a plant cell comprising the following steps: (a) transforming the plant cell with a heterologous nucleic acid sequence operably linked to a promoter, wherein the heterologous nucleic sequence comprises a sequence of the invention; (b) growing the plant under conditions wherein the heterologous nucleic acids sequence is expressed in the plant cell.

[0082] The invention provides feeds or foods comprising a polypeptide of the invention, or a polypeptide encoded by a nucleic acid of the invention. In one aspect, the invention provides a food, feed, a liquid, e.g., a beverage (such as a fruit juice or a beer), a bread or a dough or a bread product, or a beverage precursor (e.g., a wort), comprising a polypeptide of the invention. The invention provides food or nutritional supplements for an animal comprising a polypeptide of the invention, e.g., a polypeptide encoded by the nucleic acid of the invention.

[0083] In one aspect, the polypeptide in the food or nutritional supplement can be glycosylated. The invention provides edible enzyme delivery matrices comprising a polypeptide of the invention, e.g., a polypeptide encoded by the nucleic acid of the invention. In one aspect, the delivery matrix comprises a pellet. In one aspect, the polypeptide can be glycosylated. In one aspect, the polypeptide, enzyme, protein, e.g. structural or binding protein activity is thermotolerant. In another aspect, the polypeptide, enzyme, protein, e.g. structural or binding protein activity is thermostable.

[0084] The invention provides a food, a feed or a nutritional supplement comprising a polypeptide of the invention. The invention provides methods for utilizing a polypeptide, enzyme, protein, e.g. structural or binding protein, as a nutritional supplement in an animal diet, the method comprising: preparing a nutritional supplement containing a polypeptide, enzyme, protein, e.g. structural or binding protein, comprising at least thirty contiguous amino acids of a polypeptide of the invention; and administering the nutritional supplement to an animal. The animal can be a human, a ruminant or a monogastric animal. The polypeptide, enzyme, protein, e.g. structural or binding protein can be prepared by expression of a polynucleotide encoding the polypeptide, enzyme, protein, e.g. structural or binding protein in an organism selected from the group consisting of a bacterium, a yeast, a plant, an insect, a fungus and an animal. The organism can be selected from the group consisting of an S. pombe, S. cerevisiae, Pichia pastoris, E. coli, Streptomyces sp., Bacillus sp. and Lactobacillus sp.

[0085] The invention provides edible enzyme delivery matrix comprising thermostable recombinant polypeptide, enzyme, protein, e.g. structural or binding protein of the invention. The invention provides methods for delivering a polypeptide, enzyme, protein, e.g. structural or binding protein, supplement to an animal, the method comprising: preparing an edible enzyme delivery matrix in the form of pellets comprising a granulate edible carrier and thermostable recombinant polypeptide, enzyme, protein, e.g. structural or binding protein, wherein the pellets readily disperse the polypeptide, enzyme, protein, e.g. structural or binding protein contained therein into aqueous media, and administering the edible enzyme delivery matrix to the animal. The recombinant polypeptide, enzyme, protein, e.g. structural or binding protein can comprise a polypeptide of the invention. The polypeptide, enzyme, protein, e.g. structural or binding protein can be glycosylated to provide thermostability at pelletizing conditions. The delivery matrix can be formed by pelletizing a mixture comprising a grain germ and a polypeptide, enzyme, protein, e.g. structural or binding protein. The pelletizing conditions can include application of steam. The pelletizing conditions can comprise application of a temperature in excess of about 80° C. for about 5 minutes and the enzyme retains a specific activity of at least 350 to about 900 units per milligram of enzyme.

[0086] In one aspect, invention provides a pharmaceutical composition comprising a polypeptide, enzyme, protein, e.g. structural or binding protein, of the invention, or a polypeptide encoded by a nucleic acid of the invention. In one aspect, the pharmaceutical composition acts as a digestive aid. In one aspect, the pharmaceutical of this invention is formulated as an edible delivery agent, or, a formulation of this invention comprises a tablet, a gel, a capsule or a geltab, or a lotion, a spray or a gel.

[0087] The invention provides methods for delivering an enzyme or protein supplement to an animal, the method comprising: (a) providing a cell that recombinantly generates a polypeptide of the invention, and (b) administering the cell or the recombinantly generated polypeptide to the animal. In one aspect, the cell is a plant cell, a bacterial cell, a yeast cell, an insect cell or an animal cell, or the cell is selected from the group consisting of a Schizosaccharomyces sp., Saccharomyces sp., Pichia sp., Escherichia sp., Streptomyces sp., Bacillus sp. and Lactobacillus sp., or the cell is Saccharomyces pombe, or the cell is Saccharomyces cerevisiae, or the cell is Pichia pastoris, or the cell is Escherichia coli, or the cell is Bacillus cereus.

[0088] The invention provides compositions comprising an encapsulated formulation, e.g., as a pharmaceutical, food, feed or dietary supplement encapsulated formulation, comprising at least one polypeptide of the invention.

[0089] The invention provides methods for making bioethanol, biomethanol, biopropanol and/or, bio-butanol comprising (A) contacting a composition comprising a cellooligsaccharide, an arabinoxylan oligomer, a lignin, a lignocellulose, a xylan, a glucan, a cellulose or a fermentable sugar with the polypeptide of the invention, or a polypeptide encoded by a nucleic acid of the invention; (B) the method of (A), wherein the composition of comprises a plant, plant product or plant derivative, and optionally the plant or plant product comprises cane sugar plants or plant products, beets or sugarbeets, wheat, corn, soybeans, potato, rice or barley, (C) the method of (A) or (B), wherein the polypeptide has activity comprising lignocellulosic enzyme and/or cellulase, endoglucanase, cellobiohydrolase, beta-glucosidase, xylanase, mannanse, β-xylosidase and/or arabinofuranosidase activity; or (D) the method of (A), (B) or (C), wherein the plant is a monocot or dicot, or the plant is a monocot corn, sugarcane, rice, wheat, barley, switchgrass or Miscanthus; or the plant is a dicot oilseed crop, soy, canola, rapeseed, flax, cotton, palm oil, sugar beet, peanut, tree, poplar or lupine; or (E) the method of (A), (B), (C) or (D), further comprising processing and/or formulating the bioethanol, biomethanol, biopropanol and/or, bio-butanol as a liquid fuel and/or a gas fuel, wherein optionally the fuel comprises a biofuel and/or a synthetic fuel, or the fuel comprises bioethanol, biomethanol, biopropanol and/or, bio-butanol; and/or a gasoline-ethanol, -methanol, -butanol and/or -propanol mix.

[0090] The invention provides methods for processing a biomass material comprising a cellooligsaccharide, an arabinoxylan oligomer, a lignin, a lignocellulose, a xylan, a glucan, a cellulose or a fermentable sugar comprising contacting the composition with the polypeptide of the invention, or a polypeptide encoded by a nucleic acid of the invention, wherein optionally the biomass material comprising lignocellulose is derived from an agricultural crop, is a byproduct of a food or a feed production, is a lignocellulosic waste product, or is a plant residue or a waste paper or waste paper product, and optionally the polypeptide has activity comprising lignocellulosic enzyme and/or cellulase, endoglucanase, cellobiohydrolase, beta-glucosidase, xylanase, mannanse, β-xylosidase and/or arabinofuranosidase activity, and optionally the plant residue comprise stems, leaves, hulls, husks, corn or corn cobs, corn stover, hay, straw, wood, wood chips, wood pulp, wood waste and sawdust, and optionally the paper waste comprises discarded or used photocopy paper, computer printer paper, notebook paper, notepad paper, typewriter paper, newspapers, magazines, cardboard and paper-based packaging materials, and optionally the processing of the biomass material generates a biodiesel, or a bioalcohol, a bioethanol, biomethanol, biobutanol or biopropanol.

[0091] The details of one or more aspects of the invention are set forth in the accompa-nying drawings and the description below. Other features, objects, and advantages of the invention will be apparent from the description and drawings, and from the claims.

[0092] All publications, patents, patent applications, GenBank sequences and ATCC deposits, cited herein are hereby expressly incorporated by reference for all purposes.

### BRIEF DESCRIPTION OF DRAWINGS

[0093] The following drawings are illustrative of aspects of the invention and are not meant to limit the scope of the invention as encompassed by the claims.

[0094] FIG. 1 is a block diagram of a computer system.

[0095] FIG. 2 is a flow diagram illustrating one aspect of a process for comparing a new nucleotide or protein sequence with a database of sequences in order to determine the homology levels between the new sequence and the sequences in the database.

[0096] FIG. 3 is a flow diagram illustrating one aspect of a process in a computer for determining whether two sequences are homologous.

[0097] FIG. 4 is a flow diagram illustrating one aspect of an identifier process 300 for detecting the presence of a feature in a sequence.

[0098] Like reference symbols in the various drawings indicate like elements.

### DETAILED DESCRIPTION

[0099] The invention provides isolated, synthetic and recombinant polypeptides, including enzymes, structural proteins and binding proteins, polynucleotides encoding these polypeptides, and methods of making and using these polynucleotides and polypeptides. The polypeptides of the invention, and the polynucleotides encoding the polypeptides of the invention, encompass many classes of enzymes, structural proteins and binding proteins. In one aspect, the enzymes and proteins of the invention comprise, e.g. aldolases, alpha-galactosidases, amidases, e.g. secondary amidases, amylases, catalases, carotenoid pathway enzymes, dehalogenases, endoglucanases, epoxide hydrolases, esterases, hydrolases, glucosidases, glycosidases, inteins, isomerases, laccases, lipases, monooxygenases, nitroreductases, nitrilases, P450 enzymes, pectate lyases, phosphatases, phospholipases, phytases, polymerases, proteases, peptidases and xylanases, which are more specifically described below. The invention also provides isolated, synthetic and recombinant polypeptides, including enzymes, structural proteins and binding proteins, polynucleotides encoding these polypeptides, having the activities described in Table 1, Table 3 and/or Table 4, and in another aspect, with or without signal sequences as described in Table 2.

### Aldolases

[0100] In one aspect, the invention provides aldolases, polynucleotides encoding them, and methods of making and using these polynucleotides and polypeptides. In one aspect, the invention is directed to polypeptides, e.g., enzymes, having an aldolase activity, including thermostable and thermotolerant aldolase activity, and polynucleotides encoding these enzymes, and making and using these polynucleotides and polypeptides. In one aspect, the aldolase activity comprises catalysis of the formation of a carbon-carbon bond. In one aspect, the aldolase activity comprises an aldol condensation. The aldol condensation can have an aldol donor substrate comprising an acetaldehyde and an aldol acceptor substrate comprising an aldehyde. The aldol condensation can yield a product of a single chirality. In one aspect, the aldolase activity is enantioselective. The aldolase activity can comprise a 2-deoxyribose-5-phosphate aldolase (DERA) activity. The aldolase activity can comprise catalysis of the condensation of acetaldehyde as donor and a 2(R)-hydroxy-3-(hydroxy or mercapto)-propionaldehyde derivative to form a 2-deoxysugar. The aldolase activity can comprise catalysis of the condensation of acetaldehyde as donor and a 2-substituted acetaldehyde acceptor to form a 2,4,6-trideoxyhexose via a 4-substituted-3-hydroxybutanal intermediate. The aldolase activity can comprise catalysis of the generation of chiral aldehydes using two acetaldehydes as substrates. The aldolase activity can comprises enantioselective assembling of chiral β,δ-dihydroxyheptanoic acid side chains. The aldolase activity can comprise enantioselective assembling of the core of [R—(R*,R*)]-2-(4-fluorophenyl)-b,d-dihydroxy-5-(1-methylethyl)-3-phenyl-4-(phenylamino)-carbonyl]-1H-pyrrole-1-heptanoic acid (Atorvastatin, or LIPITOR™), rosuvastatin (CRESTOR™) and/or fluvastatin (LESCOL™). The aldolase activity can comprise, with an oxidation step, synthesis of a 3R,5S-6-chloro-2,4,6-trideoxy-erythro-hexonolactone.

### Alpha-Galactosidases

[0101] In one aspect, the invention provides alpha-galactosidases, polynucleotides encoding them, and methods of making and using these polynucleotides and polypeptides. In one aspect, the invention is directed to polypeptides, e.g., enzymes, having an alpha-galactosidase activity, including thermostable and thermotolerant alpha-galactosidase activity, and polynucleotides encoding these enzymes, and making and using these polynucleotides and polypeptides.

[0102] An alpha galactosidase hydrolyses the non-reducing terminal alpha 1-3,4,6 linked galactose from poly- and oligosaccharides. These saccharides are commonly found in legumes and are difficult to digest. As such, alpha-galactosidases can be used as a digestive aid to break down raffinose, stachyose, and verbascose, found in such foods as beans and other gassy foods.

### Amidases

[0103] In one aspect, the invention provides amidases, polynucleotides encoding them, and methods of making and using these polynucleotides and polypeptides. In one aspect, the invention is directed to polypeptides, e.g., enzymes, having an amidase activity, including thermostable and thermotolerant amidase activity, and polynucleotides encoding these enzymes, and making and using these polynucleotides and polypeptides. In one aspect, the amidases of the invention are used in the removal of arginine, phenylalanine or methionine from the N-terminal end of peptides in peptide or peptidomimetic synthesis. In one aspect, the enzyme of the invention, e.g. an amidase, is selective for the L, or “natural” enantiomer of the amino acid derivatives and is therefore useful for the production of optically active compounds. These reactions can be performed in the presence of the chemically more reactive ester functionality, a step which is very difficult to achieve with nonenzymatic methods. The enzyme is also able to tolerate high temperatures (at least 70° C.), and high concentrations of organic solvents (>40% DMSO), both of which cause a disruption of secondary structure in peptides, which enables cleavage of otherwise resistant bonds.

### Secondary Amidases

[0104] In one aspect, the invention provides secondary amidases, polynucleotides encoding them, and methods of making and using these polynucleotides and polypeptides. In one aspect, the invention is directed to polypeptides, e.g., enzymes, having a secondary amidase activity, including thermostable and thermotolerant secondary amidase activity, and polynucleotides encoding these enzymes, and making and using these polynucleotides and polypeptides.

[0105] Secondary amidases include a variety of useful enzymes including peptidases, proteases, and hydantoinases. This class of enzymes can be used in a range of commercial applications. For example, secondary amidases can be used to: 1) increase flavor in food, in particular cheese (known as enzyme ripened cheese); 2) promote bacterial and fungal killing; 3) modify and de-protect fine chemical intermediates 4) synthesize peptide bonds; 5) and carry out chiral resolutions. Particularly, there is a need in the art for an enzyme capable of hydrolyzing Cephalosporin C.

### Amylases

[0106] In one aspect, the invention provides amylases, polynucleotides encoding them, and methods of making and using these polynucleotides and polypeptides. In one aspect, the invention is directed to polypeptides, e.g., enzymes, having an amylase activity, including thermostable and thermotolerant amylase activity, and polynucleotides encoding these enzymes, and making and using these polynucleotides and polypeptides.

[0107] In one aspect, the polypeptides of the invention can be used as amylases, for example, alpha amylases or glucoamylases, to catalyze the hydrolysis of starch into sugars. In one aspect, the invention is directed to polypeptides having thermostable amylase activity, such as alpha amylases or glucoamylase activity, e.g., a 1,4-alpha-D-glucan glucohydrolase activity. In one aspect, the polypeptides of the invention can be used as amylases, for example, alpha amylases or glucoamylases, to catalyze the hydrolysis of starch into sugars, such as glucose. The invention is also directed to nucleic acid constructs, vectors, and host cells comprising the nucleic acid sequences of the invention as well as recombinant methods for producing the polypeptides of the invention. The invention is also directed to the use of amylases of the invention in starch conversion processes, including production of high fructose corn syrup (HFCS), bioethanol, biopropanol, biobutanol, biopropanol, biomethanol, dextrose, and dextrose syrups and the like.

[0108] Commercially, glucoamylases are used to further hydrolyze cornstarch, which has already been partially hydrolyzed with an alpha-amylase. The glucose produced in this reaction may then be converted to a mixture of glucose and fructose by a glucose isomerase enzyme. This mixture, or one enriched with fructose, is the high fructose corn syrup commercialized throughout the world. In general, starch to fructose processing consists of four steps: liquefaction of granular starch, saccharification of the liquefied starch into dextrose, purification, and isomerization to fructose. The object of a starch liquefaction process is to convert a concentrated suspension of starch polymer granules into a solution of soluble shorter chain length dextrins of low viscosity.

[0109] The amylases of the invention can be used in automatic dish wash (ADW) products and laundry detergent. In ADW products, the amylase will function at pH 10-11 and at 45-60° C. in the presence of calcium chelators and oxidative conditions. For laundry, activity at pH 9-10 and 40° C. in the appropriate detergent matrix will be required. Amylases are also useful in textile desizing, brewing processes, starch modification in the paper and pulp industry and other processes described in the art.

[0110] Amylases can be used commercially in the initial stages (liquefaction) of starch processing; in wet corn milling; in alcohol production; as cleaning agents in detergent matrices; in the textile industry for starch desizing; in baking applications; in the beverage industry; in oilfields in drilling processes; in inking of recycled paper and in animal feed. Amylases are also useful in textile desizing, brewing processes, starch modification in the paper and pulp industry and other processes.

### Carotenoid Pathway Enzymes

[0111] The invention provides novel enzymes, and the polynucleotides encoding them, involved in carotenoid (such as lycopenes and luteins), astaxanthin and/or isoprenoid synthesis. The invention also provides novel genes in the carotenoid, astaxanthin and isoprenoid biosynthetic pathways comprising at least one enzyme of the invention. For example, alternative aspects, the invention provides one or more nucleic acid coding sequences (CDSs, or ORFs) encoding all, or at least one, enzyme(s) involved in a desired biosynthetic pathway for carotenoids, astaxanthins and/or isoprenoids. The nucleic acid coding sequence(s) can be expressed through an expression plasmid, vector, engineered virus or any episomal expression system, or, can be integrated into the genome of the host cell. In one aspect, the enzyme(s) involved in the biosynthetic pathway system comprise a novel combination of enzymes. In another aspect, the enzyme(s) involved in the biosynthetic pathway system comprise at least one novel enzyme of the invention—where nucleic acids used in the system encode a novel enzyme of the invention.

[0112] Carotenoids are natural pigments which have antioxidant and anti-carcinogenic activity. They are free radical scavengers, and as such, strong antioxidants. Carotenoids have a conjugated backbone structure and are very rigid molecules, having a backbone consisting of 9 to 11 alternating single/double bonds and have very similar electro-optical properties as polyacetylene. Astaxanthins are abundant naturally occurring carotenoids. They contain an internal unit similar to beta-carotene but have two terminal carbonyl and hydroxyl functionalities. These compounds are useful for food and feed supplements, colorants, neutraceuticals, cosmetic and pharmaceutical needs. Isoprenoids are compounds biosynthesized from or containing isoprene (unsaturated branched chain five-carbon hydrocarbon) units, including terpenes, carotenoids, fat soluble vitamins, ubiquinone, rubber, and some steroids. Biosynthetic pathways for carotenoids, astaxanthins and isoprenoids are known; most of these published pathways are derived from one organism or a combination of genes from a few species.

### Catalases

[0113] In one aspect, the invention provides catalases, polynucleotides encoding them, and methods of making and using these polynucleotides and polypeptides. In one aspect, the invention is directed to polypeptides, e.g., enzymes, having a catalase activity, including thermostable and thermotolerant catalase activity, and polynucleotides encoding these enzymes, and making and using these polynucleotides and polypeptides.

[0114] In processes where hydrogen peroxide is a by-product, catalases of the invention can be used to destroy or detect hydrogen peroxide, e.g., in production of glyoxylic acid and in glucose sensors. Also, in processes where hydrogen peroxide is used as a bleaching or antibacterial agent, catalases of the invention can be used to destroy residual hydrogen peroxide, e.g. in contact lens cleaning, in bleaching steps in pulp and paper production, and in the pasteurization of dairy products. Further, such catalases of the invention can be used as catalysts for oxidation reactions, e.g. epoxidation and hydroxylation.

### Dehalogenases

[0115] In one aspect, the invention provides dehalogenases, polynucleotides encoding them, and methods of making and using these polynucleotides and polypeptides. In one aspect, the invention is directed to polypeptides, e.g., enzymes, having a dehalogenase activity, including thermostable and thermotolerant dehalogenase activity, and polynucleotides encoding these enzymes, and making and using these polynucleotides and polypeptides.

[0116] Environmental pollutants consist of a large quantity and variety of chemicals; many of these are toxic, environmental hazards that were designated in 1979 as priority pollutants by the U.S. Environmental Protection Agency. Microbial and enzymatic biodegradation is one method for the elimination of these pollutants. Accordingly, methods have been designed to treat commercial wastes and to bioremediate polluted environments via microbial and related enzymatic processes. Unfortunately, many chemical pollutants are either resistant to microbial degradation or are toxic to potential microbial-degraders when present in high concentrations and certain combinations.

[0117] Dehalogenases, e.g. haloalkane dehalogenases, of the invention can cleave carbon-halogen bonds in haloalkanes and halocarboxylic acids by hydrolysis, thus converting them to their corresponding alcohols. This reaction can be used for detoxification involving haloalkanes, such as ethylchloride, methylchloride, and 1,2-dichloroethane (e.g., detoxification of toxic composition, e.g., pesticides, poisons, chemical warfare agents and the like comprising haloalkanes).

[0118] The present invention provides a number of dehalogenase enzymes useful in bioremediation having improved enzymatic characteristics. The polynucleotides and polynucleotide products of the invention are useful in, for example, groundwater treatment involving transformed host cells containing a polynucleotide or polypeptide of the invention (e.g., the bacteria Xanthobacter autotrophicus) and the haloalkane 1,2-dichlorethane as well as removal of polychlorinated biphenyls (PCB's) from soil sediment.

[0119] The haloalkane dehalogenase of the invention are useful in carbon-halide reduction efforts. The enzymes of the invention initiate the degradation of haloalkanes. Alternatively, host cells containing a dehalogenase polynucleotide or polypeptide of the invention can feed on the haloalkanes and produce the detoxifying enzyme.

### Endoglucanases

[0120] In one aspect, the invention provides endoglucanases, polynucleotides encoding them, and methods of making and using these polynucleotides and polypeptides. In one aspect, the invention is directed to polypeptides, e.g., enzymes, having an endoglucanase activity, including thermostable and thermotolerant endoglucanase activity, and polynucleotides encoding these enzymes, and making and using these polynucleotides and polypeptides.

[0121] In one aspect, the enzymes of the invention have a glucanase, e.g., an endoglucanase, activity, e.g., catalyzing hydrolysis of internal endo-β-1,4- and/or β-1,3-glucanase linkages. In one aspect, the endoglucanase activity (e.g., endo-1,4-beta-D-glucan 4-glucano hydrolase activity) comprises hydrolysis of 1,4- and/or β-1,3-beta-D-glycosidic linkages in cellulose, cellulose derivatives (e.g., carboxy methyl cellulose and hydroxy ethyl cellulose) lichenin, beta-1,4 bonds in mixed beta-1,3 glucans, such as cereal beta-D-glucans or xyloglucans and other plant material containing cellulosic parts.

[0122] Endoglucanases of the invention (e.g., endo-beta-1,4-glucanases, EC 3.2.1.4; endo-beta-1,3(1)-glucanases, EC 3.2.1.6; endo-beta-1,3-glucanases, EC 3.2.1.39) can hydrolyze internal β-1,4- and/or β-1,3-glucosidic linkages in cellulose and glucan to produce smaller molecular weight glucose and glucose oligomers. Glucans are polysaccharides formed from 1,4-β- and/or 1,3-glycoside-linked D-glucopyranose. Endoglucanases of the invention can be used in the food industry, for baking and fruit and vegetable processing, breakdown of agricultural waste, in the manufacture of animal feed, in pulp and paper production, textile manufacture and household and industrial cleaning agents. Endoglucanases are produced by fungi and bacteria.

[0123] Beta-glucans are major non-starch polysaccharides of cereals. The glucan content can vary significantly depending on variety and growth conditions. The physicochemical properties of this polysaccharide are such that it gives rise to viscous solutions or even gels under oxidative conditions. In addition glucans have high water-binding capacity. All of these characteristics present problems for several industries including brewing, baking, animal nutrition. In brewing applications, the presence of glucan results in wort filterability and haze formation issues. In baking applications (especially for cookies and crackers), glucans can create sticky doughs that are difficult to machine and reduce biscuit size. In addition, this carbohydrate is implicated in rapid rehydration of the baked product resulting in loss of crispiness and reduced shelf-life. For monogastric animal feed applications with cereal diets, beta-glucan is a contributing factor to viscosity of gut contents and thereby adversely affects the digestibility of the feed and animal growth rate. For ruminant animals, these beta-glucans represent substantial components of fiber intake and more complete digestion of glucans would facilitate higher feed conversion efficiencies. It is desirable for animal feed endoglucanases to be active in the animal stomach.

[0124] Endoglucanases of the invention can be used in the digestion of cellulose, a beta-1,4-linked glucan found in all plant material. Cellulose is the most abundant polysaccharide in nature. Enzymes of the invention that digest cellulose have utility in the pulp and paper industry, in textile manufacture and in household and industrial cleaning agents.

[0125] The following assays can be used to demonstrate/confirm the enzymatic activity of exemplary enzymes of the invention or to determine if a polypeptide has the requisite enzyme (e.g., glucanase, mannanase, or xylanase or e.g., an alkaline endoglucanase/cellulase) activity to be within the scope of the invention.

### Cellulase Activity Assay: BCA Reducing Ends Assay

[0126] This assay measures the amount of reducing ends produced during the enzymatic degradation of carboxymethylcellulose (CMC) in a high throughput multiple sample 96-well format.

[0127] Materials:

### Substrate Solutions:

[0128] 1% CMC—Dissolve 1 gm CMC in 100 ml 50 mM Britton-Robinson buffer at pH—4, heat CMC solution in boiling water bath, while mixing, for 20-40 minutes until it dissolves (solution will still appear slightly milky, but translucent). Adjust to desired pH with 1M NaOH or HCl.

[0129] Solution A:

[0130] 64 mg/ml sodium carbonate monohydrate

[0131] 24 mg/ml sodium bicarbonate

[0132] 1.95 mg/ml BCA (4,4′-dicarboxy-2,2′-biquinoline disodium salt (Sigma Chemical cat #D-8284)

[0133] Add above to dH2O,

[0134] Might need to dissolve the BCA by heating, don't heat more than ˜80 C.

[0135] Solution B:

[0136] 1.24 mg/ml cupric sulfate pentahydrate

[0137] 1.26 mg/ml L-serine

[0138] Add above to dH2O

[0139] Working Reagent:

[0140] 1:1 of solutions A & B, make fresh working reagent mixture every day (usually only make enough for each assay), make fresh Solutions A & B every week.

[0141] Glucose Stock Solution:

[0142] 10 mM Glucose in dH2O. 0.2 um filter, store at 4 C.

[0143] Glucose Standards:

[0144] Dilute the 10 mM Glucose stock in 1% CMC at desired pH; to a final concentration of 0, 100, 200, 300, 400, 500 uM. Since the curve is determined by adding 10 ul of the standards to the working reagent it works out to 0-0.005 umole glucose/well. The standard curve needs to be generated for each plate of sample time-points, as the heating cycle can affect the amount of signal observed.

[0145] Methods:

[0146] Set-Up:

[0147] Aliquot 1 ml of substrate solution (1% CMC) into deep-well plate (if using ambient Temp) or Acme-tubes in hot-block, equilibrate to desired temperature (—5 min) in heat block or heated water bath.

[0148] While solution is equilibrating, make 10 ml of the working reagent and aliquot 100 ul into 96 well PCR-plate. Set plate on ice.

[0149] Reaction/Sampling:

[0150] After temperature equilibration is complete, add enzyme solution to substrate solution. Mix immediately by pipetting up/down. Immediately aliquot 10-ul into PCR-plate (this is t=0, zero time point). Aliquot 10-ul into PCR-plate at each desired time point (e.g. 0, 2, 5, 10, 15, 20, 30 minutes).

[0151] Save the last row on the plate for addition of 10 ul of glucose standards (I.e. wells should only have the 100-ul working reagent in them)

[0152] Assay Color Development:

[0153] When all time points are collected and standards are added, cover plate and heat to 100 C. for 10 min using PCR machine. Cool plate on ice for 5-10 min (or set PCR machine to 1 C for 10 min).

[0154] Add 100 ul H2O to wells. Mix. Aliquot 100 ul of mixture into clear flat bottomed 96-well plate and read absorbance at 560 nm.

[0155] Generate Standard Curve:

[0156] Plot the A560 vs. umole glucose from the wells containing the glucose standards. Use linear regression to calculate the slope (S_{std}).

[0157] Generate Graph of Reaction Slope:

[0158] Plot A560 vs. time-points. Zero each sample's time points against its own T=0 (i.e. subtract sample's T=0 absorbance value from all other time-points of same sample).

[0159] Generate the slope (Sᵣₓₙ) for each set of sample time-points (A560/time).

[0160] Activity Determination:

[0161] Divide Sᵣₓₙ, by the S_{std}, and multiply by 100 (as the umole product detected is the amount of reducing ends in the 10-ul used in the assay, not the total amount generated in the 1 ml enzyme reaction).

[0162] Specific Activity Determination:

[0163] Divide the Activity (in units of umole/min) by the total mg of protein added in the 1-ml reaction. Determine the protein concentration by Bradford or similar assay.

[0164] Divide the protein concentration by any dilutions used.

[0165] Multiply by the volume (in ml) used in the reaction.

[0166] All points should be done in duplicate with triplicate being better.

[0167] In another aspect, enzymes are tested to determine if they are within the scope of the invention using a glucanase substrate (many of which are well known in the art), e.g., barley and/or oat glucan, and/or galactomannan-comprising compositions.

[0168] Specific activity of the enzymes of the invention can be determined on 1% substrate in 50 mM sodium acetate buffer pH 5.3, at 37° C. using the BCA reducing sugar assay (see above). 1 unit (U) of glucanase activity=1 μmol/min⁻¹ glucose reducing equivalents released at 37° C., pH 5.3.
[0169] Barley Beta Glucan (BBG): 30 U/mg
[0170] Oat Beta Glucan (OBG): 38 U/mg
[0171] Carboxymethylcellulose (CMC): 40 U/mg
[0172] Carob Galactomannan: 0.3 U/mg

### Epoxide Hydrolases

[0173] In one aspect, the invention provides epoxide hydrolases, polynucleotides encoding them, and methods of making and using these polynucleotides and polypeptides. In one aspect, the invention is directed to polypeptides, e.g., enzymes, having an epoxide hydrolase activity, including thermostable and thermotolerant epoxide hydrolase activity, and polynucleotides encoding these enzymes, and making and using these polynucleotides and polypeptides. The polypeptides of the invention can be used as epoxide hydrolases to catalyze the hydrolysis of epoxides and arene oxides to their corresponding diols.

[0174] Epoxide hydrolases catalyze the hydrolysis of epoxides and arene oxides to their corresponding diols. Epoxide hydrolases from microbial sources are highly versatile biocatalysts for the asymmetric hydrolysis of epoxides on a preparative scale. Besides kinetic resolution, which furnishes the corresponding vicinal diol and remaining non-hydrolyzed epoxide in nonracemic form, enantioconvergent processes are possible. These are highly attractive as they lead to the formation of a single enantiomeric diol from a racemic oxirane.

[0175] Microsomal epoxide hydrolases are biotransformation enzymes that catalyze the conversion of a broad array of xenobiotic epoxide substrates to more polar diol metabolites, see, e.g., Omiecinski (2000) Toxicol. Lett. 112-113:365-370. Microsomal epoxide hydrolases catalyze the addition of water to epoxides in a two-step reaction involving initial attack of an active site carboxylate on the oxirane to give an ester intermediate followed by hydrolysis of the ester. Soluble epoxide hydrolase play a role in the biosynthesis of inflammation mediators.

[0176] Epoxide hydrolases of the invention can be used in the detoxification of epoxides or in the biosynthesis of hormones. Additionally, epoxide hydrolases of the invention can efficiently process several substrates, leading to enantiomerically enriched-epoxides (the unreacted enantiomer) and/or to the corresponding vicinal diols.

### Esterases

[0177] In one aspect, the invention provides esterases, polynucleotides encoding them, and methods of making and using these polynucleotides and polypeptides. In one aspect, the invention is directed to polypeptides, e.g., enzymes, having an esterase activity, including thermostable and thermotolerant esterase activity, and polynucleotides encoding these enzymes, and making and using these polynucleotides and polypeptides.

[0178] Many esterases are known and have been discovered in a broad variety of organisms, including bacteria, yeast and higher animals and plants. A principal example of esterases are the lipases, which are used in the hydrolysis of lipids, acidolysis (replacement of an esterified fatty acid with a free fatty acid) reactions, transesterification (exchange of fatty acids between triglycerides) reactions, and in ester synthesis. The major industrial applications for lipases include: the detergent industry, where they are employed to decompose fatty materials in laundry stains into easily removable hydrophilic substances; the food and beverage industry where they are used in the manufacture of cheese, the ripening and flavoring of cheese, as antistaling agents for bakery products, and in the production of margarine and other spreads with natural butter flavors; in waste systems; and in the pharmaceutical industry where they are used as digestive aids.

[0179] Alternatively, esterases of the invention can be used in detergent compositions. In one aspect, the esterase can be a nonsurface-active esterase. In another aspect, the esterase can be a surface-active esterase. The esterase can be formulated in a non-aqueous liquid composition, a cast solid, a granular form, a particulate form, a compressed tablet, a gel form, a paste or a slurry form.

[0180] In another aspect, the invention provides fabrics or clothing comprising an esterase of the invention. In another aspect, esterases of the invention are used to treat a lipid-containing fabric.

[0181] In another aspect, the invention provides foods and drinks comprising an esterase of the invention. The invention also provides cheeses comprising an esterase of the invention. Additionally, the invention provides methods for the manufacture of cheese comprising the following steps: (a) providing a polypeptide having an esterase activity, wherein the polypeptide comprises a polypeptide of the invention, or, a polypeptide encoded by a nucleic acid of the invention; (b) providing a cheese precursor; and (c) contacting the polypeptide of step (a) with the precursor of step (b) under condition wherein the esterase can catalyze cheese manufacturing processes. In one aspect, the method can comprise the process of ripening and flavoring of cheese.

[0182] In another aspect, the invention provides margarines and spreads comprising an enzyme of the invention. The invention provides methods for production of margarine or other spreads with natural butter flavors comprising the following steps: (a) providing a polypeptide having an esterase activity, wherein the polypeptide comprises a polypeptide of the invention, or, a polypeptide encoded by a nucleic acid of the invention; (b) providing a margarine or a spread precursor; and (c) contacting the polypeptide of step (a) with the precursor of step (b) under condition wherein the esterase can catalyze processes involved in margarine or spread production.

[0183] The invention provides methods for treating solid or liquid waste products comprising the following steps: (a) providing a polypeptide having an esterase activity, wherein the polypeptide comprises a polypeptide of the invention, or, a polypeptide encoded by a nucleic acid of the invention; (b) providing a solid or a liquid waste; and (c) contacting the polypeptide of step (a) and the waste of step (b) under conditions wherein the polypeptide can treat the waste. The invention provides solid or liquid waste products comprising a polypeptide of the invention.

[0184] The invention provides methods for aiding digestion in a mammal comprising (a) providing a polypeptide having an esterase activity, wherein the polypeptide comprises a polypeptide of the invention, or, a polypeptide encoded by a nucleic acid of the invention; (b) providing a composition comprising a substrate for the polypeptide of step (a); (c) feeding or administering to the mammal the polypeptide of step (a) with a feed or food comprising a substrate for the polypeptide of step (a), thereby helping digestion in the mammal. In one aspect, the mammal is a human.

[0185] The invention provides pharmaceutical compositions comprising a polypeptide and/or a nucleic acid of the invention, e.g., a pharmaceutical composition for use as a digestive aid in a mammal comprising a polypeptide having an esterase activity, wherein the polypeptide comprises a polypeptide of the invention, or, a polypeptide encoded by a nucleic acid of the invention. In one aspect, the mammal comprises a human. The enzymes of the invention are used in the manufacture of medicaments.

[0186] The invention provides bakery products comprising a polypeptide of the invention. The invention provides antistaling agents for bakery products comprising a polypeptide having an esterase activity, wherein the polypeptide comprises a polypeptide of the invention, or, a polypeptide encoded by a nucleic acid of the invention.

[0187] The invention provides methods for hydrolyzing, breaking up or disrupting a ester-comprising composition comprising the following steps: (a) providing a polypeptide of the invention having an esterase activity, or a polypeptide encoded by a nucleic acid of the invention; (b) providing a composition comprising a protein; and (c) contacting the polypeptide of step (a) with the composition of step (b) under conditions wherein the esterase hydrolyzes, breaks up or disrupts the ester-comprising composition.

[0188] Alternatively, the invention provides methods for liquefying or removing ester-comprising compositions comprising the following steps: (a) providing a polypeptide of the invention having an esterase activity, or a polypeptide encoded by a nucleic acid of the invention; (b) providing a composition comprising a protein; and (c) contacting the polypeptide of step (a) with the composition of step (b) under conditions wherein esterase removes or liquefies the ester-comprising compositions.

### Hydrolases

[0189] In one aspect, the invention provides hydrolases, polynucleotides encoding them, and methods of making and using these polynucleotides and polypeptides. In one aspect, the invention is directed to polypeptides, e.g., enzymes, having a hydrolase activity, e.g., an esterase, acylase, lipase, phospholipase or protease (including peptidase) activity, including thermostable and thermotolerant hydrolase activity, and polynucleotides encoding these enzymes, and making and using these polynucleotides and polypeptides. The hydrolase activities of the polypeptides and peptides of the invention include esterase activity, lipase activity (hydrolysis of lipids), acidolysis reactions (to replace an esterified fatty acid with a free fatty acid), transesterification reactions (exchange of fatty acids between triglycerides), ester synthesis, ester interchange reactions, phospholipase activity (e.g., phospholipase A, B, C and D activity, patatin activity, lipid acyl hydrolase (LAH) activity) and protease activity (hydrolysis of peptide bonds). The polypeptides of the invention can be used in a variety of pharmaceutical, agricultural and industrial contexts, including the manufacture of cosmetics and nutraceuticals.

[0190] In one aspect, the polypeptides of the invention are used in the biocatalytic synthesis of structured lipids (lipids that contain a defined set of fatty acids distributed in a defined manner on the glycerol backbone), including cocoa butter alternatives (CBA), lipids containing poly-unsaturated fatty acids (PUFAs), diacylglycerides, e.g., 1,3-diacyl glycerides (DAGs), monoglycerides, e.g., 2-monoglycerides (MAGs) and triacylglycerides (TAGs). In one aspect, the polypeptides of the invention are used to modify oils, such as fish, animal and vegetable oils, and lipids, such as poly-unsaturated fatty acids. The hydrolases of the invention having lipase activity can modify oils by hydrolysis, alcoholysis, esterification, transesterification and/or interesterification. The methods of the invention can use lipases with defined regio-specificity or defined chemoselectivity in biocatalytic synthetic reactions. In another aspect, the polypeptides of the invention are used to synthesize enantiomerically pure chiral products.

[0191] Additionally, the polypeptides of the invention can be used in food processing, brewing, bath additives, alcohol production, peptide synthesis, enantioselectivity, hide preparation in the leather industry, waste management and animal degradation, silver recovery in the photographic industry, medical treatment, silk degumming, biofilm degradation, biomass conversion to a biofuel such as bioethanol, biopropanol, biobutanol, biopropanol, biomethanol, biodiesel and the like, biodefense, antimicrobial agents and disinfectants, personal care and cosmetics, biotech reagents, in increasing starch yield from corn wet milling and pharmaceuticals such as digestive aids and anti-inflammatory (anti-phlogistic) agents.

[0192] The major industrial applications for hydrolases, e.g., esterases, lipases, phospholipases and proteases, include the detergent industry, where they are employed to decompose fatty materials in laundry stains into easily removable hydrophilic substances; the food and beverage industry where they are used in the manufacture of cheese, the ripening and flavoring of cheese, as antistaling agents for bakery products, and in the production of margarine and other spreads with natural butter flavors; in waste systems; and in the pharmaceutical industry where they are used as digestive aids.

[0193] Oils and fats an important renewable raw material for the chemical industry. They are available in large quantities from the processing of oilseeds from plants like rice bran oil, rapeseed (canola), sunflower, olive, palm or soy. Other sources of valuable oils and fats include fish, restaurant waste, and rendered animal fats. These fats and oils are a mixture of triglycerides or lipids, i.e. fatty acids (FAs) esterified on a glycerol scaffold. Each oil or fat contains a wide variety of different lipid structures, defined by the FA content and their regiochemical distribution on the glycerol backbone. These properties of the individual lipids determine the physical properties of the pure triglyceride. Hence, the triglyceride content of a fat or oil to a large extent determines the physical, chemical and biological properties of the oil. The value of lipids increases greatly as a function of their purity. High purity can be achieved by fractional chromatography or distillation, separating the desired triglyceride from the mixed background of the fat or oil source. However, this is costly and yields are often limited by the low levels at which the triglyceride occurs naturally. In addition, the purity of the product is often compromised by the presence of many structurally and physically or chemically similar triglycerides in the oil.

[0194] An alternative to purifying triglycerides or other lipids from a natural source is to synthesize the lipids. The products of such processes are called structured lipids because they contain a defined set of fatty acids distributed in a defined manner on the glycerol backbone. The value of lipids also increases greatly by controlling the fatty acid content and distribution within the lipid. Lipases can be used to affect such control.

[0195] Phospholipases are enzymes that hydrolyze the ester bonds of phospholipids. Corresponding to their importance in the metabolism of phospholipids, these enzymes are widespread among prokaryotes and eukaryotes. The phospholipases affect the metabolism, construction and reorganization of biological membranes and are involved in signal cascades. Several types of phospholipases are known which differ in their specificity according to the position of the bond attacked in the phospholipid molecule. Phospholipase A1 (PLA1) removes the 1-position fatty acid to produce free fatty acid and 1-lyso-2-acylphospholipid. Phospholipase A2 (PLA2) removes the 2-position fatty acid to produce free fatty acid and 1-acyl-2-lysophospholipid. PLA1 and PLA2 enzymes can be intra- or extra-cellular, membrane-bound or soluble. Intracellular PLA2 is found in almost every mammalian cell. Phospholipase C(PLC) removes the phosphate moiety to produce 1,2 diacylglycerol and phospho base. Phospholipase D (PLD) produces 1,2-diacylglycerophosphate and base group. PLC and PLD are important in cell function and signaling. Patatins are another type of phospholipase thought to work as a PLA.

[0196] In general, enzymes, including hydrolases such as esterases, lipases and proteases, are active over a narrow range of environmental conditions (temperature, pH, etc.), and many are highly specific for particular substrates. The narrow range of activity for a given enzyme limits its applicability and creates a need for a selection of enzymes that (a) have similar activities but are active under different conditions or (b) have different substrates. For instance, an enzyme capable of catalyzing a reaction at 50° C. may be so inefficient at 35° C., that its use at the lower temperature will not be feasible. For this reason, laundry detergents generally contain a selection of proteolytic enzymes (e.g., polypeptides of the invention), allowing the detergent to be used over a broad range of wash temperature and pH. In view of the specificity of enzymes and the growing use of hydrolases in industry, research, and medicine, there is an ongoing need in the art for new enzymes and new enzyme inhibitors.

### Proteases

[0197] In one aspect, the invention provides proteases and peptidases, polynucleotides encoding them, and methods of making and using these polynucleotides and polypeptides. Enzymes of this invention can have any protease activity, including a peptidase and/or a proteinase activity; for example, an exemplary protease activity of the invention can comprise catalysis of the hydrolysis of peptide bonds. The proteases of the invention can catalyze peptide hydrolysis reactions in both directions. The direction of the reaction can be determined, e.g., by manipulating substrate and/or product concentrations, temperature, selection of protease and the like. The protease activity can comprise an endoprotease activity and/or an exoprotease activity. The protease activity can comprise a protease activity, e.g., a carboxypeptidase activity, a dipeptidylpeptidase or an aminopeptidase activity, a serine protease activity, a metalloproteinase activity, a cysteine protease activity and/or an aspartic protease activity. In one aspect, protease activity can comprise activity the same or similar to a chymotrypsin, a trypsin, an elastase, a kallikrein and/or a subtilisin activity.

[0198] Assays that can be used to determine if a polypeptide has a protease activity can comprise use of a variety of pNA (para-nitroanalide) linked small peptide substrates as well as protein substrates, such as casein, gelatin, corn zein, soybean trypsin inhibitor, soybean lectin, and wheat germ lectin. For the small peptide substrate assays, hydrolysis of the terminal peptide bond liberates the pNA group and causes an increase in absorbance at 410 nm. To monitor activity on the protein substrates, incubation of the protease and substrate at 37° C. can be followed by monitoring the increase in fluorescence from an intramolecularly quenched substrate, by O-pthaldialdehyde (OPA) analysis, where in the presence of BME, OPA reacts with free amino ends to produce a fluorescent imidazole that can be detected using a standard fluorescence plate reader, or by SDS-PAGE analysis, where protease activity is indicated by the reduction or disappearance of substrate band(s).

[0199] Proteinase activity can also be determined on casein, gelatin, or corn zein using zymograms: zymogram gels contain the enzyme substrate (e.g., alpha-zein) embedded within the gel matrix. If a protease has activity on the zein in the gel, a clearing zone will be produced within an otherwise blue background following electrophoresis, renaturation, development, and staining steps. The clearing zone corresponds to the position of the protease in the gel.

[0200] The polypeptides of the invention include proteases in an active or inactive form. For example, the polypeptides of the invention include proproteins before “maturation” or processing of prepro sequences, e.g., by a proprotein-proces sing enzyme, such as a proprotein convertase to generate an “active” mature protein. The polypeptides of the invention include proteases inactive for other reasons, e.g., before “activation” by a post-translational processing event, e.g., an endo- or exo-peptidase or proteinase action, a phosphorylation event, an amidation, a glycosylation or a sulfation, a dimerization event, and the like.

[0201] The polypeptides of the invention include all active forms, including active subsequences, e.g., catalytic domains or active sites, e.g., of a protease (or any other enzyme) of this invention. In one aspect, the invention provides catalytic domains or active sites. In one aspect, the invention provides a peptide or polypeptide comprising or consisting of an active site domain; domains can be predicted through use of the database Pfam, which is a large collection of multiple sequence alignments and hidden Markov models covering many common protein families, The Pfam protein families database, A. Bateman, E. Birney, L. Cerruti, R. Durbin, L. Etwiller, S. R. Eddy, S. Griffiths-Jones, K. L. Howe, M. Marshall, and E. L. L. Sonnhammer, Nucleic Acids Research, 30(1):276-280, 2002); Finn, et al., (2006) Nucleic Acids Res., Database Issue 34:D247-D251. Profile hidden Markov models (profile HMMs) can be used to do database (sequence) searching using statistical descriptions of a sequence family's consensus; HMMER uses profile HMMs, and can be useful in situations like working with an evolutionarily diverse protein family (a BLAST search with any individual sequence may not find the rest of the sequences in the family).

[0202] Methods for identifying “prepro” domain sequences and signal sequences are well known in the art, see, e.g., Van de Ven (1993) Crit. Rev. Oncog. 4(2):115-136. For example, to identify a prepro sequence, the protein is purified from the extracellular space and the N-terminal protein sequence is determined and compared to the unprocessed form.

### Glucosidases

[0203] In one aspect, the invention provides glucosidases, polynucleotides encoding them, and methods of making and using these polynucleotides and polypeptides. In one aspect, the invention is directed to polypeptides, e.g., enzymes, having a glucosidase activity, including thermostable and thermotolerant glucosidase activity, and polynucleotides encoding these enzymes, and making and using these polynucleotides and polypeptides.

[0204] Alpha-glucosidases of the invention can catalyze the hydrolysis of starches into sugars. Alpha-glucosidases can hydrolyze terminal non-reducing 1, 4 or 1,6 linked α-D-glucose residues in starch, with release of α-D-glucose.

[0205] Alpha-glucosidases of the invention can be used commercially in the stages liquefaction and saccharification of starch processing; in wet corn milling; in alcohol production; as cleaning agents in detergent matrices; in the textile industry for starch desizing; in baking applications; in the beverage industry; in oilfields in drilling processes; in inking of recycled paper and in animal feed. Alpha-glucosidases of the invention are also useful in textile desizing, brewing processes, starch modification in the paper and pulp industry and other processes.

### Glycosidases

[0206] In one aspect, the invention provides glycosidases, polynucleotides encoding them, and methods of making and using these polynucleotides and polypeptides. In one aspect, the invention is directed to polypeptides, e.g., enzymes, having a glycosidase activity, including thermostable and thermotolerant glycosidase activity, and polynucleotides encoding these enzymes, and making and using these polynucleotides and polypeptides. Glycosidase enzymes of the invention can have more specific activity as glucosidases, α-galactosidases, β-galactosidases, β-mannosidases, β-mannanases, endoglucanases, and pullulanases.

[0207] α-galactosidases of the invention can catalyze the hydrolysis of galactose groups on a polysaccharide backbone or hydrolyze the cleavage of di- or oligosaccharides comprising galactose. β-mannanases of the invention can catalyze the hydrolysis of mannose groups internally on a polysaccharide backbone or hydrolyze the cleavage of di- or oligosaccharides comprising mannose groups. β-mannosidases of the invention can hydrolyze non-reducing, terminal mannose residues on a mannose-containing polysaccharide and the cleavage of di- or oligosaccaharides comprising mannose groups.

[0208] Guar gum is a branched galactomannan polysaccharide composed of β-1,4 linked mannose backbone with a-1,6 linked galactose sidechains. The enzymes required for the degradation of guar are β-mannanase, β-mannosidase and α-galactosidase. β-mannanase hydrolyses the mannose backbone internally and β-mannosidase hydrolyses non-reducing, terminal mannose residues. α-galactosidase hydrolyses α-linked galactose groups.

[0209] Galactomannan polysaccharides and the enzymes of the invention that degrade them have a variety of applications. Guar is commonly used as a thickening agent in food and is utilized in hydraulic fracturing in oil and gas recovery. Consequently, galactomannanases are industrially relevant for the degradation and modification of guar. Furthermore, a need exists for thermostable galactomannases that are active in extreme conditions associated with oil drilling and well stimulation.

[0210] There are other applications for these enzymes in various industries, such as in the beet sugar industry. 20-30% of the domestic U.S. sucrose consumption is sucrose from sugar beets. Raw beet sugar can contain a small amount of raffinose when the sugar beets are stored before processing and rotting begins to set in. Raffinose inhibits the crystallization of sucrose and also constitutes a hidden quantity of sucrose. Thus, there is merit to eliminating raffinose from raw beet sugar. α-Galactosidase has also been used as a digestive aid to break down raffinose, stachyose, and verbascose in such foods as beans and other gassy foods.

[0211] β-Galactosidases of the invention can be used for the production of lactose-free dietary milk products. Additionally, β-galactosidases of the invention can be used for the enzymatic synthesis of oligosaccharides via transglycosylation reactions.

[0212] Pullulanase is well known as a debranching enzyme of pullulan and starch. The enzyme of the invention can hydrolyze α-1,6-glucosidic linkages on these polymers. Starch degradation for the production or sweeteners (glucose or maltose) is a very important industrial application of this enzyme. The degradation of starch is developed in two stages. The first stage involves the liquefaction of the substrate with α-amylase, and the second stage, or saccharification stage, is performed by β-amylase with pullalanase added as a debranching enzyme, to obtain better yields.

[0213] Endoglucanases of the invention can be used in a variety of industrial applications. For instance, the endoglucanases of the invention can hydrolyze the internal β-1,4-glycosidic bonds in cellulose, which may be used for the conversion of plant biomass into fuels and chemicals. Endoglucanases of the invention also have applications in detergent formulations, the textile industry, in animal feed, in waste treatment, oil drilling and well stimulation, and in the fruit juice and brewing industry for the clarification and extraction of juices.

### Inteins

[0214] In one aspect, the invention provides inteins, polynucleotides encoding them, and methods of making and using these polynucleotides and polypeptides. In another aspect, the invention provides a chimeric protein comprising at least three domains, wherein the first domain comprises at least one enzyme domain or a binding protein domain, the second domain comprises at least one intein domain and a third domain comprising a detectable moiety domain, at least one intein domain is positioned between at least one enzyme or binding protein and at least one detectable moiety domain, and the intein domain has at least one cleavage or splicing activity.

[0215] In one aspect, the detectable moiety domain comprises a detectable peptide or polypeptide. The detectable peptide or a polypeptide can be a fluorescent peptide or polypeptide. The detectable peptide or a polypeptide can be a bioluminescent or a chemiluminescent peptide or polypeptide. In one aspect, the bioluminescent or chemiluminescent polypeptide comprises a green fluorescent protein (GFP), an aequorin, an obelin, a mnemiopsin or a berovin. In one aspect, the detectable moiety domain comprises an enzyme that generates a detectable signal. The enzyme that generates a detectable signal can comprise an alpha-galactosidase, an antibiotic (e.g., chloramphenicol acetyltransferase) or a kinase. The detectable moiety domain can comprise a radioactive isotope.

[0216] In one aspect, the chimeric protein is a recombinant fusion protein. In one aspect, the intein domain splicing activity results in cleavage of the enzyme domain from the intein domain and detectable domain. The intein domain splicing activity can result in cleavage of the enzyme domain from the intein domain and detectable domain and cleavage of the detectable domain from the intein domain. In one aspect, the intein domain splicing activity results in cleavage of the detectable domain from the intein domain. In one aspect, the intein domain has only splicing activity. The intein domain can have only cleaving activity.

[0217] In one aspect, at least one domain is separated from another domain by a linker. The linker can be a flexible linker. The intein domain can be separated from the detectable moiety domain and the enzyme domain by a linker.

### Isomerases

[0218] In one aspect, the invention provides isomerases, e.g. xylose isomerases, polynucleotides encoding them, and methods of making and using these polynucleotides and polypeptides. In one aspect, the invention is directed to polypeptides, e.g., enzymes, having an isomerase activity, e.g. xylose isomerase activity, including thermostable and thermotolerant isomerase activity, e.g. xylose isomerase activity, and polynucleotides encoding these enzymes, and making and using these polynucleotides and polypeptides.

[0219] In one aspect, the invention provides xylose isomerase enzymes, polynucleotides encoding the enzymes, methods of making and using these polynucleotides and polypeptides. The polypeptides of the invention can be used in a variety of agricultural and industrial contexts. For example, the polypeptides of the invention can be used for converting glucose to fructose or for manufacturing high content fructose syrups in large quantities. Other examples include use of the polypeptides of the invention in confectionary, brewing, alcohol and soft drinks production, and in diabetic foods and sweeteners.

### Laccases

[0220] In one aspect, the invention provides laccases, polynucleotides encoding them, and methods of making and using these polynucleotides and polypeptides. In one aspect, the invention is directed to polypeptides, e.g., enzymes, having a laccase activity, including thermostable and thermotolerant laccase activity, and polynucleotides encoding these enzymes, and making and using these polynucleotides and polypeptides.

[0221] In one aspect, the invention provides methods of depolymerizing lignin, e.g., in a pulp or paper manufacturing process, using a polypeptide of the invention. In another aspect, the invention provides methods for oxidizing products that can be mediators of laccase-catalyzed oxidation reactions, e.g., 2,2-azinobis-(3-ethylbenzthiazoline-6-sulfonate) (ABTS), 1-hydroxybenzotriazole (HBT), 2,2,6,6-tetramethylpiperidin-1-yloxy (TEMPO), dimethoxyphenol, dihydroxyfumaric acid (DHF) and the like.

[0222] Laccases are a subclass of the multicopper oxidase super family of enzymes, which includes ascorbate oxidases and the mammalian protein, ceruloplasmin. Laccases are one of the oldest known enzymes and were first implicated in the oxidation of urushiol and laccol. In one aspect, reactions catalyzed by laccases of the invention comprises the oxidation of phenolic substrates. The major target application has been in the delignification of wood fibers during the preparation of pulp.

### Lipases

[0223] In one aspect, the invention provides lipases, polynucleotides encoding them, and methods of making and using these polynucleotides and polypeptides. In one aspect, the invention is directed to polypeptides, e.g., enzymes, having a lipase activity, including thermostable and thermotolerant lipase activity, and polynucleotides encoding these enzymes, and making and using these polynucleotides and polypeptides.

[0224] In one aspect, the lipases of the invention can be used in a variety of pharmaceutical, agricultural and industrial contexts, including the manufacture of cosmetics and nutraceuticals. In one aspect, the lipases of the invention are used in the biocatalytic synthesis of structured lipids (lipids that contain a defined set of fatty acids distributed in a defined manner on the glycerol backbone), including cocoa butter alternatives (CBA), lipids containing poly-unsaturated fatty acids (PUFAs), diacylglycerides, e.g., 1,3-diacyl glycerides (DAGs), monoglycerides, e.g., 2-monoglycerides (MAGs) and triacylglycerides (TAGs). In one aspect, the polypeptides of the invention are used to modify oils, such as fish, animal and vegetable oils, and lipids, such as poly-unsaturated fatty acids. The lipases of the invention can modify oils by hydrolysis, alcoholysis, esterification, transesterification and/or interesterification. The methods of the invention use lipases with defined regio-specificity or defined chemoselectivity in biocatalytic synthetic reactions. In another aspect, the polypeptides of the invention are used to synthesize enantiomerically pure chiral products.

[0225] The invention provides lipase enzymes, polynucleotides encoding the enzymes, methods of making and using these polynucleotides and polypeptides. The polypeptides of the invention can be used in a variety of pharmaceutical, agricultural and industrial contexts, including the manufacture of cosmetics and nutraceuticals. In one aspect, the polypeptides of the invention are used in the biocatalytic synthesis of structured lipids (lipids that contain a defined set of fatty acids distributed in a defined manner on the glycerol backbone), including cocoa butter alternatives, poly-unsaturated fatty acids (PUFAs), 1,3-diacyl glycerides (DAGs), 2-monoglycerides (MAGs) and triacylglycerides (TAGs), such as 1,3-dipalmitoyl-2-oleoylglycerol (POP), 1,3-distearoyl-2-oleoylglycerol (SOS),1-palmitoyl-2-oleoyl-3-stearoylglycerol (POS) or 1-oleoyl-2,3-dimyristoylglycerol (OMM), long chain polyunsaturated fatty acids such as arachidonic acid, docosahexaenoic acid (DHA) and eicosapentaenoic acid (EPA).

[0226] In one aspect, the invention provides synthesis (using lipases of the invention) of a triglyceride mixture composed of POS (Palmitic-Oleic-Stearic), POP (Palmitic-Oleic-Palmitic) and SOS (Stearic-Oleic-Stearic) from glycerol. This synthesis uses free fatty acids versus fatty acid esters. In one aspect, this reaction can be performed in one pot with sequential addition of fatty acids using crude glycerol and free fatty acids and fatty acid esters. In one aspect, stearate and palmitate are mixed together to generate mixtures of DAGs. In one aspect, the diacylglycerides are subsequently acylated with oleate to give components of cocoa butter equivalents. In alternative aspects, the proportions of POS, POP and SOS can be varied according to: stearate to palmitate ratio; selectivity of enzyme for palmitate versus stearate; or enzyme enantioselectivity (could alter levels of POS/SOP). One-pot synthesis of cocoa butter equivalents or other cocoa butter alternatives is possible using this aspect of the invention.

[0227] In one aspect, lipases that exhibit regioselectivity and/or chemoselectivity are used in the structure synthesis of lipids or in the processing of lipids. Thus, the methods of the invention use lipases with defined regio-specificity or defined chemoselectivity (e.g., a fatty acid specificity) in a biocatalytic synthetic reaction. For example, the methods of the invention can use lipases with SN1, SN2 and/or SN3 regio-specificity, or combinations thereof. In one aspect, the methods of the invention use lipases that exhibit regioselectivity for the 2-position of a triacylglyceride (TAG). This SN2 regioselectivity can be used in the synthesis of a variety of structured lipids, e.g., triacylglycerides (TAGs), including 1,3-DAGs and components of cocoa butter.

[0228] The methods and compositions (lipases) of the invention can be used in the biocatalytic synthesis of structured lipids, and the production of nutraceuticals (e.g., polyunsaturated fatty acids and oils), various foods and food additives (e.g., emulsifiers, fat replacers, margarines and spreads), cosmetics (e.g., emulsifiers, creams), pharmaceuticals and drug delivery agents (e.g., liposomes, tablets, formulations), and animal feed additives (e.g., polyunsaturated fatty acids, such as linoleic acids) comprising lipids made by the structured synthesis methods of the invention or processed by the methods of the invention

[0229] In one aspect, lipases of the invention can act on fluorogenic fatty acid (FA) esters, e.g., umbelliferyl FA esters. In one aspect, profiles of FA specificities of lipases made or modified by the methods of the invention can be obtained by measuring their relative activities on a series of umbelliferyl FA esters, such as palmitate, stearate, oleate, laurate, PUFA, butyrate.

[0230] The methods and compositions (lipases) of the invention can be used to synthesize enantiomerically pure chiral products. In one aspect, the methods and compositions (lipases) of the invention can be used to prepare a D-amino acid and corresponding esters from a racemic mix. For example, D-aspartic acid can be prepared from racemic aspartic acid. In one aspect, optically active D-homophenylalanine and/or its esters are prepared. The enantioselectively synthesized D-homophenylalanine can be starting material for many drugs, such as Enalapril, Lisinopril, and Quinapril, used in the treatment of hypertension and congestive heart failure. The D-aspartic acid and its derivatives made by the methods and compositions of the invention can be used in pharmaceuticals, e.g., for the inhibition of arginiosuccinate synthetase to prevent or treat sepsis or cytokine-induced systemic hypotension or as immunosuppressive agents. The D-aspartic acid and its derivatives made by the methods and compositions of the invention can be used as taste modifying compositions for foods, e.g., as sweeteners (e.g., ALITAME™). For example, the methods and compositions (lipases) of the invention can be used to synthesize an optical isomer S(+) of 2-(6-methoxy-2-naphthyl) propionic acid from a racemic (R,S) ester of 2-(6-methoxy-2-naphthyl) propionic acid.

[0231] In one aspect, the methods and compositions (lipases) of the invention can be used to for stereoselectively hydrolyzing racemic mixtures of esters of 2-substituted acids, e.g., 2-aryloxy substituted acids, such as R-2-(4-hydroxyphenoxy)propionic acid, 2-arylpropionic acid, ketoprofen to synthesize enantiomerically pure chiral products.

[0232] The methods and compositions (lipases) of the invention can be used to hydrolyze oils, such as fish, animal and vegetable oils, and lipids, such as poly-unsaturated fatty acids. In one aspect, the polypeptides of the invention are used process fatty acids (such as poly-unsaturated fatty acids), e.g., fish oil fatty acids, for use in or as a feed additive.

[0233] Addition of poly-unsaturated fatty acids PUFAs to feed for dairy cattle has been demonstrated to result in improved fertility and milk yields. Fish oil contains a high level of PUFAs and therefore is a potentially inexpensive source for PUFAs as a starting material for the methods of the invention. The biocatalytic methods of the invention can process fish oil under mild conditions, thus avoiding harsh conditions utilized in some processes. Harsh conditions may promote unwanted isomerization, polymerization and oxidation of the PUFAs. In one aspect, the methods of the invention comprise lipase-catalyzed total hydrolysis of fish-oil or selective hydrolysis of PUFAs from fish oil to provide a mild alternative that would leave the high-value PUFAs intact. In one aspect, the methods further comprise hydrolysis of lipids by chemical or physical splitting of the fat.

[0234] In one aspect, the lipases and methods of the invention are used for the total hydrolysis of fish oil. Lipases can be screened for their ability to catalyze the total hydrolysis of fish oil under different conditions using. In alternative aspects, a single or multiple lipases are used to catalyze the total splitting of the fish oil. Several lipases of the invention may need to be used, owing to the presence of the PUFAs. In one aspect, a PUFA-specific lipase of the invention is combined with a general lipase to achieve the desired effect.

[0235] The methods and compositions (lipases) of the invention can be used to catalyze the partial or total hydrolysis of other oils, e.g. olive oils, that do not contain PUFAs.

[0236] The methods and compositions (lipases) of the invention can be used to catalyze the hydrolysis of PUFA glycerol esters. These methods can be used to make feed additives. In one aspect, lipases of the invention catalyze the release of PUFAs from simple esters and fish oil. Standard assays and analytical methods can be utilized. The methods and compositions (lipases) of the invention can be used to selectively hydrolyze saturated esters over unsaturated esters into acids or alcohols. The methods and compositions (lipases) of the invention can be used to treat latexes for a variety of purposes, e.g., to treat latexes used in hair fixative compositions to remove unpleasant odors. The methods and compositions (lipases) of the invention can be used in the treatment of a lipase deficiency in an animal, e.g., a mammal, such as a human. The methods and compositions (lipases) of the invention can be used to prepare lubricants, such as hydraulic oils. The methods and compositions (lipases) of the invention can be used in making and using detergents. The methods and compositions (lipases) of the invention can be used in processes for the chemical finishing of fabrics, fibers or yarns. In one aspect, the methods and compositions (lipases) of the invention can be used for obtaining flame retardancy in a fabric using, e.g., a halogen-substituted carboxylic acid or an ester thereof, i.e. a fluorinated, chlorinated or bromated carboxylic acid or an ester thereof.

### Monooxygenases

[0237] In one aspect, the invention provides monooxygenases, polynucleotides encoding them, and methods of making and using these polynucleotides and polypeptides. In one aspect, the invention is directed to polypeptides, e.g., enzymes, having a monooxygenase activity, including thermostable and thermotolerant monooxygenase activity, and polynucleotides encoding these enzymes, and making and using these polynucleotides and polypeptides.

[0238] In one aspect, the monooxygenases of the invention have commercial utility as biocatalysts for use in the synthesis of aromatic and aliphatic esters and their derivatives, such as acids and alcohols. In one aspect, the monooxygenases of the invention are used in the catalysis of sulfoxidation reactions. In one aspect, the invention provides Baeyer-Villiger monooxygenases, polynucleotides encoding the Baeyer-Villiger monooxygenases, and methods of using these Baeyer-Villiger monooxygenases and polynucleotides. In one aspect, the invention provides methods of producing chiral synthetic intermediates using Baeyer-Villiger monooxygenases.

[0239] In one aspect, the monooxygenase activity comprises catalysis of sulfoxidation reactions. The monooxygenase activity can comprise an asymmetric sulfoxidation reaction. The monooxygenase activity can be enantiospecific. In one aspect, it can generate a substantially chiral product.

[0240] In one aspect, the monooxygenase activity comprises generation of an ester or a lactone having at least one of the following structures:

[chemical structure]

[0241] wherein: R₁, R₂, R₃ and R₄ are each independently selected from —H, substituted or unsubstituted alkyl, alkenyl, alkynyl, aryl, heteroaryl, cycloalkyl, and heterocyclic; wherein the substituted groups are substituted with one or more of lower alkyl, hydroxy, alkoxy, mercapto, cycloalkyl, heterocyclic, aryl, heteroaryl, aryloxy, and halogen, or two or more of R₁, R₂, R₃ and R₄ may together form cyclic moieties, and, R′ is selected from substituted or unsubstituted alkylene, alkenylene, alkynylene, arylene, heteroarylene, cycloalkylene, and heterocyclic; wherein the substitutions are substituted with one or more of lower alkyl, hydroxy, alkoxy, mercapto, cycloalkyl, heterocyclic, aryl, heteroaryl, aryloxy, and halogen.

[0242] In one aspect, the monooxygenase activity comprises oxidation of a cycloalkanone to produce a chiral lactone. The cycloalkanone can comprise a cyclobutanone, a cyclopentanone, a cyclohexanone, a 2-methylcyclopentanone, a 2-methylcyclohexanone, a cyclohex-2-ene-1-one, a 2-(cyclohex-1-enyl)cyclohexanone, a 1,2-cyclohexanedione, a 1,3-cyclohexanedione or a 1,4-cyclohexanedione.

[0243] In one aspect, the monooxygenase activity comprises a chlorophenol 4-monooxygenase activity or a xylene monooxygenase activity.

[0244] The invention provides a pharmaceutical composition comprising a polypeptide of the invention.

[0245] The invention provides a method for converting a ketone to its corresponding ester comprising contacting the ketone with a polypeptide of the invention under conditions wherein the polypeptide catalyzes the conversion of the ketone to its corresponding ester. In one aspect, the polypeptide has an monooxygenase activity that is enantiospecific to generate a substantially chiral product. In one aspect, the ester is an aromatic or an aliphatic ester.

[0246] The invention provides a method for converting a cycloaliphatic ketone to its corresponding lactone comprising contacting the cycloaliphatic ketone with a polypeptide of the invention under conditions wherein the polypeptide catalyzes the conversion of the cycloaliphatic ketone to its corresponding lactone. In one aspect, the polypeptide has an monooxygenase activity that is enantiospecific to generate a substantially chiral product. In one aspect, the ester or lactone has at least one of the following structures:

[chemical structure]

[0247] wherein: R₁, R₂, R₃ and R₄ are each independently selected from —H, substituted or unsubstituted alkyl, alkenyl, alkynyl, aryl, heteroaryl, cycloalkyl, and heterocyclic; wherein the substituted groups are substituted with one or more of lower alkyl, hydroxy, alkoxy, mercapto, cycloalkyl, heterocyclic, aryl, heteroaryl, aryloxy, and halogen, or two or more of R₁, R₂, R₃ and R₄ may together form cyclic moieties, and, R′ is selected from substituted or unsubstituted alkylene, alkenylene, alkynylene, arylene, heteroarylene, cycloalkylene, and heterocyclic; wherein the substitutions are substituted with one or more of lower alkyl, hydroxy, alkoxy, mercapto, cycloalkyl, heterocyclic, aryl, heteroaryl, aryloxy, and halogen.

### Nitroreductases

[0248] In one aspect, the invention provides nitroreductases, polynucleotides encoding them, and methods of making and using these polynucleotides and polypeptides. In one aspect, the invention is directed to polypeptides, e.g., enzymes, having a nitroreductase activity, including thermostable and thermotolerant nitroreductase activity, and polynucleotides encoding these enzymes, and making and using these polynucleotides and polypeptides.

[0249] Nitroreductases can catalyze the six-electron reduction of nitro compounds to the corresponding amines. Amines have a variety of applications as synthons and advanced pharmaceutical intermediates. There are markets for both aromatic amines and chiral aliphatic amines.

[0250] Nitroreductases of the invention fall in to two main classes. These are the oxygen-sensitive and oxygen-insensitive nitroreductases. The oxygen-sensitive enzyme can catalyze nitroreduction only under anaerobic conditions. A nitro anion radical is formed by a one-electron transfer and is immediately reoxidized in the presence of oxygen thus generating a futile cycle whereby reducing equivalents are consumed without nitroreduction. On the other hand the oxygen-insensitive nitroreductases catalyze nitroreduction in a series of two electron transfers, first via the nitroso and then the hydroxylamine intermediates before forming the amine.

### Nitrilases

[0251] In one aspect, the invention provides nitrilases, polynucleotides encoding them, and methods of making and using these polynucleotides and polypeptides. In one aspect, the invention is directed to polypeptides, e.g., enzymes, having a nitrilase activity, including thermostable and thermotolerant nitrilase activity, and polynucleotides encoding these enzymes, and making and using these polynucleotides and polypeptides.

[0252] Nitrilases of the invention can be used for hydrolyzing a nitrile to a carboxylic acid. In one embodiment, the conditions of the reaction comprise aqueous conditions. In another embodiment, the conditions comprise a pH of about 8.0 and/or a temperature from about 37° C. to about 45° C. Nitrilases of the invention can also be used for hydrolyzing a cyanohydrin moiety or an aminonitrile moiety of a molecule. Alternatively, the nitrilases of the invention can be used for making a chiral α-hydroxy acid molecule, a chiral amino acid molecule, a chiral β-hydroxy acid molecule, or a chiral gamma-hydroxy acid molecule. In one embodiment, the chiral molecule is an (R)-enantiomer. In another embodiment, the chiral molecule is an (S)-enantiomer. In one embodiment of the invention, one particular enzyme can have R-specificity for one particular substrate and the same enzyme can have S-specificity for a different particular substrate.

[0253] In one aspect, nitrilases of the invention can be used for making a composition or an intermediate thereof, wherein the nitrilase of the invention hydrolyzes a cyanohydrin or a aminonitrile moiety. In one embodiment, the composition or intermediate thereof comprises (S)-2-amino-4-phenyl butanoic acid. In a further embodiment, the composition or intermediate thereof comprises an L-amino acid. In a further embodiment, the composition comprises a food additive or a pharmaceutical drug.

[0254] In another aspect, nitrilases of the invention can be used for making an (R)-ethyl 4-cyano-3-hydroxybutyric acid, wherein the nitrilase of the invention acts upon a hydroxyglutaryl nitrile and selectively produces an (R)-enantiomer, so as to make (R)-ethyl 4-cyano-3-hydroxybutyric acid. In one embodiment, the ee is at least 95% or at least 99%. In another embodiment, the hydroxyglutaryl nitrile comprises 1,3-di-cyano-2-hydroxy-propane or 3-hydroxyglutaronitrile.

[0255] In another aspect, nitrilases of the invention can be used for making an (S)-ethyl 4-cyano-3-hydroxybutyric acid, wherein the nitrilase of the invention acts upon a hydroxyglutaryl nitrile and selectively produces an (S)-enantiomer, so as to make (S)-ethyl 4-cyano-3-hydroxybutyric acid.

[0256] In another aspect, the nitrilases of the invention can be used for making a (R)-mandelic acid, wherein the nitrilase of the invention acts upon a mandelonitrile to produce a (R)-mandelic acid. In one embodiment, the (R)-mandelic acid comprises (R)-2-chloromandelic acid. In another embodiment, the (R)-mandelic acid comprises an aromatic ring substitution in the ortho-, meta-, or para-positions; a 1-naphthyl derivative of (R)-mandelic acid, a pyridyl derivative of (R)-mandelic acid or a thienyl derivative of (R)-mandelic acid or a combination thereof.

[0257] In another aspect, the nitrilases of the invention can be used for making a (S)-mandelic acid, wherein the nitrilase of the invention acts upon a mandelonitrile to produce a (S)-mandelic acid. In one embodiment, the (S)-mandelic acid comprises (S)-methyl benzyl cyanide and the mandelonitrile comprises (S)-methoxy-benzyl cyanide. In one embodiment, the (S)-mandelic acid comprises an aromatic ring substitution in the ortho-, meta-, or para-positions; a 1-naphthyl derivative of (S)-mandelic acid, a pyridyl derivative of (S)-mandelic acid or a thienyl derivative of (S)-mandelic acid or a combination thereof.

[0258] In yet another aspect, the nitrilases of the invention can be used for making a (S)-phenyl lactic acid derivative or a (R)-phenyllacetic acid derivative, wherein the nitrilase of the invention acts upon a phenyllactonitrile and selectively produces an (S)-enantiomer or an (R)-enantiomer, thereby producing an (S)-phenyl lactic acid derivative or an (R)-phenyl lactic acid derivative.

### P450 Enzymes

[0259] In one aspect, the invention provides P450 enzymes, polynucleotides encoding them, and methods of making and using these polynucleotides and polypeptides. In one aspect, the invention is directed to polypeptides, e.g., enzymes, having a P450 enzymatic activity, including thermostable and thermotolerant P450 enzymatic activity, and polynucleotides encoding these enzymes, and making and using these polynucleotides and polypeptides.

[0260] P450s are oxidative enzymes that are widespread in nature and polypeptides of the invention having P450 activity can be used in processes such as detoxifying xenobiotics, catabolism of unusual carbon sources and biosynthesis of secondary metabolites (e.g., detoxification of toxic composition, e.g., pesticides, poisons, chemical warfare agents and the like). These oxygenases activate molecular oxygen using an iron-heme center and utilize a redox electron shuttle to support the epoxidation reaction.

[0261] In one aspect, the P450 activity comprises a monooxygenation reaction. In one aspect, the P450 activity comprises catalysis of incorporation of oxygen into a substrate. In one aspect, the P450 activity can further comprise hydroxylation of aliphatic or aromatic carbons. In another aspect, the P450 activity can comprise epoxidation. Alternatively, the P450 activity can comprise N-, O-, or S-dealkylation. In one aspect, the P450 activity can comprise dehalogenation. In another aspect the P450 activity can comprise oxidative deamination. Alternatively, the P450 activity can comprise N-oxidation or N-hydroxylation. In one aspect, the P450 activity can comprise sulphoxide formation.

[0262] In one aspect, the epoxidase activity further comprises an alkene substrate. The epoxidase activity can further comprise production of a chiral product. In one aspect, the epoxidase activity can be enantioselective.

### Pectate Lyases

[0263] In one aspect, the invention provides pectate lyases, e.g. pectinases, polynucleotides encoding them, and methods of making and using these polynucleotides and polypeptides. In one aspect, the invention is directed to polypeptides, e.g., enzymes, having a pectate lyase, e.g. a pectinase activity, including thermostable and thermotolerant pectate lyase, e.g. a pectinase activity, and polynucleotides encoding these enzymes, and making and using these polynucleotides and polypeptides.

[0264] The pectate lyases, e.g. pectinases, of the invention can be used to catalyze the beta-elimination or hydrolysis of pectin and/or polygalacturonic acid, such as 1,4-linked alpha-D-galacturonic acid. They can be used in variety of industrial applications, e.g., to treat plant cell walls, such as those in cotton or other natural fibers. In another exemplary industrial application, the polypeptides of the invention can be used in textile scouring.

[0265] In one aspect, pectate lyase activity comprises catalysis of beta-elimination (trans-elimination) or hydrolysis of pectin or polygalacturonic acid (pectate). The pectate lyase activity can comprise the breakup or dissolution of plant cell walls. The pectate lyase activity can comprise beta-elimination (trans-elimination) or hydrolysis of 1,4-linked alpha-D-galacturonic acid. The pectate lyase activity can comprise catalysis of beta-elimination (trans-elimination) or hydrolysis of methyl-esterified galacturonic acid. The pectate lyase activity can be exo-acting or endo-acting. In one aspect, the pectate lyase activity is endo-acting and acts at random sites within a polymer chain to give a mixture of oligomers. In one aspect, the pectate lyase activity is exo-acting and acts from one end of a polymer chain and produces monomers or dimers. The pectate lyase activity can catalyze the random cleavage of alpha-1,4-glycosidic linkages in pectic acid (polygalacturonic acid) by trans-elimination or hydrolysis. The pectate lyase activity can comprise activity the same or similar to pectate lyase (EC 4.2.2.2), poly(1,4-alpha-D-galacturonide) lyase, polygalacturonate lyase (EC 4.2.2.2), pectin lyase (EC 4.2.2.10), polygalacturonase (EC 3.2.1.15), exo-polygalacturonase (EC 3.2.1.67), exo-polygalacturonate lyase (EC 4.2.2.9) or exo-poly-alpha-galacturonosidase (EC 3.2.1.82). The pectate lyase activity can comprise beta-elimination (trans-elimination) or hydrolysis of galactan to galactose or galactooligomers. The pectate lyase activity can comprise beta-elimination (trans-elimination) or hydrolysis of a plant fiber. The plant fiber can comprise cotton fiber, hemp fiber or flax fiber.

[0266] The pectate lyases, e.g. pectinases, of the invention can be used for hydrolyzing, breaking up or disrupting a pectin- or pectate (polygalacturonic acid)-comprising composition, for liquefying or removing a pectin or pectate (polygalacturonic acid) from a composition. Alternatively, the pectate lyases, e.g. pectinases, of the invention can be used in detergent compositions. In one aspect, the pectate lyase is a nonsurface-active pectate lyase or a surface-active pectate lyase. The pectate lyase can be formulated in a non-aqueous liquid composition, a cast solid, a granular form, a particulate form, a compressed tablet, a gel form, a paste or a slurry form.

[0267] In one aspect, the pectate lyases, e.g. pectinases, of the invention can be used for washing an object. In another aspect, textiles or fabrics comprise a polypeptide of the invention, or a polypeptide encoded by a nucleic acid of the invention, wherein the polypeptide has pectate lyase, e.g. pectinase activity. Additionally, the pectate lyases, e.g. pectinases, of the invention can be used for fiber, thread, textile or fabric scouring. In one aspect, the pectate lyase is an alkaline active and thermostable pectate lyase. The desizing and scouring treatments can be combined in a single bath. The method can further comprise addition of an alkaline and thermostable amylase. The desizing or scouring treatments can comprise conditions of between about pH 8.5 to pH 10.0 and temperatures of at about 40° C. The method can further comprise addition of a bleaching step. The desizing, scouring and bleaching treatments can be done simultaneously or sequentially in a single-bath container. The bleaching treatment can comprise hydrogen peroxide or at least one peroxy compound that can generate hydrogen peroxide when dissolved in water, or combinations thereof, and at least one bleach activator. The fiber, thread, textile or fabric can comprise a cellulosic material. The cellulosic material can comprise a crude fiber, a yarn, a woven or knit textile, a cotton, a linen, a flax, a ramie, a rayon, a hemp, a jute or a blend of natural or synthetic fibers.

[0268] Alternatively, the pectate lyases, e.g. pectinases, of the invention can be used in feeds or foods. For example, the pectate lyases, e.g. pectinases, of the invention can be used to improve the extraction of oil from an oil-rich plant material. In one aspect, the oil-rich plant material comprises an oil-rich seed. The oil can be a soybean oil, an olive oil, a rapeseed (canola) oil or a sunflower oil.

[0269] In another aspect, the pectate lyases, e.g. pectinases, of the invention can be used for preparing a fruit or vegetable juice, syrup, puree or extract. In yet another aspect, the pectate lyases, e.g. pectinases, of the invention can used for treating a paper or a paper or wood pulp. Alternatively, the invention provides papers or paper products or paper pulps comprising a pectate lyase of the invention, or a polypeptide encoded by a nucleic acid of the invention.

[0270] In yet another aspect, the invention provides pharmaceutical compositions comprising a polypeptide of the invention, or a polypeptide encoded by a nucleic acid of the invention, wherein the polypeptide has pectate lyase, e.g. pectinase activity. The pharmaceutical composition can act as a digestive aid.

[0271] Alternatively, the invention provides oral care products comprising a polypeptide of the invention, or a polypeptide encoded by a nucleic acid of the invention, wherein the polypeptide has pectate lyase, e.g. pectinase activity. The oral care product can comprise a toothpaste, a dental cream, a gel or a tooth powder, an odontic, a mouth wash, a pre- or post brushing rinse formulation, a chewing gum, a lozenge or a candy.

### Phosphatases

[0272] In one aspect, the invention provides phosphatases, polynucleotides encoding them, and methods of making and using these polynucleotides and polypeptides. In one aspect, the invention is directed to polypeptides, e.g., enzymes, having a phosphatase activity, including thermostable and thermotolerant phosphatase activity, and polynucleotides encoding these enzymes, and making and using these polynucleotides and polypeptides.

[0273] Phosphatases are a group of enzymes that remove phosphate groups from organophosphate ester compounds. There are numerous phosphatases, including alkaline phosphatases, phosphodiesterases and phytases.

[0274] Alkaline phosphatases are widely distributed enzymes and are composed of a group of enzymes which hydrolyze organic phosphate ester bonds at alkaline pH.

[0275] Phosphodiesterases are capable of hydrolyzing nucleic acids by hydrolyzing the phosphodiester bridges of DNA and RNA. The classification of phosphodiesterases depends upon which side of the phosphodiester bridge is attacked. The 3′ enzymes specifically hydrolyze the ester linkage between the 3′ carbon and the phosphoric group whereas the 5′ enzymes hydrolyze the ester linkage between the phosphoric group and the 5′ carbon of the phosphodiester bridge. The best known of the class 3′ enzymes is a phosphodiesterase from the venom of the rattlesnake or from a rustle's viper, which hydrolyses all the 3′ bonds in either RNA or DNA liberating nearly all the nucleotide units as nucleotide 5′ phosphates. This enzyme requires a free 3′ hydroxyl group on the terminal nucleotide residue and proceeds stepwise from that end of the polynucleotide chain. This enzyme and all other nucleases which attack only at the ends of the polynucleotide chains are called exonucleases. The 5′ enzymes are represented by a phosphodiesterase from bovine spleen, also an exonuclease, which hydrolyses all the 5′ linkages of both DNA and RNA and thus liberates only nucleoside 3′ phosphates. It begins its attack at the end of the chain having a free 3′ hydroxyl group.

[0276] Phytase enzymes remove phosphate from phytic acid (inositol hexaphosphoric acid), a compound found in plants such as corn, wheat and rice. The enzyme has commercial use for the treatment of animal feed, making the inositol of the phytic acid available for animal nutrition. Phytases are used to improve the utilization of natural phosphorus in animal feed. Use of phytase as a feed additive enables the animal to metabolize a larger degree of its cereal feed's natural mineral content thereby reducing or altogether eliminating the need for synthetic phosphorus additives. More important than the reduced need for phosphorus additives is the corresponding reduction of phosphorus in pig and chicken waste. Many European countries severely limit the amount of manure that can be spread per acre due to concerns regarding phosphorus contamination of ground water.

[0277] Alkaline phosphatases hydrolyze monophosphate esters, releasing an organic phosphate and the cognate alcohol compound. It is non-specific with respect to the alcohol moiety and it is this feature which accounts for the many uses of this enzyme.

### Phospholipases

[0278] In one aspect, the invention provides phospholipases, polynucleotides encoding them, and methods of making and using these polynucleotides and polypeptides. In one aspect, the invention is directed to polypeptides, e.g., enzymes, having a phospholipase activity, including thermostable and thermotolerant phospholipase activity, and polynucleotides encoding these enzymes, and making and using these polynucleotides and polypeptides.

[0279] Phospholipases are enzymes that hydrolyze the ester bonds of phospholipids. Corresponding to their importance in the metabolism of phospholipids, these enzymes are widespread among prokaryotes and eukaryotes. The phospholipases affect the metabolism, construction and reorganization of biological membranes and are involved in signal cascades. Several types of phospholipases are known which differ in their specificity according to the position of the bond attacked in the phospholipid molecule. Phospholipase A1 (PLA1) removes the 1-position fatty acid to produce free fatty acid and 1-lyso-2-acylphospholipid. Phospholipase A2 (PLA2) removes the 2-position fatty acid to produce free fatty acid and 1-acyl-2-lysophospholipid. PLA1 and PLA2 enzymes can be intra- or extra-cellular, membrane-bound or soluble. Intracellular PLA2 is found in almost every mammalian cell. Phospholipase C(PLC) removes the phosphate moiety to produce 1,2 diacylglycerol and phospho base. Phospholipase D (PLD) produces 1,2-diacylglycerophosphate and base group. PLC and PLD are important in cell function and signaling. PLD had been the dominant phospholipase in biocatalysis. Patatins are another type of phospholipase, thought to work as a PLA.

[0280] The invention provides methods for cleaving a glycerolphosphate ester linkage comprising the following steps: (a) providing a polypeptide having a phospholipase activity, wherein the polypeptide comprises an amino acid sequence of the invention, or the polypeptide is encoded by a nucleic acid of the invention; (b) providing a composition comprising a glycerolphosphate ester linkage; and, (c) contacting the polypeptide of step (a) with the composition of step (b) under conditions wherein the polypeptide cleaves the glycerolphosphate ester linkage. In one aspect, the conditions comprise between about pH 5 to about 5.5, or, between about pH 4.5 to about 5.0. In one aspect, the conditions comprise a temperature of between about 40° C. and about 70° C. In one aspect, the composition comprises a vegetable oil. In one aspect, the composition comprises an oilseed phospholipid. In one aspect, the cleavage reaction can generate a water extractable phosphorylated base and a diglyceride.

[0281] Phospholipases of the invention can be used in oil degumming, wherein the phospholipase is used under conditions wherein the phospholipase can cleave ester linkages in an oil, thereby degumming the oil. In one aspect, the oil is a vegetable oil. In another aspect, the vegetable oil comprises oilseed. The vegetable oil can comprise palm oil, rapeseed oil, corn oil, soybean oil, canola oil, sesame oil, peanut oil or sunflower oil. In one aspect, the method further comprises addition of a phospholipase of the invention, another phospholipase, another enzyme, or a combination thereof.

[0282] In another aspect of the invention, phospholipases of the invention can be used for converting a non-hydratable phospholipid to a hydratable form or for caustic refining of a phospholipid-containing composition. In the latter use, the polypeptide of the invention can be added before caustic refining and the composition comprising the phospholipid can comprise a plant and the polypeptide can be expressed transgenically in the plant, the polypeptide having a phospholipase activity can be added during crushing of a seed or other plant part, or, the polypeptide having a phospholipase activity is added following crushing or prior to refining. The polypeptide can be added during caustic refining and varying levels of acid and caustic can be added depending on levels of phosphorous and levels of free fatty acids. The polypeptide can be added after caustic refining: in an intense mixer or retention mixer prior to separation; following a heating step; in a centrifuge; in a soapstock; in a washwater; or, during bleaching or deodorizing steps.

[0283] In yet another aspect, the phospholipases of the invention can be used for purification of a phytosterol or a triterpene. The phytosterol or a triterpene can comprise a plant sterol. The plant sterol can be derived from a vegetable oil. The vegetable oil can comprise a coconut oil, canola oil, cocoa butter oil, corn oil, cottonseed oil, linseed oil, olive oil, palm oil, peanut oil, oil derived from a rice bran, safflower oil, sesame oil, soybean oil or a sunflower oil. The method can comprise use of nonpolar solvents to quantitatively extract free phytosterols and phytosteryl fatty-acid esters. The phytosterol or a triterpene can comprise a β-sitosterol, a campesterol, a stigmasterol, a stigmastanol, a β-sitostanol, a sitostanol, a desmosterol, a chalinasterol, a poriferasterol, a clionasterol or a brassicasterol.

[0284] In one embodiment, the phospholipases of the invention can be used for refining a crude oil. The polypeptide can have a phospholipase activity is in a water solution that is added to the composition. The water level can be between about 0.5 to 5%. The process time can be less than about 2 hours, less than about 60 minutes, less than about 30 minutes, less than 15 minutes, or less than 5 minutes. The hydrolysis conditions can comprise a temperature of between about 25° C.-70° C. The hydrolysis conditions can comprise use of caustics. The hydrolysis conditions can comprise a pH of between about pH 3 and pH 10, between about pH 4 and pH 9, or between about pH 5 and pH 8. The hydrolysis conditions can comprise addition of emulsifiers and/or mixing after the contacting of step (c). The methods can comprise addition of an emulsion-breaker and/or heat to promote separation of an aqueous phase. The methods can comprise degumming before the contacting step to collect lecithin by centrifugation and then adding a PLC, a PLC and/or a PLA to remove non-hydratable phospholipids. The methods can comprise water degumming of crude oil to less than 10 ppm for edible oils and subsequent physical refining to less than about 50 ppm for biodiesel oils. The methods can comprise addition of acid to promote hydration of non-hydratable phospholipids.

### Phytases

[0285] In one aspect, the invention provides phytases, polynucleotides encoding them, and methods of making and using these polynucleotides and polypeptides. In one aspect, the invention is directed to polypeptides, e.g., enzymes, having a phytase activity, including thermostable and thermotolerant phytase activity, and polynucleotides encoding these enzymes, and making and using these polynucleotides and polypeptides.

[0286] Conversion of phytate to inositol and inorganic phosphorous can be catalyzed by phytase enzymes. Phytases such as phytase #EC 3.1.3.8 are capable of catalyzing the hydrolysis of myo-inositol hexaphosphate to D-myo-inositol 1,2,4,5,6-pentaphosphate and orthophosphate. Other phytases hydrolyze inositol pentaphosphate to tetra-, tri-, and lower phosphates. Acid phosphatases are enzymes that catalytically hydrolyze a wide variety of phosphate esters. For example, #EC 3.1.3.2 enzymes catalyze the hydrolysis of orthophosphoric monoesters to orthophosphate products.

[0287] Phytases of the invention can be used in producing phytase as a feed additive, e.g. for monogastric animals, fish, poultry, ruminants and other non-ruminants. Phytases of the invention can also be used for producing animal feed from certain industrial processes, e.g., wheat and corn waste products. In one aspect, the wet milling process of corn produces glutens sold as animal feeds. The addition of phytase improves the nutritional value of the feed product.

[0288] Phytases of the invention may also be used in dietary aids or in pharmaceutical compositions, for reducing pollution and increasing nutrient availability in an environment or environmental sample by degrading environmental phytic acid, for liberating minerals from phytates in plant materials either in vitro, i.e., in feed treatment processes, or in vivo, i.e., by administering the enzymes to animals.

### Polymerases

[0289] In one aspect, the invention provides polymerases, polynucleotides encoding them, and methods of making and using these polynucleotides and polypeptides. In one aspect, the invention is directed to polypeptides, e.g., enzymes, having a polymerase activity, including thermostable and thermotolerant polymerase activity, and polynucleotides encoding these enzymes, and making and using these polynucleotides and polypeptides.

[0290] The polymerase enzymes of the invention can have different polymerase activities at various high temperatures. In one aspect, the polymerase activity comprises addition of deoxynucleotides at the 3′ hydroxyl end of a polynucleotide. The invention also provides kits, e.g., diagnostic kits, and methods for performing various amplification reactions, e.g., polymerase chain reactions, transcription amplifications, ligase chain reactions, self-sustained sequence replication or Q Beta replicase amplifications.

[0291] In one aspect, the polymerase activity comprises addition of nucleotides at the 3′ hydroxyl end of a nucleic acid. The polymerase activity can comprise a 5′→3′ polymerase activity, a 3′→5′ exonuclease activity or a 5′→3′ exonuclease activity or all or a combination thereof. In one aspect, the polymerase activity comprises only a 5′→3′ polymerase activity, but not a 3′→5′ exonuclease activity or a 5′→3′ exonuclease activity. In another aspect, the polymerase activity can comprise a 5′→3′ polymerase activity and a 3′→5′ exonuclease activity, but not a 5′→3′ exonuclease activity. Alternatively, the polymerase activity can comprise a 5′→3′ polymerase activity and a 5′→3′ exonuclease activity, but not a 3′→5′ exonuclease activity. The polymerase activity can comprise addition of dUTP or dITP. The polymerase activity can comprise addition of a modified or a non-natural nucleotide to a polynucleotide, such as an analog of guanine, cytosine, thymine, adenine or uracil, e.g., a 2-aminopurine, an inosine or a 5-methylcytosine.

[0292] In one aspect, the polymerase activity can comprise strand displacement properties. In one aspect, the polymerase activity comprises reverse transcriptase activity.

### Proteases

[0293] In one aspect, the invention provides proteases, polynucleotides encoding them, and methods of making and using these polynucleotides and polypeptides. In one aspect, the invention is directed to polypeptides, e.g., enzymes, having a protease activity, including thermostable and thermotolerant protease activity, and polynucleotides encoding these enzymes, and making and using these polynucleotides and polypeptides.

[0294] Proteases of the invention can be carbonyl hydrolases which act to cleave peptide bonds of proteins or peptides. Proteolytic enzymes are ubiquitous in occurrence, found in all living organisms, and are essential for cell growth and differentiation. The extracellular proteases are of commercial value and find multiple applications in various industrial sectors. Industrial applications of proteases include food processing, brewing, alcohol production, peptide synthesis, enantioselectivity, hide preparation in the leather industry, waste management and animal degradation, silver recovery in the photographic industry, medical treatment, silk degumming, biofilm degradation, biomass conversion to a biofuel (e.g., bioethanol, biopropanol, biobutanol, biopropanol, biomethanol, biodiesel), biodefense, antimicrobial agents and disinfectants, personal care and cosmetics, biotech reagents and in increasing starch yield from corn wet milling. Additionally, proteases are important components of laundry detergents and other products. Within biological research, proteases are used in purification processes to degrade unwanted proteins. It is often desirable to employ proteases of low specificity or mixtures of more specific proteases to obtain the necessary degree of degradation.

[0295] Proteases are classified according to their catalytic mechanisms. The International Union of Biochemistry and Molecular Biology (IUBMB) recognizes four mechanistic classes: (1) the serine proteases; (2) the cysteine proteases; (3) the aspartic proteases; and (4) the metalloproteases. In addition, the IUBMB recognizes a class of endopeptidases (oligopeptidases) of unknown catalytic mechanism. The serine proteases have alkaline pH optima, the metalloproteases are optimally active around neutrality, and the cysteine and aspartic enzymes have acidic pH optima. Serine proteases class comprises two distinct families: the chymotrypsin family, which includes the mammalian enzymes such as chymotrypsin, trypsin, elastase, or kallikrein, and the subtilisin family, which include the bacterial enzymes such as subtilisin. Serine proteases are used for a variety of industrial purposes, such as laundry detergents to aid in the removal of proteinaceous stains. In the food processing industry, serine proteases are used to produce protein-rich concentrates from fish and livestock, and in the preparation of dairy products.

[0296] The proteases of the invention can be used in a variety of diagnostic, therapeutic, and industrial contexts. The proteases of the invention can be used as, e.g., an additive for a detergent, for processing foods and for chemical synthesis utilizing a reverse reaction. Additionally, the proteases of the invention can be used in food processing, brewing, bath additives, alcohol production, peptide synthesis, enantioselectivity, hide preparation in the leather industry, waste management and animal degradation, silver recovery in the photographic industry, medical treatment, silk degumming, biofilm degradation, biomass conversion to biofuel (e.g., bioethanol, biopropanol, biobutanol, biopropanol, biomethanol, biodiesel), biodefense, antimicrobial agents and disinfectants, personal care and cosmetics, biotech reagents, in increasing starch yield from corn wet milling and pharmaceuticals such as digestive aids and anti-inflammatory (anti-phlogistic) agents.

### Xylanases

[0297] In one aspect, the invention provides xylanases, polynucleotides encoding them, and methods of making and using these polynucleotides and polypeptides. In one aspect, the invention is directed to polypeptides, e.g., enzymes, having a xylanase activity, including thermostable and thermotolerant xylanase activity, and polynucleotides encoding these enzymes, and making and using these polynucleotides and polypeptides.

[0298] Xylanases (e.g., endo-1,4-beta-xylanase, EC 3.2.1.8) of the invention can hydrolyze internal β-1,4-xylosidic linkages in xylan to produce smaller molecular weight xylose and xylo-oligomers. Xylans are polysaccharides formed from 1,4-β-glycoside-linked D-xylopyranoses. Xylanases of the invention are of considerable commercial value, being used in the food industry, for baking and fruit and vegetable processing, breakdown of agricultural waste, in the manufacture of animal feed and in pulp and paper production.

[0299] Arabinoxylanase are major non-starch polysaccharides of cereals representing 2.5-7.1% w/w depending on variety and growth conditions. The physicochemical properties of this polysaccharide are such that it gives rise to viscous solutions or even gels under oxidative conditions. In addition, arabinoxylans have high water-binding capacity and may have a role in protein foam stability. All of these characteristics present problems for several industries including brewing, baking, animal nutrition and paper manufacturing. In brewing applications, the presence of xylan results in wort filterability and haze formation issues. In baking applications (especially for cookies and crackers), these arabinoxylans create sticky doughs that are difficult to machine and reduce biscuit size. In addition, this carbohydrate is implicated in rapid rehydration of the baked product resulting in loss of crispiness and reduced shelf-life. For monogastric animal feed applications with cereal diets, arabinoxylan is a major contributing factor to viscosity of gut contents and thereby adversely affects the digestibility of the feed and animal growth rate. For ruminant animals, these polysaccharides represent substantial components of fiber intake and more complete digestion of arabinoxylans would facilitate higher feed conversion efficiencies.

[0300] Xylanases are currently used as additives (dough conditioners) in dough processing for the hydrolysis of water soluble arabinoxylan. In baking applications (especially for cookies and crackers), arabinoxylan creates sticky doughs that are difficult to machine and reduce biscuit size. In addition, this carbohydrate is implicated in rapid rehydration of the baked product resulting in loss of crispiness and reduced shelf-life.

[0301] The enhancement of xylan digestion in animal feed may improve the availability and digestibility of valuable carbohydrate and protein feed nutrients. For monogastric animal feed applications with cereal diets, arabinoxylan is a major contributing factor to viscosity of gut contents and thereby adversely affects the digestibility of the feed and animal growth rate. For ruminant animals, these polysaccharides represent substantial components of fiber intake and more complete digestion would facilitate higher feed conversion efficiencies. It is desirable for animal feed xylanases to be active in the animal stomach. This requires a feed enzyme to have high activity at 37° C. and at low pH for monogastrics (pH 2-4) and near neutral pH for ruminants (pH 6.5-7). The enzyme should also possess resistance to animal gut xylanases and stability at the higher temperatures involved in feed pelleting. As such, there is a need in the art for xylanase feed additives for monogastric feed with high specific activity, activity at 35-40° C. and pH 2-4, half life greater than 30 minutes in SGF and a half-life >5 minutes at 85° C. in formulated state. For ruminant feed, there is a need for xylanase feed additives that have a high specific activity, activity at 35-40° C. and pH 6.5-7.0, half life greater than 30 minutes in SRF and stability as a concentrated dry powder.

[0302] In one aspect, the xylanases of the invention are also used in improving the quality and quantity of milk protein production in lactating cows, increasing the amount of soluble saccharides in the stomach and small intestine of pigs, improving late egg production efficiency and egg yields in hens. Additionally, xylanases of the inventions can be used in biobleaching and treatment of chemical pulps, biobleaching and treatment of wood or paper pulps, in reducing lignin in wood and modifying wood, as feed additives and/or supplements or in manufacturing cellulose solutions. Detergent compositions comprising xylanases of the invention are used for fruit, vegetables and/or mud and clay compounds.

[0303] In another aspect, xylanases of the invention can be used in compositions for the treatments and/or prophylaxis of coccidiosis. In yet another aspect, xylanases of the invention can be used in the production of water soluble dietary fiber, in improving the filterability, separation and production of starch, the beverage industry in improving filterability of wort or beer, in reducing viscosity of plant material, or in increasing viscosity or gel strength of food products such as jam, marmalade, jelly, juice, paste, soup, salsa, etc. Xylanases of the invention may also be used in hydrolysis of hemicellulose for which it is selective, particularly in the presence of cellulose. In addition, xylanases of the invention can also be used in the production of bioethanol, biopropanol, biobutanol, biopropanol, biomethanol, biodiesel, in transformation of a microbe that produces ethanol, methanol, butanol, propanol, etc, in production of oenological tannins and enzymatic composition, in stimulating the natural defenses of plants, in production of sugars from hemicellulose substrates, in the cleaning of fruit, vegetables, mud or clay containing soils, in cleaning beer filtration membranes, and in killing or inhibiting microbial cells.

[0304] Tables 1 and 4 detail exemplary activities of polypeptides of the invention (see also Table 3); noting that each polypeptide of the invention can have more than one specific enzymatic activity. The activities/functions of exemplary polypeptides of the invention were determined by sequence comparison (BLAST) analysis with public sequence databases, such as the NR database available through GenBank and the Geneseq database available from Thomson Scientific, as summarized in Table 1 and Table 4. Table 1 and Table 4 describe the source organism of the closest hit polypeptide (see “Organism” column); the GenBank accession number of the top BLAST hit for DNA and protein (see “NR or Geneseq Protein Accession Code”), the percent sequence identity between the sequence of the invention and the top BLAST hit (see “% Id” column), and other descriptions for that particular exemplary polynucleotide/polypeptide entry and the BLAST analysis. The EC (Enzyme Commission) Number, or enzyme nomenclature, is based upon the recommendations of the Nomenclature Committee of the International Union of Biochemistry and Molecular Biology (IUBMB); see also Table 3, below.

[0305] For example, as an aid in reading Table 1 and Table 4, the polypeptide SEQ ID NO:16,334 (and active fragments thereof), encoded, e.g., by SEQ ID NO:16,333, has at least a transaminase activity (including, in one aspect, a (2-aminoethyl)phosphonate-pyruvate transaminase activity), and its activity was determined by a closest BLAST hit from a sequence initially isolated from Clostridium tetani strain E88; NR or Geneseq Protein Accession Code 28203795; and SEQ ID NO:16,334/16,333 have at least about 58% sequence identity to this closest hit.

[0306] Table 1 and Table 4 list exemplary enzymatic activities of polypeptides of the invention, as can be determined by sequence identity (e.g., homology); and in one embodiment a sequence of the invention comprises an enzyme having at least 50%, 51%, 52%, 53%, 54%, 55%, 56%, 57%, 58%, 59%, 60%, 61%, 62%, 63%, 64%, 65%, 66%, 67%, 68%, 69%, 70%, 71%, 72%, 73%, 74%, 75%, 76%, 77%, 78%, 79%, 80%, 81%, 82%, 83%, 84%, 85%, 86%, 87%, 88%, 89%, 90%, 91%, 92%, 93%, 94%, 95%, 96%, 97%, 98%, 99%, or more sequence identity (homology) to a polypeptide encoded by an exemplary nucleic acid sequence of the invention, including all odd numbered SEQ ID NO:1 to SEQ ID NO:108,699, or an exemplary polypeptide of the invention, including all even numbered SEQ ID NO:2 to SEQ ID NO:108,699, and with an exemplary function as listed in Table 1 and Table 4.

[0307] A polypeptide or peptide of the invention can have at least one activity as set forth in Table 1 and Table 4 or as listed in Table 3, below:

TABLE 3
EC (Enzyme Commission) Numbers with the corresponding mode
of action for each enzyme class, subclass and sub-subclass

| | |
|---|---|
| 1.—.—.— | Oxidoreductases. |
| 1.1.—.— | Acting on the CH—OH group of donors. |
| 1.1.1.— | With NAD(+) or NADP(+) as acceptor. |
| 1.1.2.— | With a cytochrome as acceptor. |
| 1.1.3.— | With oxygen as acceptor. |
| 1.1.4.— | With a disulfide as acceptor. |
| 1.1.5.— | With a quinone or similar compound as |
| | acceptor. |
| 1.1.99.— | With other acceptors. |
| 1.2.—.— | Acting on the aldehyde or oxo group of |
| | donors. |
| 1.2.1.— | With NAD(+) or NADP(+) as acceptor. |
| 1.2.2.— | With a cytochrome as acceptor. |
| 1.2.3.— | With oxygen as acceptor. |
| 1.2.4.— | With a disulfide as acceptor. |
| 1.2.7.— | With an iron-sulfur protein as acceptor. |
| 1.2.99.— | With other acceptors. |
| 1.3.—.— | Acting on the CH—CH group of donors. |
| 1.3.1.— | With NAD(+) or NADP(+) as acceptor. |
| 1.3.2.— | With a cytochrome as acceptor. |
| 1.3.3.— | With oxygen as acceptor. |
| 1.3.5.— | With a quinone or related compound as |
| | acceptor. |
| 1.3.7.— | With an iron-sulfur protein as acceptor. |
| 1.3.99.— | With other acceptors. |
| 1.4.—.— | Acting on the CH—NH(2) group of donors. |
| 1.4.1.— | With NAD(+) or NADP(+) as acceptor. |
| 1.4.2.— | With a cytochrome as acceptor. |
| 1.4.3.— | With oxygen as acceptor. |
| 1.4.4.— | With a disulfide as acceptor. |
| 1.4.7.— | With an iron-sulfur protein as acceptor. |
| 1.4.99.— | With other acceptors. |
| 1.5.—.— | Acting on the CH—NH group of donors. |
| 1.5.1.— | With NAD(+) or NADP(+) as acceptor. |
| 1.5.3.— | With oxygen as acceptor. |
| 1.5.4.— | With a disulfide as acceptor. |
| 1.5.5.— | With a quinone or similar compound as |
| | acceptor. |
| 1.5.8.— | With a flavin as acceptor. |
| 1.5.99.— | With other acceptors. |
| 1.6.—.— | Acting on NADH or NADPH. |
| 1.6.1.— | With NAD(+) or NADP(+) as acceptor. |
| 1.6.2.— | With a heme protein as acceptor. |
| 1.6.3.— | With a oxygen as acceptor. |
| 1.6.4.— | With a disulfide as acceptor. |
| 1.6.5.— | With a quinone or similar compound as |
| | acceptor. |
| 1.6.6.— | With a nitrogenous group as acceptor. |
| 1.6.8.— | With a flavin as acceptor. |
| 1.6.99.— | With other acceptors. |
| 1.7.—.— | Acting on other nitrogenous compounds as |
| | donors. |
| 1.7.1.— | With NAD(+) or NADP(+) as acceptor. |
| 1.7.2.— | With a cytochrome as acceptor. |
| 1.7.3.— | With oxygen as acceptor. |
| 1.7.7.— | With an iron-sulfur protein as acceptor. |
| 1.7.99.— | With other acceptors. |
| 1.8.—.— | Acting on a sulfur group of donors. |
| 1.8.1.— | With NAD(+) or NADP(+) as acceptor. |
| 1.8.2.— | With a cytochrome as acceptor. |
| 1.8.3.— | With oxygen as acceptor. |
| 1.8.4.— | With a disulfide as acceptor. |
| 1.8.5.— | With a quinone or similar compound as |
| | acceptor. |
| 1.8.7.— | With an iron-sulfur protein as acceptor. |
| 1.8.98.— | With other, known, acceptors. |
| 1.8.99.— | With other acceptors. |
| 1.9.—.— | Acting on a heme group of donors. |
| 1.9.3.— | With oxygen as acceptor. |
| 1.9.6.— | With a nitrogenous group as acceptor. |
| 1.9.99.— | With other acceptors. |
| 1.10.—.— | Acting on diphenols and related |
| | substances as donors. |
| 1.10.1.— | With NAD(+) or NADP(+) as acceptor. |
| 1.10.2.— | With a cytochrome as acceptor. |
| 1.10.3.— | With oxygen as acceptor. |
| 1.10.99.— | With other acceptors. |
| 1.11.—.— | Acting on a peroxide as acceptor |
| | (peroxidases). |
| 1.12.—.— | Acting on hydrogen as donor. |
| 1.12.1.— | With NAD(+) or NADP(+) as acceptor. |
| 1.12.2.— | With a cytochrome as acceptor. |
| 1.12.5.— | With a quinone or similar compound as |
| | acceptor. |
| 1.12.7.— | With an iron-sulfur protein as acceptor. |
| 1.12.98.— | With other known acceptors. |
| 1.12.99.— | With other acceptors. |
| 1.13.—.— | Acting on single donors with |
| | incorporation of molecular oxygen. |
| 1.13.11.— | With incorporation of two atoms of oxygen. |
| 1.13.12.— | With incorporation of one atom of oxygen. |
| 1.14.—.— | Acting on paired donors, with incorporation or |
| | reduction of molecular oxygen |
| 1.14.11.— | With 2-oxoglutarate as one donor, and |
| | incorporation of one atom each of oxygen into both |
| | donors |
| 1.14.12.— | With NADH or NADPH as one donor, and |
| | incorporation of two atoms of oxygen into one donor |
| 1.14.13.— | With NADH or NADPH as one donor, and |
| | incorporation of one atom of oxygen |
| 1.14.14.— | With reduced flavin or flavoprotein as one |
| | donor, and incorporation of one atom of oxygen |
| 1.14.15.— | With a reduced iron-sulfur protein as one |
| | donor, and incorporation of one atom of oxygen |
| 1.14.16.— | With reduced pteridine as one donor, and |
| | incorporation of one atom of oxygen |
| 1.14.17.— | With reduced ascorbate as one donor, and |
| | incorporation of one atom of oxygen |
| 1.14.18.— | With another compound as one donor, and |
| | incorporation of one incorporation of one atom of |
| | oxygen |
| 1.14.19.— | With oxidation of a pair of donors resulting |
| | in the reduction of molecular oxygen to two molecules |
| | of water |
| 1.14.20.— | With 2-oxoglutarate as one donor, and the |
| | other dehydrogenated. |
| 1.14.21.— | With NADH or NADPH as one donor, and |
| | the other dehydrogenated. |
| 1.15.—.— | Acting on superoxide as acceptor. |
| 1.16.—.— | Oxidizing metal ions. |
| 1.16.1.— | With NAD(+) or NADP(+) as acceptor. |
| 1.16.3.— | With oxygen as acceptor. |
| 1.16.8.— | With flavin as acceptor. |
| 1.17.—.— | Acting on CH or CH(2) groups. |
| 1.17.1.— | With NAD(+) or NADP(+) as acceptor. |
| 1.17.3.— | With oxygen as acceptor. |
| 1.17.4.— | With a disulfide as acceptor. |
| 1.17.5.— | With a quinone or similar compound as |
| | acceptor |
| 1.17.99.— | With other acceptors. |
| 1.18.—.— | Acting on iron-sulfur proteins as donors. |
| 1.18.1.— | With NAD(+) or NADP(+) as acceptor. |
| 1.18.6.— | With dinitrogen as acceptor. |
| 1.18.96.— | With other, known, acceptors. |
| 1.18.99.— | With H(+) as acceptor. |
| 1.19.—.— | Acting on reduced flavodoxin as donor. |
| 1.19.6.— | With dinitrogen as acceptor. |
| 1.20.—.— | Acting on phosphorus or arsenic in |
| | donors. |
| 1.20.1.— | Acting on phosphorus or arsenic in |
| | donors, with NAD(P)(+) as acceptor |
| 1.20.4.— | Acting on phosphorus or arsenic in |
| | donors, with disulfide as acceptor |
| 1.20.98.— | Acting on phosphorus or arsenic in |
| | donors, with other, known acceptors |
| 1.20.99.— | Acting on phosphorus or arsenic in |
| | donors, with other acceptors |
| 1.21.—.— | Acting on x-H and y-H to form an x-y |
| | bond. |
| 1.21.3.— | With oxygen as acceptor. |
| 1.21.4.— | With a disulfide as acceptor. |
| 1.21.99.— | With other acceptors. |
| 1.97.—.— | Other oxidoreductases. |
| 2.—.—.— | Transferases. |
| 2.1.—.— | Transferring one-carbon groups. |
| 2.1.1.— | Methyltransferases. |
| 2.1.2.— | Hydroxymethyl-, formyl- and related |
| | transferases. |
| 2.1.3.— | Carboxyl- and carbamoyltransferases. |
| 2.1.4.— | Amidinotransferases. |
| 2.2.—.— | Transferring aldehyde or ketone residues. |
| 2.2.1.— | Transketolases and transaldolases. |
| 2.3.—.— | Acyltransferases. |
| 2.3.1.— | Transferring groups other than amino- |
| | acyl groups. |
| 2.3.2.— | Aminoacyltransferases. |
| 2.3.3.— | Acyl groups converted into alkyl on |
| | transfer. |
| 2.4.—.— | Glycosyltransferases. |
| 2.4.1.— | Hexosyltransferases. |
| 2.4.2.— | Pentosyltransferases. |
| 2.4.99.— | Transferring other glycosyl groups. |
| 2.5.—.— | Transferring alkyl or aryl groups, other |
| | than methyl groups. |
| 2.6.—.— | Transferring nitrogenous groups. |
| 2.6.1.— | Transaminases (aminotransferases). |
| 2.6.3.— | Oximinotransferases. |
| 2.6.99.— | Transferring other nitrogenous groups. |
| 2.7.—.— | Transferring phosphorous-containing groups. |
| 2.7.1.— | Phosphotransferases with an alcohol group as |
| | acceptor. |
| 2.7.2.— | Phosphotransferases with a carboxyl group as |
| | acceptor. |
| 2.7.3.— | Phosphotransferases with a nitrogenous group |
| | as acceptor. |
| 2.7.4.— | Phosphotransferases with a phosphate group as |
| | acceptor. |
| 2.7.6.— | Diphosphotransferases. |
| 2.7.7.— | Nucleotidyltransferases. |
| 2.7.8.— | Transferases for other substituted phosphate |
| | groups. |
| 2.7.9.— | Phosphotransferases with paired acceptors. |
| 2.8.—.— | Transferring sulfur-containing groups. |
| 2.8.1.— | Sulfurtransferases. |
| 2.8.2.— | Sulfotransferases. |
| 2.8.3.— | CoA-transferases. |
| 2.8.4.— | Transferring alkylthio groups. |
| 2.9.—.— | Transferring selenium-containing groups. |
| 2.9.1.— | Selenotransferases. |
| 3.—.—.— | Hydrolases. |
| 3.1.—.— | Acting on ester bonds. |
| 3.1.1.— | Carboxylic ester hydrolases. |
| 3.1.2.— | Thiolester hydrolases. |
| 3.1.3.— | Phosphoric monoester hydrolases. |
| 3.1.4.— | Phosphoric diester hydrolases. |
| 3.1.5.— | Triphosphoric monoester hydrolases. |
| 3.1.6.— | Sulfuric ester hydrolases. |
| 3.1.7.— | Diphosphoric monoester hydrolases. |
| 3.1.8.— | Phosphoric triester hydrolases. |
| 3.1.11.— | Exodeoxyribonucleases producing 5′- |
| | phosphomonoesters. |
| 3.1.13.— | Exoribonucleases producing 5′- |
| | phosphomonoesters. |
| 3.1.14.— | Exoribonucleases producing 3′- |
| | phosphomonoesters. |
| 3.1.15.— | Exonucleases active with either ribo- or |
| | deoxyribonucleic acid and producing 5′- |
| | phosphomonoesters |
| 3.1.16.— | Exonucleases active with either ribo- or |
| | deoxyribonucleic acid producing 3′-phosphomonoesters |
| 3.1.21.— | Endodeoxyribonucleases producing 5′- |
| | phosphomonoesters. |
| 3.1.22.— | Endodeoxyribonucleases producing |
| | other than 5′-phosphomonoesters. |
| 3.1.25.— | Site-specific endodeoxyribonucleases |
| | specific for altered bases. |
| 3.1.26.— | Endoribonucleases producing 5′- |
| | phosphomonoesters. |
| 3.1.27.— | Endoribonucleases producing other |
| | than 5′-phosphomonoesters. |
| 3.1.30.— | Endoribonucleases active with either |
| | ribo- or deoxyribonucleic and producing 5′- |
| | phosphomonoesters |
| 3.1.31.— | Endoribonucleases active with either |
| | ribo- or deoxyribonucleic and producing 3′- |
| | phosphomonoesters |
| 3.2.—.— | Glycosylases. |
| 3.2.1.— | Glycosidases, i.e. enzymes hydrolyzing |
| | O- and S-glycosyl compounds |
| 3.2.2.— | Hydrolyzing N-glycosyl compounds. |
| 3.3.—.— | Acting on ether bonds. |
| 3.3.1.— | Thioether and trialkylsulfonium |
| | hydrolases. |
| 3.3.2.— | Ether hydrolases. |
| 3.4.—.— | Acting on peptide bonds (peptide |
| | hydrolases). |
| 3.4.11.— | Aminopeptidases. |
| 3.4.13.— | Dipeptidases. |
| 3.4.14.— | Dipeptidyl-peptidases and tripeptidyl- |
| | peptidases. |
| 3.4.15.— | Peptidyl-dipeptidases. |
| 3.4.16.— | Serine-type carboxypeptidases. |
| 3.4.17.— | Metallocarboxypeptidases. |
| 3.4.18.— | Cysteine-type carboxypeptidases. |
| 3.4.19.— | Omega peptidases. |
| 3.4.21.— | Serine endopeptidases. |
| 3.4.22.— | Cysteine endopeptidases. |
| 3.4.23.— | Aspartic endopeptidases. |
| 3.4.24.— | Metalloendopeptidases. |
| 3.4.25.— | Threonine endopeptidases. |
| 3.4.99.— | Endopeptidases of unknown catalytic |
| | mechanism. |
| 3.5.—.— | Acting on carbon-nitrogen bonds, other |
| | than peptide bonds. |
| 3.5.1.— | In linear amides. |
| 3.5.2.— | In cyclic amides. |
| 3.5.3.— | In linear amidines. |
| 3.5.4.— | In cyclic amidines. |
| 3.5.5.— | In nitriles. |
| 3.5.99.— | In other compounds. |
| 3.6.—.— | Acting on acid anhydrides. |
| 3.6.1.— | In phosphorous-containing anhydrides. |
| 3.6.2.— | In sulfonyl-containing anhydrides. |
| 3.6.3.— | Acting on acid anhydrides; catalyzing |
| | transmembrane movement of substances |
| 3.6.4.— | Acting on acid anhydrides; involved in |
| | cellular and subcellular movement |
| 3.6.5.— | Acting on GTP; involved in cellular and |
| | subcellular movement. |
| 3.7.—.— | Acting on carbon-carbon bonds. |
| 3.7.1.— | In ketonic substances. |
| 3.8.—.— | Acting on halide bonds. |
| 3.8.1.— | In C-halide compounds. |
| 3.9.—.— | Acting on phosphorus-nitrogen bonds. |
| 3.10.—.— | Acting on sulfur-nitrogen bonds. |
| 3.11.—.— | Acting on carbon-phosphorus bonds. |
| 3.12.—.— | Acting on sulfur-sulfur bonds. |
| 3.13.—.— | Acting on carbon-sulfur bonds. |
| 4.—.—.— | Lyases. |
| 4.1.—.— | Carbon-carbon lyases. |
| 4.1.1.— | Carboxy-lyases. |
| 4.1.2.— | Aldehyde-lyases. |
| 4.1.3.— | Oxo-acid-lyases. |
| 4.1.99.— | Other carbon-carbon lyases. |
| 4.2.—.— | Carbon-oxygen lyases. |
| 4.2.1.— | Hydro-lyases. |
| 4.2.2.— | Acting on polysaccharides. |
| 4.2.3.— | Acting on phosphates. |
| 4.2.99.— | Other carbon-oxygen lyases. |
| 4.3.—.— | Carbon-nitrogen lyases. |
| 4.3.1.— | Ammonia-lyases. |
| 4.3.2.— | Lyases acting on amides, amidines, etc. |
| 4.3.3.— | Amine-lyases. |
| 4.3.99.— | Other carbon-nitrogen-lyases. |
| 4.4.—.— | Carbon-sulfur lyases. |
| 4.5.—.— | Carbon-halide lyases. |
| 4.6.—.— | Phosphorus-oxygen lyases. |
| 4.99.—.— | Other lyases. |
| 5.—.—.— | Isomerases. |
| 5.1.—.— | Racemases and epimerases. |
| 5.1.1.— | Acting on amino acids and derivatives. |
| 5.1.2.— | Acting on hydroxy acids and derivatives. |
| 5.1.3.— | Acting on carbohydrates and derivatives. |
| 5.1.99.— | Acting on other compounds. |
| 5.2.—.— | Cis-trans-isomerases. |
| 5.3.—.— | Intramolecular oxidoreductases. |
| 5.3.1.— | Interconverting aldoses and ketoses. |
| 5.3.2.— | Interconverting keto- and enol-groups. |
| 5.3.3.— | Transposing C══C bonds. |
| 5.3.4.— | Transposing S—S bonds. |
| 5.3.99.— | Other intramolecular oxidoreductases. |
| 5.4.—.— | Intramolecular transferases (mutases). |
| 5.4.1.— | Transferring acyl groups. |
| 5.4.2.— | Phosphotransferases (phosphomutases). |
| 5.4.3.— | Transferring amino groups. |
| 5.4.4.— | Transferring hydroxy groups. |
| 5.4.99.— | Transferring other groups. |
| 5.5.—.— | Intramolecular lyases. |
| 5.99.—.— | Other isomerases. |
| 6.—.—.— | Ligases. |
| 6.1.—.— | Forming carbon-oxygen bonds. |
| 6.1.1.— | Ligases forming aminoacyl-tRNA and |
| | related compounds. |
| 6.2.—.— | Forming carbon-sulfur bonds. |
| 6.2.1.— | Acid--thiol ligases. |
| 6.3.—.— | Forming carbon-nitrogen bonds. |
| 6.3.1.— | Acid--ammonia (or amide) ligases (amide |
| | synthases). |
| 6.3.2.— | Acid--D-amino-acid ligases (peptide |
| | synthases). |
| 6.3.3.— | Cyclo-ligases. |
| 6.3.4.— | Other carbon--nitrogen ligases. |
| 6.3.5.— | Carbon--nitrogen ligases with glutamine as |
| | amido-N-donor. |
| 6.4.—.— | Forming carbon-carbon bonds. |
| 6.5.—.— | Forming phosphoric ester bonds. |
| 6.6.—.— | Forming nitrogen-metal bonds. |
| 6.6.1.— | Forming nitrogen-metal bonds. |

EC Numbers with the corresponding name given to each enzyme
class, subclass and sub-subclass.
ENZYME: 1.—.—.—

| | |
|---|---|
| 1.1.1.1 | Alcohol dehydrogenase. |
| 1.1.1.2 | Alcohol dehydrogenase (NADP+). |
| 1.1.1.3 | Homoserine dehydrogenase. |
| 1.1.1.4 | (R,R)-butanediol dehydrogenase. |
| 1.1.1.5 | Acetoin dehydrogenase. |
| 1.1.1.6 | Glycerol dehydrogenase. |
| 1.1.1.7 | Propanediol-phosphate dehydrogenase. |
| 1.1.1.8 | Glycerol-3-phosphate dehydrogenase |
| | (NAD+). |
| 1.1.1.9 | D-xylulose reductase. |
| 1.1.1.10 | L-xylulose reductase. |
| 1.1.1.11 | D-arabinitol 4-dehydrogenase. |
| 1.1.1.12 | L-arabinitol 4-dehydrogenase. |
| 1.1.1.13 | L-arabinitol 2-dehydrogenase. |
| 1.1.1.14 | L-iditol 2-dehydrogenase. |
| 1.1.1.15 | D-iditol 2-dehydrogenase. |
| 1.1.1.16 | Galactitol 2-dehydrogenase. |
| 1.1.1.17 | Mannitol-1-phosphate 5- |
| | dehydrogenase. |
| 1.1.1.18 | Inositol 2-dehydrogenase. |
| 1.1.1.19 | L-glucuronate reductase. |
| 1.1.1.20 | Glucuronolactone reductase. |
| 1.1.1.21 | Aldehyde reductase. |
| 1.1.1.22 | UDP-glucose 6-dehydrogenase. |
| 1.1.1.23 | Histidinol dehydrogenase. |
| 1.1.1.24 | Quinate dehydrogenase. |
| 1.1.1.25 | Shikimate dehydrogenase. |
| 1.1.1.26 | Glyoxylate reductase. |
| 1.1.1.27 | L-lactate dehydrogenase. |
| 1.1.1.28 | D-lactate dehydrogenase. |
| 1.1.1.29 | Glycerate dehydrogenase. |
| 1.1.1.30 | 3-hydroxybutyrate dehydrogenase. |
| 1.1.1.31 | 3-hydroxyisobutyrate dehydrogenase. |
| 1.1.1.32 | Mevaldate reductase. |
| 1.1.1.33 | Mevaldate reductase (NADPH). |
| 1.1.1.34 | Hydroxymethylglutaryl-CoA reductase |
| | (NADPH). |
| 1.1.1.35 | 3-hydroxyacyl-CoA dehydrogenase. |
| 1.1.1.36 | Acetoacetyl-CoA reductase. |
| 1.1.1.37 | Malate dehydrogenase. |
| 1.1.1.38 | Malate dehydrogenase (oxaloacetate- |
| | decarboxylating). |
| 1.1.1.39 | Malate dehydrogenase |
| | (decarboxylating). |
| 1.1.1.40 | Malate dehydrogenase (oxaloacetate- |
| | decarboxylating) (NADP+). |
| 1.1.1.41 | Isocitrate dehydrogenase (NAD+). |
| 1.1.1.42 | Isocitrate dehydrogenase (NADP+). |
| 1.1.1.43 | Phosphogluconate 2-dehydrogenase. |
| 1.1.1.44 | Phosphogluconate dehydrogenase |
| | (decarboxylating). |
| 1.1.1.45 | L-gulonate 3-dehydrogenase. |
| 1.1.1.46 | L-arabinose 1-dehydrogenase. |
| 1.1.1.47 | Glucose 1-dehydrogenase. |
| 1.1.1.48 | Galactose 1-dehydrogenase. |
| 1.1.1.49 | Glucose-6-phosphate 1-dehydrogenase. |
| 1.1.1.50 | 3-alpha-hydroxysteroid dehydrogenase (B- |
| | specific). |
| 1.1.1.51 | 3(or 17)beta-hydroxysteroid dehydrogenase. |
| 1.1.1.52 | 3-alpha-hydroxycholanate dehydrogenase. |
| 1.1.1.53 | 3-alpha(or 20-beta)-hydroxysteroid |
| | dehydrogenase. |
| 1.1.1.54 | Allyl-alcohol dehydrogenase. |
| 1.1.1.55 | L-acetaldehyde reductase (NADPH). |
| 1.1.1.56 | Ribitol 2-dehydrogenase. |
| 1.1.1.57 | Fructuronate reductase. |
| 1.1.1.58 | Tagaturonate reductase. |
| 1.1.1.59 | 3-hydroxypropionate dehydrogenase. |
| 1.1.1.60 | 2-hydroxy-3-oxopropionate reductase. |
| 1.1.1.61 | 4-hydroxybutyrate dehydrogenase. |
| 1.1.1.62 | Estradiol 17-beta-dehydrogenase. |
| 1.1.1.63 | Testosterone 17-beta-dehydrogenase. |
| 1.1.1.64 | Testosterone 17-beta-dehydrogenase |
| | (NADP+). |
| 1.1.1.65 | Pyridoxine 4-dehydrogenase. |
| 1.1.1.66 | Omega-hydroxydecanoate dehydrogenase. |
| 1.1.1.67 | Mannitol 2-dehydrogenase. |
| 1.1.1.69 | Gluconate 5-dehydrogenase. |
| 1.1.1.71 | Alcohol dehydrogenase (NAD(P)+). |
| 1.1.1.72 | Glycerol dehydrogenase (NADP+). |
| 1.1.1.73 | Octanol dehydrogenase. |
| 1.1.1.75 | (R)-aminopropanol dehydrogenase. |
| 1.1.1.76 | (S,S)-butanediol dehydrogenase. |
| 1.1.1.77 | Lactaldehyde reductase. |
| 1.1.1.78 | D-lactaldehyde dehydrogenase. |
| 1.1.1.79 | Glyoxylate reductase (NADP+). |
| 1.1.1.80 | Isopropanol dehydrogenase (NADP+). |
| 1.1.1.81 | Hydroxypyruvate reductase. |
| 1.1.1.82 | Malate dehydrogenase (NADP+). |
| 1.1.1.83 | D-malate dehydrogenase (decarboxylating). |
| 1.1.1.84 | Dimethylmalate dehydrogenase. |
| 1.1.1.85 | 3-isopropylmalate dehydrogenase. |
| 1.1.1.86 | Ketol-acid reductoisomerase. |
| 1.1.1.87 | Homoisocitrate dehydrogenase. |
| 1.1.1.88 | Hydroxymethylglutaryl-CoA reductase. |
| 1.1.1.90 | Aryl-alcohol dehydrogenase. |
| 1.1.1.91 | Aryl-alcohol dehydrogenase (NADP+). |
| 1.1.1.92 | Oxaloglycolate reductase |
| | (decarboxylating). |
| 1.1.1.93 | Tartrate dehydrogenase. |
| 1.1.1.94 | Glycerol-3-phosphate dehydrogenase |
| | (NAD(P)+). |
| 1.1.1.95 | Phosphoglycerate dehydrogenase. |
| 1.1.1.96 | Diiodophenylpyruvate reductase. |
| 1.1.1.97 | 3-hydroxybenzyl-alcohol dehydrogenase. |
| 1.1.1.98 | (R)-2-hydroxy-fatty-acid dehydrogenase. |
| 1.1.1.99 | (S)-2-hydroxy-fatty-acid dehydrogenase. |
| 1.1.1.100 | 3-oxoacyl-[acyl-carrier-protein] |
| | reductase. |
| 1.1.1.101 | Acylglycerone-phosphate reductase. |
| 1.1.1.102 | 3-dehydrosphinganine reductase. |
| 1.1.1.103 | L-threonine 3-dehydrogenase. |
| 1.1.1.104 | 4-oxoproline reductase. |
| 1.1.1.105 | Retinol dehydrogenase. |
| 1.1.1.106 | Pantoate 4-dehydrogenase. |
| 1.1.1.107 | Pyridoxal 4-dehydrogenase. |
| 1.1.1.108 | Carnitine 3-dehydrogenase. |
| 1.1.1.110 | Indolelactate dehydrogenase. |
| 1.1.1.111 | 3-(imidazol-5-yl)lactate dehydrogenase. |
| 1.1.1.112 | Indanol dehydrogenase. |
| 1.1.1.113 | L-xylose 1-dehydrogenase. |
| 1.1.1.114 | Apiose 1-reductase. |
| 1.1.1.115 | Ribose 1-dehydrogenase (NADP+). |
| 1.1.1.116 | D-arabinose 1-dehydrogenase. |
| 1.1.1.117 | D-arabinose 1-dehydrogenase |
| | (NAD(P)+). |
| 1.1.1.118 | Glucose 1-dehydrogenase (NAD+). |
| 1.1.1.119 | Glucose 1-dehydrogenase (NADP+). |
| 1.1.1.120 | Galactose 1-dehydrogenase (NADP+). |
| 1.1.1.121 | Aldose 1-dehydrogenase. |
| 1.1.1.122 | D-threo-aldose 1-dehydrogenase. |
| 1.1.1.123 | Sorbose 5-dehydrogenase (NADP+). |
| 1.1.1.124 | Fructose 5-dehydrogenase (NADP+). |
| 1.1.1.125 | 2-deoxy-D-gluconate 3-dehydrogenase. |
| 1.1.1.126 | 2-dehydro-3-deoxy-D-gluconate 6- |
| | dehydrogenase. |
| 1.1.1.127 | 2-dehydro-3-deoxy-D-gluconate 5- |
| | dehydrogenase. |
| 1.1.1.128 | L-idonate 2-dehydrogenase. |
| 1.1.1.129 | L-threonate 3-dehydrogenase. |
| 1.1.1.130 | 3-dehydro-L-gulonate 2-dehydrogenase. |
| 1.1.1.131 | Mannuronate reductase. |
| 1.1.1.132 | GDP-mannose 6-dehydrogenase. |
| 1.1.1.133 | dTDP-4-dehydrorhamnose reductase. |
| 1.1.1.134 | dTDP-6-deoxy-L-talose 4- |
| | dehydrogenase. |
| 1.1.1.135 | GDP-6-deoxy-D-talose 4-dehydrogenase. |
| 1.1.1.136 | UDP-N-acetylglucosamine 6- |
| | dehydrogenase. |
| 1.1.1.137 | Ribitol-5-phosphate 2-dehydrogenase. |
| 1.1.1.138 | Mannitol 2-dehydrogenase (NADP+). |
| 1.1.1.140 | Sorbitol-6-phosphate 2-dehydrogenase. |
| 1.1.1.141 | 15-hydroxyprostaglandin dehydrogenase |
| | (NAD+). |
| 1.1.1.142 | D-pinitol dehydrogenase. |
| 1.1.1.143 | Sequoyitol dehydrogenase. |
| 1.1.1.144 | Perillyl-alcohol dehydrogenase. |
| 1.1.1.145 | 3-beta-hydroxy-delta(5)-steroid |
| | dehydrogenase. |
| 1.1.1.146 | 11-beta-hydroxysteroid dehydrogenase. |
| 1.1.1.147 | 16-alpha-hydroxysteroid dehydrogenase. |
| 1.1.1.148 | Estradiol 17-alpha-dehydrogenase. |
| 1.1.1.149 | 20-alpha-hydroxysteroid dehydrogenase. |
| 1.1.1.150 | 21-hydroxysteroid dehydrogenase |
| | (NAD+). |
| 1.1.1.152 | 3-alpha-hydroxy-5-beta-androstane-17- |
| | one 3-alpha-dehydrogenase. |
| 1.1.1.153 | Sepiapterin reductase. |
| 1.1.1.154 | Ureidoglycolate dehydrogenase. |
| 1.1.1.155 | Homoisocitrate dehydrogenase. |
| 1.1.1.156 | Glycerol 2-dehydrogenase (NADP+). |
| 1.1.1.157 | 3-hydroxybutyryl-CoA dehydrogenase. |
| 1.1.1.158 | UDP-N-acetylmuramate dehydrogenase. |
| 1.1.1.159 | 7-alpha-hydroxysteroid dehydrogenase. |
| 1.1.1.160 | Dihydrobunolol dehydrogenase. |
| 1.1.1.161 | Cholestanetetraol 26-dehydrogenase. |
| 1.1.1.162 | Erythrulose reductase. |
| 1.1.1.163 | Cyclopentanol dehydrogenase. |
| 1.1.1.164 | Hexadecanol dehydrogenase. |
| 1.1.1.165 | 2-alkyn-1-ol dehydrogenase. |
| 1.1.1.166 | Hydroxycyclohexanecarboxylate |
| | dehydrogenase. |
| 1.1.1.167 | Hydroxymalonate dehydrogenase. |
| 1.1.1.168 | 2-dehydropantolactone reductase (A- |
| | specific). |
| 1.1.1.169 | 2-dehydropantoate 2-reductase. |
| 1.1.1.170 | Sterol-4-alpha-carboxylate 3- |
| | dehydrogenase (decarboxylating). |
| 1.1.1.172 | 2-oxoadipate reductase. |
| 1.1.1.173 | L-rhamnose 1-dehydrogenase. |
| 1.1.1.174 | Cyclohexane-1,2-diol dehydrogenase. |
| 1.1.1.175 | D-xylose 1-dehydrogenase. |
| 1.1.1.176 | 12-alpha-hydroxysteroid |
| | dehydrogenase. |
| 1.1.1.177 | Glycerol-3-phosphate 1-dehydrogenase |
| | (NADP+). |
| 1.1.1.178 | 3-hydroxy-2-methylbutyryl-CoA |
| | dehydrogenase. |
| 1.1.1.179 | D-xylose 1-dehydrogenase (NADP+). |
| 1.1.1.181 | Cholest-5-ene-3-beta,7-alpha-diol 3- |
| | beta-dehydrogenase. |
| 1.1.1.183 | Geraniol dehydrogenase. |
| 1.1.1.184 | Carbonyl reductase (NADPH). |
| 1.1.1.185 | L-glycol dehydrogenase. |
| 1.1.1.186 | dTDP-galactose 6-dehydrogenase. |
| 1.1.1.187 | GDP-4-dehydro-D-rhamnose reductase. |
| 1.1.1.188 | Prostaglandin-F synthase. |
| 1.1.1.189 | Prostaglandin-E(2) 9-reductase. |
| 1.1.1.190 | Indole-3-acetaldehyde reductase |
| | (NADH). |
| 1.1.1.191 | Indole-3-acetaldehyde reductase |
| | (NADPH). |
| 1.1.1.192 | Long-chain-alcohol dehydrogenase. |
| 1.1.1.193 | 5-amino-6-(5- |
| | phosphoribosylamino)uracil reductase. |
| 1.1.1.194 | Coniferyl-alcohol dehydrogenase. |
| 1.1.1.195 | Cinnamyl-alcohol dehydrogenase. |
| 1.1.1.196 | 15-hydroxyprostaglandin-D |
| | dehydrogenase (NADP+). |
| 1.1.1.197 | 15-hydroxyprostaglandin dehydrogenase |
| | (NADP+). |
| 1.1.1.198 | (+)-borneol dehydrogenase. |
| 1.1.1.199 | (S)-usnate reductase. |
| 1.1.1.200 | Aldose-6-phosphate reductase |
| | (NADPH). |
| 1.1.1.201 | 7-beta-hydroxysteroid dehydrogenase |
| | (NADP+). |
| 1.1.1.202 | 1,3-propanediol dehydrogenase. |
| 1.1.1.203 | Uronate dehydrogenase. |
| 1.1.1.205 | IMP dehydrogenase. |
| 1.1.1.206 | Tropine dehydrogenase. |
| 1.1.1.207 | (−)-menthol dehydrogenase. |
| 1.1.1.208 | (+)-neomenthol dehydrogenase. |
| 1.1.1.209 | 3(or 17)-alpha-hydroxysteroid |
| | dehydrogenase. |
| 1.1.1.210 | 3-beta(or 20-alpha)-hydroxysteroid |
| | dehydrogenase. |
| 1.1.1.211 | Long-chain-3-hydroxyacyl-CoA |
| | dehydrogenase. |
| 1.1.1.212 | 3-oxoacyl-[acyl-carrier-protein] |
| | reductase (NADH). |
| 1.1.1.213 | 3-alpha-hydroxysteroid dehydrogenase |
| | (A-specific). |
| 1.1.1.214 | 2-dehydropantolactone reductase (B- |
| | specific). |
| 1.1.1.215 | Gluconate 2-dehydrogenase. |
| 1.1.1.216 | Farnesol dehydrogenase. |
| 1.1.1.217 | Benzyl-2-methyl-hydroxybutyrate |
| | dehydrogenase. |
| 1.1.1.218 | Morphine 6-dehydrogenase. |
| 1.1.1.219 | Dihydrokaempferol 4-reductase. |
| 1.1.1.220 | 6-pyruvoyltetrahydropterin 2′-reductase. |
| 1.1.1.221 | Vomifoliol 4′-dehydrogenase. |
| 1.1.1.222 | (R)-4-hydroxyphenyllactate |
| | dehydrogenase. |
| 1.1.1.223 | Isopiperitenol dehydrogenase. |
| 1.1.1.224 | Mannose-6-phosphate 6-reductase. |
| 1.1.1.225 | Chlordecone reductase. |
| 1.1.1.226 | 4-hydroxycyclohexanecarboxylate |
| | dehydrogenase. |
| 1.1.1.227 | (−)-borneol dehydrogenase. |
| 1.1.1.228 | (+)-sabinol dehydrogenase. |
| 1.1.1.229 | Diethyl 2-methyl-3-oxosuccinate |
| | reductase. |
| 1.1.1.230 | 3-alpha-hydroxyglycyrrhetinate |
| | dehydrogenase. |
| 1.1.1.231 | 15-hydroxyprostaglandin-I |
| | dehydrogenase (NADP+). |
| 1.1.1.232 | 15-hydroxyicosatetraenoate |
| | dehydrogenase. |
| 1.1.1.233 | N-acylmannosamine 1-dehydrogenase. |
| 1.1.1.234 | Flavanone 4-reductase. |
| 1.1.1.235 | 8-oxocoformycin reductase. |
| 1.1.1.236 | Tropinone reductase. |
| 1.1.1.237 | Hydroxyphenylpyruvate reductase. |
| 1.1.1.238 | 12-beta-hydroxysteroid dehydrogenase. |
| 1.1.1.239 | 3-alpha-(17-beta)-hydroxysteroid |
| | dehydrogenase (NAD+). |
| 1.1.1.240 | N-acetylhexosamine 1-dehydrogenase. |
| 1.1.1.241 | 6-endo-hydroxycineole dehydrogenase. |
| 1.1.1.243 | Carveol dehydrogenase. |
| 1.1.1.244 | Methanol dehydrogenase. |
| 1.1.1.245 | Cyclohexanol dehydrogenase. |
| 1.1.1.246 | Pterocarpin synthase. |
| 1.1.1.247 | Codeinone reductase (NADPH). |
| 1.1.1.248 | Salutaridine reductase (NADPH). |
| 1.1.1.250 | D-arabinitol 2-dehydrogenase. |
| 1.1.1.251 | Galactitol-1-phosphate 5- |
| | dehydrogenase. |
| 1.1.1.252 | Tetrahydroxynaphthalene reductase. |
| 1.1.1.254 | (S)-carnitine 3-dehydrogenase. |
| 1.1.1.255 | Mannitol dehydrogenase. |
| 1.1.1.256 | Fluoren-9-ol dehydrogenase. |
| 1.1.1.257 | 4-(hydroxymethyl)benzenesulfonate |
| | dehydrogenase. |
| 1.1.1.258 | 6-hydroxyhexanoate dehydrogenase. |
| 1.1.1.259 | 3-hydroxypimeloyl-CoA |
| | dehydrogenase. |
| 1.1.1.260 | Sulcatone reductase. |
| 1.1.1.261 | Glycerol-1-phosphate dehydrogenase |
| | (NAD(P)+). |
| 1.1.1.262 | 4-hydroxythreonine-4-phosphate |
| | dehydrogenase. |
| 1.1.1.263 | 1,5-anhydro-D-fructose reductase. |
| 1.1.1.264 | L-idonate 5-dehydrogenase. |
| 1.1.1.265 | 3-methylbutanal reductase. |
| 1.1.1.266 | dTDP-4-dehydro-6-deoxyglucose |
| | reductase. |
| 1.1.1.267 | 1-deoxy-D-xylulose-5-phosphate |
| | reductoisomerase. |
| 1.1.1.268 | 2-(R)-hydroxypropyl-CoM |
| | dehydrogenase. |
| 1.1.1.269 | 2-(S)-hydroxypropyl-CoM |
| | dehydrogenase. |
| 1.1.1.270 | 3-keto-steroid reductase. |
| 1.1.1.271 | GDP-L-fucose synthase. |
| 1.1.1.272 | (R)-2-hydroxyacid dehydrogenase. |
| 1.1.1.273 | Vellosimine dehydrogenase. |
| 1.1.1.274 | 2,5-didehydrogluconate reductase. |
| 1.1.1.275 | (+)-trans-carveol dehydrogenase. |
| 1.1.1.276 | Serine 3-dehydrogenase. |
| 1.1.1.277 | 3-beta-hydroxy-5-beta-steroid |
| | dehydrogenase. |
| 1.1.1.278 | 3-beta-hydroxy-5-alpha-steroid |
| | dehydrogenase. |
| 1.1.1.279 | (R)-3-hydroxyacid-ester dehydrogenase. |
| 1.1.1.280 | (S)-3-hydroxyacid-ester dehydrogenase. |
| 1.1.1.281 | GDP-4-dehydro-6-deoxy-D-mannose |
| | reductase. |
| 1.1.1.282 | Quinate/shikimate dehydrogenase. |
| 1.1.2.2 | Mannitol dehydrogenase (cytochrome). |
| 1.1.2.3 | L-lactate dehydrogenase (cytochrome). |
| 1.1.2.4 | D-lactate dehydrogenase (cytochrome). |
| 1.1.2.5 | D-lactate dehydrogenase (cytochrome c- |
| | 553). |
| 1.1.3.3 | Malate oxidase. |
| 1.1.3.4 | Glucose oxidase. |
| 1.1.3.5 | Hexose oxidase. |
| 1.1.3.6 | Cholesterol oxidase. |
| 1.1.3.7 | Aryl-alcohol oxidase. |
| 1.1.3.8 | L-gulonolactone oxidase. |
| 1.1.3.9 | Galactose oxidase. |
| 1.1.3.10 | Pyranose oxidase. |
| 1.1.3.11 | L-sorbose oxidase. |
| 1.1.3.12 | Pyridoxine 4-oxidase. |
| 1.1.3.13 | Alcohol oxidase. |
| 1.1.3.14 | Catechol oxidase (dimerizing). |
| 1.1.3.15 | (S)-2-hydroxy-acid oxidase. |
| 1.1.3.16 | Ecdysone oxidase. |
| 1.1.3.17 | Choline oxidase. |
| 1.1.3.18 | Secondary-alcohol oxidase. |
| 1.1.3.19 | 4-hydroxymandelate oxidase. |
| 1.1.3.20 | Long-chain-alcohol oxidase. |
| 1.1.3.21 | Glycerol-3-phosphate oxidase. |
| 1.1.3.23 | Thiamine oxidase. |
| 1.1.3.24 | L-galactonolactone oxidase. |
| 1.1.3.25 | Cellobiose oxidase. |
| 1.1.3.27 | Hydroxyphytanate oxidase. |
| 1.1.3.28 | Nucleoside oxidase. |
| 1.1.3.29 | N-acylhexosamine oxidase. |
| 1.1.3.30 | Polyvinyl-alcohol oxidase. |
| 1.1.3.37 | D-arabinono-1,4-lactone oxidase. |
| 1.1.3.38 | Vanillyl-alcohol oxidase. |
| 1.1.3.39 | Nucleoside oxidase (H(2)O(2)-forming). |
| 1.1.3.40 | D-mannitol oxidase. |
| 1.1.3.41 | Xylitol oxidase. |
| 1.1.4.1 | Vitamin-K-epoxide reductase |
| | (warfarin-sensitive). |
| 1.1.4.2 | Vitamin-K-epoxide reductase |
| | (warfarin-insensitive). |
| 1.1.5.2 | Quinoprotein glucose dehydrogenase. |
| 1.1.99.1 | Choline dehydrogenase. |
| 1.1.99.2 | 2-hydroxyglutarate dehydrogenase. |
| 1.1.99.3 | Gluconate 2-dehydrogenase |
| | (acceptor). |
| 1.1.99.4 | Dehydrogluconate dehydrogenase. |
| 1.1.99.5 | Glycerol-3-phosphate dehydrogenase. |
| 1.1.99.6 | D-2-hydroxy-acid dehydrogenase. |
| 1.1.99.7 | Lactate--malate transhydrogenase. |
| 1.1.99.8 | Alcohol dehydrogenase (acceptor). |
| 1.1.99.9 | Pyridoxine 5-dehydrogenase. |
| 1.1.99.10 | Glucose dehydrogenase (acceptor). |
| 1.1.99.11 | Fructose 5-dehydrogenase. |
| 1.1.99.12 | Sorbose dehydrogenase. |
| 1.1.99.13 | Glucoside 3-dehydrogenase. |
| 1.1.99.14 | Glycolate dehydrogenase. |
| 1.1.99.16 | Malate dehydrogenase (acceptor). |
| 1.1.99.18 | Cellobiose dehydrogenase (acceptor). |
| 1.1.99.19 | Uracil dehydrogenase. |
| 1.1.99.20 | Alkan-1-ol dehydrogenase (acceptor). |
| 1.1.99.21 | D-sorbitol dehydrogenase (acceptor). |
| 1.1.99.22 | Glycerol dehydrogenase (acceptor). |
| 1.1.99.23 | Polyvinyl-alcohol dehydrogenase |
| | (acceptor). |
| 1.1.99.24 | Hydroxyacid--oxoacid |
| | transhydrogenase. |
| 1.1.99.25 | Quinate dehydrogenase |
| | (pyrroloquinoline-quinone). |
| 1.1.99.26 | 3-hydroxycyclohexanone |
| | dehydrogenase. |
| 1.1.99.27 | (R)-pantolactone dehydrogenase |
| | (flavin). |
| 1.1.99.28 | Glucose--fructose oxidoreductase. |
| 1.1.99.29 | Pyranose dehydrogenase (acceptor). |
| 1.1.99.30 | 2-oxo-acid reductase. |
| 1.2.1.1 | Formaldehyde dehydrogenase |
| | (glutathione). |
| 1.2.1.2 | Formate dehydrogenase. |
| 1.2.1.3 | Aldehyde dehydrogenase (NAD+). |
| 1.2.1.4 | Aldehyde dehydrogenase (NADP+). |
| 1.2.1.5 | Aldehyde dehydrogenase (NAD(P)+). |
| 1.2.1.7 | Benzaldehyde dehydrogenase |
| | (NADP+). |
| 1.2.1.8 | Betaine-aldehyde dehydrogenase. |
| 1.2.1.9 | Glyceraldehyde-3-phosphate dehydrogenase |
| | (NADP+). |
| 1.2.1.10 | Acetaldehyde dehydrogenase (acetylating). |
| 1.2.1.11 | Aspartate-semialdehyde dehydrogenase. |
| 1.2.1.12 | Glyceraldehyde-3-phosphate dehydrogenase |
| | (phosphorylating). |
| 1.2.1.13 | Glyceraldehyde-3-phosphate dehydrogenase |
| | (NADP(+)) (phosphorylating). |
| 1.2.1.15 | Malonate-semialdehyde dehydrogenase. |
| 1.2.1.16 | Succinate-semialdehyde dehydrogenase |
| | (NAD(P)+). |
| 1.2.1.17 | Glyoxylate dehydrogenase (acylating). |
| 1.2.1.18 | Malonate-semialdehyde dehydrogenase |
| | (acetylating). |
| 1.2.1.19 | Aminobutyraldehyde dehydrogenase. |
| 1.2.1.20 | Glutarate-semialdehyde dehydrogenase. |
| 1.2.1.21 | Glycolaldehyde dehydrogenase. |
| 1.2.1.22 | Lactaldehyde dehydrogenase. |
| 1.2.1.23 | 2-oxoaldehyde dehydrogenase (NAD+). |
| 1.2.1.24 | Succinate-semialdehyde dehydrogenase. |
| 1.2.1.25 | 2-oxoisovalerate dehydrogenase (acylating). |
| 1.2.1.26 | 2,5-dioxovalerate dehydrogenase. |
| 1.2.1.27 | Methylmalonate-semialdehyde |
| | dehydrogenase (acylating). |
| 1.2.1.28 | Benzaldehyde dehydrogenase (NAD+). |
| 1.2.1.29 | Aryl-aldehyde dehydrogenase. |
| 1.2.1.30 | Aryl-aldehyde dehydrogenase (NADP+). |
| 1.2.1.31 | L-aminoadipate-semialdehyde |
| | dehydrogenase. |
| 1.2.1.32 | Aminomuconate-semialdehyde |
| | dehydrogenase. |
| 1.2.1.33 | (R)-dehydropantoate dehydrogenase. |
| 1.2.1.36 | Retinal dehydrogenase. |
| 1.2.1.38 | N-acetyl-gamma-glutamyl-phosphate |
| | reductase. |
| 1.2.1.39 | Phenylacetaldehyde dehydrogenase. |
| 1.2.1.40 | 3-alpha,7-alpha,12-alpha- |
| | trihydroxycholestan-26-al 26-oxidoreductase. |
| 1.2.1.41 | Glutamate-5-semialdehyde dehydrogenase. |
| 1.2.1.42 | Hexadecanal dehydrogenase (acylating). |
| 1.2.1.43 | Formate dehydrogenase (NADP+). |
| 1.2.1.44 | Cinnamoyl-CoA reductase. |
| 1.2.1.45 | 4-carboxy-2-hydroxymuconate-6- |
| | semialdehyde dehydrogenase. |
| 1.2.1.46 | Formaldehyde dehydrogenase. |
| 1.2.1.47 | 4-trimethylammoniobutyraldehyde |
| | dehydrogenase. |
| 1.2.1.48 | Long-chain-aldehyde dehydrogenase. |
| 1.2.1.49 | 2-oxoaldehyde dehydrogenase |
| | (NADP+). |
| 1.2.1.50 | Long-chain-fatty-acyl-CoA reductase. |
| 1.2.1.51 | Pyruvate dehydrogenase (NADP+). |
| 1.2.1.52 | Oxoglutarate dehydrogenase |
| | (NADP+). |
| 1.2.1.53 | 4-hydroxyphenylacetaldehyde |
| | dehydrogenase. |
| 1.2.1.54 | Gamma-guanidinobutyraldehyde |
| | dehydrogenase. |
| 1.2.1.57 | Butanal dehydrogenase. |
| 1.2.1.58 | Phenylglyoxylate dehydrogenase |
| | (acylating). |
| 1.2.1.59 | Glyceraldehyde-3-phosphate |
| | dehydrogenase (NAD(P)(+)) (phosphorylating). |
| 1.2.1.60 | 5-carboxymethyl-2-hydroxymuconic- |
| | semialdehyde dehydrogenase. |
| 1.2.1.61 | 4-hydroxymuconic-semialdehyde |
| | dehydrogenase. |
| 1.2.1.62 | 4-formylbenzenesulfonate |
| | dehydrogenase. |
| 1.2.1.63 | 6-oxohexanoate dehydrogenase. |
| 1.2.1.64 | 4-hydroxybenzaldehyde |
| | dehydrogenase. |
| 1.2.1.65 | Salicylaldehyde dehydrogenase. |
| 1.2.1.66 | Mycothiol-dependent formaldehyde |
| | dehydrogenase. |
| 1.2.1.67 | Vanillin dehydrogenase. |
| 1.2.1.68 | Coniferyl-aldehyde dehydrogenase. |
| 1.2.1.69 | Fluoroacetaldehyde dehydrogenase. |
| 1.2.2.1 | Formate dehydrogenase (cytochrome). |
| 1.2.2.2 | Pyruvate dehydrogenase (cytochrome). |
| 1.2.2.3 | Formate dehydrogenase (cytochrome c- |
| | 553). |
| 1.2.2.4 | Carbon-monoxide dehydrogenase |
| | (cytochrome b-561). |
| 1.2.3.1 | Aldehyde oxidase. |
| 1.2.3.3 | Pyruvate oxidase. |
| 1.2.3.4 | Oxalate oxidase. |
| 1.2.3.5 | Glyoxylate oxidase. |
| 1.2.3.6 | Pyruvate oxidase (CoA-acetylating). |
| 1.2.3.7 | Indole-3-acetaldehyde oxidase. |
| 1.2.3.8 | Pyridoxal oxidase. |
| 1.2.3.9 | Aryl-aldehyde oxidase. |
| 1.2.3.11 | Retinal oxidase. |
| 1.2.3.13 | 4-hydroxyphenylpyruvate oxidase. |
| 1.2.4.1 | Pyruvate dehydrogenase (acetyl- |
| | transferring). |
| 1.2.4.2 | Oxoglutarate dehydrogenase (succinyl- |
| | transferring). |
| 1.2.4.4 | 3-methyl-2-oxobutanoate dehydrogenase (2- |
| | methylpropanoyl-transferring). |
| 1.2.7.1 | Pyruvate synthase. |
| 1.2.7.2 | 2-oxobutyrate synthase. |
| 1.2.7.3 | 2-oxoglutarate synthase. |
| 1.2.7.4 | Carbon-monoxide dehydrogenase |
| | (ferredoxin). |
| 1.2.7.5 | Aldehyde ferredoxin oxidoreductase. |
| 1.2.7.6 | Glyceraldehyde-3-phosphate dehydrogenase |
| | (ferredoxin). |
| 1.2.7.7 | 3-methyl-2-oxobutanoate dehydrogenase |
| | (ferredoxin). |
| 1.2.7.8 | Indolepyruvate ferredoxin oxidoreductase. |
| 1.2.7.9 | 2-oxoglutarate ferredoxin oxidoreductase. |
| 1.2.99.2 | Carbon-monoxide dehydrogenase |
| | (acceptor). |
| 1.2.99.3 | Aldehyde dehydrogenase (pyrroloquinoline- |
| | quinone). |
| 1.2.99.4 | Formaldehyde dismutase. |
| 1.2.99.5 | Formylmethanofuran dehydrogenase. |
| 1.2.99.6 | Carboxylate reductase. |
| 1.2.99.7 | Aldehyde dehydrogenase (FAD- |
| | independent). |
| 1.3.1.1 | Dihydrouracil dehydrogenase (NAD+). |
| 1.3.1.2 | Dihydropyrimidine dehydrogenase |
| | (NADP+). |
| 1.3.1.3 | Cortisone beta-reductase. |
| 1.3.1.4 | Cortisone alpha-reductase. |
| 1.3.1.5 | Cucurbitacin delta(23)-reductase. |
| 1.3.1.6 | Fumarate reductase (NADH). |
| 1.3.1.7 | Meso-tartrate dehydrogenase. |
| 1.3.1.8 | Acyl-CoA dehydrogenase (NADP+). |
| 1.3.1.9 | Enoyl-[acyl-carrier-protein] reductase |
| | (NADH). |
| 1.3.1.10 | Enoyl-[acyl-carrier-protein] reductase |
| | (NADPH, B-specific). |
| 1.3.1.11 | 2-coumarate reductase. |
| 1.3.1.12 | Prephenate dehydrogenase. |
| 1.3.1.13 | Prephenate dehydrogenase (NADP+). |
| 1.3.1.14 | Orotate reductase (NADH). |
| 1.3.1.15 | Orotate reductase (NADPH). |
| 1.3.1.16 | Beta-nitroacrylate reductase. |
| 1.3.1.17 | 3-methyleneoxindole reductase. |
| 1.3.1.18 | Kynurenate-7,8-dihydrodiol dehydrogenase. |
| 1.3.1.19 | Cis-1,2-dihydrobenzene-1,2-diol |
| | dehydrogenase. |
| 1.3.1.20 | Trans-1,2-dihydrobenzene-1,2-diol |
| | dehydrogenase. |
| 1.3.1.21 | 7-dehydrocholesterol reductase. |
| 1.3.1.22 | Cholestenone 5-alpha-reductase. |
| 1.3.1.23 | Cholestenone 5-beta-reductase. |
| 1.3.1.24 | Biliverdin reductase. |
| 1.3.1.25 | 1,6-dihydroxycyclohexa-2,4-diene-1- |
| | carboxylate dehydrogenase. |
| 1.3.1.26 | Dihydrodipicolinate reductase. |
| 1.3.1.27 | 2-hexadecenal reductase. |
| 1.3.1.28 | 2,3-dihydro-2,3-dihydroxybenzoate |
| | dehydrogenase. |
| 1.3.1.29 | Cis-1,2-dihydro-1,2-dihydroxynaphthalene |
| | dehydrogenase. |
| 1.3.1.30 | Progesterone 5-alpha-reductase. |
| 1.3.1.31 | 2-enoate reductase. |
| 1.3.1.32 | Maleylacetate reductase. |
| 1.3.1.33 | Protochlorophyllide reductase. |
| 1.3.1.34 | 2,4-dienoyl-CoA reductase (NADPH). |
| 1.3.1.35 | Phosphatidylcholine desaturase. |
| 1.3.1.36 | Geissoschizine dehydrogenase. |
| 1.3.1.37 | Cis-2-enoyl-CoA reductase (NADPH). |
| 1.3.1.38 | Trans-2-enoyl-CoA reductase (NADPH). |
| 1.3.1.39 | Enoyl-[acyl-carrier-protein] reductase |
| | (NADPH, A-specific). |
| 1.3.1.40 | 2-hydroxy-6-oxo-6-phenylhexa-2,4- |
| | dienoate reductase. |
| 1.3.1.41 | Xanthommatin reductase. |
| 1.3.1.42 | 12-oxophytodienoate reductase. |
| 1.3.1.43 | Cyclohexadienyl dehydrogenase. |
| 1.3.1.44 | Trans-2-enoyl-CoA reductase (NAD+). |
| 1.3.1.45 | 2′-hydroxyisoflavone reductase. |
| 1.3.1.46 | Biochanin-A reductase. |
| 1.3.1.47 | Alpha-santonin 1,2-reductase. |
| 1.3.1.48 | 15-oxoprostaglandin 13-oxidase. |
| 1.3.1.49 | Cis-3,4-dihydrophenanthrene-3,4-diol |
| | dehydrogenase. |
| 1.3.1.51 | 2′-hydroxydaidzein reductase. |
| 1.3.1.52 | 2-methyl-branched-chain-enoyl-CoA |
| | reductase. |
| 1.3.1.53 | (3S,4R)-3,4-dihydroxycyclohexa-1,5- |
| | diene-1,4-dicarboxylate dehydrogenase. |
| 1.3.1.54 | Precorrin-6A reductase. |
| 1.3.1.56 | Cis-2,3-dihydrobiphenyl-2,3-diol |
| | dehydrogenase. |
| 1.3.1.57 | Phloroglucinol reductase. |
| 1.3.1.58 | 2,3-dihydroxy-2,3-dihydro-p-cumate |
| | dehydrogenase. |
| 1.3.1.59 | 1,6-dihydroxy-5-methylcyclohexa-2,4- |
| | dienecarboxylate dehydrogenase. |
| 1.3.1.60 | Dibenzothiophene dihydrodiol |
| | dehydrogenase. |
| 1.3.1.61 | Terephthalate 1,2-cis-dihydrodiol |
| | dehydrogenase. |
| 1.3.1.62 | Pimeloyl-CoA dehydrogenase. |
| 1.3.1.63 | 2,4-dichlorobenzoyl-CoA reductase. |
| 1.3.1.64 | Phthalate 4,5-cis-dihydrodiol |
| | dehydrogenase. |
| 1.3.1.65 | 5,6-dihydroxy-3-methyl-2-oxo-1,2,5,6- |
| | tetrahydroquinoline dehydrogenase. |
| 1.3.1.66 | Cis-dihydroethylcatechol |
| | dehydrogenase. |
| 1.3.1.67 | Cis-1,2-dihydroxy-4-methylcyclohexa- |
| | 3,5-diene-1-carboxylate dehydrogenase. |
| 1.3.1.68 | 1,2-dihydroxy-6-methylcyclohexa-3,5- |
| | dienecarboxylate dehydrogenase. |
| 1.3.1.69 | Zeatin reductase. |
| 1.3.1.70 | Delta(14)-sterol reductase. |
| 1.3.1.71 | Delta(24(24(1)))-sterol reductase. |
| 1.3.1.72 | Delta(24)-sterol reductase. |
| 1.3.1.73 | 1,2-dihydrovomilenine reductase. |
| 1.3.1.74 | 2-alkenal reductase. |
| 1.3.1.75 | Divinyl chlorophyllide a 8-vinyl- |
| | reductase. |
| 1.3.1.76 | Precorrin-2 dehydrogenase. |
| 1.3.2.3 | Galactonolactone dehydrogenase. |
| 1.3.3.1 | Dihydroorotate oxidase. |
| 1.3.3.2 | Lathosterol oxidase. |
| 1.3.3.3 | Coproporphyrinogen oxidase. |
| 1.3.3.4 | Protoporphyrinogen oxidase. |
| 1.3.3.5 | Bilirubin oxidase. |
| 1.3.3.6 | Acyl-CoA oxidase. |
| 1.3.3.7 | Dihydrouracil oxidase. |
| 1.3.3.8 | Tetrahydroberberine oxidase. |
| 1.3.3.9 | Secologanin synthase. |
| 1.3.3.10 | Tryptophan alpha,beta-oxidase. |
| 1.3.5.1 | Succinate dehydrogenase (ubiquinone). |
| 1.3.7.1 | 6-hydroxynicotinate reductase. |
| 1.3.7.2 | 15,16-dihydrobiliverdin:ferredoxin |
| | oxidoreductase. |
| 1.3.7.3 | Phycoerythrobilin:ferredoxin |
| | oxidoreductase. |
| 1.3.7.4 | Phytochromobilin:ferredoxin |
| | oxidoreductase. |
| 1.3.7.5 | Phycocyanobilin:ferredoxin |
| | oxidoreductase. |
| 1.3.99.1 | Succinate dehydrogenase. |
| 1.3.99.2 | Butyryl-CoA dehydrogenase. |
| 1.3.99.3 | Acyl-CoA dehydrogenase. |
| 1.3.99.4 | 3-oxosteroid 1-dehydrogenase. |
| 1.3.99.5 | 3-oxo-5-alpha-steroid 4-dehydrogenase. |
| 1.3.99.6 | 3-oxo-5-beta-steroid 4-dehydrogenase. |
| 1.3.99.7 | Glutaryl-CoA dehydrogenase. |
| 1.3.99.8 | 2-furoyl-CoA dehydrogenase. |
| 1.3.99.10 | Isovaleryl-CoA dehydrogenase. |
| 1.3.99.11 | Dihydroorotate dehydrogenase. |
| 1.3.99.12 | 2-methylacyl-CoA dehydrogenase. |
| 1.3.99.13 | Long-chain-acyl-CoA dehydrogenase. |
| 1.3.99.14 | Cyclohexanone dehydrogenase. |
| 1.3.99.15 | Benzoyl-CoA reductase. |
| 1.3.99.16 | Isoquinoline 1-oxidoreductase. |
| 1.3.99.17 | Quinoline 2-oxidoreductase. |
| 1.3.99.18 | Quinaldate 4-oxidoreductase. |
| 1.3.99.19 | Quinoline-4-carboxylate 2- |
| | oxidoreductase. |
| 1.3.99.20 | 4-hydroxybenzoyl-CoA reductase. |
| 1.3.99.21 | (R)-benzylsuccinyl-CoA |
| | dehydrogenase. |
| 1.4.1.1 | Alanine dehydrogenase. |
| 1.4.1.2 | Glutamate dehydrogenase. |
| 1.4.1.3 | Glutamate dehydrogenase (NAD(P)+). |
| 1.4.1.4 | Glutamate dehydrogenase (NADP+). |
| 1.4.1.5 | L-amino-acid dehydrogenase. |
| 1.4.1.7 | Serine 2-dehydrogenase. |
| 1.4.1.8 | Valine dehydrogenase (NADP+). |
| 1.4.1.9 | Leucine dehydrogenase. |
| 1.4.1.10 | Glycine dehydrogenase. |
| 1.4.1.11 | L-erythro-3,5-diaminohexanoate |
| | dehydrogenase. |
| 1.4.1.12 | 2,4-diaminopentanoate dehydrogenase. |
| 1.4.1.13 | Glutamate synthase (NADPH). |
| 1.4.1.14 | Glutamate synthase (NADH). |
| 1.4.1.15 | Lysine dehydrogenase. |
| 1.4.1.16 | Diaminopimelate dehydrogenase. |
| 1.4.1.17 | N-methylalanine dehydrogenase. |
| 1.4.1.18 | Lysine 6-dehydrogenase. |
| 1.4.1.19 | Tryptophan dehydrogenase. |
| 1.4.1.20 | Phenylalanine dehydrogenase. |
| 1.4.2.1 | Glycine dehydrogenase (cytochrome). |
| 1.4.3.1 | D-aspartate oxidase. |
| 1.4.3.2 | L-amino-acid oxidase. |
| 1.4.3.3 | D-amino-acid oxidase. |
| 1.4.3.4 | Amine oxidase (flavin-containing). |
| 1.4.3.5 | Pyridoxamine-phosphate oxidase. |
| 1.4.3.6 | Amine oxidase (copper-containing). |
| 1.4.3.7 | D-glutamate oxidase. |
| 1.4.3.8 | Ethanolamine oxidase. |
| 1.4.3.10 | Putrescine oxidase. |
| 1.4.3.11 | L-glutamate oxidase. |
| 1.4.3.12 | Cyclohexylamine oxidase. |
| 1.4.3.13 | Protein-lysine 6-oxidase. |
| 1.4.3.14 | L-lysine oxidase. |
| 1.4.3.15 | D-glutamate(D-aspartate) oxidase. |
| 1.4.3.16 | L-aspartate oxidase. |
| 1.4.3.19 | Glycine oxidase. |
| 1.4.4.2 | Glycine dehydrogenase (decarboxylating). |
| 1.4.7.1 | Glutamate synthase (ferredoxin). |
| 1.4.99.1 | D-amino-acid dehydrogenase. |
| 1.4.99.2 | Taurine dehydrogenase. |
| 1.4.99.3 | Amine dehydrogenase. |
| 1.4.99.4 | Aralkylamine dehydrogenase. |
| 1.4.99.5 | Glycine dehydrogenase (cyanide- |
| | forming). |
| 1.5.1.1 | Pyrroline-2-carboxylate reductase. |
| 1.5.1.2 | Pyrroline-5-carboxylate reductase. |
| 1.5.1.3 | Dihydrofolate reductase. |
| 1.5.1.5 | Methylenetetrahydrofolate dehydrogenase |
| | (NADP+). |
| 1.5.1.6 | Formyltetrahydrofolate dehydrogenase. |
| 1.5.1.7 | Saccharopine dehydrogenase (NAD+, L- |
| | lysine-forming). |
| 1.5.1.8 | Saccharopine dehydrogenase (NADP+, L- |
| | lysine-forming). |
| 1.5.1.9 | Saccharopine dehydrogenase (NAD+, L- |
| | glutamate-forming). |
| 1.5.1.10 | Saccharopine dehydrogenase (NADP+, |
| | L-glutamate-forming). |
| 1.5.1.11 | D-octopine dehydrogenase. |
| 1.5.1.12 | 1-pyrroline-5-carboxylate dehydrogenase. |
| 1.5.1.15 | Methylenetetrahydrofolate dehydrogenase |
| | (NAD+). |
| 1.5.1.16 | D-lysopine dehydrogenase. |
| 1.5.1.17 | Alanopine dehydrogenase. |
| 1.5.1.18 | Ephedrine dehydrogenase. |
| 1.5.1.19 | D-nopaline dehydrogenase. |
| 1.5.1.20 | Methylenetetrahydrofolate reductase |
| | (NADPH). |
| 1.5.1.21 | Delta(1)-piperideine-2-carboxylate |
| | reductase. |
| 1.5.1.22 | Strombine dehydrogenase. |
| 1.5.1.23 | Tauropine dehydrogenase. |
| 1.5.1.24 | N(5)-(carboxyethyl)ornithine synthase. |
| 1.5.1.25 | Thiomorpholine-carboxylate |
| | dehydrogenase. |
| 1.5.1.26 | Beta-alanopine dehydrogenase. |
| 1.5.1.27 | 1,2-dehydroreticulinium reductase |
| | (NADPH). |
| 1.5.1.28 | Opine dehydrogenase. |
| 1.5.1.29 | FMN reductase. |
| 1.5.1.30 | Flavin reductase. |
| 1.5.1.31 | Berberine reductase. |
| 1.5.1.32 | Vomilenine reductase. |
| 1.5.1.33 | Pteridine reductase. |
| 1.5.1.34 | 6,7-dihydropteridine reductase. |
| 1.5.3.1 | Sarcosine oxidase. |
| 1.5.3.2 | N-methyl-L-amino-acid oxidase. |
| 1.5.3.4 | N(6)-methyl-lysine oxidase. |
| 1.5.3.5 | (S)-6-hydroxynicotine oxidase. |
| 1.5.3.6 | (R)-6-hydroxynicotine oxidase. |
| 1.5.3.7 | L-pipecolate oxidase. |
| 1.5.3.10 | Dimethylglycine oxidase. |
| 1.5.3.11 | Polyamine oxidase. |
| 1.5.3.12 | Dihydrobenzophenanthridine oxidase. |
| 1.5.4.1 | Pyrimidodiazepine synthase. |
| 1.5.5.1 | Electron-transferring-flavoprotein |
| | dehydrogenase. |
| 1.5.8.1 | Dimethylamine dehydrogenase. |
| 1.5.8.2 | Trimethylamine dehydrogenase. |
| 1.5.99.1 | Sarcosine dehydrogenase. |
| 1.5.99.2 | Dimethylglycine dehydrogenase. |
| 1.5.99.3 | L-pipecolate dehydrogenase. |
| 1.5.99.4 | Nicotine dehydrogenase. |
| 1.5.99.5 | Methylglutamate dehydrogenase. |
| 1.5.99.6 | Spermidine dehydrogenase. |
| 1.5.99.8 | Proline dehydrogenase. |
| 1.5.99.9 | Methylenetetrahydromethanopterin |
| | dehydrogenase. |
| 1.5.99.11 | 5,10-methylenetetrahydromethanopterin |
| | reductase. |
| 1.5.99.12 | Cytokinin dehydrogenase. |
| 1.6.1.1 | NAD(P)(+) transhydrogenase (B-specific). |
| 1.6.1.2 | NAD(P)(+) transhydrogenase (AB- |
| | specific). |
| 1.6.2.2 | Cytochrome-b5 reductase. |
| 1.6.2.4 | NADPH--hemoprotein reductase. |
| 1.6.2.5 | NADPH--cytochrome-c2 reductase. |
| 1.6.2.6 | Leghemoglobin reductase. |
| 1.6.3.1 | NAD(P)H oxidase. |
| 1.6.5.3 | NADH dehydrogenase (ubiquinone). |
| 1.6.5.4 | Monodehydroascorbate reductase (NADH). |
| 1.6.5.5 | NADPH:quinone reductase. |
| 1.6.5.6 | p-benzoquinone reductase (NADPH). |
| 1.6.5.7 | 2-hydroxy-1,4-benzoquinone reductase. |
| 1.6.6.9 | Trimethylamine-N-oxide reductase. |
| 1.6.99.1 | NADPH dehydrogenase. |
| 1.6.99.2 | NAD(P)H dehydrogenase (quinone). |
| 1.6.99.3 | NADH dehydrogenase. |
| 1.6.99.5 | NADH dehydrogenase (quinone). |
| 1.6.99.6 | NADPH dehydrogenase (quinone). |
| 1.7.1.1 | Nitrate reductase (NADH). |
| 1.7.1.2 | Nitrate reductase (NAD(P)H). |
| 1.7.1.3 | Nitrate reductase (NADPH). |
| 1.7.1.4 | Nitrite reductase (NAD(P)H). |
| 1.7.1.5 | Hyponitrite reductase. |
| 1.7.1.6 | Azobenzene reductase. |
| 1.7.1.7 | GMP reductase. |
| 1.7.1.9 | Nitroquinoline-N-oxide reductase. |
| 1.7.1.10 | Hydroxylamine reductase (NADH). |
| 1.7.1.11 | 4- |
| | (dimethylamino)phenylazoxybenzene reductase. |
| 1.7.1.12 | N-hydroxy-2-acetamidofluorene |
| | reductase. |
| 1.7.2.1 | Nitrite reductase (NO-forming). |
| 1.7.2.2 | Nitrite reductase (cytochrome; |
| | ammonia-forming). |
| 1.7.2.3 | Trimethylamine-N-oxide reductase |
| | (cytochrome c). |
| 1.7.3.1 | Nitroethane oxidase. |
| 1.7.3.2 | Acetylindoxyl oxidase. |
| 1.7.3.3 | Urate oxidase. |
| 1.7.3.4 | Hydroxylamine oxidase. |
| 1.7.3.5 | 3-aci-nitropropanoate oxidase. |
| 1.7.7.1 | Ferredoxin--nitrite reductase. |
| 1.7.7.2 | Ferredoxin--nitrate reductase. |
| 1.7.99.1 | Hydroxylamine reductase. |
| 1.7.99.4 | Nitrate reductase. |
| 1.7.99.5 | 5,10-methylenetetrahydrofolate |
| | reductase (FADH(2)). |
| 1.7.99.6 | Nitrous-oxide reductase. |
| 1.7.99.7 | Nitric-oxide reductase. |
| 1.7.99.8 | Hydroxylamine oxidoreductase. |
| 1.8.1.2 | Sulfite reductase (NADPH). |
| 1.8.1.3 | Hypotaurine dehydrogenase. |
| 1.8.1.4 | Dihydrolipoyl dehydrogenase. |
| 1.8.1.5 | 2-oxopropyl-CoM reductase |
| | (carboxylating). |
| 1.8.1.6 | Cystine reductase. |
| 1.8.1.7 | Glutathione-disulfide reductase. |
| 1.8.1.8 | Protein-disulfide reductase. |
| 1.8.1.9 | Thioredoxin-disulfide reductase. |
| 1.8.1.10 | CoA-glutathione reductase. |
| 1.8.1.11 | Asparagusate reductase. |
| 1.8.1.12 | Trypanothione-disulfide reductase. |
| 1.8.1.13 | Bis-gamma-glutamylcystine reductase. |
| 1.8.1.14 | CoA-disulfide reductase. |
| 1.8.1.15 | Mycothione reductase. |
| 1.8.2.1 | Sulfite dehydrogenase. |
| 1.8.2.2 | Thiosulfate dehydrogenase. |
| 1.8.3.1 | Sulfite oxidase. |
| 1.8.3.2 | Thiol oxidase. |
| 1.8.3.3 | Glutathione oxidase. |
| 1.8.3.4 | Methanethiol oxidase. |
| 1.8.3.5 | Prenylcysteine oxidase. |
| 1.8.4.1 | Glutathione--homocystine |
| | transhydrogenase. |
| 1.8.4.2 | Protein-disulfide reductase |
| | (glutathione). |
| 1.8.4.3 | Glutathione--CoA-glutathione |
| | transhydrogenase. |
| 1.8.4.4 | Glutathione--cystine transhydrogenase. |
| 1.8.4.5 | Methionine-S-oxide reductase. |
| 1.8.4.6 | Protein-methionine-S-oxide reductase. |
| 1.8.4.7 | Enzyme-thiol transhydrogenase |
| | (glutathione-disulfide). |
| 1.8.4.8 | Phosphoadenylyl-sulfate reductase |
| | (thioredoxin). |
| 1.8.4.9 | Adenylyl-sulfate reductase |
| | (glutathione). |
| 1.8.4.10 | Adenylyl-sulfate reductase |
| | (thioredoxin). |
| 1.8.5.1 | Glutathione dehydrogenase (ascorbate). |
| 1.8.7.1 | Sulfite reductase (ferredoxin). |
| 1.8.98.1 | CoB--CoM heterodisulfide reductase. |
| 1.8.99.1 | Sulfite reductase. |
| 1.8.99.2 | Adenylyl-sulfate reductase. |
| 1.8.99.3 | Hydrogensulfite reductase. |
| 1.9.3.1 | Cytochrome-c oxidase. |
| 1.9.6.1 | Nitrate reductase (cytochrome). |
| 1.9.99.1 | Iron--cytochrome-c reductase. |
| 1.10.1.1 | Trans-acenaphthene-1,2-diol |
| | dehydrogenase. |
| 1.10.2.1 | L-ascorbate--cytochrome-b5 reductase. |
| 1.10.2.2 | Ubiquinol--cytochrome-c reductase. |
| 1.10.3.1 | Catechol oxidase. |
| 1.10.3.2 | Laccase. |
| 1.10.3.3 | L-ascorbate oxidase. |
| 1.10.3.4 | O-aminophenol oxidase. |
| 1.10.3.5 | 3-hydroxyanthranilate oxidase. |
| 1.10.3.6 | Rifamycin-B oxidase. |
| 1.10.99.1 | Plastoquinol--plastocyanin reductase. |
| 1.11.1.1 | NADH peroxidase. |
| 1.11.1.2 | NADPH peroxidase. |
| 1.11.1.3 | Fatty-acid peroxidase. |
| 1.11.1.5 | Cytochrome-c peroxidase. |
| 1.11.1.6 | Catalase. |
| 1.11.1.7 | Peroxidase. |
| 1.11.1.8 | Iodide peroxidase. |
| 1.11.1.9 | Glutathione peroxidase. |
| 1.11.1.10 | Chloride peroxidase. |
| 1.11.1.11 | L-ascorbate peroxidase. |
| 1.11.1.12 | Phospholipid-hydroperoxide glutathione |
| | peroxidase. |
| 1.11.1.13 | Manganese peroxidase. |
| 1.11.1.14 | Diarylpropane peroxidase. |
| 1.12.1.2 | Hydrogen dehydrogenase. |
| 1.12.1.3 | Hydrogen dehydrogenase (NADP+). |
| 1.12.2.1 | Cytochrome-c3 hydrogenase. |
| 1.12.5.1 | Hydrogen:quinone oxidoreductase. |
| 1.12.7.2 | Ferredoxin hydrogenase. |
| 1.12.98.1 | Coenzyme F420 hydrogenase. |
| 1.12.98.2 | 5,10-methenyltetrahydromethanopterin |
| | hydrogenase. |
| 1.12.98.3 | Methanosarcina-phenazine hydrogenase. |
| 1.12.99.6 | Hydrogenase (acceptor). |
| 1.13.11.1 | Catechol 1,2-dioxygenase. |
| 1.13.11.2 | Catechol 2,3-dioxygenase. |
| 1.13.11.3 | Protocatechuate 3,4-dioxygenase. |
| 1.13.11.4 | Gentisate 1,2-dioxygenase. |
| 1.13.11.5 | Homogentisate 1,2-dioxygenase. |
| 1.13.11.6 | 3-hydroxyanthranilate 3,4-dioxygenase. |
| 1.13.11.8 | Protocatechuate 4,5-dioxygenase. |
| 1.13.11.9 | 2,5-dihydroxypyridine 5,6-dioxygenase. |
| 1.13.11.10 | 7,8-dihydroxykynurenate 8,8a- |
| | dioxygenase. |
| 1.13.11.11 | Tryptophan 2,3-dioxygenase. |
| 1.13.11.12 | Lipoxygenase. |
| 1.13.11.13 | Ascorbate 2,3-dioxygenase. |
| 1.13.11.14 | 2,3-dihydroxybenzoate 3,4-dioxygenase. |
| 1.13.11.15 | 3,4-dihydroxyphenylacetate 2,3- |
| | dioxygenase. |
| 1.13.11.16 | 3-carboxyethylcatechol 2,3-dioxygenase. |
| 1.13.11.17 | Indole 2,3-dioxygenase. |
| 1.13.11.18 | Sulfur dioxygenase. |
| 1.13.11.19 | Cysteamine dioxygenase. |
| 1.13.11.20 | Cysteine dioxygenase. |
| 1.13.11.22 | Caffeate 3,4-dioxygenase. |
| 1.13.11.23 | 2,3-dihydroxyindole 2,3-dioxygenase. |
| 1.13.11.24 | Quercetin 2,3-dioxygenase. |
| 1.13.11.25 | 3,4-dihydroxy-9,10-secoandrosta- |
| | 1,3,5(10)-triene-9,17-dione 4,5-dioxygenase. |
| 1.13.11.26 | Peptide-tryptophan 2,3-dioxygenase. |
| 1.13.11.27 | 4-hydroxyphenylpyruvate dioxygenase. |
| 1.13.11.28 | 2,3-dihydroxybenzoate 2,3-dioxygenase. |
| 1.13.11.29 | Stizolobate synthase. |
| 1.13.11.30 | Stizolobinate synthase. |
| 1.13.11.31 | Arachidonate 12-lipoxygenase. |
| 1.13.11.32 | 2-nitropropane dioxygenase. |
| 1.13.11.33 | Arachidonate 15-lipoxygenase. |
| 1.13.11.34 | Arachidonate 5-lipoxygenase. |
| 1.13.11.35 | Pyrogallol 1,2-oxygenase. |
| 1.13.11.36 | Chloridazon-catechol dioxygenase. |
| 1.13.11.37 | Hydroxyquinol 1,2-dioxygenase. |
| 1.13.11.38 | 1-hydroxy-2-naphthoate 1,2-dioxygenase. |
| 1.13.11.39 | Biphenyl-2,3-diol 1,2-dioxygenase. |
| 1.13.11.40 | Arachidonate 8-lipoxygenase. |
| 1.13.11.41 | 2,4′-dihydroxyacetophenone dioxygenase. |
| 1.13.11.42 | Indoleamine-pyrrole 2,3-dioxygenase. |
| 1.13.11.43 | Lignostilbene alpha-beta-dioxygenase. |
| 1.13.11.44 | Linoleate diol synthase. |
| 1.13.11.45 | Linoleate 11-lipoxygenase. |
| 1.13.11.46 | 4-hydroxymandelate synthase. |
| 1.13.11.47 | 3-hydroxy-4-oxoquinoline 2,4- |
| | dioxygenase. |
| 1.13.11.48 | 3-hydroxy-2-methylquinolin-4-one 2,4- |
| | dioxygenase. |
| 1.13.11.49 | Chlorite O(2)-lyase. |
| 1.13.11.50 | Acetylacetone-cleaving enzyme. |
| 1.13.12.1 | Arginine 2-monooxygenase. |
| 1.13.12.2 | Lysine 2-monooxygenase. |
| 1.13.12.3 | Tryptophan 2-monooxygenase. |
| 1.13.12.4 | Lactate 2-monooxygenase. |
| 1.13.12.5 | Renilla-luciferin 2-monooxygenase. |
| 1.13.12.6 | Cypridina-luciferin 2-monooxygenase. |
| 1.13.12.7 | Photinus-luciferin 4-monooxygenase (ATP- |
| | hydrolyzing). |
| 1.13.12.8 | Watasenia-luciferin 2-monooxygenase. |
| 1.13.12.9 | Phenylalanine 2-monooxygenase. |
| 1.13.12.11 | Methylphenyltetrahydropyridine N- |
| | monooxygenase. |
| 1.13.12.12 | Apo-beta-carotenoid-14′,13′-dioxygenase. |
| 1.13.12.13 | Oplophorus-luciferin 2-monooxygenase. |
| 1.13.99.1 | Inositol oxygenase. |
| 1.13.99.3 | Tryptophan 2′-dioxygenase. |
| 1.14.11.1 | Gamma-butyrobetaine dioxygenase. |
| 1.14.11.2 | Procollagen-proline dioxygenase. |
| 1.14.11.3 | Pyrimidine-deoxynucleoside 2′- |
| | dioxygenase. |
| 1.14.11.4 | Procollagen-lysine 5-dioxygenase. |
| 1.14.11.6 | Thymine dioxygenase. |
| 1.14.11.7 | Procollagen-proline 3-dioxygenase. |
| 1.14.11.8 | Trimethyllysine dioxygenase. |
| 1.14.11.9 | Naringenin 3-dioxygenase. |
| 1.14.11.10 | Pyrimidine-deoxynucleoside 1′- |
| | dioxygenase. |
| 1.14.11.11 | Hyoscyamine (6S)-dioxygenase. |
| 1.14.11.12 | Gibberellin-44 dioxygenase. |
| 1.14.11.13 | Gibberellin 2-beta-dioxygenase. |
| 1.14.11.14 | 6-beta-hydroxyhyoscyamine |
| | epoxidase. |
| 1.14.11.15 | Gibberellin 3-beta-dioxygenase. |
| 1.14.11.16 | Peptide-aspartate beta- |
| | dioxygenase. |
| 1.14.11.17 | Taurine dioxygenase. |
| 1.14.11.18 | Phytanoyl-CoA dioxygenase. |
| 1.14.11.19 | Leucocyanidin oxygenase. |
| 1.14.11.20 | Desacetoxyvindoline 4- |
| | hydroxylase. |
| 1.14.11.21 | Clavaminate synthase. |
| 1.14.12.1 | Anthranilate 1,2-dioxygenase |
| | (deaminating, decarboxylating). |
| 1.14.12.3 | Benzene 1,2-dioxygenase. |
| 1.14.12.4 | 3-hydroxy-2- |
| | methylpyridinecarboxylate dioxygenase. |
| 1.14.12.5 | 5-pyridoxate dioxygenase. |
| 1.14.12.7 | Phthalate 4,5-dioxygenase. |
| 1.14.12.8 | 4-sulfobenzoate 3,4-dioxygenase. |
| 1.14.12.9 | 4-chlorophenylacetate 3,4- |
| | dioxygenase. |
| 1.14.12.10 | Benzoate 1,2-dioxygenase. |
| 1.14.12.11 | Toluene dioxygenase. |
| 1.14.12.12 | Naphthalene 1,2-dioxygenase. |
| 1.14.12.13 | 2-chlorobenzoate 1,2-dioxygenase. |
| 1.14.12.14 | 2-aminobenzenesulfonate 2,3- |
| | dioxygenase. |
| 1.14.12.15 | Terephthalate 1,2-dioxygenase. |
| 1.14.12.16 | 2-hydroxyquinoline 5,6- |
| | dioxygenase. |
| 1.14.12.17 | Nitric oxide dioxygenase. |
| 1.14.12.18 | Biphenyl 2,3-dioxygenase. |
| 1.14.13.1 | Salicylate 1-monooxygenase. |
| 1.14.13.2 | 4-hydroxybenzoate 3- |
| | monooxygenase. |
| 1.14.13.3 | 4-hydroxyphenylacetate 3- |
| | monooxygenase. |
| 1.14.13.4 | Melilotate 3-monooxygenase. |
| 1.14.13.5 | Imidazoleacetate 4- |
| | monooxygenase. |
| 1.14.13.6 | Orcinol 2-monooxygenase. |
| 1.14.13.7 | Phenol 2-monooxygenase. |
| 1.14.13.8 | Dimethylaniline monooxygenase |
| | (N-oxide-forming). |
| 1.14.16.4 | Tryptophan 5-monooxygenase. |
| 1.14.16.5 | Glyceryl-ether monooxygenase. |
| 1.14.16.6 | Mandelate 4-monooxygenase. |
| 1.14.17.1 | Dopamine beta-monooxygenase. |
| 1.14.17.3 | Peptidylglycine monooxygenase. |
| 1.14.17.4 | Aminocyclopropanecarboxylate oxidase. |
| 1.14.18.1 | Monophenol monooxygenase. |
| 1.14.18.2 | CMP-N-acetylneuraminate |
| | monooxygenase. |
| 1.14.19.1 | Stearoyl-CoA 9-desaturase. |
| 1.14.19.2 | Acyl-[acyl-carrier-protein] desaturase. |
| 1.14.19.3 | Linoleoyl-CoA desaturase. |
| 1.14.20.1 | Deacetoxycephalosporin-C synthase. |
| 1.14.21.1 | (S)-stylopine synthase. |
| 1.14.21.2 | (S)-cheilanthifoline synthase. |
| 1.14.21.3 | Berbamunine synthase. |
| 1.14.21.4 | Salutaridine synthase. |
| 1.14.21.5 | (S)-canadine synthase. |
| 1.14.99.1 | Prostaglandin-endoperoxide synthase. |
| 1.14.99.2 | Kynurenine 7,8-hydroxylase. |
| 1.14.99.3 | Heme oxygenase (decyclizing). |
| 1.14.99.4 | Progesterone monooxygenase. |
| 1.14.99.7 | Squalene monooxygenase. |
| 1.14.99.9 | Steroid 17-alpha-monooxygenase. |
| 1.14.99.10 | Steroid 21-monooxygenase. |
| 1.14.99.11 | Estradiol 6-beta-monooxygenase. |
| 1.14.99.12 | Androst-4-ene-3,17-dione |
| | monooxygenase. |
| 1.14.99.14 | Progesterone 11-alpha-monooxygenase. |
| 1.14.99.15 | 4-methoxybenzoate monooxygenase (O- |
| | demethylating). |
| 1.14.99.19 | Plasmanylethanolamine desaturase. |
| 1.14.99.20 | Phylloquinone monooxygenase (2,3- |
| | epoxidizing). |
| 1.14.99.21 | Latia-luciferin monooxygenase |
| | (demethylating). |
| 1.14.99.22 | Ecdysone 20-monooxygenase. |
| 1.14.99.23 | 3-hydroxybenzoate 2-monooxygenase. |
| 1.14.99.24 | Steroid 9-alpha-monooxygenase. |
| 1.14.99.26 | 2-hydroxypyridine 5-monooxygenase. |
| 1.14.99.27 | Juglone 3-monooxygenase. |
| 1.14.99.28 | Linalool 8-monooxygenase. |
| 1.14.99.29 | Deoxyhypusine monooxygenase. |
| 1.14.99.30 | Carotene 7,8-desaturase. |
| 1.14.99.31 | Myristoyl-CoA 11-(E) desaturase. |
| 1.14.99.32 | Myristoyl-CoA 11-(Z) desaturase. |
| 1.14.99.33 | Delta(12)-fatty acid |
| | dehydrogenase. |
| 1.14.99.34 | Monoprenyl isoflavone epoxidase. |
| 1.14.99.35 | Thiophene-2-carbonyl-CoA |
| | monooxygenase. |
| 1.14.99.36 | Beta-carotene 15,15′- |
| | monooxygenase. |
| 1.14.99.37 | Taxadiene 5-alpha-hydroxylase. |
| 1.15.1.1 | Superoxide dismutase. |
| 1.15.1.2 | Superoxide reductase. |
| 1.16.1.1 | Mercury(II) reductase. |
| 1.16.1.2 | Diferric-transferrin reductase. |
| 1.16.1.3 | Aquacobalamin reductase. |
| 1.16.1.4 | Cob(II)alamin reductase. |
| 1.16.1.5 | Aquacobalamin reductase |
| | (NADPH). |
| 1.16.1.6 | Cyanocobalamin reductase |
| | (cyanide-eliminating). |
| 1.16.1.7 | Ferric-chelate reductase. |
| 1.16.1.8 | [Methionine synthase] reductase. |
| 1.16.3.1 | Ferroxidase. |
| 1.16.8.1 | Cob(II)yrinic acid a,c-diamide |
| | reductase. |
| 1.17.1.1 | CDP-4-dehydro-6-deoxyglucose |
| | reductase. |
| 1.17.1.2 | 4-hydroxy-3-methylbut-2-enyl |
| | diphosphate reductase. |
| 1.17.1.3 | Leucoanthocyanidin reductase. |
| 1.17.1.4 | Xanthine dehydrogenase. |
| 1.17.1.5 | Nicotinate dehydrogenase. |
| 1.17.3.1 | Pteridine oxidase. |
| 1.17.3.2 | Xanthine oxidase. |
| 1.17.3.3 | 6-hydroxynicotinate |
| | dehydrogenase. |
| 1.17.4.1 | Ribonucleoside-diphosphate |
| | reductase. |
| 1.17.4.2 | Ribonucleoside-triphosphate |
| | reductase. |
| 1.17.4.3 | 4-hydroxy-3-methylbut-2-en-1-yl |
| | diphosphate synthase. |
| 1.17.5.1 | Phenylacetyl-CoA dehydrogenase. |
| 1.17.99.1 | 4-cresol dehydrogenase |
| | (hydroxylating). |
| 1.17.99.2 | Ethylbenzene hydroxylase. |
| 1.18.1.1 | Rubredoxin--NAD(+) reductase. |
| 1.18.1.2 | Ferredoxin--NADP(+) reductase. |
| 1.18.1.3 | Ferredoxin--NAD(+) reductase. |
| 1.18.1.4 | Rubredoxin--NAD(P)(+) reductase. |
| 1.18.6.1 | Nitrogenase. |
| 1.19.6.1 | Nitrogenase (flavodoxin). |
| 1.20.1.1 | Phosphonate dehydrogenase. |
| 1.20.4.1 | Arsenate reductase (glutaredoxin). |
| 1.20.4.2 | Methylarsonate reductase. |
| 1.20.98.1 | Arsenate reductase (azurin). |
| 1.20.99.1 | Arsenate reductase (donor). |
| 1.21.3.1 | Isopenicillin-N synthase. |
| 1.21.3.2 | Columbamine oxidase. |
| 1.21.3.3 | Reticuline oxidase. |
| 1.21.3.4 | Sulochrin oxidase ((+)-bisdechlorogeodin- |
| | forming). |
| 1.21.3.5 | Sulochrin oxidase ((−)-bisdechlorogeodin- |
| | forming). |
| 1.21.3.6 | Aureusidin synthase. |
| 1.21.4.1 | D-proline reductase (dithiol). |
| 1.21.4.2 | Glycine reductase. |
| 1.21.4.3 | Sarcosine reductase. |
| 1.21.4.4 | Betaine reductase. |
| 1.21.99.1 | Beta-cyclopiazonate dehydrogenase. |
| 1.97.1.1 | Chlorate reductase. |
| 1.97.1.2 | Pyrogallol hydroxytransferase. |
| 1.97.1.3 | Sulfur reductase. |
| 1.97.1.4 | [Formate acetyltransferase] activating |
| | enzyme. |
| 1.97.1.8 | Tetrachloroethene reductive dehalogenase. |
| 1.97.1.9 | Selenate reductase. |
| 1.97.1.10 | Thyroxine 5′-deiodinase. |
| 1.97.1.11 | Thyroxine 5-deiodinase. |

ENZYME: 2.—.—.—

| | |
|---|---|
| 2.1.1.1 | Nicotinamide N-methyltransferase. |
| 2.1.1.2 | Guanidinoacetate N-methyltransferase. |
| 2.1.1.3 | Thetin--homocysteine S-methyltransferase. |
| 2.1.1.4 | Acetylserotonin O-methyltransferase. |
| 2.1.1.5 | Betaine--homocysteine S-methyltransferase. |
| 2.1.1.6 | Catechol O-methyltransferase. |
| 2.1.1.7 | Nicotinate N-methyltransferase. |
| 2.1.1.8 | Histamine N-methyltransferase. |
| 2.1.1.9 | Thiol S-methyltransferase. |
| 2.1.1.10 | Homocysteine S-methyltransferase. |
| 2.1.1.11 | Magnesium protoporphyrin IX |
| | methyltransferase. |
| 2.1.1.12 | Methionine S-methyltransferase. |
| 2.1.1.13 | Methionine synthase. |
| 2.1.1.14 | 5-methyltetrahydropteroyltriglutamate-- |
| | homocysteine S-methyltransferase. |
| 2.1.1.15 | Fatty-acid O-methyltransferase. |
| 2.1.1.16 | Methylene-fatty-acyl-phospholipid |
| | synthase. |
| 2.1.1.17 | Phosphatidylethanolamine N- |
| | methyltransferase. |
| 2.1.1.18 | Polysaccharide O- |
| | methyltransferase. |
| 2.1.1.19 | Trimethylsulfonium-- |
| | tetrahydrofolate N-methyltransferase. |
| 2.1.1.20 | Glycine N-methyltransferase. |
| 2.1.1.21 | Methylamine--glutamate N- |
| | methyltransferase. |
| 2.1.1.22 | Carnosine N-methyltransferase. |
| 2.1.1.25 | Phenol O-methyltransferase. |
| 2.1.1.26 | Iodophenol O-methyltransferase. |
| 2.1.1.27 | Tyramine N-methyltransferase. |
| 2.1.1.28 | Phenylethanolamine N- |
| | methyltransferase. |
| 2.1.1.29 | tRNA (cytosine-5-)- |
| | methyltransferase. |
| 2.1.1.31 | tRNA (guanine-N(1)-)- |
| | methyltransferase. |
| 2.1.1.32 | tRNA (guanine-N(2)-)- |
| | methyltransferase. |
| 2.1.1.33 | tRNA (guanine-N(7)-)- |
| | methyltransferase. |
| 2.1.1.34 | tRNA (guanosine-2′-O-)- |
| | methyltransferase. |
| 2.1.1.35 | tRNA (uracil-5-)-methyltransferase. |
| 2.1.1.36 | tRNA (adenine-N(1)-)- |
| | methyltransferase. |
| 2.1.1.37 | DNA (cytosine-5-)- |
| | methyltransferase. |
| 2.1.1.38 | O-demethylpuromycin O- |
| | methyltransferase. |
| 2.1.1.39 | Inositol 3-methyltransferase. |
| 2.1.1.40 | Inositol 1-methyltransferase. |
| 2.1.1.41 | Sterol 24-C-methyltransferase. |
| 2.1.1.42 | Luteolin O-methyltransferase. |
| 2.1.1.43 | Histone-lysine N-methyltransferase. |
| 2.1.1.44 | Dimethylhistidine N- |
| | methyltransferase. |
| 2.1.1.45 | Thymidylate synthase. |
| 2.1.1.46 | Isoflavone 4′-O-methyltransferase. |
| 2.1.1.47 | Indolepyruvate C- |
| | methyltransferase. |
| 2.1.1.48 | rRNA (adenine-N(6)-)- |
| | methyltransferase. |
| 2.1.1.49 | Amine N-methyltransferase. |
| 2.1.1.50 | Loganate O-methyltransferase. |
| 2.1.1.51 | rRNA (guanine-N(1)-)- |
| | methyltransferase. |
| 2.1.1.52 | rRNA (guanine-N(2)-)- |
| | methyltransferase. |
| 2.1.1.53 | Putrescine N-methyltransferase. |
| 2.1.1.54 | Deoxycytidylate C-methyltransferase. |
| 2.1.1.55 | tRNA (adenine-N(6)-)-methyltransferase. |
| 2.1.1.56 | mRNA (guanine-N(7)-)-methyltransferase. |
| 2.1.1.57 | mRNA (nucleoside-2′-O-)- |
| | methyltransferase. |
| 2.1.1.59 | [Cytochrome c]-lysine N- |
| | methyltransferase. |
| 2.1.1.60 | Calmodulin-lysine N-methyltransferase. |
| 2.1.1.61 | tRNA (5-methylaminomethyl-2- |
| | thiouridylate)-methyltransferase. |
| 2.1.1.62 | mRNA (2′-O-methyladenosine-N(6)-)- |
| | methyltransferase. |
| 2.1.1.63 | Methylated-DNA--[protein]-cysteine S- |
| | methyltransferase. |
| 2.1.1.64 | 3-demethylubiquinone-9 3-O- |
| | methyltransferase. |
| 2.1.1.65 | Licodione 2′-O-methyltransferase. |
| 2.1.1.66 | rRNA (adenosine-2′-O-)-methyltransferase. |
| 2.1.1.67 | Thiopurine S-methyltransferase. |
| 2.1.1.68 | Caffeate O-methyltransferase. |
| 2.1.1.69 | 5-hydroxyfuranocoumarin 5-O- |
| | methyltransferase. |
| 2.1.1.70 | 8-hydroxyfuranocoumarin 8-O- |
| | methyltransferase. |
| 2.1.1.71 | Phosphatidyl-N-methylethanolamine N- |
| | methyltransferase. |
| 2.1.1.72 | Site-specific DNA-methyltransferase |
| | (adenine-specific). |
| 2.1.1.74 | Methylenetetrahydrofolate--tRNA-(uracil- |
| | 5-)-methyltransferase (FADH(2)-oxidizing). |
| 2.1.1.75 | Apigenin 4′-O-methyltransferase. |
| 2.1.1.76 | Quercetin 3-O-methyltransferase. |
| 2.1.1.77 | Protein-L-isoaspartate(D-aspartate) O- |
| | methyltransferase. |
| 2.1.1.78 | Isoorientin 3′-O-methyltransferase. |
| 2.1.1.79 | Cyclopropane-fatty-acyl-phospholipid |
| | synthase. |
| 2.1.1.80 | Protein-glutamate O-methyltransferase. |
| 2.1.1.82 | 3-methylquercitin 7-O-methyltransferase. |
| 2.1.1.83 | 3,7-dimethylquercitin 4′-O- |
| | methyltransferase. |
| 2.1.1.84 | Methylquercetagetin 6-O- |
| | methyltransferase. |
| 2.1.1.85 | Protein-histidine N-methyltransferase. |
| 2.1.1.86 | Tetrahydromethanopterin S- |
| | methyltransferase. |
| 2.1.1.87 | Pyridine N-methyltransferase. |
| 2.1.1.88 | 8-hydroxyquercitin 8-O- |
| | methyltransferase. |
| 2.1.1.89 | Tetrahydrocolumbamine 2-O- |
| | methyltransferase. |
| 2.1.1.90 | Methanol--5- |
| | hydroxybenzimidazolylcobamide Co- |
| | methyltransferase. |
| 2.1.1.91 | Isobutyraldoxime O- |
| | methyltransferase. |
| 2.1.1.92 | Bergaptol O-methyltransferase. |
| 2.1.1.93 | Xanthotoxol O-methyltransferase. |
| 2.1.1.94 | 11-O-demethyl-17-O- |
| | deacetylvindoline O-methyltransferase. |
| 2.1.1.95 | Tocopherol O-methyltransferase. |
| 2.1.1.96 | Thioether S-methyltransferase. |
| 2.1.1.97 | 3-hydroxyanthranilate 4-C- |
| | methyltransferase. |
| 2.1.1.98 | Diphthine synthase. |
| 2.1.1.99 | 16-methoxy-2,3-dihydro-3- |
| | hydroxytabersonine N-methyltransferase. |
| 2.1.1.100 | Protein-S-isoprenylcysteine O- |
| | methyltransferase. |
| 2.1.1.101 | Macrocin O-methyltransferase. |
| 2.1.1.102 | Demethylmacrocin O- |
| | methyltransferase. |
| 2.1.1.103 | Phosphoethanolamine N- |
| | methyltransferase. |
| 2.1.1.104 | Caffeoyl-CoA O- |
| | methyltransferase. |
| 2.1.1.105 | N-benzoyl-4-hydroxyanthranilate |
| | 4-O-methyltransferase. |
| 2.1.1.106 | Tryptophan 2-C-methyltransferase. |
| 2.1.1.107 | Uroporphyrin-III C- |
| | methyltransferase. |
| 2.1.1.108 | 6-hydroxymellein O- |
| | methyltransferase. |
| 2.1.1.109 | Demethylsterigmatocystin 6-O- |
| | methyltransferase. |
| 2.1.1.110 | Sterigmatocystin 7-O- |
| | methyltransferase. |
| 2.1.1.111 | Anthranilate N-methyltransferase. |
| 2.1.1.112 | Glucuronoxylan 4-O- |
| | methyltransferase. |
| 2.1.1.113 | Site-specific DNA- |
| | methyltransferase (cytosine-N(4)-specific). |
| 2.1.1.114 | Hexaprenyldihydroxybenzoate |
| | methyltransferase. |
| 2.1.1.115 | (RS)-1-benzyl-1,2,3,4- |
| | tetrahydroisoquinoline N-methyltransferase. |
| 2.1.1.116 | 3′-hydroxy-N-methyl-(S)-coclaurine 4′-O- |
| | methyltransferase. |
| 2.1.1.117 | (S)-scoulerine 9-O-methyltransferase. |
| 2.1.1.118 | Columbamine O-methyltransferase. |
| 2.1.1.119 | 10-hydroxydihydrosanguinarine 10-O- |
| | methyltransferase. |
| 2.1.1.120 | 12-hydroxydihydrochelirubine 12-O- |
| | methyltransferase. |
| 2.1.1.121 | 6-O-methylnorlaudanosoline 5′-O- |
| | methyltransferase. |
| 2.1.1.122 | (S)-tetrahydroprotoberberine N- |
| | methyltransferase. |
| 2.1.1.123 | [Cytochrome-c]-methionine S- |
| | methyltransferase. |
| 2.1.1.124 | [Cytochrome-c]-arginine N- |
| | methyltransferase. |
| 2.1.1.125 | Histone-arginine N-methyltransferase. |
| 2.1.1.126 | [Myelin basic protein]-arginine N- |
| | methyltransferase. |
| 2.1.1.127 | [Ribulose-bisphosphate carboxylase]- |
| | lysine N-methyltransferase. |
| 2.1.1.128 | (RS)-norcoclaurine 6-O- |
| | methyltransferase. |
| 2.1.1.129 | Inositol 4-methyltransferase. |
| 2.1.1.130 | Precorrin-2 C(20)-methyltransferase. |
| 2.1.1.131 | Precorrin-3B C(17)-methyltransferase. |
| 2.1.1.132 | Precorrin-6Y C(5,15)-methyltransferase |
| | (decarboxylating). |
| 2.1.1.133 | Precorrin-4 C(11)-methyltransferase. |
| 2.1.1.136 | Chlorophenol O-methyltransferase. |
| 2.1.1.137 | Arsenite methyltransferase. |
| 2.1.1.139 | 3′-demethylstaurosporine O- |
| | methyltransferase. |
| 2.1.1.140 | (S)-coclaurine-N-methyltransferase. |
| 2.1.1.141 | Jasmonate O-methyltransferase. |
| 2.1.1.142 | Cycloartenol 24-C-methyltransferase. |
| 2.1.1.143 | 24-methylenesterol C-methyltransferase. |
| 2.1.1.144 | Trans-aconitate 2-methyltransferase. |
| 2.1.1.145 | Trans-aconitate 3-methyltransferase. |
| 2.1.1.146 | (Iso)eugenol O-methyltransferase. |
| 2.1.1.147 | Corydaline synthase. |
| 2.1.1.148 | Thymidylate synthase (FAD). |
| 2.1.1.149 | Myricetin O-methyltransferase. |
| 2.1.1.150 | Isoflavone 7-O-methyltransferase. |
| 2.1.1.151 | Cobalt-factor II C(20)-methyltransferase. |
| 2.1.1.152 | Precorrin-6A synthase (deacetylating). |
| 2.1.2.1 | Glycine hydroxymethyltransferase. |
| 2.1.2.2 | Phosphoribosylglycinamide |
| | formyltransferase. |
| 2.1.2.3 | Phosphoribosylaminoimidazolecarboxamide |
| | formyltransferase. |
| 2.1.2.4 | Glycine formimidoyltransferase. |
| 2.1.2.5 | Glutamate formimidoyltransferase. |
| 2.1.2.7 | D-alanine 2- |
| | hydroxymethyltransferase. |
| 2.1.2.8 | Deoxycytidylate 5- |
| | hydroxymethyltransferase. |
| 2.1.2.9 | Methionyl-tRNA formyltransferase. |
| 2.1.2.10 | Aminomethyltransferase. |
| 2.1.2.11 | 3-methyl-2-oxobutanoate |
| | hydroxymethyltransferase. |
| 2.1.3.1 | Methylmalonyl-CoA |
| | carboxytransferase. |
| 2.1.3.2 | Aspartate carbamoyltransferase. |
| 2.1.3.3 | Ornithine carbamoyltransferase. |
| 2.1.3.5 | Oxamate carbamoyltransferase. |
| 2.1.3.6 | Putrescine carbamoyltransferase. |
| 2.1.3.7 | 3-hydroxymethylcephem |
| | carbamoyltransferase. |
| 2.1.3.8 | Lysine carbamoyltransferase. |
| 2.1.4.1 | Glycine amidinotransferase. |
| 2.1.4.2 | Scyllo-inosamine-4-phosphate |
| | amidinotransferase. |
| 2.2.1.1 | Transketolase. |
| 2.2.1.2 | Transaldolase. |
| 2.2.1.3 | Formaldehyde transketolase. |
| 2.2.1.4 | Acetoin--ribose-5-phosphate |
| | transaldolase. |
| 2.2.1.5 | 2-hydroxy-3-oxoadipate synthase. |
| 2.2.1.6 | Acetolactate synthase. |
| 2.2.1.7 | 1-deoxy-D-xylulose-5-phosphate |
| | synthase. |
| 2.2.1.8 | Fluorothreonine transaldolase. |
| 2.3.1.1 | Amino-acid N-acetyltransferase. |
| 2.3.1.2 | Imidazole N-acetyltransferase. |
| 2.3.1.3 | Glucosamine N-acetyltransferase. |
| 2.3.1.4 | Glucosamine 6-phosphate N- |
| | acetyltransferase. |
| 2.3.1.5 | Arylamine N-acetyltransferase. |
| 2.3.1.6 | Choline O-acetyltransferase. |
| 2.3.1.7 | Carnitine O-acetyltransferase. |
| 2.3.1.8 | Phosphate acetyltransferase. |
| 2.3.1.9 | Acetyl-CoA C-acetyltransferase. |
| 2.3.1.10 | Hydrogen-sulfide S-acetyltransferase. |
| 2.3.1.11 | Thioethanolamine S-acetyltransferase. |
| 2.3.1.12 | Dihydrolipoyllysine-residue |
| | acetyltransferase. |
| 2.3.1.13 | Glycine N-acyltransferase. |
| 2.3.1.14 | Glutamine N-phenylacetyltransferase. |
| 2.3.1.15 | Glycerol-3-phosphate O-acyltransferase. |
| 2.3.1.16 | Acetyl-CoA C-acyltransferase. |
| 2.3.1.17 | Aspartate N-acetyltransferase. |
| 2.3.1.18 | Galactoside O-acetyltransferase. |
| 2.3.1.19 | Phosphate butyryltransferase. |
| 2.3.1.20 | Diacylglycerol O-acyltransferase. |
| 2.3.1.21 | Carnitine O-palmitoyltransferase. |
| 2.3.1.22 | 2-acylglycerol O-acyltransferase. |
| 2.3.1.23 | 1-acylglycerophosphocholine O- |
| | acyltransferase. |
| 2.3.1.24 | Sphingosine N-acyltransferase. |
| 2.3.1.25 | Plasmalogen synthase. |
| 2.3.1.26 | Sterol O-acyltransferase. |
| 2.3.1.27 | Cortisol O-acetyltransferase. |
| 2.3.1.28 | Chloramphenicol O-acetyltransferase. |
| 2.3.1.29 | Glycine C-acetyltransferase. |
| 2.3.1.30 | Serine O-acetyltransferase. |
| 2.3.1.31 | Homoserine O-acetyltransferase. |
| 2.3.1.32 | Lysine N-acetyltransferase. |
| 2.3.1.33 | Histidine N-acetyltransferase. |
| 2.3.1.34 | D-tryptophan N-acetyltransferase. |
| 2.3.1.35 | Glutamate N-acetyltransferase. |
| 2.3.1.36 | D-amino-acid N-acetyltransferase. |
| 2.3.1.37 | 5-aminolevulinate synthase. |
| 2.3.1.38 | [Acyl-carrier-protein] S-acetyltransferase. |
| 2.3.1.39 | [Acyl-carrier-protein] S- |
| | malonyltransferase. |
| 2.3.1.40 | Acyl-[acyl-carrier-protein]--phospholipid |
| | O-acyltransferase. |
| 2.3.1.41 | 3-oxoacyl-[acyl-carrier-protein] synthase. |
| 2.3.1.42 | Glycerone-phosphate O-acyltransferase. |
| 2.3.1.43 | Phosphatidylcholine--sterol O- |
| | acyltransferase. |
| 2.3.1.44 | N-acetylneuraminate 4-O- |
| | acetyltransferase. |
| 2.3.1.45 | N-acetylneuraminate 7-O(or 9-O)- |
| | acetyltransferase. |
| 2.3.1.46 | Homoserine O-succinyltransferase. |
| 2.3.1.47 | 8-amino-7-oxononanoate synthase. |
| 2.3.1.48 | Histone acetyltransferase. |
| 2.3.1.49 | Deacetyl-[citrate-(pro-3S)-lyase] S- |
| | acetyltransferase. |
| 2.3.1.50 | Serine C-palmitoyltransferase. |
| 2.3.1.51 | 1-acylglycerol-3-phosphate O- |
| | acyltransferase. |
| 2.3.1.52 | 2-acylglycerol-3-phosphate O- |
| | acyltransferase. |
| 2.3.1.53 | Phenylalanine N-acetyltransferase. |
| 2.3.1.54 | Formate C-acetyltransferase. |
| 2.3.1.56 | Aromatic-hydroxylamine O- |
| | acetyltransferase. |
| 2.3.1.57 | Diamine N-acetyltransferase. |
| 2.3.1.58 | 2,3-diaminopropionate N- |
| | oxalyltransferase. |
| 2.3.1.59 | Gentamicin 2′-N-acetyltransferase. |
| 2.3.1.60 | Gentamicin 3′-N-acetyltransferase. |
| 2.3.1.61 | Dihydrolipoyllysine-residue |
| | succinyltransferase. |
| 2.3.1.62 | 2-acylglycerophosphocholine O- |
| | acyltransferase. |
| 2.3.1.63 | 1-alkylglycerophosphocholine O- |
| | acyltransferase. |
| 2.3.1.64 | Agmatine N(4)- |
| | coumaroyltransferase. |
| 2.3.1.65 | Glycine N-choloyltransferase. |
| 2.3.1.66 | Leucine N-acetyltransferase. |
| 2.3.1.67 | 1-alkylglycerophosphocholine O- |
| | acetyltransferase. |
| 2.3.1.68 | Glutamine N-acyltransferase. |
| 2.3.1.69 | Monoterpenol O-acetyltransferase. |
| 2.3.1.70 | CDP-acylglycerol O- |
| | arachidonoyltransferase. |
| 2.3.1.71 | Glycine N-benzoyltransferase. |
| 2.3.1.72 | Indoleacetylglucose--inositol O- |
| | acyltransferase. |
| 2.3.1.73 | Diacylglycerol--sterol O- |
| | acyltransferase. |
| 2.3.1.74 | Naringenin-chalcone synthase. |
| 2.3.1.75 | Long-chain-alcohol O-fatty- |
| | acyltransferase. |
| 2.3.1.76 | Retinol O-fatty-acyltransferase. |
| 2.3.1.77 | Triacylglycerol--sterol O- |
| | acyltransferase. |
| 2.3.1.78 | Heparan-alpha-glucosaminide N- |
| | acetyltransferase. |
| 2.3.1.79 | Maltose O-acetyltransferase. |
| 2.3.1.80 | Cysteine-S-conjugate N- |
| | acetyltransferase. |
| 2.3.1.81 | Aminoglycoside N(3′)- |
| | acetyltransferase. |
| 2.3.1.82 | Aminoglycoside N(6′)- |
| | acetyltransferase. |
| 2.3.1.83 | Phosphatidylcholine--dolichol O- |
| | acyltransferase. |
| 2.3.1.84 | Alcohol O-acetyltransferase. |
| 2.3.1.85 | Fatty-acid synthase. |
| 2.3.1.86 | Fatty-acyl-CoA synthase. |
| 2.3.1.87 | Aralkylamine N-acetyltransferase. |
| 2.3.1.88 | Peptide alpha-N-acetyltransferase. |
| 2.3.1.89 | Tetrahydrodipicolinate N-acetyltransferase. |
| 2.3.1.90 | Beta-glucogallin O-galloyltransferase. |
| 2.3.1.91 | Sinapoylglucose--choline O- |
| | sinapoyltransferase. |
| 2.3.1.92 | Sinapoylglucose--malate O- |
| | sinapoyltransferase. |
| 2.3.1.93 | 13-hydroxylupinine O-tigloyltransferase. |
| 2.3.1.94 | Erythronolide synthase. |
| 2.3.1.95 | Trihydroxystilbene synthase. |
| 2.3.1.96 | Glycoprotein N-palmitoyltransferase. |
| 2.3.1.97 | Glycylpeptide N-tetradecanoyltransferase. |
| 2.3.1.98 | Chlorogenate--glucarate O- |
| | hydroxycinnamoyltransferase. |
| 2.3.1.99 | Quinate O-hydroxycinnamoyltransferase. |
| 2.3.1.100 | Myelin-proteolipid O- |
| | palmitoyltransferase. |
| 2.3.1.101 | Formylmethanofuran-- |
| | tetrahydromethanopterin N-formyltransferase. |
| 2.3.1.102 | N(6)-hydroxylysine O-acetyltransferase. |
| 2.3.1.103 | Sinapoylglucose--sinapoylglucose O- |
| | sinapoyltransferase. |
| 2.3.1.104 | 1-alkenylglycerophosphocholine O- |
| | acyltransferase. |
| 2.3.1.105 | Alkylglycerophosphate 2-O- |
| | acetyltransferase. |
| 2.3.1.106 | Tartronate O- |
| | hydroxycinnamoyltransferase. |
| 2.3.1.107 | 17-O-deacetylvindoline O- |
| | acetyltransferase. |
| 2.3.1.108 | Tubulin N-acetyltransferase. |
| 2.3.1.109 | Arginine N-succinyltransferase. |
| 2.3.1.110 | Tyramine N-feruloyltransferase. |
| 2.3.1.111 | Mycocerosate synthase. |
| 2.3.1.112 | D-tryptophan N-malonyltransferase. |
| 2.3.1.113 | Anthranilate N-malonyltransferase. |
| 2.3.1.114 | 3,4-dichloroaniline N-malonyltransferase. |
| 2.3.1.115 | Isoflavone-7-O-beta-glucoside 6″-O- |
| | malonyltransferase. |
| 2.3.1.116 | Flavonol-3-O-beta-glucoside O- |
| | malonyltransferase. |
| 2.3.1.117 | 2,3,4,5-tetrahydropyridine-2,6- |
| | dicarboxylate N-succinyltransferase. |
| 2.3.1.118 | N-hydroxyarylamine O-acetyltransferase. |
| 2.3.1.119 | Icosanoyl-CoA synthase. |
| 2.3.1.121 | 1-alkenylglycerophosphoethanolamine O- |
| | acyltransferase. |
| 2.3.1.122 | Trehalose O-mycolyltransferase. |
| 2.3.1.123 | Dolichol O-acyltransferase. |
| 2.3.1.125 | 1-alkyl-2-acetylglycerol O- |
| | acyltransferase. |
| 2.3.1.126 | Isocitrate O- |
| | dihydroxycinnamoyltransferase. |
| 2.3.1.127 | Ornithine N-benzoyltransferase. |
| 2.3.1.128 | Ribosomal-protein-alanine N- |
| | acetyltransferase. |
| 2.3.1.129 | Acyl-[acyl-carrier-protein]--UDP-N- |
| | acetylglucosamine O-acyltransferase. |
| 2.3.1.130 | Galactarate O- |
| | hydroxycinnamoyltransferase. |
| 2.3.1.131 | Glucarate O- |
| | hydroxycinnamoyltransferase. |
| 2.3.1.132 | Glucarolactone O- |
| | hydroxycinnamoyltransferase. |
| 2.3.1.133 | Shikimate O- |
| | hydroxycinnamoyltransferase. |
| 2.3.1.134 | Galactolipid O-acyltransferase. |
| 2.3.1.135 | Phosphatidylcholine--retinol O- |
| | acyltransferase. |
| 2.3.1.136 | Polysialic-acid O-acetyltransferase. |
| 2.3.1.137 | Carnitine O-octanoyltransferase. |
| 2.3.1.138 | Putrescine N- |
| | hydroxycinnamoyltransferase. |
| 2.3.1.139 | Ecdysone O-acyltransferase. |
| 2.3.1.140 | Rosmarinate synthase. |
| 2.3.1.141 | Galactosylacylglycerol O- |
| | acyltransferase. |
| 2.3.1.142 | Glycoprotein O-fatty- |
| | acyltransferase. |
| 2.3.1.143 | Beta-glucogallin-- |
| | tetrakisgalloylglucose O-galloyltransferase. |
| 2.3.1.144 | Anthranilate N-benzoyltransferase. |
| 2.3.1.145 | Piperidine N-piperoyltransferase. |
| 2.3.1.146 | Pinosylvin synthase. |
| 2.3.1.147 | Glycerophospholipid arachidonoyl- |
| | transferase (CoA-independent). |
| 2.3.1.148 | Glycerophospholipid acyltransferase |
| | (CoA-dependent). |
| 2.3.1.149 | Platelet-activating factor |
| | acetyltransferase. |
| 2.3.1.150 | Salutaridinol 7-O-acetyltransferase. |
| 2.3.1.151 | Benzophenone synthase. |
| 2.3.1.152 | Alcohol O-cinnamoyltransferase. |
| 2.3.1.153 | Anthocyanin 5-aromatic |
| | acyltransferase. |
| 2.3.1.154 | Propionyl-CoA C(2)- |
| | trimethyltridecanoyltransferase. |
| 2.3.1.155 | Acetyl-CoA C-myristoyltransferase. |
| 2.3.1.156 | Phloroisovalerophenone synthase. |
| 2.3.1.157 | Glucosamine-1-phosphate N- |
| | acetyltransferase. |
| 2.3.1.158 | Phospholipid:diacylglycerol acyltransferase. |
| 2.3.1.159 | Acridone synthase. |
| 2.3.1.160 | Vinorine synthase. |
| 2.3.1.161 | Lovastatin nonaketide synthase. |
| 2.3.1.162 | Taxadien-5-alpha-ol O-acetyltransferase. |
| 2.3.1.163 | 10-hydroxytaxane O-acetyltransferase. |
| 2.3.1.164 | Isopenicillin-N N-acyltransferase. |
| 2.3.1.165 | 6-methylsalicylic acid synthase. |
| 2.3.1.166 | 2-alpha-hydroxytaxane 2-O- |
| | benzoyltransferase. |
| 2.3.1.167 | 10-deacetylbaccatin III 10-O- |
| | acetyltransferase. |
| 2.3.1.168 | Dihydrolipoyllysine-residue (2- |
| | methylpropanoyl)transferase. |
| 2.3.1.169 | CO-methylating acetyl-CoA synthase. |
| 2.3.2.1 | D-glutamyltransferase. |
| 2.3.2.2 | Gamma-glutamyltransferase. |
| 2.3.2.3 | Lysyltransferase. |
| 2.3.2.4 | Gamma-glutamylcyclotransferase. |
| 2.3.2.5 | Glutaminyl-peptide cyclotransferase. |
| 2.3.2.6 | Leucyltransferase. |
| 2.3.2.7 | Aspartyltransferase. |
| 2.3.2.8 | Arginyltransferase. |
| 2.3.2.9 | Agaritine gamma-glutamyltransferase. |
| 2.3.2.10 | UDP-N-acetylmuramoylpentapeptide-lysine |
| | N(6)-alanyltransferase. |
| 2.3.2.11 | Alanylphosphatidylglycerol synthase. |
| 2.3.2.12 | Peptidyltransferase. |
| 2.3.2.13 | Protein-glutamine gamma- |
| | glutamyltransferase. |
| 2.3.2.14 | D-alanine gamma-glutamyltransferase. |
| 2.3.2.15 | Glutathione gamma- |
| | glutamylcysteinyltransferase. |
| 2.3.3.1 | Citrate (Si)-synthase. |
| 2.3.3.2 | Decylcitrate synthase. |
| 2.3.3.3 | Citrate (Re)-synthase. |
| 2.3.3.4 | Decylhomocitrate synthase. |
| 2.3.3.5 | 2-methylcitrate synthase. |
| 2.3.3.6 | 2-ethylmalate synthase. |
| 2.3.3.7 | 3-ethylmalate synthase. |
| 2.3.3.8 | ATP citrate synthase. |
| 2.3.3.9 | Malate synthase. |
| 2.3.3.10 | Hydroxymethylglutaryl-CoA synthase. |
| 2.3.3.11 | 2-hydroxyglutarate synthase. |
| 2.3.3.12 | 3-propylmalate synthase. |
| 2.3.3.13 | 2-isopropylmalate synthase. |
| 2.3.3.14 | Homocitrate synthase. |
| 2.3.3.15 | Sulfoacetaldehyde |
| | acetyltransferase. |
| 2.4.1.1 | Phosphorylase. |
| 2.4.1.2 | Dextrin dextranase. |
| 2.4.1.4 | Amylosucrase. |
| 2.4.1.5 | Dextransucrase. |
| 2.4.1.7 | Sucrose phosphorylase. |
| 2.4.1.8 | Maltose phosphorylase. |
| 2.4.1.9 | Inulosucrase. |
| 2.4.1.10 | Levansucrase. |
| 2.4.1.11 | Glycogen (starch) synthase. |
| 2.4.1.12 | Cellulose synthase (UDP-forming). |
| 2.4.1.13 | Sucrose synthase. |
| 2.4.1.14 | Sucrose-phosphate synthase. |
| 2.4.1.15 | Alpha,alpha-trehalose-phosphate |
| | synthase (UDP-forming). |
| 2.4.1.16 | Chitin synthase. |
| 2.4.1.17 | Glucuronosyltransferase. |
| 2.4.1.18 | 1,4-alpha-glucan branching |
| | enzyme. |
| 2.4.1.19 | Cyclomaltodextrin |
| | glucanotransferase. |
| 2.4.1.20 | Cellobiose phosphorylase. |
| 2.4.1.21 | Starch synthase. |
| 2.4.1.22 | Lactose synthase. |
| 2.4.1.23 | Sphingosine beta- |
| | galactosyltransferase. |
| 2.4.1.24 | 1,4-alpha-glucan 6-alpha- |
| | glucosyltransferase. |
| 2.4.1.25 | 4-alpha-glucanotransferase. |
| 2.4.1.26 | DNA alpha-glucosyltransferase. |
| 2.4.1.27 | DNA beta-glucosyltransferase. |
| 2.4.1.28 | Glucosyl-DNA beta- |
| | glucosyltransferase. |
| 2.4.1.29 | Cellulose synthase (GDP-forming). |
| 2.4.1.30 | 1,3-beta-oligoglucan |
| | phosphorylase. |
| 2.4.1.31 | Laminaribiose phosphorylase. |
| 2.4.1.32 | Glucomannan 4-beta- |
| | mannosyltransferase. |
| 2.4.1.33 | Alginate synthase. |
| 2.4.1.34 | 1,3-beta-glucan synthase. |
| 2.4.1.35 | Phenol beta-glucosyltransferase. |
| 2.4.1.36 | Alpha,alpha-trehalose-phosphate |
| | synthase (GDP-forming). |
| 2.4.1.37 | Fucosylgalactoside 3-alpha- |
| | galactosyltransferase. |
| 2.4.1.38 | Beta-N- |
| | acetylglucosaminylglycopeptide beta-1,4- |
| | galactosyltransferase. |
| 2.4.1.39 | Steroid N- |
| | acetylglucosaminyltransferase. |
| 2.4.1.40 | Glycoprotein-fucosylgalactoside |
| | alpha-N-acetylgalactosaminyltransferase. |
| 2.4.1.41 | Polypeptide N- |
| | acetylgalactosaminyltransferase. |
| 2.4.1.43 | Polygalacturonate 4-alpha- |
| | galacturonosyltransferase. |
| 2.4.1.44 | Lipopolysaccharide 3-alpha- |
| | galactosyltransferase. |
| 2.4.1.45 | 2-hydroxyacylsphingosine 1-beta- |
| | galactosyltransferase. |
| 2.4.1.46 | 1,2-diacylglycerol 3-beta- |
| | galactosyltransferase. |
| 2.4.1.47 | N-acylsphingosine |
| | galactosyltransferase. |
| 2.4.1.48 | Heteroglycan alpha- |
| | mannosyltransferase. |
| 2.4.1.49 | Cellodextrin phosphorylase. |
| 2.4.1.50 | Procollagen galactosyltransferase. |
| 2.4.1.52 | Poly(glycerol-phosphate) alpha- |
| | glucosyltransferase. |
| 2.4.1.53 | Poly(ribitol-phosphate) beta- |
| | glucosyltransferase. |
| 2.4.1.54 | Undecaprenyl-phosphate |
| | mannosyltransferase. |
| 2.4.1.56 | Lipopolysaccharide N- |
| | acetylglucosaminyltransferase. |
| 2.4.1.57 | Phosphatidylinositol alpha- |
| | mannosyltransferase. |
| 2.4.1.58 | Lipopolysaccharide |
| | glucosyltransferase I. |
| 2.4.1.60 | Abequosyltransferase. |
| 2.4.1.62 | Ganglioside galactosyltransferase. |
| 2.4.1.63 | Linamarin synthase. |
| 2.4.1.64 | Alpha,alpha-trehalose phosphorylase. |
| 2.4.1.65 | 3-galactosyl-N-acetylglucosaminide |
| | 4-alpha-L-fucosyltransferase. |
| 2.4.1.66 | Procollagen glucosyltransferase. |
| 2.4.1.67 | Galactinol--raffinose |
| | galactosyltransferase. |
| 2.4.1.68 | Glycoprotein 6-alpha-L- |
| | fucosyltransferase. |
| 2.4.1.69 | Galactoside 2-alpha-L- |
| | fucosyltransferase. |
| 2.4.1.70 | Poly(ribitol-phosphate) N- |
| | acetylglucosaminyltransferase. |
| 2.4.1.71 | Arylamine glucosyltransferase. |
| 2.4.1.73 | Lipopolysaccharide glucosyltransferase II. |
| 2.4.1.74 | Glycosaminoglycan galactosyltransferase. |
| 2.4.1.75 | UDP-galacturonosyltransferase. |
| 2.4.1.78 | Phosphopolyprenol glucosyltransferase. |
| 2.4.1.79 | Galactosylgalactosylglucosylceramide |
| | beta-D-acetylgalactosaminyltransferase. |
| 2.4.1.80 | Ceramide glucosyltransferase. |
| 2.4.1.81 | Flavone 7-O-beta-glucosyltransferase. |
| 2.4.1.82 | Galactinol--sucrose galactosyltransferase. |
| 2.4.1.83 | Dolichyl-phosphate beta-D- |
| | mannosyltransferase. |
| 2.4.1.85 | Cyanohydrin beta-glucosyltransferase. |
| 2.4.1.86 | Glucosaminylgalactosylglucosylceramide |
| | beta-galactosyltransferase. |
| 2.4.1.87 | N-acetyllactosaminide 3-alpha- |
| | galactosyltransferase. |
| 2.4.1.88 | Globoside alpha-N- |
| | acetylgalactosaminyltransferase. |
| 2.4.1.90 | N-acetyllactosamine synthase. |
| 2.4.1.91 | Flavonol 3-O-glucosyltransferase. |
| 2.4.1.92 | (N-acetylneuraminyl)- |
| | galactosylglucosylceramide N- |
| | acetylgalactosaminyltransferase. |
| 2.4.1.94 | Protein N-acetylglucosaminyltransferase. |
| 2.4.1.95 | Bilirubin-glucuronoside |
| | glucuronosyltransferase. |
| 2.4.1.96 | Sn-glycerol-3-phosphate 1- |
| | galactosyltransferase. |
| 2.4.1.97 | 1,3-beta-D-glucan phosphorylase. |
| 2.4.1.99 | Sucrose:sucrose fructosyltransferase. |
| 2.4.1.100 | 2,1-fructan:2,1-fructan 1- |
| | fructosyltransferase. |
| 2.4.1.101 | Alpha-1,3-mannosyl-glycoprotein 2-beta- |
| | N-acetylglucosaminyltransferase. |
| 2.4.1.102 | Beta-1,3-galactosyl-O-glycosyl- |
| | glycoprotein beta-1,6-N- |
| | acetylglucosaminyltransferase. |
| 2.4.1.103 | Alizarin 2-beta-glucosyltransferase. |
| 2.4.1.104 | O-dihydroxycoumarin 7-O- |
| | glucosyltransferase. |
| 2.4.1.105 | Vitexin beta-glucosyltransferase. |
| 2.4.1.106 | Isovitexin beta-glucosyltransferase. |
| 2.4.1.109 | Dolichyl-phosphate-mannose--protein |
| | mannosyltransferase. |
| 2.4.1.110 | tRNA-queuosine beta- |
| | mannosyltransferase. |
| 2.4.1.111 | Coniferyl-alcohol glucosyltransferase. |
| 2.4.1.112 | Alpha-1,4-glucan-protein synthase |
| | (UDP-forming). |
| 2.4.1.113 | Alpha-1,4-glucan-protein synthase |
| | (ADP-forming). |
| 2.4.1.114 | 2-coumarate O-beta- |
| | glucosyltransferase. |
| 2.4.1.115 | Anthocyanidin 3-O- |
| | glucosyltransferase. |
| 2.4.1.116 | Cyanidin-3-rhamnosylglucoside 5-O- |
| | glucosyltransferase. |
| 2.4.1.117 | Dolichyl-phosphate beta- |
| | glucosyltransferase. |
| 2.4.1.118 | Cytokinin 7-beta-glucosyltransferase. |
| 2.4.1.119 | Dolichyl-diphosphooligosaccharide-- |
| | protein glycotransferase. |
| 2.4.1.120 | Sinapate 1-glucosyltransferase. |
| 2.4.1.121 | Indole-3-acetate beta- |
| | glucosyltransferase. |
| 2.4.1.122 | Glycoprotein-N-acetylgalactosamine |
| | 3-beta-galactosyltransferase. |
| 2.4.1.123 | Inositol 3-alpha-galactosyltransferase. |
| 2.4.1.125 | Sucrose--1,6-alpha-glucan 3(6)-alpha- |
| | glucosyltransferase. |
| 2.4.1.126 | Hydroxycinnamate 4-beta- |
| | glucosyltransferase. |
| 2.4.1.127 | Monoterpenol beta- |
| | glucosyltransferase. |
| 2.4.1.128 | Scopoletin glucosyltransferase. |
| 2.4.1.129 | Peptidoglycan glycosyltransferase. |
| 2.4.1.130 | Dolichyl-phosphate-mannose-- |
| | glycolipid alpha-mannosyltransferase. |
| 2.4.1.131 | Glycolipid 2-alpha- |
| | mannosyltransferase. |
| 2.4.1.132 | Glycolipid 3-alpha- |
| | mannosyltransferase. |
| 2.4.1.133 | Xylosylprotein 4-beta- |
| | galactosyltransferase. |
| 2.4.1.134 | Galactosylxylosylprotein 3-beta- |
| | galactosyltransferase. |
| 2.4.1.135 | Galactosylgalactosylxylosylprotein 3- |
| | beta-glucuronosyltransferase. |
| 2.4.1.136 | Gallate 1-beta-glucosyltransferase. |
| 2.4.1.137 | Sn-glycerol-3-phosphate 2-alpha- |
| | galactosyltransferase. |
| 2.4.1.138 | Mannotetraose 2-alpha-N- |
| | acetylglucosaminyltransferase. |
| 2.4.1.139 | Maltose synthase. |
| 2.4.1.140 | Alternansucrase. |
| 2.4.1.141 | N-acetylglucosaminyldiphosphodolichol |
| | N-acetylglucosaminyltransferase. |
| 2.4.1.142 | Chitobiosyldiphosphodolichol beta- |
| | mannosyltransferase. |
| 2.4.1.143 | Alpha-1,6-mannosyl-glycoprotein 2- |
| | beta-N-acetylglucosaminyltransferase. |
| 2.4.1.144 | Beta-1,4-mannosyl-glycoprotein 4-beta- |
| | N-acetylglucosaminyltransferase. |
| 2.4.1.145 | Alpha-1,3-mannosyl-glycoprotein 4- |
| | beta-N-acetylglucosaminyltransferase. |
| 2.4.1.146 | Beta-1,3-galactosyl-O-glycosyl- |
| | glycoprotein beta-1,3-N- |
| | acetylglucosaminyltransferase. |
| 2.4.1.147 | Acetylgalactosaminyl-O-glycosyl- |
| | glycoprotein beta-1,3-N- |
| | acetylglucosaminyltransferase. |
| 2.4.1.148 | Acetylgalactosaminyl-O-glycosyl- |
| | glycoprotein beta-1,6-N- |
| | acetylglucosaminyltransferase. |
| 2.4.1.149 | N-acetyllactosaminide beta-1,3-N- |
| | acetylglucosaminyltransferase. |
| 2.4.1.150 | N-acetyllactosaminide beta-1,6-N- |
| | acetylglucosaminyl-transferase. |
| 2.4.1.152 | 4-galactosyl-N-acetylglucosaminide 3- |
| | alpha-L-fucosyltransferase. |
| 2.4.1.153 | Dolichyl-phosphate alpha-N- |
| | acetylglucosaminyltransferase. |
| 2.4.1.154 | Globotriosylceramide beta-1,6-N- |
| | acetylgalactosaminyl-transferase. |
| 2.4.1.155 | Alpha-1,6-mannosyl-glycoprotein 6- |
| | beta-N-acetylglucosaminyltransferase. |
| 2.4.1.156 | Indolylacetyl-myo-inositol |
| | galactosyltransferase. |
| 2.4.1.157 | 1,2-diacylglycerol 3-glucosyltransferase. |
| 2.4.1.158 | 13-hydroxydocosanoate 13-beta- |
| | glucosyltransferase. |
| 2.4.1.159 | Flavonol-3-O-glucoside L- |
| | rhamnosyltransferase. |
| 2.4.1.160 | Pyridoxine 5′-O-beta-D- |
| | glucosyltransferase. |
| 2.4.1.161 | Oligosaccharide 4-alpha-D- |
| | glucosyltransferase. |
| 2.4.1.162 | Aldose beta-D-fructosyltransferase. |
| 2.4.1.163 | Beta-galactosyl-N- |
| | acetylglucosaminylgalactosylglucosyl-ceramide beta- |
| | 1,3-acetylglucosaminyltransferase. |
| 2.4.1.164 | Galactosyl-N- |
| | acetylglucosaminylgalactosylglucosyl-ceramide beta- |
| | 1,6-N-acetylglucosaminyltransferase. |
| 2.4.1.165 | N- |
| | acetylneuraminylgalactosylglucosylceramide beta-1,4- |
| | N-acetylgalactosaminyltransferase. |
| 2.4.1.166 | Raffinose--raffinose alpha- |
| | galactosyltransferase. |
| 2.4.1.167 | Sucrose 6(F)-alpha-galactosyltransferase. |
| 2.4.1.168 | Xyloglucan 4-glucosyltransferase. |
| 2.4.1.170 | Isoflavone 7-O-glucosyltransferase. |
| 2.4.1.171 | Methyl-ONN-azoxymethanol beta-D- |
| | glucosyltransferase. |
| 2.4.1.172 | Salicyl-alcohol beta-D- |
| | glucosyltransferase. |
| 2.4.1.173 | Sterol 3-beta-glucosyltransferase. |
| 2.4.1.174 | Glucuronylgalactosylproteoglycan 4-beta- |
| | N-acetylgalactosaminyltransferase. |
| 2.4.1.175 | Glucuronosyl-N-acetylgalactosaminyl- |
| | proteoglycan 4-beta-N- |
| | acetylgalactosaminyltransferase. |
| 2.4.1.176 | Gibberellin beta-D-glucosyltransferase. |
| 2.4.1.177 | Cinnamate beta-D-glucosyltransferase. |
| 2.4.1.178 | Hydroxymandelonitrile |
| | glucosyltransferase. |
| 2.4.1.179 | Lactosylceramide beta-1,3- |
| | galactosyltransferase. |
| 2.4.1.180 | Lipopolysaccharide N- |
| | acetylmannosaminouronosyltransferase. |
| 2.4.1.181 | Hydroxyanthraquinone |
| | glucosyltransferase. |
| 2.4.1.182 | Lipid-A-disaccharide synthase. |
| 2.4.1.183 | Alpha-1,3-glucan synthase. |
| 2.4.1.184 | Galactolipid galactosyltransferase. |
| 2.4.1.185 | Flavanone 7-O-beta-glucosyltransferase. |
| 2.4.1.186 | Glycogenin glucosyltransferase. |
| 2.4.1.187 | N- |
| | acetylglucosaminyldiphosphoundecaprenol N-acetyl- |
| | beta-D-mannosaminyltransferase. |
| 2.4.1.188 | N- |
| | acetylglucosaminyldiphosphoundecaprenol |
| | glucosyltransferase. |
| 2.4.1.189 | Luteolin 7-O-glucuronosyltransferase. |
| 2.4.1.190 | Luteolin-7-O-glucuronide 7-O- |
| | glucuronosyltransferase. |
| 2.4.1.191 | Luteolin-7-O-diglucuronide 4′-O- |
| | glucuronosyltransferase. |
| 2.4.1.192 | Nuatigenin 3-beta- |
| | glucosyltransferase. |
| 2.4.1.193 | Sarsapogenin 3-beta- |
| | glucosyltransferase. |
| 2.4.1.194 | 4-hydroxybenzoate 4-O-beta-D- |
| | glucosyltransferase. |
| 2.4.1.195 | Thiohydroximate beta-D- |
| | glucosyltransferase. |
| 2.4.1.196 | Nicotinate glucosyltransferase. |
| 2.4.1.197 | High-mannose-oligosaccharide beta- |
| | 1,4-N-acetylglucosaminyltransferase. |
| 2.4.1.198 | Phosphatidylinositol N- |
| | acetylglucosaminyltransferase. |
| 2.4.1.199 | Beta-mannosylphosphodecaprenol- |
| | mannooligosaccharide 6-mannosyltransferase. |
| 2.4.1.201 | Alpha-1,6-mannosyl-glycoprotein 4- |
| | beta-N-acetylglucosaminyltransferase. |
| 2.4.1.202 | 2,4-dihydroxy-7-methoxy-2H-1,4- |
| | benzoxazin-3(4H)-one 2-D-glucosyltransferase. |
| 2.4.1.203 | Trans-zeatin O-beta-D- |
| | glucosyltransferase. |
| 2.4.1.205 | Galactogen 6-beta- |
| | galactosyltransferase. |
| 2.4.1.206 | Lactosylceramide 1,3-N-acetyl-beta- |
| | D-glucosaminyltransferase. |
| 2.4.1.207 | Xyloglucan:xyloglucosyl transferase. |
| 2.4.1.208 | Diglucosyl diacylglycerol synthase. |
| 2.4.1.209 | Cis-p-coumarate glucosyltransferase. |
| 2.4.1.210 | Limonoid glucosyltransferase. |
| 2.4.1.211 | 1,3-beta-galactosyl-N- |
| | acetylhexosamine phosphorylase. |
| 2.4.1.212 | Hyaluronan synthase. |
| 2.4.1.213 | Glucosylglycerol-phosphate synthase. |
| 2.4.1.214 | Glycoprotein 3-alpha-L- |
| | fucosyltransferase. |
| 2.4.1.215 | Cis-zeatin O-beta-D- |
| | glucosyltransferase. |
| 2.4.1.216 | Trehalose 6-phosphate |
| | phosphorylase. |
| 2.4.1.217 | Mannosyl-3-phosphoglycerate |
| | synthase. |
| 2.4.1.218 | Hydroquinone glucosyltransferase. |
| 2.4.1.219 | Vomilenine glucosyltransferase. |
| 2.4.1.220 | Indoxyl-UDPG glucosyltransferase. |
| 2.4.1.221 | Peptide-O-fucosyltransferase. |
| 2.4.1.222 | O-fucosylpeptide 3-beta-N- |
| | acetylglucosaminyltransferase. |
| 2.4.1.223 | Glucuronyl-galactosyl-proteoglycan |
| | 4-alpha-N-acetylglucosaminyltransferase. |
| 2.4.1.224 | Glucuronosyl-N- |
| | acetylglucosaminyl-proteoglycan 4-alpha-N- |
| | acetylglucosaminyltransferase. |
| 2.4.1.225 | N-acetylglucosaminyl-proteoglycan |
| | 4-beta-glucuronosyltransferase. |
| 2.4.1.226 | N-acetylgalactosaminyl- |
| | proteoglycan 3-beta-glucuronosyltransferase. |
| 2.4.1.227 | Undecaprenyldiphospho- |
| | muramoylpentapeptide beta-N- |
| | acetylglucosaminyltransferase. |
| 2.4.1.228 | Lactosylceramide 4-alpha- |
| | galactosyltransferase. |
| 2.4.1.229 | [Skp1-protein]-hydroxyproline N- |
| | acetylglucosaminyltransferase. |
| 2.4.1.230 | Kojibiose phosphorylase. |
| 2.4.1.231 | Alpha,alpha-trehalose phosphorylase |
| | (configuration-retaining). |
| 2.4.1.232 | Initiation-specific alpha-1,6- |
| | mannosyltransferase. |
| 2.4.2.1 | Purine-nucleoside phosphorylase. |
| 2.4.2.2 | Pyrimidine-nucleoside phosphorylase. |
| 2.4.2.3 | Uridine phosphorylase. |
| 2.4.2.4 | Thymidine phosphorylase. |
| 2.4.2.5 | Nucleoside ribosyltransferase. |
| 2.4.2.6 | Nucleoside deoxyribosyltransferase. |
| 2.4.2.7 | Adenine phosphoribosyltransferase. |
| 2.4.2.8 | Hypoxanthine |
| | phosphoribosyltransferase. |
| 2.4.2.9 | Uracil phosphoribosyltransferase. |
| 2.4.2.10 | Orotate phosphoribosyltransferase. |
| 2.4.2.11 | Nicotinate |
| | phosphoribosyltransferase. |
| 2.4.2.12 | Nicotinamide |
| | phosphoribosyltransferase. |
| 2.4.2.14 | Amidophosphoribosyltransferase. |
| 2.4.2.15 | Guanosine phosphorylase. |
| 2.4.2.16 | Urate-ribonucleotide phosphorylase. |
| 2.4.2.17 | ATP phosphoribosyltransferase. |
| 2.4.2.18 | Anthranilate |
| | phosphoribosyltransferase. |
| 2.4.2.19 | Nicotinate-nucleotide diphosphorylase |
| | (carboxylating). |
| 2.4.2.20 | Dioxotetrahydropyrimidine |
| | phosphoribosyltransferase. |
| 2.4.2.21 | Nicotinate-nucleotide-- |
| | dimethylbenzimidazole phosphoribosyltransferase. |
| 2.4.2.22 | Xanthine phosphoribosyltransferase. |
| 2.4.2.23 | Deoxyuridine phosphorylase. |
| 2.4.2.24 | 1,4-beta-D-xylan synthase. |
| 2.4.2.25 | Flavone apiosyltransferase. |
| 2.4.2.26 | Protein xylosyltransferase. |
| 2.4.2.27 | dTDP-dihydrostreptose--streptidine-6- |
| | phosphate dihydrostreptosyltransferase. |
| 2.4.2.28 | S-methyl-5-thioadenosine phosphorylase. |
| 2.4.2.29 | Queuine tRNA-ribosyltransferase. |
| 2.4.2.30 | NAD(+) ADP-ribosyltransferase. |
| 2.4.2.31 | NAD(P)(+)--arginine ADP- |
| | ribosyltransferase. |
| 2.4.2.32 | Dolichyl-phosphate D-xylosyltransferase. |
| 2.4.2.33 | Dolichyl-xylosyl-phosphate--protein |
| | xylosyltransferase. |
| 2.4.2.34 | Indolylacetylinositol arabinosyltransferase. |
| 2.4.2.35 | Flavonol-3-O-glycoside xylosyltransferase. |
| 2.4.2.36 | NAD(+)--diphthamide ADP- |
| | ribosyltransferase. |
| 2.4.2.37 | NAD(+)--dinitrogen-reductase ADP-D- |
| | ribosyltransferase. |
| 2.4.2.38 | Glycoprotein 2-beta-D-xylosyltransferase. |
| 2.4.2.39 | Xyloglucan 6-xylosyltransferase. |
| 2.4.2.40 | Zeatin O-beta-D-xylosyltransferase. |
| 2.4.99.1 | Beta-galactoside alpha-2,6-sialyltransferase. |
| 2.4.99.2 | Monosialoganglioside sialyltransferase. |
| 2.4.99.3 | Alpha-N-acetylgalactosaminide alpha-2,6- |
| | sialyltransferase. |
| 2.4.99.4 | Beta-galactoside alpha-2,3-sialyltransferase. |
| 2.4.99.5 | Galactosyldiacylglycerol alpha-2,3- |
| | sialyltransferase. |
| 2.4.99.6 | N-acetyllactosaminide alpha-2,3- |
| | sialyltransferase. |
| 2.4.99.7 | (Alpha-N-acetylneuraminyl-2,3-beta- |
| | galactosyl-1,3)-N-acetyl-galactosaminide 6-alpha- |
| | sialyltransferase. |
| 2.4.99.8 | Alpha-N-acetylneuraminate alpha-2,8- |
| | sialyltransferase. |
| 2.4.99.9 | Lactosylceramide alpha-2,3- |
| | sialyltransferase. |
| 2.4.99.10 | Neolactotetraosylceramide alpha-2,3- |
| | sialyltransferase. |
| 2.4.99.11 | Lactosylceramide alpha-2,6-N- |
| | sialyltransferase. |
| 2.5.1.1 | Dimethylallyltranstransferase. |
| 2.5.1.2 | Thiamine pyridinylase. |
| 2.5.1.3 | Thiamine-phosphate diphosphorylase. |
| 2.5.1.4 | Adenosylmethionine cyclotransferase. |
| 2.5.1.5 | Galactose-6-sulfurylase. |
| 2.5.1.6 | Methionine adenosyltransferase. |
| 2.5.1.7 | UDP-N-acetylglucosamine 1- |
| | carboxyvinyltransferase. |
| 2.5.1.8 | tRNA isopentenyltransferase. |
| 2.5.1.9 | Riboflavin synthase. |
| 2.5.1.10 | Geranyltranstransferase. |
| 2.5.1.11 | Trans-octaprenyltranstransferase. |
| 2.5.1.15 | Dihydropteroate synthase. |
| 2.5.1.16 | Spermidine synthase. |
| 2.5.1.17 | Cob(I)yrinic acid a,c-diamide |
| | adenosyltransferase. |
| 2.5.1.18 | Glutathione transferase. |
| 2.5.1.19 | 3-phosphoshikimate 1- |
| | carboxyvinyltransferase. |
| 2.5.1.20 | Rubber cis-polyprenylcistransferase. |
| 2.5.1.21 | Farnesyl-diphosphate |
| | farnesyltransferase. |
| 2.5.1.22 | Spermine synthase. |
| 2.5.1.23 | Sym-norspermidine synthase. |
| 2.5.1.24 | Discadenine synthase. |
| 2.5.1.25 | tRNA-uridine |
| | aminocarboxypropyltransferase. |
| 2.5.1.26 | Alkylglycerone-phosphate synthase. |
| 2.5.1.27 | Adenylate dimethylallyltransferase. |
| 2.5.1.28 | Dimethylallylcistransferase. |
| 2.5.1.29 | Farnesyltranstransferase. |
| 2.5.1.30 | Trans-hexaprenyltranstransferase. |
| 2.5.1.31 | Di-trans,poly-cis- |
| | decaprenylcistransferase. |
| 2.5.1.32 | Geranylgeranyl-diphosphate |
| | geranylgeranyltransferase. |
| 2.5.1.33 | Trans-pentaprenyltranstransferase. |
| 2.5.1.34 | Tryptophan dimethylallyltransferase. |
| 2.5.1.35 | Aspulvinone dimethylallyltransferase. |
| 2.5.1.36 | Trihydroxypterocarpan |
| | dimethylallyltransferase. |
| 2.5.1.38 | Isonocardicin synthase. |
| 2.5.1.39 | 4-hydroxybenzoate |
| | nonaprenyltransferase. |
| 2.5.1.41 | Phosphoglycerol |
| | geranylgeranyltransferase. |
| 2.5.1.42 | Geranylgeranylglycerol-phosphate |
| | geranylgeranyltransferase. |
| 2.5.1.43 | Nicotianamine synthase. |
| 2.5.1.44 | Homospermidine synthase. |
| 2.5.1.45 | Homospermidine synthase (spermidine- |
| | specific). |
| 2.5.1.46 | Deoxyhypusine synthase. |
| 2.5.1.47 | Cysteine synthase. |
| 2.5.1.48 | Cystathionine gamma-synthase. |
| 2.5.1.49 | O-acetylhomoserine |
| | aminocarboxypropyltransferase. |
| 2.5.1.50 | Zeatin 9-aminocarboxyethyltransferase. |
| 2.5.1.51 | Beta-pyrazolylalanine synthase. |
| 2.5.1.52 | L-mimosine synthase. |
| 2.5.1.53 | Uracilylalanine synthase. |
| 2.5.1.54 | 3-deoxy-7-phosphoheptulonate synthase. |
| 2.5.1.55 | 3-deoxy-8-phosphooctulonate synthase. |
| 2.5.1.56 | N-acetylneuraminate synthase. |
| 2.5.1.57 | N-acylneuraminate-9-phosphate synthase. |
| 2.5.1.58 | Protein farnesyltransferase. |
| 2.5.1.59 | Protein geranylgeranyltransferase type I. |
| 2.5.1.60 | Protein geranylgeranyltransferase type II. |
| 2.5.1.61 | Hydroxymethylbilane synthase. |
| 2.5.1.62 | Chlorophyll synthase. |
| 2.5.1.63 | Adenosyl-fluoride synthase. |
| 2.5.1.64 | 2-succinyl-6-hydroxy-2,4-cyclohexadiene- |
| | 1-carboxylate synthase. |
| 2.6.1.1 | Aspartate transaminase. |
| 2.6.1.2 | Alanine transaminase. |
| 2.6.1.3 | Cysteine transaminase. |
| 2.6.1.4 | Glycine transaminase. |
| 2.6.1.5 | Tyrosine transaminase. |
| 2.6.1.6 | Leucine transaminase. |
| 2.6.1.7 | Kynurenine--oxoglutarate transaminase. |
| 2.6.1.8 | 2,5-diaminovalerate transaminase. |
| 2.6.1.9 | Histidinol-phosphate transaminase. |
| 2.6.1.11 | Acetylornithine transaminase. |
| 2.6.1.12 | Alanine--oxo-acid transaminase. |
| 2.6.1.13 | Ornithine--oxo-acid transaminase. |
| 2.6.1.14 | Asparagine--oxo-acid transaminase. |
| 2.6.1.15 | Glutamine--pyruvate transaminase. |
| 2.6.1.16 | Glutamine--fructose-6-phosphate |
| | transaminase (isomerizing). |
| 2.6.1.17 | Succinyldiaminopimelate transaminase. |
| 2.6.1.18 | Beta-alanine--pyruvate transaminase. |
| 2.6.1.19 | 4-aminobutyrate transaminase. |
| 2.6.1.21 | D-alanine transaminase. |
| 2.6.1.22 | (S)-3-amino-2-methylpropionate |
| | transaminase. |
| 2.6.1.23 | 4-hydroxyglutamate transaminase. |
| 2.6.1.24 | Diiodotyrosine transaminase. |
| 2.6.1.26 | Thyroid-hormone transaminase. |
| 2.6.1.27 | Tryptophan transaminase. |
| 2.6.1.28 | Tryptophan--phenylpyruvate |
| | transaminase. |
| 2.6.1.29 | Diamine transaminase. |
| 2.6.1.30 | Pyridoxamine--pyruvate transaminase. |
| 2.6.1.31 | Pyridoxamine--oxaloacetate |
| | transaminase. |
| 2.6.1.32 | Valine--3-methyl-2-oxovalerate |
| | transaminase. |
| 2.6.1.33 | dTDP-4-amino-4,6-dideoxy-D-glucose |
| | transaminase. |
| 2.6.1.34 | UDP-2-acetamido-4-amino-2,4,6- |
| | trideoxyglucose transaminase. |
| 2.6.1.35 | Glycine--oxaloacetate transaminase. |
| 2.6.1.36 | L-lysine 6-transaminase. |
| 2.6.1.37 | 2-aminoethylphosphonate--pyruvate |
| | transaminase. |
| 2.6.1.38 | Histidine transaminase. |
| 2.6.1.39 | 2-aminoadipate transaminase. |
| 2.6.1.40 | (R)-3-amino-2-methylpropionate-- |
| | pyruvate transaminase. |
| 2.6.1.41 | D-methionine--pyruvate transaminase. |
| 2.6.1.42 | Branched-chain-amino-acid |
| | transaminase. |
| 2.6.1.43 | Aminolevulinate transaminase. |
| 2.6.1.44 | Alanine--glyoxylate transaminase. |
| 2.6.1.45 | Serine--glyoxylate transaminase. |
| 2.6.1.46 | Diaminobutyrate--pyruvate |
| | transaminase. |
| 2.6.1.47 | Alanine--oxomalonate transaminase. |
| 2.6.1.48 | 5-aminovalerate transaminase. |
| 2.6.1.49 | Dihydroxyphenylalanine transaminase. |
| 2.6.1.50 | Glutamine--scyllo-inositol |
| | transaminase. |
| 2.6.1.51 | Serine--pyruvate transaminase. |
| 2.6.1.52 | Phosphoserine transaminase. |
| 2.6.1.54 | Pyridoxamine-phosphate transaminase. |
| 2.6.1.55 | Taurine-2-oxoglutarate transaminase. |
| 2.6.1.56 | 1D-1-guanidino-3-amino-1,3-dideoxy- |
| | scyllo-inositol transaminase. |
| 2.6.1.57 | Aromatic-amino-acid transaminase. |
| 2.6.1.58 | Phenylalanine(histidine) transaminase. |
| 2.6.1.59 | dTDP-4-amino-4,6-dideoxygalactose |
| | transaminase. |
| 2.6.1.60 | Aromatic-amino-acid--glyoxylate |
| | transaminase. |
| 2.6.1.62 | Adenosylmethionine--8-amino-7- |
| | oxononanoate transaminase. |
| 2.6.1.63 | Kynurenine--glyoxylate transaminase. |
| 2.6.1.64 | Glutamine--phenylpyruvate transaminase. |
| 2.6.1.65 | N(6)-acetyl-beta-lysine transaminase. |
| 2.6.1.66 | Valine--pyruvate transaminase. |
| 2.6.1.67 | 2-aminohexanoate transaminase. |
| 2.6.1.68 | Ornithine(lysine) transaminase. |
| 2.6.1.70 | Aspartate--phenylpyruvate transaminase. |
| 2.6.1.71 | Lysine--pyruvate 6-transaminase. |
| 2.6.1.72 | D-4-hydroxyphenylglycine transaminase. |
| 2.6.1.73 | Methionine--glyoxylate transaminase. |
| 2.6.1.74 | Cephalosporin-C transaminase. |
| 2.6.1.75 | Cysteine-conjugate transaminase. |
| 2.6.1.76 | Diaminobutyrate--2-oxoglutarate |
| | transaminase. |
| 2.6.1.77 | Taurine--pyruvate aminotransferase. |
| 2.6.3.1 | Oximinotransferase. |
| 2.6.99.1 | dATP(dGTP)--DNA purinetransferase. |
| 2.7.1.1 | Hexokinase. |
| 2.7.1.2 | Glucokinase. |
| 2.7.1.3 | Ketohexokinase. |
| 2.7.1.4 | Fructokinase. |
| 2.7.1.5 | Rhamnulokinase. |
| 2.7.1.6 | Galactokinase. |
| 2.7.1.7 | Mannokinase. |
| 2.7.1.8 | Glucosamine kinase. |
| 2.7.1.10 | Phosphoglucokinase. |
| 2.7.1.11 | 6-phosphofructokinase. |
| 2.7.1.12 | Gluconokinase. |
| 2.7.1.13 | Dehydrogluconokinase. |
| 2.7.1.14 | Sedoheptulokinase. |
| 2.7.1.15 | Ribokinase. |
| 2.7.1.16 | Ribulokinase. |
| 2.7.1.17 | Xylulokinase. |
| 2.7.1.18 | Phosphoribokinase. |
| 2.7.1.19 | Phosphoribulokinase. |
| 2.7.1.20 | Adenosine kinase. |
| 2.7.1.21 | Thymidine kinase. |
| 2.7.1.22 | Ribosylnicotinamide kinase. |
| 2.7.1.23 | NAD(+) kinase. |
| 2.7.1.24 | Dephospho-CoA kinase. |
| 2.7.1.25 | Adenylyl-sulfate kinase. |
| 2.7.1.26 | Riboflavin kinase. |
| 2.7.1.27 | Erythritol kinase. |
| 2.7.1.28 | Triokinase. |
| 2.7.1.29 | Glycerone kinase. |
| 2.7.1.30 | Glycerol kinase. |
| 2.7.1.31 | Glycerate kinase. |
| 2.7.1.32 | Choline kinase. |
| 2.7.1.33 | Pantothenate kinase. |
| 2.7.1.34 | Pantetheine kinase. |
| 2.7.1.35 | Pyridoxal kinase. |
| 2.7.1.36 | Mevalonate kinase. |
| 2.7.1.37 | Protein kinase. |
| 2.7.1.38 | Phosphorylase kinase. |
| 2.7.1.39 | Homoserine kinase. |
| 2.7.1.40 | Pyruvate kinase. |
| 2.7.1.41 | Glucose-1-phosphate |
| | phosphodismutase. |
| 2.7.1.42 | Riboflavin phosphotransferase. |
| 2.7.1.43 | Glucuronokinase. |
| 2.7.1.44 | Galacturonokinase. |
| 2.7.1.45 | 2-dehydro-3-deoxygluconokinase. |
| 2.7.1.46 | L-arabinokinase. |
| 2.7.1.47 | D-ribulokinase. |
| 2.7.1.48 | Uridine kinase. |
| 2.7.1.49 | Hydroxymethylpyrimidine kinase. |
| 2.7.1.50 | Hydroxyethylthiazole kinase. |
| 2.7.1.51 | L-fuculokinase. |
| 2.7.1.52 | Fucokinase. |
| 2.7.1.53 | L-xylulokinase. |
| 2.7.1.54 | D-arabinokinase. |
| 2.7.1.55 | Allose kinase. |
| 2.7.1.56 | 1-phosphofructokinase. |
| 2.7.1.58 | 2-dehydro-3-deoxygalactonokinase. |
| 2.7.1.59 | N-acetylglucosamine kinase. |
| 2.7.1.60 | N-acylmannosamine kinase. |
| 2.7.1.61 | Acyl-phosphate--hexose |
| | phosphotransferase. |
| 2.7.1.62 | Phosphoramidate--hexose |
| | phosphotransferase. |
| 2.7.1.63 | Polyphosphate--glucose |
| | phosphotransferase. |
| 2.7.1.64 | Inositol 3-kinase. |
| 2.7.1.65 | Scyllo-inosamine 4-kinase. |
| 2.7.1.66 | Undecaprenol kinase. |
| 2.7.1.67 | 1-phosphatidylinositol 4-kinase. |
| 2.7.1.68 | 1-phosphatidylinositol-4-phosphate |
| | 5-kinase. |
| 2.7.1.69 | Protein-N(pi)-phosphohistidine--sugar |
| | phosphotransferase. |
| 2.7.1.71 | Shikimate kinase. |
| 2.7.1.72 | Streptomycin 6-kinase. |
| 2.7.1.73 | Inosine kinase. |
| 2.7.1.74 | Deoxycytidine kinase. |
| 2.7.1.76 | Deoxyadenosine kinase. |
| 2.7.1.77 | Nucleoside phosphotransferase. |
| 2.7.1.78 | Polynucleotide 5′-hydroxy-kinase. |
| 2.7.1.79 | Diphosphate--glycerol phosphotransferase. |
| 2.7.1.80 | Diphosphate--serine phosphotransferase. |
| 2.7.1.81 | Hydroxylysine kinase. |
| 2.7.1.82 | Ethanolamine kinase. |
| 2.7.1.83 | Pseudouridine kinase. |
| 2.7.1.84 | Alkylglycerone kinase. |
| 2.7.1.85 | Beta-glucoside kinase. |
| 2.7.1.86 | NADH kinase. |
| 2.7.1.87 | Streptomycin 3″-kinase. |
| 2.7.1.88 | Dihydrostreptomycin-6-phosphate 3′-alpha- |
| | kinase. |
| 2.7.1.89 | Thiamine kinase. |
| 2.7.1.90 | Diphosphate--fructose-6-phosphate 1- |
| | phosphotransferase. |
| 2.7.1.91 | Sphinganine kinase. |
| 2.7.1.92 | 5-dehydro-2-deoxygluconokinase. |
| 2.7.1.93 | Alkylglycerol kinase. |
| 2.7.1.94 | Acylglycerol kinase. |
| 2.7.1.95 | Kanamycin kinase. |
| 2.7.1.99 | [Pyruvate dehydrogenase (lipoamide)] kinase. |
| 2.7.1.100 | S-methyl-5-thioribose kinase. |
| 2.7.1.101 | Tagatose kinase. |
| 2.7.1.102 | Hamamelose kinase. |
| 2.7.1.103 | Viomycin kinase. |
| 2.7.1.104 | Diphosphate--protein phosphotransferase. |
| 2.7.1.105 | 6-phosphofructo-2-kinase. |
| 2.7.1.106 | Glucose-1,6-bisphosphate synthase. |
| 2.7.1.107 | Diacylglycerol kinase. |
| 2.7.1.108 | Dolichol kinase. |
| 2.7.1.109 | [Hydroxymethylglutaryl-CoA reductase |
| | (NADPH)] kinase. |
| 2.7.1.110 | Dephospho-[reductase kinase] kinase. |
| 2.7.1.112 | Protein-tyrosine kinase. |
| 2.7.1.113 | Deoxyguanosine kinase. |
| 2.7.1.114 | AMP--thymidine kinase. |
| 2.7.1.115 | [3-methyl-2-oxobutanoate dehydrogenase |
| | (lipoamide)] kinase. |
| 2.7.1.116 | [Isocitrate dehydrogenase (NADP+)] kinase. |
| 2.7.1.117 | [Myosin light-chain] kinase. |
| 2.7.1.118 | ADP--thymidine kinase. |
| 2.7.1.119 | Hygromycin-B kinase. |
| 2.7.1.120 | Caldesmon kinase. |
| 2.7.1.121 | Phosphoenolpyruvate--glycerone |
| | phosphotransferase. |
| 2.7.1.122 | Xylitol kinase. |
| 2.7.1.123 | Calcium/calmodulin-dependent protein |
| | kinase. |
| 2.7.1.124 | [Tyrosine 3-monooxygenase] kinase. |
| 2.7.1.125 | Rhodopsin kinase. |
| 2.7.1.126 | [Beta-adrenergic-receptor] kinase. |
| 2.7.1.127 | Inositol-trisphosphate 3-kinase. |
| 2.7.1.128 | [Acetyl-CoA carboxylase] kinase. |
| 2.7.1.129 | [Myosin heavy-chain] kinase. |
| 2.7.1.130 | Tetraacyldisaccharide 4′-kinase. |
| 2.7.1.131 | [Low-density lipoprotein receptor] |
| | kinase. |
| 2.7.1.132 | Tropomyosin kinase. |
| 2.7.1.134 | Inositol-tetrakisphosphate 1-kinase. |
| 2.7.1.135 | [Tau protein] kinase. |
| 2.7.1.136 | Macrolide 2′-kinase. |
| 2.7.1.137 | Phosphatidylinositol 3-kinase. |
| 2.7.1.138 | Ceramide kinase. |
| 2.7.1.140 | Inositol-tetrakisphosphate 5-kinase. |
| 2.7.1.141 | [RNA-polymerase]-subunit kinase. |
| 2.7.1.142 | Glycerol-3-phosphate--glucose |
| | phosphotransferase. |
| 2.7.1.143 | Diphosphate-purine nucleoside kinase. |
| 2.7.1.144 | Tagatose-6-phosphate kinase. |
| 2.7.1.145 | Deoxynucleoside kinase. |
| 2.7.1.146 | ADP-specific phosphofructokinase. |
| 2.7.1.147 | ADP-specific glucokinase. |
| 2.7.1.148 | 4-(cytidine 5′-diphospho)-2-C-methyl- |
| | D-erythritol kinase. |
| 2.7.1.149 | 1-phosphatidylinositol-5-phosphate 4- |
| | kinase. |
| 2.7.1.150 | 1-phosphatidylinositol-3-phosphate 5- |
| | kinase. |
| 2.7.1.151 | Inositol-polyphosphate multikinase. |
| 2.7.1.153 | Phosphatidylinositol-4,5-bisphosphate 3- |
| | kinase. |
| 2.7.1.154 | Phosphatidylinositol-4-phosphate 3- |
| | kinase. |
| 2.7.1.155 | Diphosphoinositol-pentakisphosphate |
| | kinase. |
| 2.7.1.156 | Adenosylcobinamide kinase. |
| 2.7.2.1 | Acetate kinase. |
| 2.7.2.2 | Carbamate kinase. |
| 2.7.2.3 | Phosphoglycerate kinase. |
| 2.7.2.4 | Aspartate kinase. |
| 2.7.2.6 | Formate kinase. |
| 2.7.2.7 | Butyrate kinase. |
| 2.7.2.8 | Acetylglutamate kinase. |
| 2.7.2.10 | Phosphoglycerate kinase (GTP). |
| 2.7.2.11 | Glutamate 5-kinase. |
| 2.7.2.12 | Acetate kinase (diphosphate). |
| 2.7.2.13 | Glutamate 1-kinase. |
| 2.7.2.14 | Branched-chain-fatty-acid kinase. |
| 2.7.3.1 | Guanidinoacetate kinase. |
| 2.7.3.2 | Creatine kinase. |
| 2.7.3.3 | Arginine kinase. |
| 2.7.3.4 | Taurocyamine kinase. |
| 2.7.3.5 | Lombricine kinase. |
| 2.7.3.6 | Hypotaurocyamine kinase. |
| 2.7.3.7 | Opheline kinase. |
| 2.7.3.8 | Ammonia kinase. |
| 2.7.3.9 | Phosphoenolpyruvate--protein |
| | phosphotransferase. |
| 2.7.3.10 | Agmatine kinase. |
| 2.7.3.11 | Protein-histidine pros-kinase. |
| 2.7.3.12 | Protein-histidine tele-kinase. |
| 2.7.4.1 | Polyphosphate kinase. |
| 2.7.4.2 | Phosphomevalonate kinase. |
| 2.7.4.3 | Adenylate kinase. |
| 2.7.4.4 | Nucleoside-phosphate kinase. |
| 2.7.4.6 | Nucleoside-diphosphate kinase. |
| 2.7.4.7 | Phosphomethylpyrimidine kinase. |
| 2.7.4.8 | Guanylate kinase. |
| 2.7.4.9 | dTMP kinase. |
| 2.7.4.10 | Nucleoside-triphosphate--adenylate |
| | kinase. |
| 2.7.4.11 | (Deoxy)adenylate kinase. |
| 2.7.4.12 | T(2)-induced deoxynucleotide kinase. |
| 2.7.4.13 | (Deoxy)nucleoside-phosphate kinase. |
| 2.7.4.14 | Cytidylate kinase. |
| 2.7.4.15 | Thiamine-diphosphate kinase. |
| 2.7.4.16 | Thiamine-phosphate kinase. |
| 2.7.4.17 | 3-phosphoglyceroyl-phosphate-- |
| | polyphosphate phosphotransferase. |
| 2.7.4.18 | Farnesyl-diphosphate kinase. |
| 2.7.4.19 | 5-methyldeoxycytidine-5′-phosphate |
| | kinase. |
| 2.7.4.20 | Dolichyl-diphosphate--polyphosphate |
| | phosphotransferase. |
| 2.7.4.21 | Inositol-hexakisphosphate kinase. |
| 2.7.6.1 | Ribose-phosphate diphosphokinase. |
| 2.7.6.2 | Thiamine diphosphokinase. |
| 2.7.6.3 | 2-amino-4-hydroxy-6- |
| | hydroxymethyldihydropteridine diphosphokinase. |
| 2.7.6.4 | Nucleotide diphosphokinase. |
| 2.7.6.5 | GTP diphosphokinase. |
| 2.7.7.1 | Nicotinamide-nucleotide |
| | adenylyltransferase. |
| 2.7.7.2 | FMN adenylyltransferase. |
| 2.7.7.3 | Pantetheine-phosphate adenylyltransferase. |
| 2.7.7.4 | Sulfate adenylyltransferase. |
| 2.7.7.5 | Sulfate adenylyltransferase (ADP). |
| 2.7.7.6 | DNA-directed RNA polymerase. |
| 2.7.7.7 | DNA-directed DNA polymerase. |
| 2.7.7.8 | Polyribonucleotide nucleotidyltransferase. |
| 2.7.7.9 | UTP--glucose-1-phosphate |
| | uridylyltransferase. |
| 2.7.7.10 | UTP--hexose-1-phosphate |
| | uridylyltransferase. |
| 2.7.7.11 | UTP--xylose-1-phosphate |
| | uridylyltransferase. |
| 2.7.7.12 | UDP-glucose--hexose-1-phosphate |
| | uridylyltransferase. |
| 2.7.7.13 | Mannose-1-phosphate guanylyltransferase. |
| 2.7.7.14 | Ethanolamine-phosphate |
| | cytidylyltransferase. |
| 2.7.7.15 | Choline-phosphate cytidylyltransferase. |
| 2.7.7.18 | Nicotinate-nucleotide adenylyltransferase. |
| 2.7.7.19 | Polynucleotide adenylyltransferase. |
| 2.7.7.21 | tRNA cytidylyltransferase. |
| 2.7.7.22 | Mannose-1-phosphate guanylyltransferase |
| | (GDP). |
| 2.7.7.23 | UDP-N-acetylglucosamine |
| | diphosphorylase. |
| 2.7.7.24 | Glucose-1-phosphate |
| | thymidylyltransferase. |
| 2.7.7.25 | tRNA adenylyltransferase. |
| 2.7.7.27 | Glucose-1-phosphate adenylyltransferase. |
| 2.7.7.28 | Nucleoside-triphosphate-aldose 1- |
| | phosphate nucleotidyltransferase. |
| 2.7.7.30 | Fucose-1-phosphate guanylyltransferase. |
| 2.7.7.31 | DNA nucleotidylexotransferase. |
| 2.7.7.32 | Galactose-1-phosphate |
| | thymidylyltransferase. |
| 2.7.7.33 | Glucose-1-phosphate cytidylyltransferase. |
| 2.7.7.34 | Glucose-1-phosphate |
| | guanylyltransferase. |
| 2.7.7.35 | Ribose-5-phosphate adenylyltransferase. |
| 2.7.7.36 | Aldose-1-phosphate adenylyltransferase. |
| 2.7.7.37 | Aldose-1-phosphate |
| | nucleotidyltransferase. |
| 2.7.7.38 | 3-deoxy-manno-octulosonate |
| | cytidylyltransferase. |
| 2.7.7.39 | Glycerol-3-phosphate |
| | cytidylyltransferase. |
| 2.7.7.40 | D-ribitol-5-phosphate |
| | cytidylyltransferase. |
| 2.7.7.41 | Phosphatidate cytidylyltransferase. |
| 2.7.7.42 | [Glutamate--ammonia-ligase] |
| | adenylyltransferase. |
| 2.7.7.43 | N-acylneuraminate cytidylyltransferase. |
| 2.7.7.44 | Glucuronate-1-phosphate |
| | uridylyltransferase. |
| 2.7.7.45 | Guanosine-triphosphate |
| | guanylyltransferase. |
| 2.7.7.46 | Gentamicin 2″-nucleotidyltransferase. |
| 2.7.7.47 | Streptomycin 3″-adenylyltransferase. |
| 2.7.7.48 | RNA-directed RNA polymerase. |
| 2.7.7.49 | RNA-directed DNA polymerase. |
| 2.7.7.50 | mRNA guanylyltransferase. |
| 2.7.7.51 | Adenylylsulfate--ammonia |
| | adenylyltransferase. |
| 2.7.7.52 | RNA uridylyltransferase. |
| 2.7.7.53 | ATP adenylyltransferase. |
| 2.7.7.54 | Phenylalanine adenylyltransferase. |
| 2.7.7.55 | Anthranilate adenylyltransferase. |
| 2.7.7.56 | tRNA nucleotidyltransferase. |
| 2.7.7.57 | N-methylphosphoethanolamine |
| | cytidylyltransferase. |
| 2.7.7.58 | (2,3-dihydroxybenzoyl)adenylate |
| | synthase. |
| 2.7.7.59 | [Protein-PII] uridylyltransferase. |
| 2.7.7.60 | 2-C-methyl-D-erythritol 4-phosphate |
| | cytidylyltransferase. |
| 2.7.7.61 | Holo-ACP synthase. |
| 2.7.7.62 | Adenosylcobinamide-phosphate |
| | guanylyltransferase. |
| 2.7.8.1 | Ethanolaminephosphotransferase. |
| 2.7.8.2 | Diacylglycerol |
| | cholinephosphotransferase. |
| 2.7.8.3 | Ceramide cholinephosphotransferase. |
| 2.7.8.4 | Serine-phosphoethanolamine synthase. |
| 2.7.8.5 | CDP-diacylglycerol--glycerol-3-phosphate |
| | 3-phosphatidyltransferase. |
| 2.7.8.6 | Undecaprenyl-phosphate galactose |
| | phosphotransferase. |
| 2.7.8.7 | Holo-[acyl-carrier-protein] synthase. |
| 2.7.8.8 | CDP-diacylglycerol--serine O- |
| | phosphatidyltransferase. |
| 2.7.8.9 | Phosphomannan |
| | mannosephosphotransferase. |
| 2.7.8.10 | Sphingosine cholinephosphotransferase. |
| 2.7.8.11 | CDP-diacylglycerol--inositol 3- |
| | phosphatidyltransferase. |
| 2.7.8.12 | CDP-glycerol glycerophosphotransferase. |
| 2.7.8.13 | Phospho-N-acetylmuramoyl-pentapeptide- |
| | transferase. |
| 2.7.8.14 | CDP-ribitol ribitolphosphotransferase. |
| 2.7.8.15 | UDP-N-acetylglucosamine--dolichyl- |
| | phosphate N-acetylglucosaminephosphotransferase. |
| 2.7.8.17 | UDP-N-acetylglucosamine--lysosomal- |
| | enzyme N-acetylglucosaminephosphotransferase. |
| 2.7.8.18 | UDP-galactose--UDP-N-acetylglucosamine |
| | galactose phosphotransferase. |
| 2.7.8.19 | UDP-glucose--glycoprotein glucose |
| | phosphotransferase. |
| 2.7.8.20 | Phosphatidylglycerol--membrane- |
| | oligosaccharide glycerophosphotransferase. |
| 2.7.8.21 | Membrane-oligosaccharide |
| | glycerophosphotransferase. |
| 2.7.8.22 | 1-alkenyl-2-acylglycerol choline |
| | phosphotransferase. |
| 2.7.8.23 | Carboxyvinyl-carboxyphosphonate |
| | phosphorylmutase. |
| 2.7.8.24 | Phosphatidylcholine synthase. |
| 2.7.8.25 | Triphosphoribosyl-dephospho-CoA |
| | synthase. |
| 2.7.8.26 | Adenosylcobinamide-GDP |
| | ribazoletransferase. |
| 2.7.9.1 | Pyruvate, phosphate dikinase. |
| 2.7.9.2 | Pyruvate, water dikinase. |
| 2.7.9.3 | Selenide, water dikinase. |
| 2.7.9.4 | Alpha-glucan, water dikinase. |
| 2.8.1.1 | Thiosulfate sulfur-transferase. |
| 2.8.1.2 | 3-mercaptopyruvate sulfur-transferase. |
| 2.8.1.3 | Thiosulfate--thiol sulfur-transferase. |
| 2.8.1.4 | tRNA sulfur-transferase. |
| 2.8.1.5 | Thiosulfate--dithiol sulfur-transferase. |
| 2.8.1.6 | Biotin synthase. |
| 2.8.1.7 | Cysteine desulfurase. |
| 2.8.2.1 | Aryl sulfotransferase. |
| 2.8.2.2 | Alcohol sulfotransferase. |
| 2.8.2.3 | Amine sulfotransferase. |
| 2.8.2.4 | Estrone sulfotransferase. |
| 2.8.2.5 | Chondroitin 4-sulfotransferase. |
| 2.8.2.6 | Choline sulfotransferase. |
| 2.8.2.7 | UDP-N-acetylgalactosamine-4-sulfate |
| | sulfotransferase. |
| 2.8.2.8 | [Heparan sulfate]-glucosamine N- |
| | sulfotransferase. |
| 2.8.2.9 | Tyrosine-ester sulfotransferase. |
| 2.8.2.10 | Renilla-luciferin sulfotransferase. |
| 2.8.2.11 | Galactosylceramide sulfotransferase. |
| 2.8.2.13 | Psychosine sulfotransferase. |
| 2.8.2.14 | Bile-salt sulfotransferase. |
| 2.8.2.15 | Steroid sulfotransferase. |
| 2.8.2.16 | Thiol sulfotransferase. |
| 2.8.2.17 | Chondroitin 6-sulfotransferase. |
| 2.8.2.18 | Cortisol sulfotransferase. |
| 2.8.2.19 | Triglucosylalkylacylglycerol |
| | sulfotransferase. |
| 2.8.2.20 | Protein-tyrosine sulfotransferase. |
| 2.8.2.21 | Keratan sulfotransferase. |
| 2.8.2.22 | Arylsulfate sulfotransferase. |
| 2.8.2.23 | [Heparan sulfate]-glucosamine 3- |
| | sulfotransferase 1. |
| 2.8.2.24 | Desulfoglucosinolate sulfotransferase. |
| 2.8.2.25 | Flavonol 3-sulfotransferase. |
| 2.8.2.26 | Quercetin-3-sulfate 3′-sulfotransferase. |
| 2.8.2.27 | Quercetin-3-sulfate 4′-sulfotransferase. |
| 2.8.2.28 | Quercetin-3,3′-bissulfate 7- |
| | sulfotransferase. |
| 2.8.2.29 | [Heparan sulfate]-glucosamine 3- |
| | sulfotransferase 2. |
| 2.8.2.30 | [Heparan sulfate]-glucosamine 3- |
| | sulfotransferase 3. |
| 2.8.3.1 | Propionate CoA-transferase. |
| 2.8.3.2 | Oxalate CoA-transferase. |
| 2.8.3.3 | Malonate CoA-transferase. |
| 2.8.3.5 | 3-oxoacid CoA-transferase. |
| 2.8.3.6 | 3-oxoadipate CoA-transferase. |
| 2.8.3.7 | Succinate--citramalate CoA-transferase. |
| 2.8.3.8 | Acetate CoA-transferase. |
| 2.8.3.9 | Butyrate--acetoacetate CoA-transferase. |
| 2.8.3.10 | Citrate CoA-transferase. |
| 2.8.3.11 | Citramalate CoA-transferase. |
| 2.8.3.12 | Glutaconate CoA-transferase. |
| 2.8.3.13 | Succinate--hydroxymethylglutarate CoA- |
| | transferase. |
| 2.8.3.14 | 5-hydroxypentanoate CoA-transferase. |
| 2.8.3.15 | Succinyl-CoA:(R)-benzylsuccinate CoA- |
| | transferase. |
| 2.8.3.16 | Formyl-CoA transferase. |
| 2.8.3.17 | Cinnamoyl-CoA:phenyllactate CoA- |
| | transferase. |
| 2.8.4.1 | Coenzyme-B sulfoethylthiotransferase. |
| 2.9.1.1 | L-seryl-tRNA(Sec) selenium transferase. |

ENZYME: 3.—.—.—

| | |
|---|---|
| 3.1.1.1 | Carboxylesterase. |
| 3.1.1.2 | Arylesterase. |
| 3.1.1.3 | Triacylglycerol lipase. |
| 3.1.1.4 | Phospholipase A(2). |
| 3.1.1.5 | Lysophospholipase. |
| 3.1.1.6 | Acetylesterase. |
| 3.1.1.7 | Acetylcholinesterase. |
| 3.1.1.8 | Cholinesterase. |
| 3.1.1.10 | Tropinesterase. |
| 3.1.1.11 | Pectinesterase. |
| 3.1.1.13 | Sterol esterase. |
| 3.1.1.14 | Chlorophyllase. |
| 3.1.1.15 | L-arabinonolactonase. |
| 3.1.1.17 | Gluconolactonase. |
| 3.1.1.19 | Uronolactonase. |
| 3.1.1.20 | Tannase. |
| 3.1.1.21 | Retinyl-palmitate esterase. |
| 3.1.1.22 | Hydroxybutyrate-dimer hydrolase. |
| 3.1.1.23 | Acylglycerol lipase. |
| 3.1.1.24 | 3-oxoadipate enol-lactonase. |
| 3.1.1.25 | 1,4-lactonase. |
| 3.1.1.26 | Galactolipase. |
| 3.1.1.27 | 4-pyridoxolactonase. |
| 3.1.1.28 | Acylcarnitine hydrolase. |
| 3.1.1.29 | Aminoacyl-tRNA hydrolase. |
| 3.1.1.30 | D-arabinonolactonase. |
| 3.1.1.31 | 6-phosphogluconolactonase. |
| 3.1.1.32 | Phospholipase A(1). |
| 3.1.1.33 | 6-acetylglucose deacetylase. |
| 3.1.1.34 | Lipoprotein lipase. |
| 3.1.1.35 | Dihydrocoumarin hydrolase. |
| 3.1.1.36 | Limonin-D-ring-lactonase. |
| 3.1.1.37 | Steroid-lactonase. |
| 3.1.1.38 | Triacetate-lactonase. |
| 3.1.1.39 | Actinomycin lactonase. |
| 3.1.1.40 | Orsellinate-depside hydrolase. |
| 3.1.1.41 | Cephalosporin-C deacetylase. |
| 3.1.1.42 | Chlorogenate hydrolase. |
| 3.1.1.43 | Alpha-amino-acid esterase. |
| 3.1.1.44 | 4-methyloxaloacetate esterase. |
| 3.1.1.45 | Carboxymethylenebutenolidase. |
| 3.1.1.46 | Deoxylimonate A-ring-lactonase. |
| 3.1.1.47 | 1-alkyl-2-acetylglycerophosphocholine |
| | esterase. |
| 3.1.1.48 | Fusarinine-C ornithinesterase. |
| 3.1.1.49 | Sinapine esterase. |
| 3.1.1.50 | Wax-ester hydrolase. |
| 3.1.1.51 | Phorbol-diester hydrolase. |
| 3.1.1.52 | Phosphatidylinositol deacylase. |
| 3.1.1.53 | Sialate O-acetylesterase. |
| 3.1.1.54 | Acetoxybutynylbithiophene deacetylase. |
| 3.1.1.55 | Acetylsalicylate deacetylase. |
| 3.1.1.56 | Methylumbelliferyl-acetate deacetylase. |
| 3.1.1.57 | 2-pyrone-4,6-dicarboxylate lactonase. |
| 3.1.1.58 | N-acetylgalactosaminoglycan |
| | deacetylase. |
| 3.1.1.59 | Juvenile-hormone esterase. |
| 3.1.1.60 | Bis(2-ethylhexyl)phthalate esterase. |
| 3.1.1.61 | Protein-glutamate methylesterase. |
| 3.1.1.63 | 11-cis-retinyl-palmitate hydrolase. |
| 3.1.1.64 | All-trans-retinyl-palmitate hydrolase. |
| 3.1.1.65 | L-rhamnono-1,4-lactonase. |
| 3.1.1.66 | 5-(3,4-diacetoxybut-1-ynyl)-2,2′- |
| | bithiophene deacetylase. |
| 3.1.1.67 | Fatty-acyl-ethyl-ester synthase. |
| 3.1.1.68 | Xylono-1,4-lactonase. |
| 3.1.1.70 | Cetraxate benzylesterase. |
| 3.1.1.71 | Acetylalkylglycerol acetylhydrolase. |
| 3.1.1.72 | Acetylxylan esterase. |
| 3.1.1.73 | Feruloyl esterase. |
| 3.1.1.74 | Cutinase. |
| 3.1.1.75 | Poly(3-hydroxybutyrate) depolymerase. |
| 3.1.1.76 | Poly(3-hydroxyoctanoate) |
| | depolymerase. |
| 3.1.1.77 | Acyloxyacyl hydrolase. |
| 3.1.1.78 | Polyneuridine-aldehyde esterase. |
| 3.1.1.79 | Hormone-sensitive lipase. |
| 3.1.2.1 | Acetyl-CoA hydrolase. |
| 3.1.2.2 | Palmitoyl-CoA hydrolase. |
| 3.1.2.3 | Succinyl-CoA hydrolase. |
| 3.1.2.4 | 3-hydroxyisobutyryl-CoA hydrolase. |
| 3.1.2.5 | Hydroxymethylglutaryl-CoA hydrolase. |
| 3.1.2.6 | Hydroxyacylglutathione hydrolase. |
| 3.1.2.7 | Glutathione thiolesterase. |
| 3.1.2.10 | Formyl-CoA hydrolase. |
| 3.1.2.11 | Acetoacetyl-CoA hydrolase. |
| 3.1.2.12 | S-formylglutathione hydrolase. |
| 3.1.2.13 | S-succinylglutathione hydrolase. |
| 3.1.2.14 | Oleoyl-[acyl-carrier-protein] hydrolase. |
| 3.1.2.15 | Ubiquitin thiolesterase. |
| 3.1.2.16 | [Citrate-(pro-3S)-lyase] thiolesterase. |
| 3.1.2.17 | (S)-methylmalonyl-CoA hydrolase. |
| 3.1.2.18 | ADP-dependent short-chain-acyl-CoA |
| | hydrolase. |
| 3.1.2.19 | ADP-dependent medium-chain-acyl-CoA |
| | hydrolase. |
| 3.1.2.20 | Acyl-CoA hydrolase. |
| 3.1.2.21 | Dodecanoyl-[acyl-carrier protein] |
| | hydrolase. |
| 3.1.2.22 | Palmitoyl-protein hydrolase. |
| 3.1.2.23 | 4-hydroxybenzoyl-CoA thioesterase. |
| 3.1.2.24 | 2-(2-hydroxyphenyl)benzenesulfinate |
| | hydrolase. |
| 3.1.2.25 | Phenylacetyl-CoA hydrolase. |
| 3.1.3.1 | Alkaline phosphatase. |
| 3.1.3.2 | Acid phosphatase. |
| 3.1.3.3 | Phosphoserine phosphatase. |
| 3.1.3.4 | Phosphatidate phosphatase. |
| 3.1.3.5 | 5′-nucleotidase. |
| 3.1.3.6 | 3′-nucleotidase. |
| 3.1.3.7 | 3′(2′),5′-bisphosphate nucleotidase. |
| 3.1.3.8 | 3-phytase. |
| 3.1.3.9 | Glucose-6-phosphatase. |
| 3.1.3.10 | Glucose-1-phosphatase. |
| 3.1.3.11 | Fructose-bisphosphatase. |
| 3.1.3.12 | Trehalose-phosphatase. |
| 3.1.3.13 | Bisphosphoglycerate phosphatase. |
| 3.1.3.14 | Methylphosphothioglycerate phosphatase. |
| 3.1.3.15 | Histidinol-phosphatase. |
| 3.1.3.16 | Phosphoprotein phosphatase. |
| 3.1.3.17 | [Phosphorylase] phosphatase. |
| 3.1.3.18 | Phosphoglycolate phosphatase. |
| 3.1.3.19 | Glycerol-2-phosphatase. |
| 3.1.3.20 | Phosphoglycerate phosphatase. |
| 3.1.3.21 | Glycerol-1-phosphatase. |
| 3.1.3.22 | Mannitol-1-phosphatase. |
| 3.1.3.23 | Sugar-phosphatase. |
| 3.1.3.24 | Sucrose-phosphatase. |
| 3.1.3.25 | Inositol-1(or 4)-monophosphatase. |
| 3.1.3.26 | 4-phytase. |
| 3.1.3.27 | Phosphatidylglycerophosphatase. |
| 3.1.3.28 | ADP-phosphoglycerate phosphatase. |
| 3.1.3.29 | N-acylneuraminate-9-phosphatase. |
| 3.1.3.31 | Nucleotidase. |
| 3.1.3.32 | Polynucleotide 3′-phosphatase. |
| 3.1.3.33 | Polynucleotide 5′-phosphatase. |
| 3.1.3.34 | Deoxynucleotide 3′-phosphatase. |
| 3.1.3.35 | Thymidylate 5′-phosphatase. |
| 3.1.3.36 | Phosphoinositide 5-phosphatase. |
| 3.1.3.37 | Sedoheptulose-bisphosphatase. |
| 3.1.3.38 | 3-phosphoglycerate phosphatase. |
| 3.1.3.39 | Streptomycin-6-phosphatase. |
| 3.1.3.40 | Guanidinodeoxy-scyllo-inositol-4- |
| | phosphatase. |
| 3.1.3.41 | 4-nitrophenylphosphatase. |
| 3.1.3.42 | [Glycogen-synthase-D] phosphatase. |
| 3.1.3.43 | [Pyruvate dehydrogenase (lipoamide)]- |
| | phosphatase. |
| 3.1.3.44 | [Acetyl-CoA carboxylase]- |
| | phosphatase. |
| 3.1.3.45 | 3-deoxy-manno-octulosonate-8- |
| | phosphatase. |
| 3.1.3.46 | Fructose-2,6-bisphosphate 2- |
| | phosphatase. |
| 3.1.3.47 | [Hydroxymethylglutaryl-CoA |
| | reductase (NADPH)]-phosphatase. |
| 3.1.3.48 | Protein-tyrosine-phosphatase. |
| 3.1.3.49 | [Pyruvate kinase]-phosphatase. |
| 3.1.3.50 | Sorbitol-6-phosphatase. |
| 3.1.3.51 | Dolichyl-phosphatase. |
| 3.1.3.52 | [3-methyl-2-oxobutanoate |
| | dehydrogenase (lipoamide)]-phosphatase. |
| 3.1.3.53 | [Myosin light-chain]-phosphatase. |
| 3.1.3.54 | Fructose-2,6-bisphosphate 6- |
| | phosphatase. |
| 3.1.3.55 | Caldesmon-phosphatase. |
| 3.1.3.56 | Inositol-polyphosphate 5-phosphatase. |
| 3.1.3.57 | Inositol-1,4-bisphosphate 1- |
| | phosphatase. |
| 3.1.3.58 | Sugar-terminal-phosphatase. |
| 3.1.3.59 | Alkylacetylglycerophosphatase. |
| 3.1.3.60 | Phosphoenolpyruvate phosphatase. |
| 3.1.3.62 | Multiple inositol-polyphosphate |
| | phosphatase. |
| 3.1.3.63 | 2-carboxy-D-arabinitol-1-phosphatase. |
| 3.1.3.64 | Phosphatidylinositol-3-phosphatase. |
| 3.1.3.66 | Phosphatidylinositol-3,4-bisphosphate |
| | 4-phosphatase. |
| 3.1.3.67 | Phosphatidylinositol-3,4,5- |
| | trisphosphate 3-phosphatase. |
| 3.1.3.68 | 2-deoxyglucose-6-phosphatase. |
| 3.1.3.69 | Glucosylglycerol 3-phosphatase. |
| 3.1.3.70 | Mannosyl-3-phosphoglycerate |
| | phosphatase. |
| 3.1.3.71 | 2-phosphosulfolactate phosphatase. |
| 3.1.3.72 | 5-phytase. |
| 3.1.3.73 | Alpha-ribazole phosphatase. |
| 3.1.4.1 | Phosphodiesterase I. |
| 3.1.4.2 | Glycerophosphocholine phosphodiesterase. |
| 3.1.4.3 | Phospholipase C. |
| 3.1.4.4 | Phospholipase D. |
| 3.1.4.11 | Phosphoinositide phospholipase C. |
| 3.1.4.12 | Sphingomyelin phosphodiesterase. |
| 3.1.4.13 | Serine-ethanolaminephosphate |
| | phosphodiesterase. |
| 3.1.4.14 | [Acyl-carrier-protein] phosphodiesterase. |
| 3.1.4.15 | Adenylyl-[glutamate--ammonia ligase] |
| | hydrolase. |
| 3.1.4.16 | 2′,3′-cyclic-nucleotide 2′- |
| | phosphodiesterase. |
| 3.1.4.17 | 3′,5′-cyclic-nucleotide phosphodiesterase. |
| 3.1.4.35 | 3′,5′-cyclic-GMP phosphodiesterase. |
| 3.1.4.37 | 2′,3′-cyclic-nucleotide 3′- |
| | phosphodiesterase. |
| 3.1.4.38 | Glycerophosphocholine |
| | cholinephosphodiesterase. |
| 3.1.4.39 | Alkylglycerophosphoethanolamine |
| | phosphodiesterase. |
| 3.1.4.40 | CMP-N-acylneuraminate |
| | phosphodiesterase. |
| 3.1.4.41 | Sphingomyelin phosphodiesterase D. |
| 3.1.4.42 | Glycerol-1,2-cyclic-phosphate 2- |
| | phosphodiesterase. |
| 3.1.4.43 | Glycerophosphoinositol |
| | inositolphosphodiesterase. |
| 3.1.4.44 | Glycerophosphoinositol |
| | glycerophosphodiesterase. |
| 3.1.4.45 | N-acetylglucosamine-1-phosphodiester |
| | alpha-N-acetylglucosaminidase. |
| 3.1.4.46 | Glycerophosphodiester phosphodiesterase. |
| 3.1.4.48 | Dolichylphosphate-glucose |
| | phosphodiesterase. |
| 3.1.4.49 | Dolichylphosphate-mannose |
| | phosphodiesterase. |
| 3.1.4.50 | Glycosylphosphatidylinositol |
| | phospholipase D. |
| 3.1.4.51 | Glucose-1-phospho-D- |
| | mannosylglycoprotein phosphodiesterase. |
| 3.1.5.1 | dGTPase. |
| 3.1.6.1 | Arylsulfatase. |
| 3.1.6.2 | Steryl-sulfatase. |
| 3.1.6.3 | Glycosulfatase. |
| 3.1.6.4 | N-acetylgalactosamine-6-sulfatase. |
| 3.1.6.6 | Choline-sulfatase. |
| 3.1.6.7 | Cellulose-polysulfatase. |
| 3.1.6.8 | Cerebroside-sulfatase. |
| 3.1.6.9 | Chondro-4-sulfatase. |
| 3.1.6.10 | Chondro-6-sulfatase. |
| 3.1.6.11 | Disulfoglucosamine-6-sulfatase. |
| 3.1.6.12 | N-acetylgalactosamine-4-sulfatase. |
| 3.1.6.13 | Iduronate-2-sulfatase. |
| 3.1.6.14 | N-acetylglucosamine-6-sulfatase. |
| 3.1.6.15 | N-sulfoglucosamine-3-sulfatase. |
| 3.1.6.16 | Monomethyl-sulfatase. |
| 3.1.6.17 | D-lactate-2-sulfatase. |
| 3.1.6.18 | Glucuronate-2-sulfatase. |
| 3.1.7.1 | Prenyl-diphosphatase. |
| 3.1.7.2 | Guanosine-3′,5′-bis(diphosphate) 3′- |
| | diphosphatase. |
| 3.1.7.3 | Monoterpenyl-diphosphatase. |
| 3.1.8.1 | Aryldialkylphosphatase. |
| 3.1.8.2 | Diisopropyl-fluorophosphatase. |
| 3.1.11.1 | Exodeoxyribonuclease I. |
| 3.1.11.2 | Exodeoxyribonuclease III. |
| 3.1.11.3 | Exodeoxyribonuclease (lambda- |
| | induced). |
| 3.1.11.4 | Exodeoxyribonuclease (phage Sp3- |
| | induced). |
| 3.1.11.5 | Exodeoxyribonuclease V. |
| 3.1.11.6 | Exodeoxyribonuclease VII. |
| 3.1.13.1 | Exoribonuclease II. |
| 3.1.13.2 | Exoribonuclease H. |
| 3.1.13.3 | Oligonucleotidase. |
| 3.1.13.4 | Poly(A)-specific ribonuclease. |
| 3.1.14.1 | Yeast ribonuclease. |
| 3.1.15.1 | Venom exonuclease. |
| 3.1.16.1 | Spleen exonuclease. |
| 3.1.21.1 | Deoxyribonuclease I. |
| 3.1.21.2 | Deoxyribonuclease IV (phage-T(4)- |
| | induced). |
| 3.1.21.3 | Type I site-specific deoxyribonuclease. |
| 3.1.21.4 | Type II site-specific deoxyribonuclease. |
| 3.1.21.5 | Type III site-specific deoxyribonuclease. |
| 3.1.21.6 | CC-preferring endodeoxyribonuclease. |
| 3.1.21.7 | Deoxyribonuclease V. |
| 3.1.22.1 | Deoxyribonuclease II. |
| 3.1.22.2 | Aspergillus deoxyribonuclease K(1). |
| 3.1.22.4 | Crossover junction endoribonuclease. |
| 3.1.22.5 | Deoxyribonuclease X. |
| 3.1.25.1 | Deoxyribonuclease (pyrimidine dimer). |
| 3.1.26.1 | Physarum polycephalum ribonuclease. |
| 3.1.26.2 | Ribonuclease alpha. |
| 3.1.26.3 | Ribonuclease III. |
| 3.1.26.4 | Ribonuclease H. |
| 3.1.26.5 | Ribonuclease P. |
| 3.1.26.6 | Ribonuclease IV. |
| 3.1.26.7 | Ribonuclease P4. |
| 3.1.26.8 | Ribonuclease M5. |
| 3.1.26.9 | Ribonuclease (poly-(U)-specific). |
| 3.1.26.10 | Ribonuclease IX. |
| 3.1.26.11 | Ribonuclease Z. |
| 3.1.27.1 | Ribonuclease T(2). |
| 3.1.27.2 | Bacillus subtilis ribonuclease. |
| 3.1.27.3 | Ribonuclease T(1). |
| 3.1.27.4 | Ribonuclease U(2). |
| 3.1.27.5 | Pancreatic ribonuclease. |
| 3.1.27.6 | Enterobacter ribonuclease. |
| 3.1.27.7 | Ribonuclease F. |
| 3.1.27.8 | Ribonuclease V. |
| 3.1.27.9 | tRNA-intron endonuclease. |
| 3.1.27.10 | rRNA endonuclease. |
| 3.1.30.1 | Aspergillus nuclease S(1). |
| 3.1.30.2 | Serratia marcescens nuclease. |
| 3.1.31.1 | Micrococcal nuclease. |
| 3.2.1.1 | Alpha-amylase. |
| 3.2.1.2 | Beta-amylase. |
| 3.2.1.3 | Glucan 1,4-alpha-glucosidase. |
| 3.2.1.4 | Cellulase. |
| 3.2.1.6 | Endo-1,3(4)-beta-glucanase. |
| 3.2.1.7 | Inulinase. |
| 3.2.1.8 | Endo-1,4-beta-xylanase. |
| 3.2.1.10 | Oligo-1,6-glucosidase. |
| 3.2.1.11 | Dextranase. |
| 3.2.1.14 | Chitinase. |
| 3.2.1.15 | Polygalacturonase. |
| 3.2.1.17 | Lysozyme. |
| 3.2.1.18 | Exo-alpha-sialidase. |
| 3.2.1.20 | Alpha-glucosidase. |
| 3.2.1.21 | Beta-glucosidase. |
| 3.2.1.22 | Alpha-galactosidase. |
| 3.2.1.23 | Beta-galactosidase. |
| 3.2.1.24 | Alpha-mannosidase. |
| 3.2.1.25 | Beta-mannosidase. |
| 3.2.1.26 | Beta-fructofuranosidase. |
| 3.2.1.28 | Alpha,alpha-trehalase. |
| 3.2.1.31 | Beta-glucuronidase. |
| 3.2.1.32 | Xylan endo-1,3-beta-xylosidase. |
| 3.2.1.33 | Amylo-alpha-1,6-glucosidase. |
| 3.2.1.35 | Hyaluronoglucosaminidase. |
| 3.2.1.36 | Hyaluronoglucuronidase. |
| 3.2.1.37 | Xylan 1,4-beta-xylosidase. |
| 3.2.1.38 | Beta-D-fucosidase. |
| 3.2.1.39 | Glucan endo-1,3-beta-D-glucosidase. |
| 3.2.1.40 | Alpha-L-rhamnosidase. |
| 3.2.1.41 | Pullulanase. |
| 3.2.1.42 | GDP-glucosidase. |
| 3.2.1.43 | Beta-L-rhamnosidase. |
| 3.2.1.44 | Fucoidanase. |
| 3.2.1.45 | Glucosylceramidase. |
| 3.2.1.46 | Galactosylceramidase. |
| 3.2.1.47 | Galactosylgalactosylglucosylceramidase. |
| 3.2.1.48 | Sucrose alpha-glucosidase. |
| 3.2.1.49 | Alpha-N-acetylgalactosaminidase. |
| 3.2.1.50 | Alpha-N-acetylglucosaminidase. |
| 3.2.1.51 | Alpha-L-fucosidase. |
| 3.2.1.52 | Beta-N-acetylhexosaminidase. |
| 3.2.1.53 | Beta-N-acetylgalactosaminidase. |
| 3.2.1.54 | Cyclomaltodextrinase. |
| 3.2.1.55 | Alpha-N-arabinofuranosidase. |
| 3.2.1.56 | Glucuronosyl-disulfoglucosamine |
| | glucuronidase. |
| 3.2.1.57 | Isopullulanase. |
| 3.2.1.58 | Glucan 1,3-beta-glucosidase. |
| 3.2.1.59 | Glucan endo-1,3-alpha-glucosidase. |
| 3.2.1.60 | Glucan 1,4-alpha- |
| | maltotetraohydrolase. |
| 3.2.1.61 | Mycodextranase. |
| 3.2.1.62 | Glycosylceramidase. |
| 3.2.1.63 | 1,2-alpha-L-fucosidase. |
| 3.2.1.64 | 2,6-beta-fructan 6-levanbiohydrolase. |
| 3.2.1.65 | Levanase. |
| 3.2.1.66 | Quercitrinase. |
| 3.2.1.67 | Galacturan 1,4-alpha-galacturonidase. |
| 3.2.1.68 | Isoamylase. |
| 3.2.1.70 | Glucan 1,6-alpha-glucosidase. |
| 3.2.1.71 | Glucan endo-1,2-beta-glucosidase. |
| 3.2.1.72 | Xylan 1,3-beta-xylosidase. |
| 3.2.1.73 | Licheninase. |
| 3.2.1.74 | Glucan 1,4-beta-glucosidase. |
| 3.2.1.75 | Glucan endo-1,6-beta-glucosidase. |
| 3.2.1.76 | L-iduronidase. |
| 3.2.1.77 | Mannan 1,2-(1,3)-alpha-mannosidase. |
| 3.2.1.78 | Mannan endo-1,4-beta-mannosidase. |
| 3.2.1.80 | Fructan beta-fructosidase. |
| 3.2.1.81 | Agarase. |
| 3.2.1.82 | Exo-poly-alpha-galacturonosidase. |
| 3.2.1.83 | Kappa-carrageenase. |
| 3.2.1.84 | Glucan 1,3-alpha-glucosidase. |
| 3.2.1.85 | 6-phospho-beta-galactosidase. |
| 3.2.1.86 | 6-phospho-beta-glucosidase. |
| 3.2.1.87 | Capsular-polysaccharide endo-1,3-alpha- |
| | galactosidase. |
| 3.2.1.88 | Beta-L-arabinosidase. |
| 3.2.1.89 | Arabinogalactan endo-1,4-beta- |
| | galactosidase. |
| 3.2.1.91 | Cellulose 1,4-beta-cellobiosidase. |
| 3.2.1.92 | Peptidoglycan beta-N-acetylmuramidase. |
| 3.2.1.93 | Alpha,alpha-phosphotrehalase. |
| 3.2.1.94 | Glucan 1,6-alpha-isomaltosidase. |
| 3.2.1.95 | Dextran 1,6-alpha-isomaltotriosidase. |
| 3.2.1.96 | Mannosyl-glycoprotein endo-beta-N- |
| | acetylglucosaminidase. |
| 3.2.1.97 | Glycopeptide alpha-N- |
| | acetylgalactosaminidase. |
| 3.2.1.98 | Glucan 1,4-alpha-maltohexaosidase. |
| 3.2.1.99 | Arabinan endo-1,5-alpha-L-arabinosidase. |
| 3.2.1.100 | Mannan 1,4-mannobiosidase. |
| 3.2.1.101 | Mannan endo-1,6-alpha-mannosidase. |
| 3.2.1.102 | Blood-group-substance endo-1,4-beta- |
| | galactosidase. |
| 3.2.1.103 | Keratan-sulfate endo-1,4-beta- |
| | galactosidase. |
| 3.2.1.104 | Steryl-beta-glucosidase. |
| 3.2.1.105 | Strictosidine beta-glucosidase. |
| 3.2.1.106 | Mannosyl-oligosaccharide glucosidase. |
| 3.2.1.107 | Protein-glucosylgalactosylhydroxylysine |
| | glucosidase. |
| 3.2.1.108 | Lactase. |
| 3.2.1.109 | Endogalactosaminidase. |
| 3.2.1.110 | Mucinaminylserine mucinaminidase. |
| 3.2.1.111 | 1,3-alpha-L-fucosidase. |
| 3.2.1.112 | 2-deoxyglucosidase. |
| 3.2.1.113 | Mannosyl-oligosaccharide 1,2-alpha- |
| | mannosidase. |
| 3.2.1.114 | Mannosyl-oligosaccharide 1,3-1,6-alpha- |
| | mannosidase. |
| 3.2.1.115 | Branched-dextran exo-1,2-alpha- |
| | glucosidase. |
| 3.2.1.116 | Glucan 1,4-alpha-maltotriohydrolase. |
| 3.2.1.117 | Amygdalin beta-glucosidase. |
| 3.2.1.118 | Prunasin beta-glucosidase. |
| 3.2.1.119 | Vicianin beta-glucosidase. |
| 3.2.1.120 | Oligoxyloglucan beta-glycosidase. |
| 3.2.1.121 | Polymannuronate hydrolase. |
| 3.2.1.122 | Maltose-6′-phosphate glucosidase. |
| 3.2.1.123 | Endoglycosylceramidase. |
| 3.2.1.124 | 3-deoxy-2-octulosonidase. |
| 3.2.1.125 | Raucaffricine beta-glucosidase. |
| 3.2.1.126 | Coniferin beta-glucosidase. |
| 3.2.1.127 | 1,6-alpha-L-fucosidase. |
| 3.2.1.128 | Glycyrrhizinate beta-glucuronidase. |
| 3.2.1.129 | Endo-alpha-sialidase. |
| 3.2.1.130 | Glycoprotein endo-alpha-1,2- |
| | mannosidase. |
| 3.2.1.131 | Xylan alpha-1,2-glucuronosidase. |
| 3.2.1.132 | Chitosanase. |
| 3.2.1.133 | Glucan 1,4-alpha-maltohydrolase. |
| 3.2.1.134 | Difructose-anhydride synthase. |
| 3.2.1.135 | Neopullulanase. |
| 3.2.1.136 | Glucuronoarabinoxylan endo-1,4- |
| | beta-xylanase. |
| 3.2.1.137 | Mannan exo-1,2-1,6-alpha- |
| | mannosidase. |
| 3.2.1.139 | Alpha-glucuronidase. |
| 3.2.1.140 | Lacto-N-biosidase. |
| 3.2.1.141 | 4-alpha-D-{(1->4)-alpha-D- |
| | glucano}trehalose trehalohydrolase. |
| 3.2.1.142 | Limit dextrinase. |
| 3.2.1.143 | Poly(ADP-ribose) glycohydrolase. |
| 3.2.1.144 | 3-deoxyoctulosonase. |
| 3.2.1.145 | Galactan 1,3-beta-galactosidase. |
| 3.2.1.146 | Beta-galactofuranosidase. |
| 3.2.1.147 | Thioglucosidase. |
| 3.2.1.148 | Ribosylhomocysteinase. |
| 3.2.1.149 | Beta-primeverosidase. |
| 3.2.1.150 | Oligoxyloglucan reducing-end- |
| | specific cellobiohydrolase. |
| 3.2.1.151 | Xyloglucan-specific endo-beta-1,4- |
| | glucanase. |
| 3.2.2.1 | Purine nucleosidase. |
| 3.2.2.2 | Inosine nucleosidase. |
| 3.2.2.3 | Uridine nucleosidase. |
| 3.2.2.4 | AMP nucleosidase. |
| 3.2.2.5 | NAD(+) nucleosidase. |
| 3.2.2.6 | NAD(P)(+) nucleosidase. |
| 3.2.2.7 | Adenosine nucleosidase. |
| 3.2.2.8 | Ribosylpyrimidine nucleosidase. |
| 3.2.2.9 | Adenosylhomocysteine nucleosidase. |
| 3.2.2.10 | Pyrimidine-5′-nucleotide |
| | nucleosidase. |
| 3.2.2.11 | Beta-aspartyl-N-acetylglucosaminidase. |
| 3.2.2.12 | Inosinate nucleosidase. |
| 3.2.2.13 | 1-methyladenosine nucleosidase. |
| 3.2.2.14 | NMN nucleosidase. |
| 3.2.2.15 | DNA-deoxyinosine glycosylase. |
| 3.2.2.16 | Methylthioadenosine nucleosidase. |
| 3.2.2.17 | Deoxyribodipyrimidine endonucleosidase. |
| 3.2.2.19 | [Protein ADP-ribosylarginine] hydrolase. |
| 3.2.2.20 | DNA-3-methyladenine glycosylase I. |
| 3.2.2.21 | DNA-3-methyladenine glycosylase II. |
| 3.2.2.22 | rRNA N-glycosylase. |
| 3.2.2.23 | DNA-formamidopyrimidine glycosylase. |
| 3.2.2.24 | ADP-ribosyl-[dinitrogen reductase] |
| | hydrolase. |
| 3.3.1.1 | Adenosylhomocysteinase. |
| 3.3.1.2 | Adenosylmethionine hydrolase. |
| 3.3.2.1 | Isochorismatase. |
| 3.3.2.2 | Alkenylglycerophosphocholine hydrolase. |
| 3.3.2.3 | Epoxide hydrolase. |
| 3.3.2.4 | Trans-epoxysuccinate hydrolase. |
| 3.3.2.5 | Alkenylglycerophosphoethanolamine |
| | hydrolase. |
| 3.3.2.6 | Leukotriene-A(4) hydrolase. |
| 3.3.2.7 | Hepoxilin-epoxide hydrolase. |
| 3.3.2.8 | Limonene-1,2-epoxide hydrolase. |
| 3.4.11.1 | Leucyl aminopeptidase. |
| 3.4.11.2 | Membrane alanyl aminopeptidase. |
| 3.4.11.3 | Cystinyl aminopeptidase. |
| 3.4.11.4 | Tripeptide aminopeptidase. |
| 3.4.11.5 | Prolyl aminopeptidase. |
| 3.4.11.6 | Aminopeptidase B. |
| 3.4.11.7 | Glutamyl aminopeptidase. |
| 3.4.11.9 | Xaa-Pro aminopeptidase. |
| 3.4.11.10 | Bacterial leucyl aminopeptidase. |
| 3.4.11.13 | Clostridial aminopeptidase. |
| 3.4.11.14 | Cytosol alanyl aminopeptidase. |
| 3.4.11.15 | Aminopeptidase Y. |
| 3.4.11.16 | Xaa-Trp aminopeptidase. |
| 3.4.11.17 | Tryptophanyl aminopeptidase. |
| 3.4.11.18 | Methionyl aminopeptidase. |
| 3.4.11.19 | D-stereospecific aminopeptidase. |
| 3.4.11.20 | Aminopeptidase Ey. |
| 3.4.11.21 | Aspartyl aminopeptidase. |
| 3.4.11.22 | Aminopeptidase I. |
| 3.4.11.23 | PepB aminopeptidase. |
| 3.4.13.3 | Xaa-His dipeptidase. |
| 3.4.13.4 | Xaa-Arg dipeptidase. |
| 3.4.13.5 | Xaa-methyl-His dipeptidase. |
| 3.4.13.7 | Glu-Glu dipeptidase. |
| 3.4.13.9 | Xaa-Pro dipeptidase. |
| 3.4.13.12 | Met-Xaa dipeptidase. |
| 3.4.13.17 | Non-stereospecific dipeptidase. |
| 3.4.13.18 | Cytosol nonspecific dipeptidase. |
| 3.4.13.19 | Membrane dipeptidase. |
| 3.4.13.20 | Beta-Ala-His dipeptidase. |
| 3.4.13.21 | Dipeptidase E. |
| 3.4.14.1 | Dipeptidyl-peptidase I. |
| 3.4.14.2 | Dipeptidyl-peptidase II. |
| 3.4.14.4 | Dipeptidyl-peptidase III. |
| 3.4.14.5 | Dipeptidyl-peptidase IV. |
| 3.4.14.6 | Dipeptidyl-dipeptidase. |
| 3.4.14.9 | Tripeptidyl-peptidase I. |
| 3.4.14.10 | Tripeptidyl-peptidase II. |
| 3.4.14.11 | Xaa-Pro dipeptidyl-peptidase. |
| 3.4.15.1 | Peptidyl-dipeptidase A. |
| 3.4.15.4 | Peptidyl-dipeptidase B. |
| 3.4.15.5 | Peptidyl-dipeptidase Dcp. |
| 3.4.16.2 | Lysosomal Pro-X carboxypeptidase. |
| 3.4.16.4 | Serine-type D-Ala-D-Ala |
| | carboxypeptidase. |
| 3.4.16.5 | Carboxypeptidase C. |
| 3.4.16.6 | Carboxypeptidase D. |
| 3.4.17.1 | Carboxypeptidase A. |
| 3.4.17.2 | Carboxypeptidase B. |
| 3.4.17.3 | Lysine carboxypeptidase. |
| 3.4.17.4 | Gly-X carboxypeptidase. |
| 3.4.17.6 | Alanine carboxypeptidase. |
| 3.4.17.8 | Muramoylpentapeptide |
| | carboxypeptidase. |
| 3.4.17.10 | Carboxypeptidase E. |
| 3.4.17.11 | Glutamate carboxypeptidase. |
| 3.4.17.12 | Carboxypeptidase M. |
| 3.4.17.13 | Muramoyltetrapeptide |
| | carboxypeptidase. |
| 3.4.17.14 | Zinc D-Ala-D-Ala carboxypeptidase. |
| 3.4.17.15 | Carboxypeptidase A2. |
| 3.4.17.16 | Membrane Pro-X carboxypeptidase. |
| 3.4.17.17 | Tubulinyl-Tyr carboxypeptidase. |
| 3.4.17.18 | Carboxypeptidase T. |
| 3.4.17.19 | Carboxypeptidase Taq. |
| 3.4.17.20 | Carboxypeptidase U. |
| 3.4.17.21 | Glutamate carboxypeptidase II. |
| 3.4.17.22 | Metallocarboxypeptidase D. |
| 3.4.18.1 | Cathepsin X. |
| 3.4.19.1 | Acylaminoacyl-peptidase. |
| 3.4.19.2 | Peptidyl-glycinamidase. |
| 3.4.19.3 | Pyroglutamyl-peptidase I. |
| 3.4.19.5 | Beta-aspartyl-peptidase. |
| 3.4.19.6 | Pyroglutamyl-peptidase II. |
| 3.4.19.7 | N-formylmethionyl-peptidase. |
| 3.4.19.9 | Gamma-glutamyl hydrolase. |
| 3.4.19.11 | Gamma-D-glutamyl-meso- |
| | diaminopimelate peptidase. |
| 3.4.19.12 | Ubiquitinyl hydrolase 1. |
| 3.4.21.1 | Chymotrypsin. |
| 3.4.21.2 | Chymotrypsin C. |
| 3.4.21.3 | Metridin. |
| 3.4.21.4 | Trypsin. |
| 3.4.21.5 | Thrombin. |
| 3.4.21.6 | Coagulation factor Xa. |
| 3.4.21.7 | Plasmin. |
| 3.4.21.9 | Enteropeptidase. |
| 3.4.21.10 | Acrosin. |
| 3.4.21.12 | Alpha-lytic endopeptidase. |
| 3.4.21.19 | Glutamyl endopeptidase. |
| 3.4.21.20 | Cathepsin G. |
| 3.4.21.21 | Coagulation factor VIIa. |
| 3.4.21.22 | Coagulation factor IXa. |
| 3.4.21.25 | Cucumisin. |
| 3.4.21.26 | Prolyl oligopeptidase. |
| 3.4.21.27 | Coagulation factor XIa. |
| 3.4.21.32 | Brachyurin. |
| 3.4.21.34 | Plasma kallikrein. |
| 3.4.21.35 | Tissue kallikrein. |
| 3.4.21.36 | Pancreatic elastase. |
| 3.4.21.37 | Leukocyte elastase. |
| 3.4.21.38 | Coagulation factor XIIa. |
| 3.4.21.39 | Chymase. |
| 3.4.21.41 | Complement subcomponent C1r. |
| 3.4.21.42 | Complement subcomponent C1s. |
| 3.4.21.43 | Classical-complement-pathway C3/C5 |
| | convertase. |
| 3.4.21.45 | Complement factor I. |
| 3.4.21.46 | Complement factor D. |
| 3.4.21.47 | Alternative-complement-pathway C3/C5 |
| | convertase. |
| 3.4.21.48 | Cerevisin. |
| 3.4.21.49 | Hypodermin C. |
| 3.4.21.50 | Lysyl endopeptidase. |
| 3.4.21.53 | Endopeptidase La. |
| 3.4.21.54 | Gamma-renin. |
| 3.4.21.55 | Venombin AB. |
| 3.4.21.57 | Leucyl endopeptidase. |
| 3.4.21.59 | Tryptase. |
| 3.4.21.60 | Scutelarin. |
| 3.4.21.61 | Kexin. |
| 3.4.21.62 | Subtilisin. |
| 3.4.21.63 | Oryzin. |
| 3.4.21.64 | Endopeptidase K. |
| 3.4.21.65 | Thermomycolin. |
| 3.4.21.66 | Thermitase. |
| 3.4.21.67 | Endopeptidase So. |
| 3.4.21.68 | T-plasminogen activator. |
| 3.4.21.69 | Protein C (activated). |
| 3.4.21.70 | Pancreatic endopeptidase E. |
| 3.4.21.71 | Pancreatic elastase II. |
| 3.4.21.72 | IgA-specific serine endopeptidase. |
| 3.4.21.73 | U-plasminogen activator. |
| 3.4.21.74 | Venombin A. |
| 3.4.21.75 | Furin. |
| 3.4.21.76 | Myeloblastin. |
| 3.4.21.77 | Semenogelase. |
| 3.4.21.78 | Granzyme A. |
| 3.4.21.79 | Granzyme B. |
| 3.4.21.80 | Streptogrisin A. |
| 3.4.21.81 | Streptogrisin B. |
| 3.4.21.82 | Glutamyl endopeptidase II. |
| 3.4.21.83 | Oligopeptidase B. |
| 3.4.21.84 | Limulus clotting factor C. |
| 3.4.21.85 | Limulus clotting factor B. |
| 3.4.21.86 | Limulus clotting enzyme. |
| 3.4.21.87 | Omptin. |
| 3.4.21.88 | Repressor lexA. |
| 3.4.21.89 | Signal peptidase I. |
| 3.4.21.90 | Togavirin. |
| 3.4.21.91 | Flavivirin. |
| 3.4.21.92 | Endopeptidase Clp. |
| 3.4.21.93 | Proprotein convertase 1. |
| 3.4.21.94 | Proprotein convertase 2. |
| 3.4.21.95 | Snake venom factor V activator. |
| 3.4.21.96 | Lactocepin. |
| 3.4.21.97 | Assemblin. |
| 3.4.21.98 | Hepacivirin. |
| 3.4.21.99 | Spermosin. |
| 3.4.21.100 | Pseudomonalisin. |
| 3.4.21.101 | Xanthomonalisin. |
| 3.4.21.102 | C-terminal processing peptidase. |
| 3.4.21.103 | Physarolisin. |
| 3.4.22.1 | Cathepsin B. |
| 3.4.22.2 | Papain. |
| 3.4.22.3 | Ficain. |
| 3.4.22.6 | Chymopapain. |
| 3.4.22.7 | Asclepain. |
| 3.4.22.8 | Clostripain. |
| 3.4.22.10 | Streptopain. |
| 3.4.22.14 | Actinidain. |
| 3.4.22.15 | Cathepsin L. |
| 3.4.22.16 | Cathepsin H. |
| 3.4.22.24 | Cathepsin T. |
| 3.4.22.25 | Glycyl endopeptidase. |
| 3.4.22.26 | Cancer procoagulant. |
| 3.4.22.27 | Cathepsin S. |
| 3.4.22.28 | Picornain 3C. |
| 3.4.22.29 | Picornain 2A. |
| 3.4.22.30 | Caricain. |
| 3.4.22.31 | Ananain. |
| 3.4.22.32 | Stem bromelain. |
| 3.4.22.33 | Fruit bromelain. |
| 3.4.22.34 | Legumain. |
| 3.4.22.35 | Histolysain. |
| 3.4.22.36 | Caspase-1. |
| 3.4.22.37 | Gingipain R. |
| 3.4.22.38 | Cathepsin K. |
| 3.4.22.39 | Adenain. |
| 3.4.22.40 | Bleomycin hydrolase. |
| 3.4.22.41 | Cathepsin F. |
| 3.4.22.42 | Cathepsin O. |
| 3.4.22.43 | Cathepsin V. |
| 3.4.22.44 | Nuclear-inclusion-a endopeptidase. |
| 3.4.22.45 | Helper-component proteinase. |
| 3.4.22.46 | L-peptidase. |
| 3.4.22.47 | Gingipain K. |
| 3.4.22.48 | Staphopain. |
| 3.4.22.49 | Separase. |
| 3.4.22.50 | V-cath endopeptidase. |
| 3.4.22.51 | Cruzipain. |
| 3.4.22.52 | Calpain-1. |
| 3.4.22.53 | Calpain-2. |
| 3.4.23.1 | Pepsin A. |
| 3.4.23.2 | Pepsin B. |
| 3.4.23.3 | Gastricsin. |
| 3.4.23.4 | Chymosin. |
| 3.4.23.5 | Cathepsin D. |
| 3.4.23.12 | Nepenthesin. |
| 3.4.23.15 | Renin. |
| 3.4.23.16 | HIV-1 retropepsin. |
| 3.4.23.17 | Pro-opiomelanocortin converting enzyme. |
| 3.4.23.18 | Aspergillopepsin I. |
| 3.4.23.19 | Aspergillopepsin II. |
| 3.4.23.20 | Penicillopepsin. |
| 3.4.23.21 | Rhizopuspepsin. |
| 3.4.23.22 | Endothiapepsin. |
| 3.4.23.23 | Mucorpepsin. |
| 3.4.23.24 | Candidapepsin. |
| 3.4.23.25 | Saccharopepsin. |
| 3.4.23.26 | Rhodotorulapepsin. |
| 3.4.23.28 | Acrocylindropepsin. |
| 3.4.23.29 | Polyporopepsin. |
| 3.4.23.30 | Pycnoporopepsin. |
| 3.4.23.31 | Scytalidopepsin A. |
| 3.4.23.32 | Scytalidopepsin B. |
| 3.4.23.34 | Cathepsin E. |
| 3.4.23.35 | Barrierpepsin. |
| 3.4.23.36 | Signal peptidase II. |
| 3.4.23.38 | Plasmepsin I. |
| 3.4.23.39 | Plasmepsin II. |
| 3.4.23.40 | Phytepsin. |
| 3.4.23.41 | Yapsin 1. |
| 3.4.23.42 | Thermopsin. |
| 3.4.23.43 | Prepilin peptidase. |
| 3.4.23.44 | Nodavirus endopeptidase. |
| 3.4.23.45 | Memapsin 1. |
| 3.4.23.46 | Memapsin 2. |
| 3.4.23.47 | HIV-2 retropepsin. |
| 3.4.23.48 | Plasminogen activator Pla. |
| 3.4.24.1 | Atrolysin A. |
| 3.4.24.3 | Microbial collagenase. |
| 3.4.24.6 | Leucolysin. |
| 3.4.24.7 | Interstitial collagenase. |
| 3.4.24.11 | Neprilysin. |
| 3.4.24.12 | Envelysin. |
| 3.4.24.13 | IgA-specific metalloendopeptidase. |
| 3.4.24.14 | Procollagen N-endopeptidase. |
| 3.4.24.15 | Thimet oligopeptidase. |
| 3.4.24.16 | Neurolysin. |
| 3.4.24.17 | Stromelysin 1. |
| 3.4.24.18 | Meprin A. |
| 3.4.24.19 | Procollagen C-endopeptidase. |
| 3.4.24.20 | Peptidyl-Lys metalloendopeptidase. |
| 3.4.24.21 | Astacin. |
| 3.4.24.22 | Stromelysin 2. |
| 3.4.24.23 | Matrilysin. |
| 3.4.24.24 | Gelatinase A. |
| 3.4.24.25 | Vibriolysin. |
| 3.4.24.26 | Pseudolysin. |
| 3.4.24.27 | Thermolysin. |
| 3.4.24.28 | Bacillolysin. |
| 3.4.24.29 | Aureolysin. |
| 3.4.24.30 | Coccolysin. |
| 3.4.24.31 | Mycolysin. |
| 3.4.24.32 | Beta-lytic metalloendopeptidase. |
| 3.4.24.33 | Peptidyl-Asp metalloendopeptidase. |
| 3.4.24.34 | Neutrophil collagenase. |
| 3.4.24.35 | Gelatinase B. |
| 3.4.24.36 | Leishmanolysin. |
| 3.4.24.37 | Saccharolysin. |
| 3.4.24.38 | Gametolysin. |
| 3.4.24.39 | Deuterolysin. |
| 3.4.24.40 | Serralysin. |
| 3.4.24.41 | Atrolysin B. |
| 3.4.24.42 | Atrolysin C. |
| 3.4.24.43 | Atroxase. |
| 3.4.24.44 | Atrolysin E. |
| 3.4.24.45 | Atrolysin F. |
| 3.4.24.46 | Adamalysin. |
| 3.4.24.47 | Horrilysin. |
| 3.4.24.48 | Ruberlysin. |
| 3.4.24.49 | Bothropasin. |
| 3.4.24.50 | Bothrolysin. |
| 3.4.24.51 | Ophiolysin. |
| 3.4.24.52 | Trimerelysin I. |
| 3.4.24.53 | Trimerelysin II. |
| 3.4.24.54 | Mucrolysin. |
| 3.4.24.55 | Pitrilysin. |
| 3.4.24.56 | Insulysin. |
| 3.4.24.57 | O-sialoglycoprotein endopeptidase. |
| 3.4.24.58 | Russellysin. |
| 3.4.24.59 | Mitochondrial intermediate |
| | peptidase. |
| 3.4.24.60 | Dactylysin. |
| 3.4.24.61 | Nardilysin. |
| 3.4.24.62 | Magnolysin. |
| 3.4.24.63 | Meprin B. |
| 3.4.24.64 | Mitochondrial processing peptidase. |
| 3.4.24.65 | Macrophage elastase. |
| 3.4.24.66 | Choriolysin L. |
| 3.4.24.67 | Choriolysin H. |
| 3.4.24.68 | Tentoxilysin. |
| 3.4.24.69 | Bontoxilysin. |
| 3.4.24.70 | Oligopeptidase A. |
| 3.4.24.71 | Endothelin-converting enzyme 1. |
| 3.4.24.72 | Fibrolase. |
| 3.4.24.73 | Jararhagin. |
| 3.4.24.74 | Fragilysin. |
| 3.4.24.75 | Lysostaphin. |
| 3.4.24.76 | Flavastacin. |
| 3.4.24.77 | Snapalysin. |
| 3.4.24.78 | GPR endopeptidase. |
| 3.4.24.79 | Pappalysin-1. |
| 3.4.24.80 | Membrane-type matrix |
| | metalloproteinase-1. |
| 3.4.24.81 | ADAM10 endopeptidase. |
| 3.4.24.82 | ADAMTS-4 endopeptidase. |
| 3.4.24.83 | Anthrax lethal factor endopeptidase. |
| 3.4.24.84 | Ste24 endopeptidase. |
| 3.4.24.85 | S2P endopeptidase. |
| 3.4.24.86 | ADAM 17 endopeptidase. |
| 3.4.25.1 | Proteasome endopeptidase complex. |
| 3.5.1.1 | Asparaginase. |
| 3.5.1.2 | Glutaminase. |
| 3.5.1.3 | Omega-amidase. |
| 3.5.1.4 | Amidase. |
| 3.5.1.5 | Urease. |
| 3.5.1.6 | Beta-ureidopropionase. |
| 3.5.1.7 | Ureidosuccinase. |
| 3.5.1.8 | Formylaspartate deformylase. |
| 3.5.1.9 | Arylformamidase. |
| 3.5.1.10 | Formyltetrahydrofolate deformylase. |
| 3.5.1.11 | Penicillin amidase. |
| 3.5.1.12 | Biotinidase. |
| 3.5.1.13 | Aryl-acylamidase. |
| 3.5.1.14 | Aminoacylase. |
| 3.5.1.15 | Aspartoacylase. |
| 3.5.1.16 | Acetylornithine deacetylase. |
| 3.5.1.17 | Acyl-lysine deacylase. |
| 3.5.1.18 | Succinyl-diaminopimelate desuccinylase. |
| 3.5.1.19 | Nicotinamidase. |
| 3.5.1.20 | Citrullinase. |
| 3.5.1.21 | N-acetyl-beta-alanine deacetylase. |
| 3.5.1.22 | Pantothenase. |
| 3.5.1.23 | Ceramidase. |
| 3.5.1.24 | Choloylglycine hydrolase. |
| 3.5.1.25 | N-acetylglucosamine-6-phosphate |
| | deacetylase. |
| 3.5.1.26 | N(4)-(beta-N-acetylglucosaminyl)-L- |
| | asparaginase. |
| 3.5.1.27 | N-formylmethionylaminoacyl-tRNA |
| | deformylase. |
| 3.5.1.28 | N-acetylmuramoyl-L-alanine amidase. |
| 3.5.1.29 | 2-(acetamidomethylene)succinate |
| | hydrolase. |
| 3.5.1.30 | 5-aminopentanamidase. |
| 3.5.1.31 | Formylmethionine deformylase. |
| 3.5.1.32 | Hippurate hydrolase. |
| 3.5.1.33 | N-acetylglucosamine deacetylase. |
| 3.5.1.35 | D-glutaminase. |
| 3.5.1.36 | N-methyl-2-oxoglutaramate hydrolase. |
| 3.5.1.38 | Glutamin-(asparagin-)ase. |
| 3.5.1.39 | Alkylamidase. |
| 3.5.1.40 | Acylagmatine amidase. |
| 3.5.1.41 | Chitin deacetylase. |
| 3.5.1.42 | Nicotinamide-nucleotide amidase. |
| 3.5.1.43 | Peptidyl-glutaminase. |
| 3.5.1.44 | Protein-glutamine glutaminase. |
| 3.5.1.46 | 6-aminohexanoate-dimer hydrolase. |
| 3.5.1.47 | N-acetyldiaminopimelate deacetylase. |
| 3.5.1.48 | Acetylspermidine deacetylase. |
| 3.5.1.49 | Formamidase. |
| 3.5.1.50 | Pentanamidase. |
| 3.5.1.51 | 4-acetamidobutyryl-CoA deacetylase. |
| 3.5.1.52 | Peptide-N(4)-(N-acetyl-beta- |
| | glucosaminyl)asparagine amidase. |
| 3.5.1.53 | N-carbamoylputrescine amidase. |
| 3.5.1.54 | Allophanate hydrolase. |
| 3.5.1.55 | Long-chain-fatty-acyl-glutamate deacylase. |
| 3.5.1.56 | N,N-dimethylformamidase. |
| 3.5.1.57 | Tryptophanamidase. |
| 3.5.1.58 | N-benzyloxycarbonylglycine hydrolase. |
| 3.5.1.59 | N-carbamoylsarcosine amidase. |
| 3.5.1.60 | N-(long-chain-acyl)ethanolamine deacylase. |
| 3.5.1.61 | Mimosinase. |
| 3.5.1.62 | Acetylputrescine deacetylase. |
| 3.5.1.63 | 4-acetamidobutyrate deacetylase. |
| 3.5.1.64 | N(alpha)-benzyloxycarbonylleucine |
| | hydrolase. |
| 3.5.1.65 | Theanine hydrolase. |
| 3.5.1.66 | 2-(hydroxymethyl)-3- |
| | (acetamidomethylene)succinate hydrolase. |
| 3.5.1.67 | 4-methyleneglutaminase. |
| 3.5.1.68 | N-formylglutamate deformylase. |
| 3.5.1.69 | Glycosphingolipid deacylase. |
| 3.5.1.70 | Aculeacin-A deacylase. |
| 3.5.1.71 | N-feruloylglycine deacylase. |
| 3.5.1.72 | D-benzoylarginine-4-nitroanilide |
| | amidase. |
| 3.5.1.73 | Carnitinamidase. |
| 3.5.1.74 | Chenodeoxycholoyltaurine hydrolase. |
| 3.5.1.75 | Urethanase. |
| 3.5.1.76 | Arylalkyl acylamidase. |
| 3.5.1.77 | N-carbamoyl-D-amino acid hydrolase. |
| 3.5.1.78 | Glutathionylspermidine amidase. |
| 3.5.1.79 | Phthalyl amidase. |
| 3.5.1.81 | N-acyl-D-amino-acid deacylase. |
| 3.5.1.82 | N-acyl-D-glutamate deacylase. |
| 3.5.1.83 | N-acyl-D-aspartate deacylase. |
| 3.5.1.84 | Biuret amidohydrolase. |
| 3.5.1.85 | (S)—N-acetyl-1-phenylethylamine |
| | hydrolase. |
| 3.5.1.86 | Mandelamide amidase. |
| 3.5.1.87 | N-carbamoyl-L-amino-acid hydrolase. |
| 3.5.1.88 | Peptide deformylase. |
| 3.5.1.89 | N- |
| | acetylglucosaminylphosphatidylinositol |
| | deacetylase. |
| 3.5.1.90 | Adenosylcobinamide hydrolase. |
| 3.5.2.1 | Barbiturase. |
| 3.5.2.2 | Dihydropyrimidinase. |
| 3.5.2.3 | Dihydroorotase. |
| 3.5.2.4 | Carboxymethylhydantoinase. |
| 3.5.2.5 | Allantoinase. |
| 3.5.2.6 | Beta-lactamase. |
| 3.5.2.7 | Imidazolonepropionase. |
| 3.5.2.9 | 5-oxoprolinase (ATP-hydrolyzing). |
| 3.5.2.10 | Creatininase. |
| 3.5.2.11 | L-lysine-lactamase. |
| 3.5.2.12 | 6-aminohexanoate-cyclic-dimer |
| | hydrolase. |
| 3.5.2.13 | 2,5-dioxopiperazine hydrolase. |
| 3.5.2.14 | N-methylhydantoinase (ATP- |
| | hydrolyzing). |
| 3.5.2.15 | Cyanuric acid amidohydrolase. |
| 3.5.2.16 | Maleimide hydrolase. |
| 3.5.2.17 | Hydroxyisourate hydrolase. |
| 3.5.3.1 | Arginase. |
| 3.5.3.2 | Guanidinoacetase. |
| 3.5.3.3 | Creatinase. |
| 3.5.3.4 | Allantoicase. |
| 3.5.3.5 | Formimidoylaspartate deiminase. |
| 3.5.3.6 | Arginine deiminase. |
| 3.5.3.7 | Guanidinobutyrase. |
| 3.5.3.8 | Formimidoylglutamase. |
| 3.5.3.9 | Allantoate deiminase. |
| 3.5.3.10 | D-arginase. |
| 3.5.3.11 | Agmatinase. |
| 3.5.3.12 | Agmatine deiminase. |
| 3.5.3.13 | Formimidoylglutamate deiminase. |
| 3.5.3.14 | Amidinoaspartase. |
| 3.5.3.15 | Protein-arginine deiminase. |
| 3.5.3.16 | Methylguanidinase. |
| 3.5.3.17 | Guanidinopropionase. |
| 3.5.3.18 | Dimethylargininase. |
| 3.5.3.19 | Ureidoglycolate hydrolase. |
| 3.5.3.20 | Diguanidinobutanase. |
| 3.5.3.21 | Methylenediurea deaminase. |
| 3.5.3.22 | Proclavaminate amidinohydrolase. |
| 3.5.4.1 | Cytosine deaminase. |
| 3.5.4.2 | Adenine deaminase. |
| 3.5.4.3 | Guanine deaminase. |
| 3.5.4.4 | Adenosine deaminase. |
| 3.5.4.5 | Cytidine deaminase. |
| 3.5.4.6 | AMP deaminase. |
| 3.5.4.7 | ADP deaminase. |
| 3.5.4.8 | Aminoimidazolase. |
| 3.5.4.9 | Methenyltetrahydrofolate cyclohydrolase. |
| 3.5.4.10 | IMP cyclohydrolase. |
| 3.5.4.11 | Pterin deaminase. |
| 3.5.4.12 | dCMP deaminase. |
| 3.5.4.13 | dCTP deaminase. |
| 3.5.4.14 | Deoxycytidine deaminase. |
| 3.5.4.15 | Guanosine deaminase. |
| 3.5.4.16 | GTP cyclohydrolase I. |
| 3.5.4.17 | Adenosine-phosphate deaminase. |
| 3.5.4.18 | ATP deaminase. |
| 3.5.4.19 | Phosphoribosyl-AMP cyclohydrolase. |
| 3.5.4.20 | Pyrithiamine deaminase. |
| 3.5.4.21 | Creatinine deaminase. |
| 3.5.4.22 | 1-pyrroline-4-hydroxy-2-carboxylate |
| | deaminase. |
| 3.5.4.23 | Blasticidin-S deaminase. |
| 3.5.4.24 | Sepiapterin deaminase. |
| 3.5.4.25 | GTP cyclohydrolase II. |
| 3.5.4.26 | Diaminohydroxyphosphoribosylaminopyrimidine |
| | deaminase. |
| 3.5.4.27 | Methenyltetrahydromethanopterin |
| | cyclohydrolase. |
| 3.5.4.28 | S-adenosylhomocysteine deaminase. |
| 3.5.4.29 | GTP cyclohydrolase IIa. |
| 3.5.4.30 | dCTP deaminase (dUMP-forming). |
| 3.5.5.1 | Nitrilase. |
| 3.5.5.2 | Ricinine nitrilase. |
| 3.5.5.4 | Cyanoalanine nitrilase. |
| 3.5.5.5 | Arylacetonitrilase. |
| 3.5.5.6 | Bromoxynil nitrilase. |
| 3.5.5.7 | Aliphatic nitrilase. |
| 3.5.5.8 | Thiocyanate hydrolase. |
| 3.5.99.1 | Riboflavinase. |
| 3.5.99.2 | Thiaminase. |
| 3.5.99.3 | Hydroxydechloroatrazine |
| | ethylaminohydrolase. |
| 3.5.99.4 | N-isopropylammelide |
| | isopropylaminohydrolase. |
| 3.5.99.5 | 2-aminomuconate deaminase. |
| 3.5.99.6 | Glucosamine-6-phosphate deaminase. |
| 3.5.99.7 | 1-aminocyclopropane-1-carboxylate |
| | deaminase. |
| 3.6.1.1 | Inorganic diphosphatase. |
| 3.6.1.2 | Trimetaphosphatase. |
| 3.6.1.3 | Adenosinetriphosphatase. |
| 3.6.1.5 | Apyrase. |
| 3.6.1.6 | Nucleoside-diphosphatase. |
| 3.6.1.7 | Acylphosphatase. |
| 3.6.1.8 | ATP diphosphatase. |
| 3.6.1.9 | Nucleotide diphosphatase. |
| 3.6.1.10 | Endopolyphosphatase. |
| 3.6.1.11 | Exopolyphosphatase. |
| 3.6.1.12 | dCTP diphosphatase. |
| 3.6.1.13 | ADP-ribose diphosphatase. |
| 3.6.1.14 | Adenosine-tetraphosphatase. |
| 3.6.1.15 | Nucleoside-triphosphatase. |
| 3.6.1.16 | CDP-glycerol diphosphatase. |
| 3.6.1.17 | Bis(5′-nucleosyl)-tetraphosphatase |
| | (asymmetrical). |
| 3.6.1.18 | FAD diphosphatase. |
| 3.6.1.19 | Nucleoside-triphosphate diphosphatase. |
| 3.6.1.20 | 5′-acylphosphoadenosine hydrolase. |
| 3.6.1.21 | ADP-sugar diphosphatase. |
| 3.6.1.22 | NAD+ diphosphatase. |
| 3.6.1.23 | dUTP diphosphatase. |
| 3.6.1.24 | Nucleoside phosphoacylhydrolase. |
| 3.6.1.25 | Triphosphatase. |
| 3.6.1.26 | CDP-diacylglycerol diphosphatase. |
| 3.6.1.27 | Undecaprenyl-diphosphatase. |
| 3.6.1.28 | Thiamine-triphosphatase. |
| 3.6.1.29 | Bis(5′-adenosyl)-triphosphatase. |
| 3.6.1.30 | M(7)G(5′)pppN diphosphatase. |
| 3.6.1.31 | Phosphoribosyl-ATP diphosphatase. |
| 3.6.1.39 | Thymidine-triphosphatase. |
| 3.6.1.40 | Guanosine-5′-triphosphate,3′- |
| | diphosphate diphosphatase. |
| 3.6.1.41 | Bis(5′-nucleosyl)-tetraphosphatase |
| | (symmetrical). |
| 3.6.1.42 | Guanosine-diphosphatase. |
| 3.6.1.43 | Dolichyldiphosphatase. |
| 3.6.1.44 | Oligosaccharide-diphosphodolichol |
| | diphosphatase. |
| 3.6.1.45 | UDP-sugar diphosphatase. |
| 3.6.1.52 | Diphosphoinositol-polyphosphate |
| | diphosphatase. |
| 3.6.2.1 | Adenylylsulfatase. |
| 3.6.2.2 | Phosphoadenylylsulfatase. |
| 3.6.3.1 | Phospholipid-translocating ATPase. |
| 3.6.3.2 | Magnesium-importing ATPase. |
| 3.6.3.3 | Cadmium-exporting ATPase. |
| 3.6.3.4 | Copper-exporting ATPase. |
| 3.6.3.5 | Zinc-exporting ATPase. |
| 3.6.3.6 | Proton-exporting ATPase. |
| 3.6.3.7 | Sodium-exporting ATPase. |
| 3.6.3.8 | Calcium-transporting ATPase. |
| 3.6.3.9 | Sodium/potassium-exchanging |
| | ATPase. |
| 3.6.3.10 | Hydrogen/potassium-exchanging |
| | ATPase. |
| 3.6.3.11 | Chloride-transporting ATPase. |
| 3.6.3.12 | Potassium-transporting ATPase. |
| 3.6.3.14 | H(+)-transporting two-sector ATPase. |
| 3.6.3.15 | Sodium-transporting two-sector |
| | ATPase. |
| 3.6.3.16 | Arsenite-transporting ATPase. |
| 3.6.3.17 | Monosaccharide-transporting ATPase. |
| 3.6.3.18 | Oligosaccharide-transporting ATPase. |
| 3.6.3.19 | Maltose-transporting ATPase. |
| 3.6.3.20 | Glycerol-3-phosphate-transporting |
| | ATPase. |
| 3.6.3.21 | Polar-amino-acid-transporting |
| | ATPase. |
| 3.6.3.22 | Nonpolar-amino-acid-transporting |
| | ATPase. |
| 3.6.3.23 | Oligopeptide-transporting ATPase. |
| 3.6.3.24 | Nickel-transporting ATPase. |
| 3.6.3.25 | Sulfate-transporting ATPase. |
| 3.6.3.26 | Nitrate-transporting ATPase. |
| 3.6.3.27 | Phosphate-transporting ATPase. |
| 3.6.3.28 | Phosphonate-transporting ATPase. |
| 3.6.3.29 | Molybdate-transporting ATPase. |
| 3.6.3.30 | Fe(3+)-transporting ATPase. |
| 3.6.3.31 | Polyamine-transporting ATPase. |
| 3.6.3.32 | Quaternary-amine-transporting |
| | ATPase. |
| 3.6.3.33 | Vitamin B12-transporting ATPase. |
| 3.6.3.34 | Iron-chelate-transporting ATPase. |
| 3.6.3.35 | Manganese-transporting ATPase. |
| 3.6.3.36 | Taurine-transporting ATPase. |
| 3.6.3.37 | Guanine-transporting ATPase. |
| 3.6.3.38 | Capsular-polysaccharide-transporting |
| | ATPase. |
| 3.6.3.39 | Lipopolysaccharide-transporting |
| | ATPase. |
| 3.6.3.40 | Teichoic-acid-transporting ATPase. |
| 3.6.3.41 | Heme-transporting ATPase. |
| 3.6.3.42 | Beta-glucan-transporting ATPase. |
| 3.6.3.43 | Peptide-transporting ATPase. |
| 3.6.3.44 | Xenobiotic-transporting ATPase. |
| 3.6.3.45 | Steroid-transporting ATPase. |
| 3.6.3.46 | Cadmium-transporting ATPase. |
| 3.6.3.47 | Fatty-acyl-CoA-transporting ATPase. |
| 3.6.3.48 | Alpha-factor-transporting ATPase. |
| 3.6.3.49 | Channel-conductance-controlling |
| | ATPase. |
| 3.6.3.50 | Protein-secreting ATPase. |
| 3.6.3.51 | Mitochondrial protein-transporting |
| | ATPase. |
| 3.6.3.52 | Chloroplast protein-transporting |
| | ATPase. |
| 3.6.3.53 | Ag(+)-exporting ATPase. |
| 3.6.4.1 | Myosin ATPase. |
| 3.6.4.2 | Dynein ATPase. |
| 3.6.4.3 | Microtubule-severing ATPase. |
| 3.6.4.4 | Plus-end-directed kinesin ATPase. |
| 3.6.4.5 | Minus-end-directed kinesin ATPase. |
| 3.6.4.6 | Vesicle-fusing ATPase. |
| 3.6.4.7 | Peroxisome-assembly ATPase. |
| 3.6.4.8 | Proteasome ATPase. |
| 3.6.4.9 | Chaperonin ATPase. |
| 3.6.4.10 | Non-chaperonin molecular chaperone |
| | ATPase. |
| 3.6.4.11 | Nucleoplasmin ATPase. |
| 3.6.5.1 | Heterotrimeric G-protein GTPase. |
| 3.6.5.2 | Small monomeric GTPase. |
| 3.6.5.3 | Protein-synthesizing GTPase. |
| 3.6.5.4 | Signal-recognition-particle GTPase. |
| 3.6.5.5 | Dynamin GTPase. |
| 3.6.5.6 | Tubulin GTPase. |
| 3.7.1.1 | Oxaloacetase. |
| 3.7.1.2 | Fumarylacetoacetase. |
| 3.7.1.3 | Kynureninase. |
| 3.7.1.4 | Phloretin hydrolase. |
| 3.7.1.5 | Acylpyruvate hydrolase. |
| 3.7.1.6 | Acetylpyruvate hydrolase. |
| 3.7.1.7 | Beta-diketone hydrolase. |
| 3.7.1.8 | 2,6-dioxo-6-phenylhexa-3-enoate |
| | hydrolase. |
| 3.7.1.9 | 2-hydroxymuconate-semialdehyde |
| | hydrolase. |
| 3.7.1.10 | Cyclohexane-1,3-dione hydrolase. |
| 3.8.1.1 | Alkylhalidase. |
| 3.8.1.2 | (S)-2-haloacid dehalogenase. |
| 3.8.1.3 | Haloacetate dehalogenase. |
| 3.8.1.5 | Haloalkane dehalogenase. |
| 3.8.1.6 | 4-chlorobenzoate dehalogenase. |
| 3.8.1.7 | 4-chlorobenzoyl-CoA dehalogenase. |
| 3.8.1.8 | Atrazine chlorohydrolase. |
| 3.8.1.9 | (R)-2-haloacid dehalogenase. |
| 3.8.1.10 | 2-haloacid dehalogenase (configuration- |
| | inverting). |
| 3.8.1.11 | 2-haloacid dehalogenase (configuration- |
| | retaining). |
| 3.9.1.1 | Phosphoamidase. |
| 3.10.1.1 | N-sulfoglucosamine sulfohydrolase. |
| 3.10.1.2 | Cyclamate sulfohydrolase. |
| 3.11.1.1 | Phosphonoacetaldehyde hydrolase. |
| 3.11.1.2 | Phosphonoacetate hydrolase. |
| 3.12.1.1 | Trithionate hydrolase. |
| 3.13.1.1 | UDP-sulfoquinovose synthase. |

ENZYME: 4.—.—.—

| | |
|---|---|
| 4.1.1.1 | Pyruvate decarboxylase. |
| 4.1.1.2 | Oxalate decarboxylase. |
| 4.1.1.3 | Oxaloacetate decarboxylase. |
| 4.1.1.4 | Acetoacetate decarboxylase. |
| 4.1.1.5 | Acetolactate decarboxylase. |
| 4.1.1.6 | Aconitate decarboxylase. |
| 4.1.1.7 | Benzoylformate decarboxylase. |
| 4.1.1.8 | Oxalyl-CoA decarboxylase. |
| 4.1.1.9 | Malonyl-CoA decarboxylase. |
| 4.1.1.11 | Aspartate 1-decarboxylase. |
| 4.1.1.12 | Aspartate 4-decarboxylase. |
| 4.1.1.14 | Valine decarboxylase. |
| 4.1.1.15 | Glutamate decarboxylase. |
| 4.1.1.16 | Hydroxyglutamate decarboxylase. |
| 4.1.1.17 | Ornithine decarboxylase. |
| 4.1.1.18 | Lysine decarboxylase. |
| 4.1.1.19 | Arginine decarboxylase. |
| 4.1.1.20 | Diaminopimelate decarboxylase. |
| 4.1.1.21 | Phosphoribosylaminoimidazole |
| | carboxylase. |
| 4.1.1.22 | Histidine decarboxylase. |
| 4.1.1.23 | Orotidine-5′-phosphate decarboxylase. |
| 4.1.1.24 | Aminobenzoate decarboxylase. |
| 4.1.1.25 | Tyrosine decarboxylase. |
| 4.1.1.28 | Aromatic-L-amino-acid decarboxylase. |
| 4.1.1.29 | Sulfinoalanine decarboxylase. |
| 4.1.1.30 | Pantothenoylcysteine decarboxylase. |
| 4.1.1.31 | Phosphoenolpyruvate carboxylase. |
| 4.1.1.32 | Phosphoenolpyruvate carboxykinase |
| | (GTP). |
| 4.1.1.33 | Diphosphomevalonate decarboxylase. |
| 4.1.1.34 | Dehydro-L-gulonate decarboxylase. |
| 4.1.1.35 | UDP-glucuronate decarboxylase. |
| 4.1.1.36 | Phosphopantothenoylcysteine |
| | decarboxylase. |
| 4.1.1.37 | Uroporphyrinogen decarboxylase. |
| 4.1.1.38 | Phosphoenolpyruvate carboxykinase |
| | (diphosphate). |
| 4.1.1.39 | Ribulose-bisphosphate carboxylase. |
| 4.1.1.40 | Hydroxypyruvate decarboxylase. |
| 4.1.1.41 | Methylmalonyl-CoA decarboxylase. |
| 4.1.1.42 | Carnitine decarboxylase. |
| 4.1.1.43 | Phenylpyruvate decarboxylase. |
| 4.1.1.44 | 4-carboxymuconolactone |
| | decarboxylase. |
| 4.1.1.45 | Aminocarboxymuconate-semialdehyde |
| | decarboxylase. |
| 4.1.1.46 | O-pyrocatechuate decarboxylase. |
| 4.1.1.47 | Tartronate-semialdehyde synthase. |
| 4.1.1.48 | Indole-3-glycerol-phosphate synthase. |
| 4.1.1.49 | Phosphoenolpyruvate carboxykinase |
| | (ATP). |
| 4.1.1.50 | Adenosylmethionine decarboxylase. |
| 4.1.1.51 | 3-hydroxy-2-methylpyridine-4,5- |
| | dicarboxylate 4-decarboxylase. |
| 4.1.1.52 | 6-methylsalicylate decarboxylase. |
| 4.1.1.53 | Phenylalanine decarboxylase. |
| 4.1.1.54 | Dihydroxyfumarate decarboxylase. |
| 4.1.1.55 | 4,5-dihydroxyphthalate decarboxylase. |
| 4.1.1.56 | 3-oxolaurate decarboxylase. |
| 4.1.1.57 | Methionine decarboxylase. |
| 4.1.1.58 | Orsellinate decarboxylase. |
| 4.1.1.59 | Gallate decarboxylase. |
| 4.1.1.60 | Stipitatonate decarboxylase. |
| 4.1.1.61 | 4-hydroxybenzoate decarboxylase. |
| 4.1.1.62 | Gentisate decarboxylase. |
| 4.1.1.63 | Protocatechuate decarboxylase. |
| 4.1.1.64 | 2,2-dialkylglycine decarboxylase |
| | (pyruvate). |
| 4.1.1.65 | Phosphatidylserine decarboxylase. |
| 4.1.1.66 | Uracil-5-carboxylate decarboxylase. |
| 4.1.1.67 | UDP-galacturonate decarboxylase. |
| 4.1.1.68 | 5-oxopent-3-ene-1,2,5-tricarboxylate |
| | decarboxylase. |
| 4.1.1.69 | 3,4-dihydroxyphthalate decarboxylase. |
| 4.1.1.70 | Glutaconyl-CoA decarboxylase. |
| 4.1.1.71 | 2-oxoglutarate decarboxylase. |
| 4.1.1.72 | Branched-chain-2-oxoacid |
| | decarboxylase. |
| 4.1.1.73 | Tartrate decarboxylase. |
| 4.1.1.74 | Indolepyruvate decarboxylase. |
| 4.1.1.75 | 5-guanidino-2-oxopentanoate |
| | decarboxylase. |
| 4.1.1.76 | Arylmalonate decarboxylase. |
| 4.1.1.77 | 4-oxalocrotonate decarboxylase. |
| 4.1.1.78 | Acetylenedicarboxylate decarboxylase. |
| 4.1.1.79 | Sulfopyruvate decarboxylase. |
| 4.1.1.80 | 4-hydroxyphenylpyruvate decarboxylase. |
| 4.1.1.81 | Threonine-phosphate decarboxylase. |
| 4.1.2.2 | Ketotetrose-phosphate aldolase. |
| 4.1.2.4 | Deoxyribose-phosphate aldolase. |
| 4.1.2.5 | Threonine aldolase. |
| 4.1.2.9 | Phosphoketolase. |
| 4.1.2.10 | Mandelonitrile lyase. |
| 4.1.2.11 | Hydroxymandelonitrile lyase. |
| 4.1.2.12 | 2-dehydropantoate aldolase. |
| 4.1.2.13 | Fructose-bisphosphate aldolase. |
| 4.1.2.14 | 2-dehydro-3-deoxy-phosphogluconate |
| | aldolase. |
| 4.1.2.17 | L-fuculose-phosphate aldolase. |
| 4.1.2.18 | 2-dehydro-3-deoxy-L-pentonate aldolase. |
| 4.1.2.19 | Rhamnulose-1-phosphate aldolase. |
| 4.1.2.20 | 2-dehydro-3-deoxyglucarate aldolase. |
| 4.1.2.21 | 2-dehydro-3-deoxy-6- |
| | phosphogalactonate aldolase. |
| 4.1.2.22 | Fructose-6-phosphate phosphoketolase. |
| 4.1.2.23 | 3-deoxy-D-manno-octulosonate aldolase. |
| 4.1.2.24 | Dimethylaniline-N-oxide aldolase. |
| 4.1.2.25 | Dihydroneopterin aldolase. |
| 4.1.2.26 | Phenylserine aldolase. |
| 4.1.2.27 | Sphinganine-1-phosphate aldolase. |
| 4.1.2.28 | 2-dehydro-3-deoxy-D-pentonate |
| | aldolase. |
| 4.1.2.29 | 5-dehydro-2-deoxyphosphogluconate |
| | aldolase. |
| 4.1.2.30 | 17-alpha-hydroxyprogesterone aldolase. |
| 4.1.2.32 | Trimethylamine-oxide aldolase. |
| 4.1.2.33 | Fucosterol-epoxide lyase. |
| 4.1.2.34 | 4-(2-carboxyphenyl)-2-oxobut-3-enoate |
| | aldolase. |
| 4.1.2.35 | Propioin synthase. |
| 4.1.2.36 | Lactate aldolase. |
| 4.1.2.37 | Acetone-cyanohydrin lyase. |
| 4.1.2.38 | Benzoin aldolase. |
| 4.1.2.39 | Hydroxynitrilase. |
| 4.1.2.40 | Tagatose-bisphosphate aldolase. |
| 4.1.2.41 | Vanillin synthase. |
| 4.1.3.1 | Isocitrate lyase. |
| 4.1.3.3 | N-acetylneuraminate lyase. |
| 4.1.3.4 | Hydroxymethylglutaryl-CoA lyase. |
| 4.1.3.6 | Citrate (pro-3S)-lyase. |
| 4.1.3.13 | Oxalomalate lyase. |
| 4.1.3.14 | 3-hydroxyaspartate aldolase. |
| 4.1.3.16 | 4-hydroxy-2-oxoglutarate aldolase. |
| 4.1.3.17 | 4-hydroxy-4-methyl-2-oxoglutarate |
| | aldolase. |
| 4.1.3.22 | Citramalate lyase. |
| 4.1.3.24 | Malyl-CoA lyase. |
| 4.1.3.25 | Citramalyl-CoA lyase. |
| 4.1.3.26 | 3-hydroxy-3-isohexenylglutaryl-CoA |
| | lyase. |
| 4.1.3.27 | Anthranilate synthase. |
| 4.1.3.30 | Methylisocitrate lyase. |
| 4.1.3.32 | 2,3-dimethylmalate lyase. |
| 4.1.3.34 | Citryl-CoA lyase. |
| 4.1.3.35 | (1-hydroxycyclohexan-1-yl)acetyl-CoA |
| | lyase. |
| 4.1.3.36 | Naphthoate synthase. |
| 4.1.3.38 | Aminodeoxychorismate lyase. |
| 4.1.99.1 | Tryptophanase. |
| 4.1.99.2 | Tyrosine phenol-lyase. |
| 4.1.99.3 | Deoxyribodipyrimidine photo-lyase. |
| 4.1.99.5 | Octadecanal decarbonylase. |
| 4.1.99.11 | Benzylsuccinate synthase. |
| 4.2.1.1 | Carbonate dehydratase. |
| 4.2.1.2 | Fumarate hydratase. |
| 4.2.1.3 | Aconitate hydratase. |
| 4.2.1.4 | Citrate dehydratase. |
| 4.2.1.5 | Arabinonate dehydratase. |
| 4.2.1.6 | Galactonate dehydratase. |
| 4.2.1.7 | Altronate dehydratase. |
| 4.2.1.8 | Mannonate dehydratase. |
| 4.2.1.9 | Dihydroxy-acid dehydratase. |
| 4.2.1.10 | 3-dehydroquinate dehydratase. |
| 4.2.1.11 | Phosphopyruvate hydratase. |
| 4.2.1.12 | Phosphogluconate dehydratase. |
| 4.2.1.17 | Enoyl-CoA hydratase. |
| 4.2.1.18 | Methylglutaconyl-CoA hydratase. |
| 4.2.1.19 | Imidazoleglycerol-phosphate dehydratase. |
| 4.2.1.20 | Tryptophan synthase. |
| 4.2.1.22 | Cystathionine beta-synthase. |
| 4.2.1.24 | Porphobilinogen synthase. |
| 4.2.1.25 | L-arabinonate dehydratase. |
| 4.2.1.27 | Acetylenecarboxylate hydratase. |
| 4.2.1.28 | Propanediol dehydratase. |
| 4.2.1.30 | Glycerol dehydratase. |
| 4.2.1.31 | Maleate hydratase. |
| 4.2.1.32 | L(+)-tartrate dehydratase. |
| 4.2.1.33 | 3-isopropylmalate dehydratase. |
| 4.2.1.34 | (S)-2-methylmalate dehydratase. |
| 4.2.1.35 | (R)-2-methylmalate dehydratase. |
| 4.2.1.36 | Homoaconitate hydratase. |
| 4.2.1.39 | Gluconate dehydratase. |
| 4.2.1.40 | Glucarate dehydratase. |
| 4.2.1.41 | 5-dehydro-4-deoxyglucarate |
| | dehydratase. |
| 4.2.1.42 | Galactarate dehydratase. |
| 4.2.1.43 | 2-dehydro-3-deoxy-L-arabinonate |
| | dehydratase. |
| 4.2.1.44 | Myo-inosose-2 dehydratase. |
| 4.2.1.45 | CDP-glucose 4,6-dehydratase. |
| 4.2.1.46 | dTDP-glucose 4,6-dehydratase. |
| 4.2.1.47 | GDP-mannose 4,6-dehydratase. |
| 4.2.1.48 | D-glutamate cyclase. |
| 4.2.1.49 | Urocanate hydratase. |
| 4.2.1.50 | Pyrazolylalanine synthase. |
| 4.2.1.51 | Prephenate dehydratase. |
| 4.2.1.52 | Dihydrodipicolinate synthase. |
| 4.2.1.53 | Oleate hydratase. |
| 4.2.1.54 | Lactoyl-CoA dehydratase. |
| 4.2.1.55 | 3-hydroxybutyryl-CoA dehydratase. |
| 4.2.1.56 | Itaconyl-CoA hydratase. |
| 4.2.1.57 | Isohexenylglutaconyl-CoA |
| | hydratase. |
| 4.2.1.58 | Crotonoyl-[acyl-carrier-protein] |
| | hydratase. |
| 4.2.1.59 | 3-hydroxyoctanoyl-[acyl-carrier- |
| | protein] dehydratase. |
| 4.2.1.60 | 3-hydroxydecanoyl-[acyl-carrier- |
| | protein] dehydratase. |
| 4.2.1.61 | 3-hydroxypalmitoyl-[acyl-carrier- |
| | protein] dehydratase. |
| 4.2.1.62 | 5-alpha-hydroxysteroid dehydratase. |
| 4.2.1.65 | 3-cyanoalanine hydratase. |
| 4.2.1.66 | Cyanide hydratase. |
| 4.2.1.67 | D-fuconate dehydratase. |
| 4.2.1.68 | L-fuconate dehydratase. |
| 4.2.1.69 | Cyanamide hydratase. |
| 4.2.1.70 | Pseudouridylate synthase. |
| 4.2.1.73 | Protoaphin-aglucone dehydratase |
| | (cyclizing). |
| 4.2.1.74 | Long-chain-enoyl-CoA hydratase. |
| 4.2.1.75 | Uroporphyrinogen-III synthase. |
| 4.2.1.76 | UDP-glucose 4,6-dehydratase. |
| 4.2.1.77 | Trans-L-3-hydroxyproline |
| | dehydratase. |
| 4.2.1.78 | (S)-norcoclaurine synthase. |
| 4.2.1.79 | 2-methylcitrate dehydratase. |
| 4.2.1.80 | 2-oxopent-4-enoate hydratase. |
| 4.2.1.81 | D(−)-tartrate dehydratase. |
| 4.2.1.82 | Xylonate dehydratase. |
| 4.2.1.83 | 4-oxalmesaconate hydratase. |
| 4.2.1.84 | Nitrile hydratase. |
| 4.2.1.85 | Dimethylmaleate hydratase. |
| 4.2.1.86 | 16-dehydroprogesterone hydratase. |
| 4.2.1.87 | Octopamine dehydratase. |
| 4.2.1.88 | Synephrine dehydratase. |
| 4.2.1.89 | Carnitine dehydratase. |
| 4.2.1.90 | L-rhamnonate dehydratase. |
| 4.2.1.91 | Carboxycyclohexadienyl dehydratase. |
| 4.2.1.92 | Hydroperoxide dehydratase. |
| 4.2.1.93 | ATP-dependent NAD(P)H-hydrate |
| | dehydratase. |
| 4.2.1.94 | Scytalone dehydratase. |
| 4.2.1.95 | Kievitone hydratase. |
| 4.2.1.96 | 4a-hydroxytetrahydrobiopterin |
| | dehydratase. |
| 4.2.1.97 | Phaseollidin hydratase. |
| 4.2.1.98 | 16-alpha-hydroxyprogesterone |
| | dehydratase. |
| 4.2.1.99 | 2-methylisocitrate dehydratase. |
| 4.2.1.100 | Cyclohexa-1,5-dienecarbonyl-CoA |
| | hydratase. |
| 4.2.1.101 | Trans-feruloyl-CoA hydratase. |
| 4.2.1.103 | Cyclohexyl-isocyanide hydratase. |
| 4.2.1.104 | Cyanate hydratase. |
| 4.2.2.1 | Hyaluronate lyase. |
| 4.2.2.2 | Pectate lyase. |
| 4.2.2.3 | Poly(beta-D-mannuronate) lyase. |
| 4.2.2.4 | Chondroitin ABC lyase. |
| 4.2.2.5 | Chondroitin AC lyase. |
| 4.2.2.6 | Oligogalacturonide lyase. |
| 4.2.2.7 | Heparin lyase. |
| 4.2.2.8 | Heparin-sulfate lyase. |
| 4.2.2.9 | Pectate disaccharide-lyase. |
| 4.2.2.10 | Pectin lyase. |
| 4.2.2.11 | Poly(alpha-L-guluronate) lyase. |
| 4.2.2.12 | Xanthan lyase. |
| 4.2.2.13 | Exo-(1->4)-alpha-D-glucan lyase. |
| 4.2.2.14 | Glucuronan lyase. |
| 4.2.2.15 | Anhydrosialidase. |
| 4.2.2.16 | Levan fructotransferase (DFA-IV- |
| | forming). |
| 4.2.2.17 | Inulin fructotransferase (DFA-I-forming). |
| 4.2.2.18 | Inulin fructotransferase (DFA-III-forming). |
| 4.2.3.1 | Threonine synthase. |
| 4.2.3.2 | Ethanolamine-phosphate phospho-lyase. |
| 4.2.3.3 | Methylglyoxal synthase. |
| 4.2.3.4 | 3-dehydroquinate synthase. |
| 4.2.3.5 | Chorismate synthase. |
| 4.2.3.6 | Trichodiene synthase. |
| 4.2.3.7 | Pentalenene synthase. |
| 4.2.3.8 | Casbene synthase. |
| 4.2.3.9 | Aristolochene synthase. |
| 4.2.3.10 | (−)-endo-fenchol synthase. |
| 4.2.3.11 | Sabinene-hydrate synthase. |
| 4.2.3.12 | 6-pyruvoyltetrahydropterin |
| | synthase. |
| 4.2.3.13 | (+)-delta-cadinene synthase. |
| 4.2.3.14 | Pinene synthase. |
| 4.2.3.15 | Myrcene synthase. |
| 4.2.3.16 | (4S)-limonene synthase. |
| 4.2.3.17 | Taxadiene synthase. |
| 4.2.3.18 | Abietadiene synthase. |
| 4.2.3.19 | Ent-kaurene synthase. |
| 4.2.3.20 | (+)-limonene synthase. |
| 4.2.3.21 | Vetispiradiene synthase. |
| 4.2.99.12 | Carboxymethyloxysuccinate lyase. |
| 4.2.99.18 | DNA-(apurinic or apyrimidinicsite) |
| | lyase. |
| 4.2.99.19 | 2-hydroxypropyl-CoM lyase. |
| 4.3.1.1 | Aspartate ammonia-lyase. |
| 4.3.1.2 | Methylaspartate ammonia-lyase. |
| 4.3.1.3 | Histidine ammonia-lyase. |
| 4.3.1.4 | Formimidoyltetrahydrofolate |
| | cyclodeaminase. |
| 4.3.1.5 | Phenylalanine ammonia-lyase. |
| 4.3.1.6 | Beta-alanyl-CoA ammonia-lyase. |
| 4.3.1.7 | Ethanolamine ammonia-lyase. |
| 4.3.1.9 | Glucosaminate ammonia-lyase. |
| 4.3.1.10 | Serine-sulfate ammonia-lyase. |
| 4.3.1.11 | Dihydroxyphenylalanine ammonia- |
| | lyase. |
| 4.3.1.12 | Ornithine cyclodeaminase. |
| 4.3.1.13 | Carbamoyl-serine ammonia-lyase. |
| 4.3.1.14 | 3-aminobutyryl-CoA ammonia- |
| | lyase. |
| 4.3.1.15 | Diaminopropionate ammonia-lyase. |
| 4.3.1.16 | Threo-3-hydroxyaspartate |
| | ammonia-lyase. |
| 4.3.1.17 | L-serine ammonia-lyase. |
| 4.3.1.18 | D-serine ammonia-lyase. |
| 4.3.1.19 | Threonine ammonia-lyase. |
| 4.3.1.20 | Erythro-3-hydroxyaspartate |
| | ammonia-lyase. |
| 4.3.2.1 | Argininosuccinate lyase. |
| 4.3.2.2 | Adenylosuccinate lyase. |
| 4.3.2.3 | Ureidoglycolate lyase. |
| 4.3.2.4 | Purine imidazole-ring cyclase. |
| 4.3.2.5 | Peptidylamidoglycolate lyase. |
| 4.3.3.1 | 3-ketovalidoxylamine C-N-lyase. |
| 4.3.3.2 | Strictosidine synthase. |
| 4.3.3.3 | Deacetylisoipecoside synthase. |
| 4.3.3.4 | Deacetylipecoside synthase. |
| 4.4.1.1 | Cystathionine gamma-lyase. |
| 4.4.1.2 | Homocysteine desulfhydrase. |
| 4.4.1.3 | Dimethylpropiothetin dethiomethylase. |
| 4.4.1.4 | Alliin lyase. |
| 4.4.1.5 | Lactoylglutathione lyase. |
| 4.4.1.6 | S-alkylcysteine lyase. |
| 4.4.1.8 | Cystathionine beta-lyase. |
| 4.4.1.9 | L-3-cyanoalanine synthase. |
| 4.4.1.10 | Cysteine lyase. |
| 4.4.1.11 | Methionine gamma-lyase. |
| 4.4.1.13 | Cysteine-S-conjugate beta-lyase. |
| 4.4.1.14 | 1-aminocyclopropane-1-carboxylate |
| | synthase. |
| 4.4.1.15 | D-cysteine desulfhydrase. |
| 4.4.1.16 | Selenocysteine lyase. |
| 4.4.1.17 | Holocytochrome-c synthase. |
| 4.4.1.19 | Phosphosulfolactate synthase. |
| 4.4.1.20 | Leukotriene-C(4) synthase. |
| 4.5.1.1 | DDT-dehydrochlorinase. |
| 4.5.1.2 | 3-chloro-D-alanine dehydrochlorinase. |
| 4.5.1.3 | Dichloromethane dehalogenase. |
| 4.5.1.4 | L-2-amino-4-chloropent-4-enoate |
| | dehydrochlorinase. |
| 4.5.1.5 | S-carboxymethylcysteine synthase. |
| 4.6.1.1 | Adenylate cyclase. |
| 4.6.1.2 | Guanylate cyclase. |
| 4.6.1.6 | Cytidylate cyclase. |
| 4.6.1.12 | 2-C-methyl-D-erythritol 2,4- |
| | cyclodiphosphate synthase. |
| 4.6.1.13 | Phosphatidylinositol diacylglycerol-lyase. |
| 4.6.1.14 | Glycosylphosphatidylinositol |
| | diacylglycerol-lyase. |
| 4.6.1.15 | FAD-AMP lyase (cyclizing). |
| 4.99.1.1 | Ferrochelatase. |
| 4.99.1.2 | Alkylmercury lyase. |
| 4.99.1.3 | Sirohydrochlorin cobaltochelatase. |
| 4.99.1.4 | Sirohydrochlorin ferrochelatase. |
| 4.99.1.5 | Aliphatic aldoxime dehydratase. |
| 4.99.1.6 | Indoleacetaldoxime dehydratase. |

ENZYME: 5.—.—.—

| | |
|---|---|
| 5.1.1.1 | Alanine racemase. |
| 5.1.1.2 | Methionine racemase. |
| 5.1.1.3 | Glutamate racemase. |
| 5.1.1.4 | Proline racemase. |
| 5.1.1.5 | Lysine racemase. |
| 5.1.1.6 | Threonine racemase. |
| 5.1.1.7 | Diaminopimelate epimerase. |
| 5.1.1.8 | 4-hydroxyproline epimerase. |
| 5.1.1.9 | Arginine racemase. |
| 5.1.1.10 | Amino-acid racemase. |
| 5.1.1.11 | Phenylalanine racemase (ATP- |
| | hydrolyzing). |
| 5.1.1.12 | Ornithine racemase. |
| 5.1.1.13 | Aspartate racemase. |
| 5.1.1.14 | Nocardicin-A epimerase. |
| 5.1.1.15 | 2-aminohexano-6-lactam racemase. |
| 5.1.1.16 | Protein-serine epimerase. |
| 5.1.1.17 | Isopenicillin-N epimerase. |
| 5.1.2.1 | Lactate racemase. |
| 5.1.2.2 | Mandelate racemase. |
| 5.1.2.3 | 3-hydroxybutyryl-CoA epimerase. |
| 5.1.2.4 | Acetoin racemase. |
| 5.1.2.5 | Tartrate epimerase. |
| 5.1.2.6 | Isocitrate epimerase. |
| 5.1.3.1 | Ribulose-phosphate 3-epimerase. |
| 5.1.3.2 | UDP-glucose 4-epimerase. |
| 5.1.3.3 | Aldose 1-epimerase. |
| 5.1.3.4 | L-ribulose-phosphate 4-epimerase. |
| 5.1.3.5 | UDP-arabinose 4-epimerase. |
| 5.1.3.6 | UDP-glucuronate 4-epimerase. |
| 5.1.3.7 | UDP-N-acetylglucosamine 4- |
| | epimerase. |
| 5.1.3.8 | N-acylglucosamine 2-epimerase. |
| 5.1.3.9 | N-acylglucosamine-6-phosphate 2- |
| | epimerase. |
| 5.1.3.10 | CDP-abequose epimerase. |
| 5.1.3.11 | Cellobiose epimerase. |
| 5.1.3.12 | UDP-glucuronate 5′-epimerase. |
| 5.1.3.13 | dTDP-4-dehydrorhamnose 3,5- |
| | epimerase. |
| 5.1.3.14 | UDP-N-acetylglucosamine 2- |
| | epimerase. |
| 5.1.3.15 | Glucose-6-phosphate 1-epimerase. |
| 5.1.3.16 | UDP-glucosamine 4-epimerase. |
| 5.1.3.17 | Heparosan-N-sulfate-glucuronate 5- |
| | epimerase. |
| 5.1.3.18 | GDP-mannose 3,5-epimerase. |
| 5.1.3.19 | Chondroitin-glucuronate 5- |
| | epimerase. |
| 5.1.3.20 | ADP-glyceromanno-heptose 6- |
| | epimerase. |
| 5.1.3.21 | Maltose epimerase. |
| 5.1.99.1 | Methylmalonyl-CoA epimerase. |
| 5.1.99.2 | 16-hydroxysteroid epimerase. |
| 5.1.99.3 | Allantoin racemase. |
| 5.1.99.4 | Alpha-methylacyl-CoA racemase. |
| 5.2.1.1 | Maleate isomerase. |
| 5.2.1.2 | Maleylacetoacetate isomerase. |
| 5.2.1.3 | Retinal isomerase. |
| 5.2.1.4 | Maleylpyruvate isomerase. |
| 5.2.1.5 | Linoleate isomerase. |
| 5.2.1.6 | Furylfuramide isomerase. |
| 5.2.1.7 | Retinol isomerase. |
| 5.2.1.8 | Peptidylprolyl isomerase. |
| 5.2.1.9 | Farnesol 2-isomerase. |
| 5.2.1.10 | 2-chloro-4-carboxymethylenebut-2-en-1,4- |
| | olide isomerase. |
| 5.2.1.11 | 4-hydroxyphenylacetaldehyde-oxime |
| | isomerase. |
| 5.3.1.1 | Triose-phosphate isomerase. |
| 5.3.1.3 | Arabinose isomerase. |
| 5.3.1.4 | L-arabinose isomerase. |
| 5.3.1.5 | Xylose isomerase. |
| 5.3.1.6 | Ribose-5-phosphate isomerase. |
| 5.3.1.7 | Mannose isomerase. |
| 5.3.1.8 | Mannose-6-phosphate isomerase. |
| 5.3.1.9 | Glucose-6-phosphate isomerase. |
| 5.3.1.12 | Glucuronate isomerase. |
| 5.3.1.13 | Arabinose-5-phosphate isomerase. |
| 5.3.1.14 | L-rhamnose isomerase. |
| 5.3.1.15 | D-lyxose ketol-isomerase. |
| 5.3.1.16 | 1-(5-phosphoribosyl)-5-((5- |
| | phosphoribosylamino)methylideneamino)imidazole-4- |
| | carboxamide isomerase. |
| 5.3.1.17 | 4-deoxy-L-threo-5-hexosulose-uronate |
| | ketol-isomerase. |
| 5.3.1.20 | Ribose isomerase. |
| 5.3.1.21 | Corticosteroid side-chain-isomerase. |
| 5.3.1.22 | Hydroxypyruvate isomerase. |
| 5.3.1.23 | S-methyl-5-thioribose-1-phosphate |
| | isomerase. |
| 5.3.1.24 | Phosphoribosylanthranilate isomerase. |
| 5.3.1.25 | L-fucose isomerase. |
| 5.3.1.26 | Galactose-6-phosphate isomerase. |
| 5.3.2.1 | Phenylpyruvate tautomerase. |
| 5.3.2.2 | Oxaloacetate tautomerase. |
| 5.3.3.1 | Steroid delta-isomerase. |
| 5.3.3.2 | Isopentenyl-diphosphate delta-isomerase. |
| 5.3.3.3 | Vinylacetyl-CoA delta-isomerase. |
| 5.3.3.4 | Muconolactone delta-isomerase. |
| 5.3.3.5 | Cholestenol delta-isomerase. |
| 5.3.3.6 | Methylitaconate delta-isomerase. |
| 5.3.3.7 | Aconitate delta-isomerase. |
| 5.3.3.8 | Dodecenoyl-CoA delta-isomerase. |
| 5.3.3.9 | Prostaglandin-A(1) delta-isomerase. |
| 5.3.3.10 | 5-carboxymethyl-2-hydroxymuconate |
| | delta-isomerase. |
| 5.3.3.11 | Isopiperitenone delta-isomerase. |
| 5.3.3.12 | Dopachrome isomerase. |
| 5.3.3.13 | Polyenoic fatty acid isomerase. |
| 5.3.4.1 | Protein disulfide-isomerase. |
| 5.3.99.2 | Prostaglandin-D synthase. |
| 5.3.99.3 | Prostaglandin-E synthase. |
| 5.3.99.4 | Prostaglandin-I synthase. |
| 5.3.99.5 | Thromboxane-A synthase. |
| 5.3.99.6 | Allene-oxide cyclase. |
| 5.3.99.7 | Styrene-oxide isomerase. |
| 5.4.1.1 | Lysolecithin acylmutase. |
| 5.4.1.2 | Precorrin-8X methylmutase. |
| 5.4.2.1 | Phosphoglycerate mutase. |
| 5.4.2.2 | Phosphoglucomutase. |
| 5.4.2.3 | Phosphoacetylglucosamine mutase. |
| 5.4.2.4 | Bisphosphoglycerate mutase. |
| 5.4.2.5 | Phosphoglucomutase (glucose- |
| | cofactor). |
| 5.4.2.6 | Beta-phosphoglucomutase. |
| 5.4.2.7 | Phosphopentomutase. |
| 5.4.2.8 | Phosphomannomutase. |
| 5.4.2.9 | Phosphoenolpyruvate mutase. |
| 5.4.2.10 | Phosphoglucosamine mutase. |
| 5.4.3.2 | Lysine 2,3-aminomutase. |
| 5.4.3.3 | Beta-lysine 5,6-aminomutase. |
| 5.4.3.4 | D-lysine 5,6-aminomutase. |
| 5.4.3.5 | D-ornithine 4,5-aminomutase. |
| 5.4.3.6 | Tyrosine 2,3-aminomutase. |
| 5.4.3.7 | Leucine 2,3-aminomutase. |
| 5.4.3.8 | Glutamate-1-semialdehyde 2,1- |
| | aminomutase. |
| 5.4.4.1 | (Hydroxyamino)benzene mutase. |
| 5.4.4.2 | Isochorismate synthase. |
| 5.4.4.3 | 3-(hydroxyamino)phenol mutase. |
| 5.4.99.1 | Methylaspartate mutase. |
| 5.4.99.2 | Methylmalonyl-CoA mutase. |
| 5.4.99.3 | 2-acetolactate mutase. |
| 5.4.99.4 | 2-methyleneglutarate mutase. |
| 5.4.99.5 | Chorismate mutase. |
| 5.4.99.7 | Lanosterol synthase. |
| 5.4.99.8 | Cycloartenol synthase. |
| 5.4.99.9 | UDP-galactopyranose mutase. |
| 5.4.99.11 | Isomaltulose synthase. |
| 5.4.99.12 | tRNA-pseudouridine synthase I. |
| 5.4.99.13 | Isobutyryl-CoA mutase. |
| 5.4.99.14 | 4-carboxymethyl-4- |
| | methylbutenolide mutase. |
| 5.4.99.15 | (1->4)-alpha-D-glucan 1-alpha-D- |
| | glucosylmutase. |
| 5.4.99.16 | Maltose alpha-D- |
| | glucosyltransferase. |
| 5.4.99.17 | Squalene--hopene cyclase. |
| 5.5.1.1 | Muconate cycloisomerase. |
| 5.5.1.2 | 3-carboxy-cis,cis-muconate |
| | cycloisomerase. |
| 5.5.1.3 | Tetrahydroxypteridine cycloisomerase. |
| 5.5.1.4 | Inositol-3-phosphate synthase. |
| 5.5.1.5 | Carboxy-cis,cis-muconate cyclase. |
| 5.5.1.6 | Chalcone isomerase. |
| 5.5.1.7 | Chloromuconate cycloisomerase. |
| 5.5.1.8 | Geranyl-diphosphate cyclase. |
| 5.5.1.9 | Cycloeucalenol cycloisomerase. |
| 5.5.1.10 | Alpha-pinene-oxide decyclase. |
| 5.5.1.11 | Dichloromuconate cycloisomerase. |
| 5.5.1.12 | Copalyl diphosphate synthase. |
| 5.5.1.13 | Ent-copalyl diphosphate synthase. |
| 5.99.1.1 | Thiocyanate isomerase. |
| 5.99.1.2 | DNA topoisomerase. |
| 5.99.1.3 | DNA topoisomerase (ATP-hydrolyzing). |

ENZYME: 6.—.—.—

| | |
|---|---|
| 6.1.1.1 | Tyrosine--tRNA ligase. |
| 6.1.1.2 | Tryptophan--tRNA ligase. |
| 6.1.1.3 | Threonine--tRNA ligase. |
| 6.1.1.4 | Leucine--tRNA ligase. |
| 6.1.1.5 | Isoleucine--tRNA ligase. |
| 6.1.1.6 | Lysine--tRNA ligase. |
| 6.1.1.7 | Alanine--tRNA ligase. |
| 6.1.1.9 | Valine--tRNA ligase. |
| 6.1.1.10 | Methionine--tRNA ligase. |
| 6.1.1.11 | Serine--tRNA ligase. |
| 6.1.1.12 | Aspartate--tRNA ligase. |
| 6.1.1.13 | D-alanine--poly(phosphoribitol) ligase. |
| 6.1.1.14 | Glycine--tRNA ligase. |
| 6.1.1.15 | Proline--tRNA ligase. |
| 6.1.1.16 | Cysteine--tRNA ligase. |
| 6.1.1.17 | Glutamate--tRNA ligase. |
| 6.1.1.18 | Glutamine--tRNA ligase. |
| 6.1.1.19 | Arginine--tRNA ligase. |
| 6.1.1.20 | Phenylalanine--tRNA ligase. |
| 6.1.1.21 | Histidine--tRNA ligase. |
| 6.1.1.22 | Asparagine--tRNA ligase. |
| 6.1.1.23 | Aspartate--tRNA(Asn) ligase. |
| 6.1.1.24 | Glutamate--tRNA(Gln) ligase. |
| 6.1.1.25 | Lysine--tRNA(Pyl) ligase. |
| 6.2.1.1 | Acetate--CoA ligase. |
| 6.2.1.2 | Butyrate--CoA ligase. |
| 6.2.1.3 | Long-chain-fatty-acid--CoA ligase. |
| 6.2.1.4 | Succinate--CoA ligase (GDP-forming). |
| 6.2.1.5 | Succinate--CoA ligase (ADP- |
| | forming). |
| 6.2.1.6 | Glutarate--CoA ligase. |
| 6.2.1.7 | Cholate--CoA ligase. |
| 6.2.1.8 | Oxalate--CoA ligase. |
| 6.2.1.9 | Malate--CoA ligase. |
| 6.2.1.10 | Acid--CoA ligase (GDP-forming). |
| 6.2.1.11 | Biotin--CoA ligase. |
| 6.2.1.12 | 4-coumarate--CoA ligase. |
| 6.2.1.13 | Acetate--CoA ligase (ADP-forming). |
| 6.2.1.14 | 6-carboxyhexanoate--CoA ligase. |
| 6.2.1.15 | Arachidonate--CoA ligase. |
| 6.2.1.16 | Acetoacetate--CoA ligase. |
| 6.2.1.17 | Propionate--CoA ligase. |
| 6.2.1.18 | Citrate--CoA ligase. |
| 6.2.1.19 | Long-chain-fatty-acid--luciferin- |
| | component ligase. |
| 6.2.1.20 | Long-chain-fatty-acid--[acyl-carrier- |
| | protein] ligase. |
| 6.2.1.22 | [Citrate (pro-3S)-lyase] ligase. |
| 6.2.1.23 | Dicarboxylate--CoA ligase. |
| 6.2.1.24 | Phytanate--CoA ligase. |
| 6.2.1.25 | Benzoate--CoA ligase. |
| 6.2.1.26 | O-succinylbenzoate--CoA ligase. |
| 6.2.1.27 | 4-hydroxybenzoate--CoA ligase. |
| 6.2.1.28 | 3-alpha,7-alpha-dihydroxy-5-beta- |
| | cholestanate--CoA ligase. |
| 6.2.1.29 | 3-alpha,7-alpha,12-alpha-trihydroxy- |
| | 5-beta-cholestanate--CoA ligase. |
| 6.2.1.30 | Phenylacetate--CoA ligase. |
| 6.2.1.31 | 2-furoate--CoA ligase. |
| 6.2.1.32 | Anthranilate--CoA ligase. |
| 6.2.1.33 | 4-chlorobenzoate--CoA ligase. |
| 6.2.1.34 | Trans-feruloyl--CoA synthase. |
| 6.3.1.1 | Aspartate--ammonia ligase. |
| 6.3.1.2 | Glutamate--ammonia ligase. |
| 6.3.1.4 | Aspartate--ammonia ligase (ADP- |
| | forming). |
| 6.3.1.5 | NAD(+) synthase. |
| 6.3.1.6 | Glutamate--ethylamine ligase. |
| 6.3.1.7 | 4-methyleneglutamate--ammonia |
| | ligase. |
| 6.3.1.8 | Glutathionylspermidine synthase. |
| 6.3.1.9 | Trypanothione synthase. |
| 6.3.1.10 | Adenosylcobinamide-phosphate |
| | synthase. |
| 6.3.2.1 | Pantoate--beta-alanine ligase. |
| 6.3.2.2 | Glutamate--cysteine ligase. |
| 6.3.2.3 | Glutathione synthase. |
| 6.3.2.4 | D-alanine--D-alanine ligase. |
| 6.3.2.5 | Phosphopantothenate--cysteine ligase. |
| 6.3.2.6 | Phosphoribosylaminoimidazolesuccinocarboxamide |
| | synthase. |
| 6.3.2.7 | UDP-N-acetylmuramoyl-L-alanyl-D- |
| | glutamate--L-lysine ligase. |
| 6.3.2.8 | UDP-N-acetylmuramate--L-alanine |
| | ligase. |
| 6.3.2.9 | UDP-N-acetylmuramoylalanine--D- |
| | glutamate ligase. |
| 6.3.2.10 | UDP-N-acetylmuramoyl-tripeptide-- |
| | D-alanyl-D-alanine ligase. |
| 6.3.2.11 | Carnosine synthase. |
| 6.3.2.12 | Dihydrofolate synthase. |
| 6.3.2.13 | UDP-N-acetylmuramoylalanyl-D- |
| | glutamate--2,6-diaminopimelate ligase. |
| 6.3.2.14 | 2,3-dihydroxybenzoate--serine |
| | ligase. |
| 6.3.2.16 | D-alanine--alanyl- |
| | poly(glycerolphosphate) ligase. |
| 6.3.2.17 | Tetrahydrofolylpolyglutamate |
| | synthase. |
| 6.3.2.18 | Gamma-glutamylhistamine |
| | synthase. |
| 6.3.2.19 | Ubiquitin--protein ligase. |
| 6.3.2.20 | Indoleacetate-lysine synthetase. |
| 6.3.2.21 | Ubiquitin--calmodulin ligase. |
| 6.3.2.22 | Diphthine--ammonia ligase. |
| 6.3.2.23 | Homoglutathione synthase. |
| 6.3.2.24 | Tyrosine--arginine ligase. |
| 6.3.2.25 | Tubulin--tyrosine ligase. |
| 6.3.2.26 | N-(5-amino-5-carboxypentanoyl)-L- |
| | cysteinyl-D-valine synthase. |
| 6.3.2.27 | Aerobactin synthase. |
| 6.3.3.1 | Phosphoribosylformylglycinamidine |
| | cyclo-ligase. |
| 6.3.3.2 | 5-formyltetrahydrofolate cyclo- |
| | ligase. |
| 6.3.3.3 | Dethiobiotin synthase. |
| 6.3.3.4 | (Carboxyethyl)arginine beta-lactam- |
| | synthase. |
| 6.3.4.1 | GMP synthase. |
| 6.3.4.2 | CTP synthase. |
| 6.3.4.3 | Formate--tetrahydrofolate ligase. |
| 6.3.4.4 | Adenylosuccinate synthase. |
| 6.3.4.5 | Argininosuccinate synthase. |
| 6.3.4.6 | Urea carboxylase. |
| 6.3.4.7 | Ribose-5-phosphate--ammonia |
| | ligase. |
| 6.3.4.8 | Imidazoleacetate-- |
| | phosphoribosyldiphosphate ligase. |
| 6.3.4.9 | Biotin--[methylmalonyl-CoA- |
| | carboxytransferase] ligase. |
| 6.3.4.10 | Biotin--[propionyl-CoA- |
| | carboxylase (ATP-hydrolyzing)] ligase. |
| 6.3.4.11 | Biotin--[methylcrotonoyl-CoA- |
| | carboxylase] ligase. |
| 6.3.4.12 | Glutamate--methylamine ligase. |
| 6.3.4.13 | Phosphoribosylamine-glycine |
| | ligase. |
| 6.3.4.14 | Biotin carboxylase. |
| 6.3.4.15 | Biotin--[acetyl-CoA-carboxylase] ligase. |
| 6.3.4.16 | Carbamoyl-phosphate synthase |
| | (ammonia). |
| 6.3.4.17 | Formate--dihydrofolate ligase. |
| 6.3.5.1 | NAD(+) synthase (glutamine- |
| | hydrolyzing). |
| 6.3.5.2 | GMP synthase (glutamine-hydrolyzing). |
| 6.3.5.3 | Phosphoribosylformylglycinamidine |
| | synthase. |
| 6.3.5.4 | Asparagine synthase (glutamine- |
| | hydrolyzing). |
| 6.3.5.5 | Carbamoyl-phosphate synthase |
| | (glutamine-hydrolyzing). |
| 6.3.5.6 | Asparaginyl-tRNA synthase (glutamine- |
| | hydrolyzing). |
| 6.3.5.7 | Glutaminyl-tRNA synthase (glutamine- |
| | hydrolyzing). |
| 6.3.5.8 | Aminodeoxychorismate synthase. |
| 6.3.5.9 | Hydrogenobyrinic acid a,c-diamide |
| | synthase (glutamine-hydrolyzing). |
| 6.3.5.10 | Adenosylcobyric acid synthase |
| | (glutamine-hydrolyzing). |
| 6.4.1.1 | Pyruvate carboxylase. |
| 6.4.1.2 | Acetyl-CoA carboxylase. |
| 6.4.1.3 | Propionyl-CoA carboxylase. |
| 6.4.1.4 | Methylcrotonoyl-CoA carboxylase. |
| 6.4.1.5 | Geranoyl-CoA carboxylase. |
| 6.4.1.6 | Acetone carboxylase. |
| 6.5.1.1 | DNA ligase (ATP). |
| 6.5.1.2 | DNA ligase (NAD+). |
| 6.5.1.3 | RNA ligase (ATP). |
| 6.5.1.4 | RNA-3′-phosphate cyclase. |
| 6.6.1.1 | Magnesium chelatase. |
| 6.6.1.2 | Cobaltochelatase. |
| 6.3.4.17 | Formate--dihydrofolate ligase. |
| 6.3.5.1 | NAD(+) synthase (glutamine- |
| | hydrolyzing). |
| 6.3.5.2 | GMP synthase (glutamine-hydrolyzing). |
| 6.3.5.3 | Phosphoribosylformylglycinamidine |
| | synthase. |
| 6.3.5.4 | Asparagine synthase (glutamine- |
| | hydrolyzing). |
| 6.3.5.5 | Carbamoyl-phosphate synthase |
| | (glutamine-hydrolyzing). |
| 6.3.5.6 | Asparaginyl-tRNA synthase (glutamine- |
| | hydrolyzing). |
| 6.3.5.7 | Glutaminyl-tRNA synthase (glutamine- |
| | hydrolyzing). |
| 6.3.5.8 | Aminodeoxychorismate synthase. |
| 6.3.5.9 | Hydrogenobyrinic acid a,c-diamide |
| | synthase (glutamine-hydrolyzing). |
| 6.3.5.10 | Adenosylcobyric acid synthase (glutamine- |
| | hydrolyzing). |
| 6.4.1.1 | Pyruvate carboxylase. |
| 6.4.1.2 | Acetyl-CoA carboxylase. |
| 6.4.1.3 | Propionyl-CoA carboxylase. |
| 6.4.1.4 | Methylcrotonoyl-CoA carboxylase. |
| 6.4.1.5 | Geranoyl-CoA carboxylase. |
| 6.4.1.6 | Acetone carboxylase. |
| 6.5.1.1 | DNA ligase (ATP). |
| 6.5.1.2 | DNA ligase (NAD+). |
| 6.5.1.3 | RNA ligase (ATP). |
| 6.5.1.4 | RNA-3′-phosphate cyclase. |
| 6.6.1.1 | Magnesium chelatase. |
| 6.6.1.2 | Cobaltochelatase. |

[0308] Table 3 summarizes exemplary functions of exemplary polypeptide and/or peptides (e.g., enzymes and active fragments thereof) of the invention; these enzyme functions were determined using sequence identity comparison analysis using closest BLAST hits to the exemplary polypeptides and polynucleotides of the invention.

[0309] The invention also provides isolated, synthetic and recombinant nucleic acids encoding polypeptides, e.g., SEQ ID NO:1, SEQ ID NO:3, SEQ ID NO:5, SEQ ID NO:7, SEQ ID NO:9, etc., and all additional nucleic acids disclosed in the SEQ ID listing, which include all odd numbered SEQ ID NO:s from SEQ ID NO:1 through SEQ ID NO:108,699 (the exemplary polynucleotides of the invention). The invention also provides isolated, synthetic and recombinant polypeptides, SEQ ID NO:2, SEQ ID NO:4, SEQ ID NO:6, SEQ ID NO:8, SEQ ID NO:10, etc., and all polypeptides disclosed in the SEQ ID listing, which include all even numbered SEQ ID NO:s from SEQ ID NO:2 through SEQ ID NO:108,699 (the exemplary polypeptides of the invention).

[0310] In another embodiment, the polypeptides of the invention can be expressed in any expression system, in vitro or in vivo, e.g., any microorganism or other cell system (e.g., eukaryotic, such as yeast or mammalian cells) using procedures known in the art. In other aspects, the polypeptides of the invention can be immobilized on a solid support prior to use in the methods of the invention. Methods for immobilizing enzymes on solid supports are commonly known in the art, for example J. Mol. Cat. B: Enzymatic 6 (1999) 29-39; Chivata et al. Biocatalysis: Immobilized cells and enzymes, J. Mol. Cat. 37 (1986) 1-24: Sharma et al., Immobilized Biomaterials Techniques and Applications, Angew. Chem. Int. Ed. Engl. 21 (1982) 837-54: Laskin (Ed.), Enzymes and Immobilized Cells in Biotechnology.

### Nucleic Acids

[0311] The invention provides nucleic acids (e.g., the various genuses of polynucleotides based in the exemplary SEQ ID NO:1, SEQ ID NO:3, SEQ ID NO:5, SEQ ID NO:7, SEQ ID NO:9, SEQ ID NO:11, etc., including all nucleic acids disclosed in the SEQ ID listing, which include all odd numbered SEQ ID NO:s from SEQ ID NO:1 through SEQ ID NO:108,699), including expression cassettes such as expression vectors, encoding polypeptides (e.g., enzymes) of the invention. The invention also includes methods for discovering new polypeptide (e.g., enzyme) sequences using the nucleic acids of the invention. The invention also includes methods for inhibiting the expression of enzymes, genes, transcripts and polypeptides using the nucleic acids of the invention. Also provided are methods for modifying the nucleic acids of the invention by, e.g., synthetic ligation reassembly, optimized directed evolution system and/or saturation mutagenesis.

[0312] The nucleic acids of the invention can be made, isolated and/or manipulated by, e.g., cloning and expression of cDNA libraries, amplification of message or genomic DNA by PCR, and the like. For example, exemplary sequences of the invention were initially derived from environmental sources.

[0313] In one aspect, the invention provides nucleic acids, and the polypeptides encoded by them, with a common novelty in that they are derived from a common source, e.g., an environmental or a bacterial source.

[0314] In practicing the methods of the invention, homologous genes can be modified by manipulating a template nucleic acid, as described herein. The invention can be practiced in conjunction with any method or protocol or device known in the art, which are well described in the scientific and patent literature.

[0315] The phrases “nucleic acid” or “nucleic acid sequence” as used herein refer to an oligonucleotide, nucleotide, polynucleotide, or to a fragment of any of these, to DNA or RNA of genomic or synthetic origin which may be single-stranded or double-stranded and may represent a sense or antisense (complementary) strand, to peptide nucleic acid (PNA), or to any DNA-like or RNA-like material, natural or synthetic in origin. The phrases “nucleic acid” or “nucleic acid sequence” includes oligonucleotide, nucleotide, polynucleotide, or to a fragment of any of these, to DNA or RNA (e.g., mRNA, rRNA, tRNA, iRNA) of genomic or synthetic origin which may be single-stranded or double-stranded and may represent a sense or antisense strand, to peptide nucleic acid (PNA), or to any DNA-like or RNA-like material, natural or synthetic in origin, including, e.g., iRNA, ribonucleoproteins (e.g., e.g., double stranded iRNAs, e.g., iRNPs). The term encompasses nucleic acids, i.e., oligonucleotides, containing known analogues of natural nucleotides. The term also encompasses nucleic-acid-like structures with synthetic backbones, see e.g., Mata (1997) Toxicol. Appl. Pharmacol. 144:189-197; Strauss-Soukup (1997) Biochemistry 36:8692-8698; Samstag (1996) Antisense Nucleic Acid Drug Dev 6:153-156. “Oligonucleotide” includes either a single stranded polydeoxynucleotide or two complementary polydeoxynucleotide strands which may be chemically synthesized. Such synthetic oligonucleotides have no 5′ phosphate and thus will not ligate to another oligonucleotide without adding a phosphate with an ATP in the presence of a kinase. A synthetic oligonucleotide can ligate to a fragment that has not been dephosphorylated.

[0316] In one aspect, “coding sequence of” or a “nucleotide sequence encoding” a particular polypeptide or protein, is a nucleic acid sequence which is transcribed and translated into a polypeptide or protein when placed under the control of appropriate regulatory sequences. The term “gene” means the segment of DNA involved in producing a polypeptide chain; it includes regions preceding and following the coding region (leader and trailer) as well as, where applicable, intervening sequences (introns) between individual coding segments (exons). “Operably linked” as used herein refers to a functional relationship between two or more nucleic acid (e.g., DNA) segments. Typically, it refers to the functional relationship of transcriptional regulatory sequence to a transcribed sequence. For example, a promoter is operably linked to a coding sequence, such as a nucleic acid of the invention, if it stimulates or modulates the transcription of the coding sequence in an appropriate host cell or other expression system. Generally, promoter transcriptional regulatory sequences that are operably linked to a transcribed sequence are physically contiguous to the transcribed sequence, i.e., they are cis-acting. However, some transcriptional regulatory sequences, such as enhancers, need not be physically contiguous or located in close proximity to the coding sequences whose transcription they enhance.

[0317] The phrase “substantially identical” in the context of two nucleic acids or polypeptides, refers to two or more sequences that have, e.g., at least about 50%, 51%, 52%, 53%, 54%, 55%, 56%, 57%, 58%, 59%, 60%, 61%, 62%, 63%, 64%, 65%, 66%, 67%, 68%, 69%, 70%, 71%, 72%, 73%, 74%, 75%, 76%, 77%, 78%, 79%, 80%, 81%, 82%, 83%, 84%, 85%, 86%, 87%, 88%, 89%, 90%, 91%, 92%, 93%, 94%, 95%, 96%, 97%, 98%, 99%, or more nucleotide or amino acid residue (sequence) identity, when compared and aligned for maximum correspondence, as measured using one of the known sequence comparison algorithms or by visual inspection. In alternative aspects, the substantial identity exists over a region of at least about 50, 75, 100, 150, 200, 250, 300, 350, 400, 450, 500, 550, 600, 650, 700, 750, 800, 850, 900, 950, 1000, 1050, 1100, 1150, or more residues or alternatively the sequences are substantially identical over at least about 150 to 200 or more residues, or over the full length of the gene and/or the protein coding sequence. In some aspects, the sequences are substantially identical over the entire length of the coding regions.

[0318] The term “variant” refers to polynucleotides or polypeptides of the invention modified at one or more base pairs, codons, introns, exons, or amino acid residues (respectively) yet still retain the biological activity of a polypeptide, enzyme, protein, e.g. structural or binding protein, of the invention. Variants can be produced by any number of means included methods such as, for example, error-prone PCR, shuffling, oligonucleotide-directed mutagenesis, assembly PCR, sexual PCR mutagenesis, in vivo mutagenesis, cassette mutagenesis, recursive ensemble mutagenesis, exponential ensemble mutagenesis, site-specific mutagenesis, gene reassembly, GSSM and any combination thereof.

[0319] The term “saturation mutagenesis”, Gene Site Saturation Mutagenesis, or “GSSM” includes a method that uses degenerate oligonucleotide primers to introduce point mutations into a polynucleotide, as described in detail, below.

[0320] The term “optimized directed evolution system” or “optimized directed evolution” includes a method for reassembling fragments of related nucleic acid sequences, e.g., related genes, and explained in detail, below.

[0321] The term “synthetic ligation reassembly” or “SLR” includes a method of ligating oligonucleotide fragments in a non-stochastic fashion, and explained in detail, below.

[0322] As used herein, the term “promoter” includes all sequences capable of driving transcription of a coding sequence in a cell, e.g., a plant cell. Thus, promoters used in the constructs of the invention include cis-acting transcriptional control elements and regulatory sequences that are involved in regulating or modulating the timing and/or rate of transcription of a gene. For example, a promoter can be a cis-acting transcriptional control element, including an enhancer, a promoter, a transcription terminator, an origin of replication, a chromosomal integration sequence, 5′ and 3′ untranslated regions, or an intronic sequence, which are involved in transcriptional regulation. These cis-acting sequences typically interact with proteins or other biomolecules to carry out (turn on/off, regulate, modulate, etc.) transcription. “Constitutive” promoters are those that drive expression continuously under most environmental conditions and states of development or cell differentiation. “Inducible” or “regulatable” promoters direct expression of the nucleic acid of the invention under the influence of environmental conditions or developmental conditions. Examples of environmental conditions that may affect transcription by inducible promoters include anaerobic conditions, elevated temperature, drought, or the presence of light.

[0323] “Plasmids” can be commercially available, publicly available on an unrestricted basis, or can be constructed from available plasmids in accord with published procedures. Equivalent plasmids to those described herein are known in the art and will be apparent to the ordinarily skilled artisan.

[0324] In one aspect, the term “recombinant” means that the nucleic acid is adjacent to a “backbone” nucleic acid to which it is not adjacent in its natural environment. Additionally, to be “enriched” the nucleic acids will represent 5% or more of the number of nucleic acid inserts in a population of nucleic acid backbone molecules. Backbone molecules according to the invention include nucleic acids such as expression vectors, self-replicating nucleic acids, viruses, integrating nucleic acids and other vectors or nucleic acids used to maintain or manipulate a nucleic acid insert of interest. Typically, the enriched nucleic acids represent 15% or more of the number of nucleic acid inserts in the population of recombinant backbone molecules. More typically, the enriched nucleic acids represent 50% or more of the number of nucleic acid inserts in the population of recombinant backbone molecules. In a one aspect, the enriched nucleic acids represent 90% or more of the number of nucleic acid inserts in the population of recombinant backbone molecules.

[0325] One aspect of the invention is an isolated nucleic acid comprising one of the sequences of the invention, or a fragment comprising at least 10, 15, 20, 25, 30, 35, 40, 50, 75, 100, 150, 200, 300, 400, or 500 or more consecutive bases of a nucleic acid of the invention. The isolated, nucleic acids may comprise DNA, including cDNA, genomic DNA and synthetic DNA. The DNA may be double-stranded or single-stranded and if single stranded may be the coding strand or non-coding (anti-sense) strand. Alternatively, the isolated nucleic acids may comprise RNA.

[0326] The isolated nucleic acids of the invention may be used to prepare one of the polypeptides of the invention, or fragments comprising at least 5, 10, 15, 20, 25, 30, 35, 40, 50, 75, 100, or 150 or more consecutive amino acids of one of the polypeptides of the invention. Accordingly, another aspect of the invention is an isolated nucleic acid which encodes one of the polypeptides of the invention, or fragments comprising at least 5, 10, 15, 20, 25, 30, 35, 40, 50, 75, 100, or 150 or more consecutive amino acids of one of the polypeptides of the invention. The coding sequences of these nucleic acids may be identical to one of the coding sequences of one of the nucleic acids of the invention or may be different coding sequences which encode one of the of the invention having at least 5, 10, 15, 20, 25, 30, 35, 40, 50, 75, 100, or 150 or more consecutive amino acids of one of the polypeptides of the invention, as a result of the redundancy or degeneracy of the genetic code. The genetic code is well known to those of skill in the art and can be obtained, e.g., on page 214 of B. Lewin, Genes VI, Oxford University Press, 1997.

[0327] The isolated nucleic acid which encodes one of the polypeptides of the invention, but is not limited to: only the coding sequence of a nucleic acid of the invention and additional coding sequences, such as leader sequences or proprotein sequences and non-coding sequences, such as introns or non-coding sequences 5′ and/or 3′ of the coding sequence. Thus, as used herein, the term “polynucleotide encoding a polypeptide” encompasses a polynucleotide which includes only the coding sequence for the polypeptide as well as a polynucleotide which includes additional coding and/or non-coding sequence.

[0328] Alternatively, the nucleic acid sequences of the invention, may be mutagenized using conventional techniques, such as site directed mutagenesis, or other techniques familiar to those skilled in the art, to introduce silent changes into the polynucleotides o of the invention. As used herein, “silent changes” include, for example, changes which do not alter the amino acid sequence encoded by the polynucleotide. Such changes may be desirable in order to increase the level of the polypeptide produced by host cells containing a vector encoding the polypeptide by introducing codons or codon pairs which occur frequently in the host organism.

[0329] The invention also relates to polynucleotides which have nucleotide changes which result in amino acid substitutions, additions, deletions, fusions and truncations in the polypeptides of the invention. Such nucleotide changes may be introduced using techniques such as site directed mutagenesis, random chemical mutagenesis, exonuclease III deletion and other recombinant DNA techniques. Alternatively, such nucleotide changes may be naturally occurring allelic variants which are isolated by identifying nucleic acids which specifically hybridize to probes comprising at least 10, 15, 20, 25, 30, 35, 40, 50, 75, 100, 150, 200, 300, 400, or 500 consecutive bases of one of the sequences of the invention (or the sequences complementary thereto) under conditions of high, moderate, or low stringency as provided herein.

[0330] General Techniques

[0331] The nucleic acids used to practice this invention, whether RNA, iRNA, antisense nucleic acid, cDNA, genomic DNA, vectors, viruses or hybrids thereof, may be isolated from a variety of sources, genetically engineered, amplified, and/or expressed/generated recombinantly. Recombinant polypeptides generated from these nucleic acids can be individually isolated, synthetic or cloned and tested for a desired activity. Any recombinant expression system can be used, including bacterial, mammalian, yeast, insect or plant cell expression systems.

[0332] Alternatively, these nucleic acids can be synthesized in vitro by well-known chemical synthesis techniques, as described in, e.g., Adams (1983) J. Am. Chem. Soc. 105:661; Belousov (1997) Nucleic Acids Res. 25:3440-3444; Frenkel (1995) Free Radic. Biol. Med. 19:373-380; Blommers (1994) Biochemistry 33:7886-7896; Narang (1979) Meth. Enzymol. 68:90; Brown (1979) Meth. Enzymol. 68:109; Beaucage (1981) Tetra. Lett. 22:1859; U.S. Pat. No. 4,458,066.

[0333] Techniques for the manipulation of nucleic acids, such as, e.g., subcloning, labeling probes (e.g., random-primer labeling using Klenow polymerase, nick translation, amplification), sequencing, hybridization and the like are well described in the scientific and patent literature, see, e.g., Sambrook, ed., MOLECULAR CLONING: A LABORATORY MANUAL (2ND ED.), Vols. 1-3, Cold Spring Harbor Laboratory, (1989); CURRENT PROTOCOLS 1N MOLECULAR BIOLOGY, Ausubel, ed. John Wiley & Sons, Inc., New York (1997); LABORATORY TECHNIQUES IN BIOCHEMISTRY AND MOLECULAR BIOLOGY: HYBRIDIZATION WITH NUCLEIC ACID PROBES, Part I. Theory and Nucleic Acid Preparation, Tijssen, ed. Elsevier, N.Y. (1993).

[0334] Another useful means of obtaining and manipulating nucleic acids used to practice the methods of the invention is to clone from genomic samples, and, if desired, screen and re-clone inserts isolated, synthetic or amplified from, e.g., genomic clones or cDNA clones. Sources of nucleic acid used in the methods of the invention include genomic or cDNA libraries contained in, e.g., mammalian artificial chromosomes (MACs), see, e.g., U.S. Pat. Nos. 5,721,118; 6,025,155; human artificial chromosomes, see, e.g., Rosenfeld (1997) Nat. Genet. 15:333-335; yeast artificial chromosomes (YAC); bacterial artificial chromosomes (BAC); P1 artificial chromosomes, see, e.g., Woon (1998) Genomics 50:306-316; P1-derived vectors (PACs), see, e.g., Kern (1997) Biotechniques 23:120-124; cosmids, recombinant viruses, phages or plasmids.

[0335] In one aspect, a nucleic acid encoding a polypeptide of the invention is assembled in appropriate phase with a leader sequence capable of directing secretion of the translated polypeptide or fragment thereof.

[0336] The invention provides fusion proteins and nucleic acids encoding them. A polypeptide of the invention can be fused to a heterologous peptide or polypeptide, such as N-terminal identification peptides which impart desired characteristics, such as increased stability or simplified purification. Peptides and polypeptides of the invention can also be synthesized and expressed as fusion proteins with one or more additional domains linked thereto for, e.g., producing a more immunogenic peptide, to more readily isolate a recombinantly synthesized peptide, to identify and isolate antibodies and antibody-expressing B cells, and the like. Detection and purification facilitating domains include, e.g., metal chelating peptides such as polyhistidine tracts and histidine-tryptophan modules that allow purification on immobilized metals, protein A domains that allow purification on immobilized immunoglobulin, and the domain utilized in the FLAGS extension/affinity purification system (Immunex Corp, Seattle Wash.). The inclusion of a cleavable linker sequences such as Factor Xa or enterokinase (Invitrogen, San Diego Calif.) between a purification domain and the motif-comprising peptide or polypeptide to facilitate purification. For example, an expression vector can include an epitope-encoding nucleic acid sequence linked to six histidine residues followed by a thioredoxin and an enterokinase cleavage site (see e.g., Williams (1995) Biochemistry 34:1787-1797; Dobeli (1998) Protein Expr. Purif. 12:404-414). The histidine residues facilitate detection and purification while the enterokinase cleavage site provides a means for purifying the epitope from the remainder of the fusion protein. Technology pertaining to vectors encoding fusion proteins and application of fusion proteins are well described in the scientific and patent literature, see e.g., Kroll (1993) DNA Cell. Biol., 12:441-53.

[0337] Transcriptional and Translational Control Sequences

[0338] The invention provides nucleic acid (e.g., DNA) sequences of the invention operatively linked to expression (e.g., transcriptional or translational) control sequence(s), e.g., promoters or enhancers, to direct or modulate RNA synthesis/expression. The expression control sequence can be in an expression vector. Exemplary bacterial promoters include lacI, lacZ, T3, T7, gpt, lambda PR, PL and trp. Exemplary eukaryotic promoters include CMV immediate early, HSV thymidine kinase, early and late SV40, LTRs from retrovirus, and mouse metallothionein I.

[0339] Promoters suitable for expressing a polypeptide in bacteria include the E. coli lac or trp promoters, the lad promoter, the lacZ promoter, the T3 promoter, the T7 promoter, the gpt promoter, the lambda PR promoter, the lambda PL promoter, promoters from operons encoding glycolytic enzymes such as 3-phosphoglycerate kinase (PGK), and the acid phosphatase promoter. Eukaryotic promoters include the CMV immediate early promoter, the HSV thymidine kinase promoter, heat shock promoters, the early and late SV40 promoter, LTRs from retroviruses, and the mouse metallothionein-I promoter. Other promoters known to control expression of genes in prokaryotic or eukaryotic cells or their viruses may also be used. Promoters suitable for expressing the polypeptide or fragment thereof in bacteria include the E. coli lac or trp promoters, the lad promoter, the lacZ promoter, the T3 promoter, the T7 promoter, the gpt promoter, the lambda P_{R} promoter, the lambda P_{L} promoter, promoters from operons encoding glycolytic enzymes such as 3-phosphoglycerate kinase (PGK) and the acid phosphatase promoter. Fungal promoters include the α-factor promoter. Eukaryotic promoters include the CMV immediate early promoter, the HSV thymidine kinase promoter, heat shock promoters, the early and late SV40 promoter, LTRs from retroviruses and the mouse metallothionein-I promoter. Other promoters known to control expression of genes in prokaryotic or eukaryotic cells or their viruses may also be used.

[0340] Tissue-Specific Promoters

[0341] The invention provides expression cassettes that can be expressed in a tissue-specific manner, e.g., that can express a polypeptide, enzyme, protein, e.g. structural or binding protein, of the invention in a tissue-specific manner. The invention also provides plants or seeds that express a polypeptide, enzyme, protein, e.g. structural or binding protein, of the invention in a tissue-specific manner. The tissue-specificity can be seed specific, stem specific, leaf specific, root specific, fruit specific and the like.

[0342] The term “expression cassette” as used herein refers to a nucleotide sequence which is capable of affecting expression of a structural gene (i.e., a protein coding sequence, such as a polypeptide, enzyme, protein, e.g. structural or binding protein, of the invention) in a host compatible with such sequences. Expression cassettes include at least a promoter operably linked with the polypeptide coding sequence; and, optionally, with other sequences, e.g., transcription termination signals. Additional factors necessary or helpful in effecting expression may also be used, e.g., enhancers, alpha-factors. Thus, expression cassettes also include plasmids, expression vectors, recombinant viruses, any form of recombinant “naked DNA” vector, and the like. A “vector” comprises a nucleic acid which can infect, transfect, transiently or permanently transduce a cell. It will be recognized that a vector can be a naked nucleic acid, or a nucleic acid complexed with protein or lipid. The vector optionally comprises viral or bacterial nucleic acids and/or proteins, and/or membranes (e.g., a cell membrane, a viral lipid envelope, etc.). Vectors include, but are not limited to replicons (e.g., RNA replicons, bacteriophages) to which fragments of DNA may be attached and become replicated. Vectors thus include, but are not limited to RNA, autonomous self-replicating circular or linear DNA or RNA (e.g., plasmids, viruses, and the like, see, e.g., U.S. Pat. No. 5,217,879), and include both the expression and non-expression plasmids. Where a recombinant microorganism or cell culture is described as hosting an “expression vector” this includes both extra-chromosomal circular and linear DNA and DNA that has been incorporated into the host chromosome(s). Where a vector is being maintained by a host cell, the vector may either be stably replicated by the cells during mitosis as an autonomous structure, or is incorporated within the host's genome.

[0343] “Tissue-specific” promoters are transcriptional control elements that are only active in particular cells or tissues or organs, e.g., in plants or animals. Tissue-specific regulation may be achieved by certain intrinsic factors which ensure that genes encoding proteins specific to a given tissue are expressed. Such factors are known to exist in mammals and plants so as to allow for specific tissues to develop.

[0344] The term “plant” includes whole plants, plant parts (e.g., leaves, stems, flowers, roots, etc.), plant protoplasts, seeds and plant cells and progeny of same. The class of plants which can be used in the method of the invention is generally as broad as the class of higher plants amenable to transformation techniques, including angiosperms (monocotyledonous and dicotyledonous plants), as well as gymnosperms. It includes plants of a variety of ploidy levels, including polyploid, diploid, haploid and hemizygous states. As used herein, the term “transgenic plant” includes plants or plant cells into which a heterologous nucleic acid sequence has been inserted, e.g., the nucleic acids and various recombinant constructs (e.g., expression cassettes) of the invention.

[0345] In one aspect, a constitutive promoter such as the CaMV 35S promoter can be used for expression in specific parts of the plant or seed or throughout the plant. For example, for overexpression, a plant promoter fragment can be employed which will direct expression of a nucleic acid in some or all tissues of a plant, e.g., a regenerated plant. Such promoters are referred to herein as “constitutive” promoters and are active under most environmental conditions and states of development or cell differentiation. Examples of constitutive promoters include the cauliflower mosaic virus (CaMV) 35S transcription initiation region, the 1′- or 2′-promoter derived from T-DNA of Agrobacterium tumefaciens, and other transcription initiation regions from various plant genes known to those of skill Such genes include, e.g., ACT11 from Arabidopsis (Huang (1996) Plant Mol. Biol. 33:125-139); Cat3 from Arabidopsis (GenBank No. U43147, Zhong (1996) Mol. Gen. Genet. 251:196-203); the gene encoding stearoyl-acyl carrier protein desaturase from Brassica napus (Genbank No. X74782, Solocombe (1994) Plant Physiol. 104:1167-1176); GPc1 from maize (GenBank No. X15596; Martinez (1989) J. Mol. Biol. 208:551-565); the Gpc2 from maize (GenBank No. U45855, Manjunath (1997) Plant Mol. Biol. 33:97-112); plant promoters described in U.S. Pat. Nos. 4,962,028; 5,633,440.

[0346] The invention uses tissue-specific or constitutive promoters derived from viruses which can include, e.g., the tobamovirus subgenomic promoter (Kumagai (1995) Proc. Natl. Acad. Sci. USA 92:1679-1683; the rice tungro bacilliform virus (RTBV), which replicates only in phloem cells in infected rice plants, with its promoter which drives strong phloem-specific reporter gene expression; the cassaya vein mosaic virus (CVMV) promoter, with highest activity in vascular elements, in leaf mesophyll cells, and in root tips (Verdaguer (1996) Plant Mol. Biol. 31:1129-1139).

[0347] Alternatively, the plant promoter may direct expression of a polypeptide, enzyme, protein, e.g. structural or binding protein-expressing nucleic acid in a specific tissue, organ or cell type (i.e. tissue-specific promoters) or may be otherwise under more precise environmental or developmental control or under the control of an inducible promoter. Examples of environmental conditions that may affect transcription include anaerobic conditions, elevated temperature, the presence of light, or sprayed with chemicals/hormones. For example, the invention incorporates the drought-inducible promoter of maize (Busk (1997) supra); the cold, drought, and high salt inducible promoter from potato (Kirch (1997) Plant Mol. Biol. 33:897-909).

[0348] Tissue-specific promoters can promote transcription only within a certain time frame of developmental stage within that tissue. See, e.g., Blazquez (1998) Plant Cell 10:791-800, characterizing the Arabidopsis LEAFY gene promoter. See also Cardon (1997) Plant J 12:367-77, describing the transcription factor SPL3, which recognizes a conserved sequence motif in the promoter region of the A. thaliana floral meristem identity gene AP1; and Mandel (1995) Plant Molecular Biology, Vol. 29, pp 995-1004, describing the meristem promoter eIF4. Tissue specific promoters which are active throughout the life cycle of a particular tissue can be used. In one aspect, the nucleic acids of the invention are operably linked to a promoter active primarily only in cotton fiber cells. In one aspect, the nucleic acids of the invention are operably linked to a promoter active primarily during the stages of cotton fiber cell elongation, e.g., as described by Rinehart (1996) supra. The nucleic acids can be operably linked to the Fbl2A gene promoter to be preferentially expressed in cotton fiber cells (Ibid). See also, John (1997) Proc. Natl. Acad. Sci. USA 89:5769-5773; John, et al., U.S. Pat. Nos. 5,608,148 and 5,602,321, describing cotton fiber-specific promoters and methods for the construction of transgenic cotton plants. Root-specific promoters may also be used to express the nucleic acids of the invention. Examples of root-specific promoters include the promoter from the alcohol dehydrogenase gene (DeLisle (1990) Int. Rev. Cytol. 123:39-60). Other promoters that can be used to express the nucleic acids of the invention include, e.g., ovule-specific, embryo-specific, endosperm-specific, integument-specific, seed coat-specific promoters, or some combination thereof; a leaf-specific promoter (see, e.g., Busk (1997) Plant J. 11:1285 1295, describing a leaf-specific promoter in maize); the ORF13 promoter from Agrobacterium rhizogenes (which exhibits high activity in roots, see, e.g., Hansen (1997) supra); a maize pollen specific promoter (see, e.g., Guerrero (1990) Mol. Gen. Genet. 224:161 168); a tomato promoter active during fruit ripening, senescence and abscission of leaves and, to a lesser extent, of flowers can be used (see, e.g., Blume (1997) Plant J. 12:731 746); a pistil-specific promoter from the potato SK2 gene (see, e.g., Ficker (1997) Plant Mol. Biol. 35:425 431); the Blec4 gene from pea, which is active in epidermal tissue of vegetative and floral shoot apices of transgenic alfalfa making it a useful tool to target the expression of foreign genes to the epidermal layer of actively growing shoots or fibers; the ovule-specific BEL1 gene (see, e.g., Reiser (1995) Cell 83:735-742, GenBank No. U39944); and/or, the promoter in Klee, U.S. Pat. No. 5,589,583, describing a plant promoter region is capable of conferring high levels of transcription in meristematic tissue and/or rapidly dividing cells.

[0349] Alternatively, plant promoters which are inducible upon exposure to plant hormones, such as auxins, are used to express the nucleic acids of the invention. For example, the invention can use the auxin-response elements E1 promoter fragment (AuxREs) in the soybean (Glycine max L.) (Liu (1997) Plant Physiol. 115:397-407); the auxin-responsive Arabidopsis GST6 promoter (also responsive to salicylic acid and hydrogen peroxide) (Chen (1996) Plant J. 10: 955-966); the auxin-inducible parC promoter from tobacco (Sakai (1996) 37:906-913); a plant biotin response element (Streit (1997) Mol. Plant. Microbe Interact. 10:933-937); and, the promoter responsive to the stress hormone abscisic acid (Sheen (1996) Science 274:1900-1902).

[0350] The nucleic acids of the invention can also be operably linked to plant promoters which are inducible upon exposure to chemicals reagents which can be applied to the plant, such as herbicides or antibiotics. For example, the maize In2-2 promoter, activated by benzenesulfonamide herbicide safeners, can be used (De Veylder (1997) Plant Cell Physiol. 38:568-577); application of different herbicide safeners induces distinct gene expression patterns, including expression in the root, hydathodes, and the shoot apical meristem. Coding sequence can be under the control of, e.g., a tetracycline-inducible promoter, e.g., as described with transgenic tobacco plants containing the Avena sativa L. (oat) arginine decarboxylase gene (Masgrau (1997) Plant J. 11:465-473); or, a salicylic acid-responsive element (Stange (1997) Plant J. 11:1315-1324). Using chemically-(e.g., hormone- or pesticide-) induced promoters, i.e., promoter responsive to a chemical which can be applied to the transgenic plant in the field, expression of a polypeptide of the invention can be induced at a particular stage of development of the plant. Thus, the invention also provides for transgenic plants containing an inducible gene encoding for polypeptides of the invention whose host range is limited to target plant species, such as corn, rice, barley, wheat, potato or other crops, inducible at any stage of development of the crop.

[0351] One of skill will recognize that a tissue-specific plant promoter may drive expression of operably linked sequences in tissues other than the target tissue. Thus, a tissue-specific promoter is one that drives expression preferentially in the target tissue or cell type, but may also lead to some expression in other tissues as well.

[0352] The nucleic acids of the invention can also be operably linked to plant promoters which are inducible upon exposure to chemicals reagents. These reagents include, e.g., herbicides, synthetic auxins, or antibiotics which can be applied, e.g., sprayed, onto transgenic plants. Inducible expression of the polypeptide, enzyme, protein, e.g. structural or binding protein-producing nucleic acids of the invention will allow the grower to select plants with the optimal polypeptide, enzyme, protein, e.g. structural or binding protein, expression and/or activity. The development of plant parts can thus controlled. In this way the invention provides the means to facilitate the harvesting of plants and plant parts. For example, in various embodiments, the maize In2-2 promoter, activated by benzenesulfonamide herbicide safeners, is used (De Veylder (1997) Plant Cell Physiol. 38:568-577); application of different herbicide safeners induces distinct gene expression patterns, including expression in the root, hydathodes, and the shoot apical meristem. Coding sequences of the invention are also under the control of a tetracycline-inducible promoter, e.g., as described with transgenic tobacco plants containing the Avena sativa L. (oat) arginine decarboxylase gene (Masgrau (1997) Plant J. 11:465-473); or, a salicylic acid-responsive element (Stange (1997) Plant J. 11:1315-1324).

[0353] In some aspects, proper polypeptide expression may require polyadenylation region at the 3′-end of the coding region. The polyadenylation region can be derived from the natural gene, from a variety of other plant (or animal or other) genes, or from genes in the Agrobacterial T-DNA.

[0354] Expression Vectors and Cloning Vehicles

[0355] The invention provides expression vectors and cloning vehicles comprising nucleic acids of the invention, e.g., sequences encoding the polypeptide, enzyme, protein, e.g. structural or binding proteins of the invention. Expression vectors and cloning vehicles of the invention can comprise viral particles, baculovirus, phage, plasmids, phagemids, cosmids, fosmids, bacterial artificial chromosomes, viral DNA (e.g., vaccinia, adenovirus, foul pox virus, pseudorabies and derivatives of SV40), P1-based artificial chromosomes, yeast plasmids, yeast artificial chromosomes, and any other vectors specific for specific hosts of interest (such as bacillus, Aspergillus and yeast). Vectors of the invention can include chromosomal, non-chromosomal and synthetic DNA sequences. Large numbers of suitable vectors are known to those of skill in the art, and are commercially available. Exemplary vectors are include: bacterial: pQE vectors (Qiagen), pBLUESCRIPT plasmids, pNH vectors, (lambda-ZAP vectors (Stratagene); ptrc99a, pKK223-3, pDR540, pRIT2T (Pharmacia); Eukaryotic: pXT1, pSG5 (Stratagene), pSVK3, pBPV, pMSG, pSVLSV40 (Pharmacia). However, any other plasmid or other vector may be used so long as they are replicable and viable in the host. Low copy number or high copy number vectors may be employed with the present invention.

[0356] The expression vector can comprise a promoter, a ribosome binding site for translation initiation and a transcription terminator. The vector may also include appropriate sequences for amplifying expression. Mammalian expression vectors can comprise an origin of replication, any necessary ribosome binding sites, a polyadenylation site, splice donor and acceptor sites, transcriptional termination sequences, and 5′ flanking non-transcribed sequences. In some aspects, DNA sequences derived from the SV40 splice and polyadenylation sites may be used to provide the required non-transcribed genetic elements.

[0357] In one aspect, the expression vectors contain one or more selectable marker genes to permit selection of host cells containing the vector. Such selectable markers include genes encoding dihydrofolate reductase or genes conferring neomycin resistance for eukaryotic cell culture, genes conferring tetracycline or ampicillin resistance in E. coli, and the S. cerevisiae TRP1 gene. Promoter regions can be selected from any desired gene using chloramphenicol transferase (CAT) vectors or other vectors with selectable markers.

[0358] Vectors for expressing the polypeptide or fragment thereof in eukaryotic cells can also contain enhancers to increase expression levels. Enhancers are cis-acting elements of DNA that can be from about 10 to about 300 bp in length. They can act on a promoter to increase its transcription. Exemplary enhancers include the SV40 enhancer on the late side of the replication origin bp 100 to 270, the cytomegalovirus early promoter enhancer, the polyoma enhancer on the late side of the replication origin, and the adenovirus enhancers.

[0359] A nucleic acid sequence can be inserted into a vector by a variety of procedures. In general, the sequence is ligated to the desired position in the vector following digestion of the insert and the vector with appropriate restriction endonucleases. Alternatively, blunt ends in both the insert and the vector may be ligated. A variety of cloning techniques are known in the art, e.g., as described in Ausubel and Sambrook. Such procedures and others are deemed to be within the scope of those skilled in the art.

[0360] The vector can be in the form of a plasmid, a viral particle, or a phage. Other vectors include chromosomal, non-chromosomal and synthetic DNA sequences, derivatives of SV40; bacterial plasmids, phage DNA, baculovirus, yeast plasmids, vectors derived from combinations of plasmids and phage DNA, viral DNA such as vaccinia, adenovirus, fowl pox virus, and pseudorabies. A variety of cloning and expression vectors for use with prokaryotic and eukaryotic hosts are described by, e.g., Sambrook.

[0361] Particular bacterial vectors which can be used include the commercially available plasmids comprising genetic elements of the well known cloning vector pBR322 (ATCC 37017), pKK223-3 (Pharmacia Fine Chemicals, Uppsala, Sweden), GEM1 (Promega Biotec, Madison, Wis., USA) pQE70, pQE60, pQE-9 (Qiagen), pD10, psiX174 pBLUESCRIPT II KS, pNH8A, pNH16a, pNH18A, pNH46A (Stratagene), ptrc99a, pKK223-3, pKK233-3, DR540, pRIT5 (Pharmacia), pKK232-8 and pCM7. Particular eukaryotic vectors include pSV2CAT, pOG44, pXT1, pSG (Stratagene) pSVK3, pBPV, pMSG, and pSVL (Pharmacia). However, any other vector may be used as long as it is replicable and viable in the host cell.

[0362] The nucleic acids of the invention can be expressed in expression cassettes, vectors or viruses and transiently or stably expressed in plant cells and seeds. One exemplary transient expression system uses episomal expression systems, e.g., cauliflower mosaic virus (CaMV) viral RNA generated in the nucleus by transcription of an episomal mini-chromosome containing supercoiled DNA, see, e.g., Covey (1990) Proc. Natl. Acad. Sci. USA 87:1633-1637. Alternatively, coding sequences, i.e., all or sub-fragments of sequences of the invention can be inserted into a plant host cell genome becoming an integral part of the host chromosomal DNA. Sense or antisense transcripts can be expressed in this manner. A vector comprising the sequences (e.g., promoters or coding regions) from nucleic acids of the invention can comprise a marker gene that confers a selectable phenotype on a plant cell or a seed. For example, the marker may encode biocide resistance, particularly antibiotic resistance, such as resistance to kanamycin, G418, bleomycin, hygromycin, or herbicide resistance, such as resistance to chlorosulfuron or Basta.

[0363] Expression vectors capable of expressing nucleic acids and proteins in plants are well known in the art, and can include, e.g., vectors from Agrobacterium spp., potato virus X (see, e.g., Angell (1997) EMBO J. 16:3675-3684), tobacco mosaic virus (see, e.g., Casper (1996) Gene 173:69-73), tomato bushy stunt virus (see, e.g., Hillman (1989) Virology 169:42-50), tobacco etch virus (see, e.g., Dolja (1997) Virology 234:243-252), bean golden mosaic virus (see, e.g., Morinaga (1993) Microbiol Immunol. 37:471-476), cauliflower mosaic virus (see, e.g., Cecchini (1997) Mol. Plant. Microbe Interact. 10:1094-1101), maize Ac/Ds transposable element (see, e.g., Rubin (1997) Mol. Cell. Biol. 17:6294-6302; Kunze (1996) Curr. Top. Microbiol. Immunol. 204:161-194), and the maize suppressor-mutator (Spm) transposable element (see, e.g., Schlappi (1996) Plant Mol. Biol. 32:717-725); and derivatives thereof.

[0364] In one aspect, the expression vector can have two replication systems to allow it to be maintained in two organisms, for example in mammalian or insect cells for expression and in a prokaryotic host for cloning and amplification. Furthermore, for integrating expression vectors, the expression vector can contain at least one sequence homologous to the host cell genome. It can contain two homologous sequences which flank the expression construct. The integrating vector can be directed to a specific locus in the host cell by selecting the appropriate homologous sequence for inclusion in the vector. Constructs for integrating vectors are well known in the art.

[0365] Expression vectors of the invention may also include a selectable marker gene to allow for the selection of bacterial strains that have been transformed, e.g., genes which render the bacteria resistant to drugs such as ampicillin, chloramphenicol, erythromycin, kanamycin, neomycin and tetracycline. Selectable markers can also include biosynthetic genes, such as those in the histidine, tryptophan and leucine biosynthetic pathways.

[0366] The DNA sequence in the expression vector is operatively linked to an appropriate expression control sequence(s) (promoter) to direct RNA synthesis. Particular named bacterial promoters include lad, lacZ, T3, T7, gpt, lambda P_{R}, P_{L} and trp. Eukaryotic promoters include CMV immediate early, HSV thymidine kinase, early and late SV40, LTRs from retrovirus and mouse metallothionein-I. Selection of the appropriate vector and promoter is well within the level of ordinary skill in the art. The expression vector also contains a ribosome binding site for translation initiation and a transcription terminator. The vector may also include appropriate sequences for amplifying expression. Promoter regions can be selected from any desired gene using chloramphenicol transferase (CAT) vectors or other vectors with selectable markers. In addition, the expression vectors in one aspect contain one or more selectable marker genes to provide a phenotypic trait for selection of transformed host cells such as dihydrofolate reductase or neomycin resistance for eukaryotic cell culture, or such as tetracycline or ampicillin resistance in E. coli.

[0367] Mammalian expression vectors may also comprise an origin of replication, any necessary ribosome binding sites, a polyadenylation site, splice donor and acceptor sites, transcriptional termination sequences and 5′ flanking nontranscribed sequences. In some aspects, DNA sequences derived from the SV40 splice and polyadenylation sites may be used to provide the required nontranscribed genetic elements.

[0368] Vectors for expressing the polypeptide or fragment thereof in eukaryotic cells may also contain enhancers to increase expression levels. Enhancers are cis-acting elements of DNA, usually from about 10 to about 300 bp in length that act on a promoter to increase its transcription. Examples include the SV40 enhancer on the late side of the replication origin bp 100 to 270, the cytomegalovirus early promoter enhancer, the polyoma enhancer on the late side of the replication origin and the adenovirus enhancers.

[0369] In addition, the expression vectors typically contain one or more selectable marker genes to permit selection of host cells containing the vector. Such selectable markers include genes encoding dihydrofolate reductase or genes conferring neomycin resistance for eukaryotic cell culture, genes conferring tetracycline or ampicillin resistance in E. coli and the S. cerevisiae TRP1 gene.

[0370] In some aspects, the nucleic acid encoding one of the polypeptides of the invention, or fragments comprising at least about 5, 10, 15, 20, 25, 30, 35, 40, 50, 75, 100, or 150 consecutive amino acids thereof is assembled in appropriate phase with a leader sequence capable of directing secretion of the translated polypeptide or fragment thereof. Optionally, the nucleic acid can encode a fusion polypeptide in which one of the polypeptides of the invention, or fragments comprising at least 5, 10, 15, 20, 25, 30, 35, 40, 50, 75, 100, or 150 consecutive amino acids thereof is fused to heterologous peptides or polypeptides, such as N-terminal identification peptides which impart desired characteristics, such as increased stability or simplified purification.

[0371] The appropriate DNA sequence may be inserted into the vector by a variety of procedures. In general, the DNA sequence is ligated to the desired position in the vector following digestion of the insert and the vector with appropriate restriction endonucleases. Alternatively, blunt ends in both the insert and the vector may be ligated. A variety of cloning techniques are disclosed in Ausubel et al. Current Protocols in Molecular Biology, John Wiley 503 Sons, Inc. 1997 and Sambrook et al., Molecular Cloning: A Laboratory Manual 2nd Ed., Cold Spring Harbor Laboratory Press (1989. Such procedures and others are deemed to be within the scope of those skilled in the art.

[0372] The vector may be, for example, in the form of a plasmid, a viral particle, or a phage. Other vectors include chromosomal, nonchromosomal and synthetic DNA sequences, derivatives of SV40; bacterial plasmids, phage DNA, baculovirus, yeast plasmids, vectors derived from combinations of plasmids and phage DNA, viral DNA such as vaccinia, adenovirus, fowl pox virus and pseudorabies. A variety of cloning and expression vectors for use with prokaryotic and eukaryotic hosts are described by Sambrook, et al., Molecular Cloning: A Laboratory Manual, 2nd Ed., Cold Spring Harbor, N.Y., (1989).

[0373] Host Cells and Transformed Cells

[0374] The invention also provides a transformed cell comprising a nucleic acid sequence of the invention, e.g., a sequence encoding a polypeptide, enzyme, protein, e.g. structural or binding protein, of the invention, or a vector of the invention. The host cell may be any of the host cells familiar to those skilled in the art, including prokaryotic cells, eukaryotic cells, such as bacterial cells, fungal cells, yeast cells, mammalian cells, insect cells, or plant cells. Exemplary bacterial cells include any species of Streptomyces, Staphylococcus, Pseudomonas or Bacillus, including E. coli, Bacillus subtilis, Pseudomonas fluorescens, Bacillus cereus, or Salmonella typhimurium. Exemplary fungal cells include any species of Aspergillus. Exemplary yeast cells include any species of Pichia, Saccharomyces, Schizosaccharomyces, or Schwanniomyces, including Pichia pastoris, Saccharomyces cerevisiae, or Schizosaccharomyces pombe. Exemplary insect cells include any species of Spodoptera or Drosophila, including Drosophila S2 and Spodoptera Sf9. Exemplary animal cells include CHO, COS or Bowes melanoma or any mouse or human cell line. The selection of an appropriate host is within the abilities of those skilled in the art. Techniques for transforming a wide variety of higher plant species are well known and described in the technical and scientific literature. See, e.g., Weising (1988) Ann. Rev. Genet. 22:421-477; U.S. Pat. No. 5,750,870.

[0375] The vector can be introduced into the host cells using any of a variety of techniques, including transformation, transfection, transduction, viral infection, gene guns, or Ti-mediated gene transfer. Particular methods include calcium phosphate transfection, DEAE-Dextran mediated transfection, lipofection, or electroporation (Davis, L., Dibner, M., Battey, I., Basic Methods in Molecular Biology, (1986)).

[0376] In one aspect, the nucleic acids or vectors of the invention are introduced into the cells for screening, thus, the nucleic acids enter the cells in a manner suitable for subsequent expression of the nucleic acid. The method of introduction is largely dictated by the targeted cell type. Exemplary methods include CaPO₄ precipitation, liposome fusion, lipofection (e.g., LIPOFECTIN™), electroporation, viral infection, etc. The candidate nucleic acids may stably integrate into the genome of the host cell (for example, with retroviral introduction) or may exist either transiently or stably in the cytoplasm (i.e. through the use of traditional plasmids, utilizing standard regulatory sequences, selection markers, etc.). As many pharmaceutically important screens require human or model mammalian cell targets, retroviral vectors capable of transfecting such targets can be used.

[0377] Where appropriate, the engineered host cells can be cultured in conventional nutrient media modified as appropriate for activating promoters, selecting transformants or amplifying the genes of the invention. Following transformation of a suitable host strain and growth of the host strain to an appropriate cell density, the selected promoter may be induced by appropriate means (e.g., temperature shift or chemical induction) and the cells may be cultured for an additional period to allow them to produce the desired polypeptide or fragment thereof.

[0378] Cells can be harvested by centrifugation, disrupted by physical or chemical means, and the resulting crude extract is retained for further purification. Microbial cells employed for expression of proteins can be disrupted by any convenient method, including freeze-thaw cycling, sonication, mechanical disruption, or use of cell lysing agents. Such methods are well known to those skilled in the art. The expressed polypeptide or fragment thereof can be recovered and purified from recombinant cell cultures by methods including ammonium sulfate or ethanol precipitation, acid extraction, anion or cation exchange chromatography, phosphocellulose chromatography, hydrophobic interaction chromatography, affinity chromatography, hydroxylapatite chromatography and lectin chromatography. Protein refolding steps can be used, as necessary, in completing configuration of the polypeptide. If desired, high performance liquid chromatography (HPLC) can be employed for final purification steps.

[0379] The constructs in host cells can be used in a conventional manner to produce the gene product encoded by the recombinant sequence. Depending upon the host employed in a recombinant production procedure, the polypeptides produced by host cells containing the vector may be glycosylated or may be non-glycosylated. Polypeptides of the invention may or may not also include an initial methionine amino acid residue.

[0380] Cell-free translation systems can also be employed to produce a polypeptide of the invention. Cell-free translation systems can use mRNAs transcribed from a DNA construct comprising a promoter operably linked to a nucleic acid encoding the polypeptide or fragment thereof. In some aspects, the DNA construct may be linearized prior to conducting an in vitro transcription reaction. The transcribed mRNA is then incubated with an appropriate cell-free translation extract, such as a rabbit reticulocyte extract, to produce the desired polypeptide or fragment thereof.

[0381] The expression vectors can contain one or more selectable marker genes to provide a phenotypic trait for selection of transformed host cells such as dihydrofolate reductase or neomycin resistance for eukaryotic cell culture, or such as tetracycline or ampicillin resistance in E. coli.

[0382] Host cells containing the polynucleotides of interest, e.g., nucleic acids of the invention, can be cultured in conventional nutrient media modified as appropriate for activating promoters, selecting transformants or amplifying genes. The culture conditions, such as temperature, pH and the like, are those previously used with the host cell selected for expression and will be apparent to the ordinarily skilled artisan. The clones which are identified as having the specified enzyme activity, binding activity and/or structural activity may then be sequenced to identify the polynucleotide sequence encoding an enzyme having the enhanced enzyme activity, binding activity and/or structural activity.

[0383] The invention provides a method for overexpressing a recombinant polypeptide, enzyme, protein, e.g. structural or binding protein, in a cell comprising expressing a vector comprising a nucleic acid of the invention, e.g., a nucleic acid comprising a nucleic acid sequence with at least about 50%, 51%, 52%, 53%, 54%, 55%, 56%, 57%, 58%, 59%, 60%, 61%, 62%, 63%, 64%, 65%, 66%, 67%, 68%, 69%, 70%, 71%, 72%, 73%, 74%, 75%, 76%, 77%, 78%, 79%, 80%, 81%, 82%, 83%, 84%, 85%, 86%, 87%, 88%, 89%, 90%, 91%, 92%, 93%, 94%, 95%, 96%, 97%, 98%, 99%, or more sequence identity to an exemplary sequence of the invention over a region of at least about 100 residues, wherein the sequence identities are determined by analysis with a sequence comparison algorithm or by visual inspection, or, a nucleic acid that hybridizes under stringent conditions to a nucleic acid sequence of the invention. The overexpression can be effected by any means, e.g., use of a high activity promoter, a dicistronic vector or by gene amplification of the vector.

[0384] The nucleic acids of the invention can be expressed, or overexpressed, in any in vitro or in vivo expression system. Any cell culture systems can be employed to express, or over-express, recombinant protein, including bacterial, insect, yeast, fungal or mammalian cultures. Over-expression can be effected by appropriate choice of promoters, enhancers, vectors (e.g., use of replicon vectors, dicistronic vectors (see, e.g., Gurtu (1996) Biochem. Biophys. Res. Commun. 229:295-8), media, culture systems and the like. In one aspect, gene amplification using selection markers, e.g., glutamine synthetase (see, e.g., Sanders (1987) Dev. Biol. Stand. 66:55-63), in cell systems are used to overexpress the polypeptides of the invention.

[0385] The host cell may be any of the host cells familiar to those skilled in the art, including prokaryotic cells, eukaryotic cells, mammalian cells, insect cells, or plant cells. As representative examples of appropriate hosts, there may be mentioned: bacterial cells, such as E. coli, Streptomyces, Bacillus subtilis, Bacillus cereus, Salmonella typhimurium and various species within the genera Pseudomonas, Streptomyces and Staphylococcus, fungal cells, such as Aspergillus, yeast such as any species of Pichia, Saccharomyces, Schizosaccharomyces, Schwanniomyces, including Pichia pastoris, Saccharomyces cerevisiae, or Schizosaccharomyces pombe, insect cells such as Drosophila S2 and Spodoptera Sf9, animal cells such as CHO, COS or Bowes melanoma and adenoviruses. The selection of an appropriate host is within the abilities of those skilled in the art.

[0386] The vector may be introduced into the host cells using any of a variety of techniques, including transformation, transfection, transduction, viral infection, gene guns, or Ti-mediated gene transfer. Particular methods include calcium phosphate transfection, DEAE-Dextran mediated transfection, lipofection, or electroporation (Davis, L., Dibner, M., Battey, I., Basic Methods in Molecular Biology, (1986)).

[0387] Where appropriate, the engineered host cells can be cultured in conventional nutrient media modified as appropriate for activating promoters, selecting transformants or amplifying the genes of the invention. Following transformation of a suitable host strain and growth of the host strain to an appropriate cell density, the selected promoter may be induced by appropriate means (e.g., temperature shift or chemical induction) and the cells may be cultured for an additional period to allow them to produce the desired polypeptide or fragment thereof.

[0388] Cells are typically harvested by centrifugation, disrupted by physical or chemical means and the resulting crude extract is retained for further purification. Microbial cells employed for expression of proteins can be disrupted by any convenient method, including freeze-thaw cycling, sonication, mechanical disruption, or use of cell lysing agents. Such methods are well known to those skilled in the art. The expressed polypeptide or fragment thereof can be recovered and purified from recombinant cell cultures by methods including ammonium sulfate or ethanol precipitation, acid extraction, anion or cation exchange chromatography, phosphocellulose chromatography, hydrophobic interaction chromatography, affinity chromatography, hydroxylapatite chromatography and lectin chromatography. Protein refolding steps can be used, as necessary, in completing configuration of the polypeptide. If desired, high performance liquid chromatography (HPLC) can be employed for final purification steps.

[0389] Various mammalian cell culture systems can also be employed to express recombinant protein. Examples of mammalian expression systems include the COS-7 lines of monkey kidney fibroblasts (described by Gluzman, Cell, 23:175, 1981) and other cell lines capable of expressing proteins from a compatible vector, such as the C127, 3T3, CHO, HeLa and BHK cell lines.

[0390] The constructs in host cells can be used in a conventional manner to produce the gene product encoded by the recombinant sequence. Depending upon the host employed in a recombinant production procedure, the polypeptides produced by host cells containing the vector may be glycosylated or may be non-glycosylated. Polypeptides of the invention may or may not also include an initial methionine amino acid residue.

[0391] Alternatively, the polypeptides of the invention, or fragments comprising at least 5, 10, 15, 20, 25, 30, 35, 40, 50, 75, 100, or 150 or more consecutive amino acids thereof can be synthetically produced by conventional peptide synthesizers. In other aspects, fragments or portions of the polypeptides may be employed for producing the corresponding full-length polypeptide by peptide synthesis; therefore, the fragments may be employed as intermediates for producing the full-length polypeptides.

[0392] Cell-free translation systems can also be employed to produce one of the polypeptides of the invention, or fragments comprising at least 5, 10, 15, 20, 25, 30, 35, 40, 50, 75, 100, or 150 or more consecutive amino acids thereof using mRNAs transcribed from a DNA construct comprising a promoter operably linked to a nucleic acid encoding the polypeptide or fragment thereof. In some aspects, the DNA construct may be linearized prior to conducting an in vitro transcription reaction. The transcribed mRNA is then incubated with an appropriate cell-free translation extract, such as a rabbit reticulocyte extract, to produce the desired polypeptide or fragment thereof.

[0393] Amplification of Nucleic Acids

[0394] In practicing the invention, nucleic acids encoding the polypeptides of the invention, or modified nucleic acids, can be reproduced by, e.g., amplification. The invention provides amplification primer sequence pairs for amplifying nucleic acids encoding polypeptides (e.g., enzymes) of the invention. In one aspect, the primer pairs are capable of amplifying nucleic acid sequences of the invention, e.g., including the exemplary SEQ ID NO:1, SEQ ID NO:3, SEQ ID NO:5, SEQ ID NO:7, SEQ ID NO:9, SEQ ID NO:11, etc., including all nucleic acids disclosed in the SEQ ID listing, which include all odd numbered SEQ ID NO:s from SEQ ID NO:1 through SEQ ID NO:108,699, or a subsequence thereof, etc. One of skill in the art can design amplification primer sequence pairs for any part of or the full length of these sequences.

[0395] In one aspect, the invention provides a nucleic acid amplified by a primer pair of the invention, e.g., a primer pair as set forth by about the first (the 5′) 12, 13, 14, 15, 16, 17, 18, 19, 20, 21, 22, 23, 24, or 25 or more residues of a nucleic acid of the invention, and about the first (the 5′) 15, 16, 17, 18, 19, 20, 21, 22, 23, 24, or 25 or more residues of the complementary strand.

[0396] The invention provides an amplification primer sequence pair for amplifying a nucleic acid encoding a polypeptide having an enzyme, structural or binding activity, wherein the primer pair is capable of amplifying a nucleic acid comprising a sequence of the invention, or fragments or subsequences thereof. One or each member of the amplification primer sequence pair can comprise an oligonucleotide comprising at least about 10 to 50 or more consecutive bases of the sequence, or about 12, 13, 14, 15, 16, 17, 18, 19, 20, 21, 22, 23, 24, or 25 or more consecutive bases of the sequence. The invention provides amplification primer pairs, wherein the primer pair comprises a first member having a sequence as set forth by about the first (the 5′) 12, 13, 14, 15, 16, 17, 18, 19, 20, 21, 22, 23, 24, or 25 or more residues of a nucleic acid of the invention, and a second member having a sequence as set forth by about the first (the 5′) 12, 13, 14, 15, 16, 17, 18, 19, 20, 21, 22, 23, 24, or 25 or more residues of the complementary strand of the first member. The invention provides a polypeptide, enzyme, protein, e.g. structural or binding protein, generated by amplification, e.g., polymerase chain reaction (PCR), using an amplification primer pair of the invention. The invention provides methods of making a polypeptide, enzyme, protein, e.g. structural or binding protein, by amplification, e.g., polymerase chain reaction (PCR), using an amplification primer pair of the invention. In one aspect, the amplification primer pair amplifies a nucleic acid from a library, e.g., a gene library, such as an environmental library.

[0397] Amplification reactions can also be used to quantify the amount of nucleic acid in a sample (such as the amount of message in a cell sample), label the nucleic acid (e.g., to apply it to an array or a blot), detect the nucleic acid, or quantify the amount of a specific nucleic acid in a sample. In one aspect of the invention, message isolated from a cell or a cDNA library are amplified.

[0398] The skilled artisan can select and design suitable oligonucleotide amplification primers. Amplification methods are also well known in the art, and include, e.g., polymerase chain reaction, PCR (see, e.g., PCR PROTOCOLS, A GUIDE TO METHODS AND APPLICATIONS, ed. Innis, Academic Press, N.Y. (1990) and PCR STRATEGIES (1995), ed. Innis, Academic Press, Inc., N.Y., ligase chain reaction (LCR) (see, e.g., Wu (1989) Genomics 4:560; Landegren (1988) Science 241:1077; Barringer (1990) Gene 89:117); transcription amplification (see, e.g., Kwoh (1989) Proc. Natl. Acad. Sci. USA 86:1173); and, self-sustained sequence replication (see, e.g., Guatelli (1990) Proc. Natl. Acad. Sci. USA 87:1874); Q Beta replicase amplification (see, e.g., Smith (1997) J. Clin. Microbiol. 35:1477-1491), automated Q-beta replicase amplification assay (see, e.g., Burg (1996) Mol. Cell. Probes 10:257-271) and other RNA polymerase mediated techniques (e.g., NASBA, Cangene, Mississauga, Ontario); see also Berger (1987) Methods Enzymol. 152:307-316; Sambrook; Ausubel; U.S. Pat. Nos. 4,683,195 and 4,683,202; Sooknanan (1995) Biotechnology 13:563-564.

### Determining the Degree of Sequence Identity

[0399] The invention provides nucleic acids comprising sequences having at least about 50%, 51%, 52%, 53%, 54%, 55%, 56%, 57%, 58%, 59%, 60%, 61%, 62%, 63%, 64%, 65%, 66%, 67%, 68%, 69%, 70%, 71%, 72%, 73%, 74%, 75%, 76%, 77%, 78%, 79%, 80%, 81%, 82%, 83%, 84%, 85%, 86%, 87%, 88%, 89%, 90%, 91%, 92%, 93%, 94%, 95%, 96%, 97%, 98%, 99%, or more, or complete (100%) sequence identity to an exemplary nucleic acid of the invention (e.g., SEQ ID NO:1, SEQ ID NO:3, SEQ ID NO:5, SEQ ID NO:7, SEQ ID NO:9, SEQ ID NO:11, etc., including all nucleic acids disclosed in the SEQ ID listing, which include all even numbered SEQ ID NO:s from SEQ ID NO:1 through SEQ ID NO:108,699, and nucleic acids encoding SEQ ID NO:2, SEQ ID NO:4, SEQ ID NO:6, SEQ ID NO:8, SEQ ID NO:10, etc., and all polypeptides disclosed in the SEQ ID listing, which include all even numbered SEQ ID NO:s from SEQ ID NO:2 through SEQ ID NO:108,699) over a region of at least about 50, 75, 100, 150, 200, 250, 300, 350, 400, 450, 500, 550, 600, 650, 700, 750, 800, 850, 900, 950, 1000, 1050, 1100, 1150, 1200, 1250, 1300, 1350, 1400, 1450, 1500, 1550 or more, residues. The invention provides polypeptides comprising sequences having at least about 50%, 51%, 52%, 53%, 54%, 55%, 56%, 57%, 58%, 59%, 60%, 61%, 62%, 63%, 64%, 65%, 66%, 67%, 68%, 69%, 70%, 71%, 72%, 73%, 74%, 75%, 76%, 77%, 78%, 79%, 80%, 81%, 82%, 83%, 84%, 85%, 86%, 87%, 88%, 89%, 90%, 91%, 92%, 93%, 94%, 95%, 96%, 97%, 98%, 99%, or more, or complete (100%) sequence identity to an exemplary polypeptide of the invention. The extent of sequence identity (homology) may be determined using any computer program and associated parameters, including those described herein, such as BLAST 2.2.2. or FASTA version 3.0t78, with the default parameters.

[0400] As used herein, the terms “computer,” “computer program” and “processor” are used in their broadest general contexts and incorporate all such devices, as described in detail, below.

[0401] Nucleic acid sequences of the invention can comprise at least 10, 15, 20, 25, 30, 35, 40, 50, 75, 100, 150, 200, 300, 400, or 500 or more consecutive nucleotides of an exemplary sequence of the invention and sequences substantially identical thereto. Homologous sequences and fragments of nucleic acid sequences of the invention can refer to a sequence having at least about 50%, 51%, 52%, 53%, 54%, 55%, 56%, 57%, 58%, 59%, 60%, 61%, 62%, 63%, 64%, 65%, 66%, 67%, 68%, 69%, 70%, 71%, 72%, 73%, 74%, 75%, 76%, 77%, 78%, 79%, 80%, 81%, 82%, 83%, 84%, 85%, 86%, 87%, 88%, 89%, 90%, 91%, 92%, 93%, 94%, 95%, 96%, 97%, 98%, 99%, or more sequence identity (homology) to these sequences. Homology (sequence identity) may be determined using any of the computer programs and parameters described herein, including FASTA version 3.0t78 with the default parameters. Homologous sequences also include RNA sequences in which uridines replace the thymines in the nucleic acid sequences of the invention. The homologous sequences may be obtained using any of the procedures described herein or may result from the correction of a sequencing error. It will be appreciated that the nucleic acid sequences of the invention can be represented in the traditional single character format (See the inside back cover of Stryer, Lubert. Biochemistry, 3rd Ed., W. H Freeman & Co., New York.) or in any other format which records the identity of the nucleotides in a sequence.

[0402] Various sequence comparison programs identified elsewhere in this patent specification are particularly contemplated for use in this aspect of the invention. Protein and/or nucleic acid sequence homologies may be evaluated using any of the variety of sequence comparison algorithms and programs known in the art. Such algorithms and programs include, but are by no means limited to, TBLASTN, BLASTP, FASTA, TFASTA and CLUSTALW (see, e.g., Pearson and Lipman, Proc. Natl. Acad. Sci. USA 85(8):2444-2448, 1988; Altschul et al., J. Mol. Biol. 215(3):403-410, 1990; Thompson Nucleic Acids Res. 22(2):4673-4680, 1994; Higgins et al., Methods Enzymol. 266:383-402, 1996; Altschul et al., J. Mol. Biol. 215(3):403-410, 1990; Altschul et al., Nature Genetics 3:266-272, 1993).

[0403] Homology or identity is often measured using sequence analysis software (e.g., Sequence Analysis Software Package of the Genetics Computer Group, University of Wisconsin Biotechnology Center, 1710 University Avenue, Madison, Wis. 53705). Such software matches similar sequences by assigning degrees of homology to various deletions, substitutions and other modifications. The terms “homology” and “identity” in the context of two or more nucleic acids or polypeptide sequences, refer to two or more sequences or subsequences that are the same or have a specified percentage of amino acid residues or nucleotides that are the same when compared and aligned for maximum correspondence over a comparison window or designated region as measured using any number of sequence comparison algorithms or by manual alignment and visual inspection.

[0404] For sequence comparison, typically one sequence acts as a reference sequence, to which test sequences are compared. When using a sequence comparison algorithm, test and reference sequences are entered into a computer, subsequence coordinates are designated, if necessary and sequence algorithm program parameters are designated. Default program parameters can be used, or alternative parameters can be designated. The sequence comparison algorithm then calculates the percent sequence identities for the test sequences relative to the reference sequence, based on the program parameters.

[0405] A “comparison window”, as used herein, includes reference to a segment of any one of the number of contiguous positions selected from the group consisting of from 20 to 600, usually about 50 to about 200, more usually about 100 to about 150 in which a sequence may be compared to a reference sequence of the same number of contiguous positions after the two sequences are optimally aligned. Methods of alignment of sequence for comparison are well-known in the art. Optimal alignment of sequences for comparison can be conducted, e.g., by the local homology algorithm of Smith & Waterman, Adv. Appl. Math. 2:482, 1981, by the homology alignment algorithm of Needleman & Wunsch, J. Mol. Biol. 48:443, 1970, by the search for similarity method of person & Lipman, Proc. Nat'l. Acad. Sci. USA 85:2444, 1988, by computerized implementations of these algorithms (GAP™ BESTFITT™, FASTA and TFASTA in the Wisconsin Genetics Software Package, Genetics Computer Group, 575 Science Dr., Madison, Wis.), or by manual alignment and visual inspection. Other algorithms for determining homology or identity include, for example, in addition to a BLAST program (Basic Local Alignment Search Tool at the National Center for Biological Information), ALIGN™, AMAS (Analysis of Multiply Aligned Sequences), AMPS (Protein Multiple Sequence Alignment), ASSET (Aligned Segment Statistical Evaluation Tool), BANDS, BESTSCOR, BIOSCAN (Biological Sequence Comparative Analysis Node), BLIMPS (BLocks IMProved Searcher), FASTA, Intervals & Points, BMB, CLUSTAL V, CLUSTAL W, CONSENSUS, LCONSENSUS, WCONSENSUS, Smith-Waterman algorithm, DARWIN™, Las Vegas algorithm, FNAT (Forced Nucleotide Alignment Tool), FRAMEALIGN™, FRAMESEARCHT™, DYNAMIC™, FILTER™, FSAP™ (Fristensky Sequence Analysis Package), GAP (Global Alignment Program), GENAL™, GIBBS™, GENQUEST™, ISSC™ (Sensitive Sequence Comparison), LALIGN™ (Local Sequence Alignment), LCP™ (Local Content Program), MACAW™ (Multiple Alignment Construction & Analysis Workbench), MAP (Multiple Alignment Program), MBLKP™, MBLKN™, PIMA™ (Pattern-Induced Multi-sequence Alignment), SAGA™ (Sequence Alignment by Genetic Algorithm) and WHAT-IFT™. Such alignment programs can also be used to screen genome databases to identify polynucleotide sequences having substantially identical sequences. A number of genome databases are available, for example, a substantial portion of the human genome is available as part of the Human Genome Sequencing Project (Gibbs, 1995). At least twenty-one other genomes have already been sequenced, including, for example, M. genitalium (Fraser et al., 1995), M. jannaschii (Bult et al., 1996), H. influenzae (Fleischmann et al., 1995), E. coli (Blattner et al., 1997) and yeast (S. cerevisiae) (Mewes et al., 1997) and D. melanogaster (Adams et al., 2000). Significant progress has also been made in sequencing the genomes of model organism, such as mouse, C. elegans and Arabadopsis sp. Several databases containing genomic information annotated with some functional information are maintained by different organizations and may be accessible via the internet.

[0406] One example of a useful algorithm is BLAST and BLAST 2.0 algorithms, which are described in Altschul et al., Nuc. Acids Res. 25:3389-3402, 1977 and Altschul et al., J. Mol. Biol. 215:403-410, 1990, respectively. Software for performing BLAST analyses is publicly available through the National Center for Biotechnology Information. This algorithm involves first identifying high scoring sequence pairs (HSPs) by identifying short words of length W in the query sequence, which either match or satisfy some positive-valued threshold score T when aligned with a word of the same length in a database sequence. T is referred to as the neighborhood word score threshold (Altschul et al., supra). These initial neighborhood word hits act as seeds for initiating searches to find longer HSPs containing them. The word hits are extended in both directions along each sequence for as far as the cumulative alignment score can be increased. Cumulative scores are calculated using, for nucleotide sequences, the parameters M (reward score for a pair of matching residues; always >0). For amino acid sequences, a scoring matrix is used to calculate the cumulative score. Extension of the word hits in each direction are halted when: the cumulative alignment score falls off by the quantity X from its maximum achieved value; the cumulative score goes to zero or below, due to the accumulation of one or more negative-scoring residue alignments; or the end of either sequence is reached. The BLAST algorithm parameters W, T and X determine the sensitivity and speed of the alignment. The BLASTN program (for nucleotide sequences) uses as defaults a wordlength (W) of 11, an expectation (E) of 10, M=5, N=−4 and a comparison of both strands. For amino acid sequences, the BLASTP program uses as defaults a wordlength of 3 and expectations (E) of 10 and the BLOSUM62 scoring matrix (see Henikoff & Henikoff, Proc. Natl. Acad. Sci. USA 89:10915, 1989) alignments (B) of 50, expectation (E) of 10, M=5, N=−4 and a comparison of both strands.

[0407] The BLAST algorithm also performs a statistical analysis of the similarity between two sequences (see, e.g., Karlin & Altschul, Proc. Natl. Acad. Sci. USA 90:5873, 1993). One measure of similarity provided by BLAST algorithm is the smallest sum probability (P(N)), which provides an indication of the probability by which a match between two nucleotide or amino acid sequences would occur by chance. For example, a nucleic acid is considered similar to a references sequence if the smallest sum probability in a comparison of the test nucleic acid to the reference nucleic acid is less than about 0.2, more in one aspect less than about 0.01 and most in one aspect less than about 0.001.

[0408] In one aspect, protein and nucleic acid sequence homologies are evaluated using the Basic Local Alignment Search Tool (“BLAST”) In particular, five specific BLAST programs are used to perform the following task:
[0409] (1) BLASTP and BLAST3 compare an amino acid query sequence against a protein sequence database;
[0410] (2) BLASTN compares a nucleotide query sequence against a nucleotide sequence database;
[0411] (3) BLASTX compares the six-frame conceptual translation products of a query nucleotide sequence (both strands) against a protein sequence database;
[0412] (4) TBLASTN compares a query protein sequence against a nucleotide sequence database translated in all six reading frames (both strands); and
[0413] (5) TBLASTX compares the six-frame translations of a nucleotide query sequence against the six-frame translations of a nucleotide sequence database.

[0414] The BLAST programs identify homologous sequences by identifying similar segments, which are referred to herein as “high-scoring segment pairs,” between a query amino or nucleic acid sequence and a test sequence which is in one aspect obtained from a protein or nucleic acid sequence database. High-scoring segment pairs are in one aspect identified (i.e., aligned) by means of a scoring matrix, many of which are known in the art. In one aspect, the scoring matrix used is the BLOSUM62 matrix (Gonnet (1992) Science 256:1443-1445; Henikoff and Henikoff (1993) Proteins 17:49-61). Less in one aspect, the PAM or PAM250 matrices may also be used (see, e.g., Schwartz and Dayhoff, eds., 1978, Matrices for Detecting Distance Relationships: Atlas of Protein Sequence and Structure, Washington: National Biomedical Research Foundation). BLAST programs are accessible through the U.S. National Library of Medicine.

[0415] The parameters used with the above algorithms may be adapted depending on the sequence length and degree of homology studied. In some aspects, the parameters may be the default parameters used by the algorithms in the absence of instructions from the user.

### Computer Systems and Computer Program Products

[0416] To determine and identify sequence identities, structural homologies, motifs and the like in silico, a nucleic acid or polypeptide sequence of the invention can be stored, recorded, and manipulated on any medium which can be read and accessed by a computer.

[0417] Accordingly, the invention provides computers, computer systems, computer readable mediums, computer programs products and the like recorded or stored thereon the nucleic acid and polypeptide sequences of the invention. As used herein, the words “recorded” and “stored” refer to a process for storing information on a computer medium. A skilled artisan can readily adopt any known methods for recording information on a computer readable medium to generate manufactures comprising one or more of the nucleic acid and/or polypeptide sequences of the invention.

[0418] The polypeptides of the invention include the polypeptide sequences of the invention, e.g., the exemplary sequences of the invention, and sequences substantially identical thereto, and fragments of any of the preceding sequences. Substantially identical, or homologous, polypeptide sequences refer to a polypeptide sequence having at least 50%, 51%, 52%, 53%, 54%, 55%, 56%, 57%, 58%, 59%, 60%, 61%, 62%, 63%, 64%, 65%, 66%, 67%, 68%, 69%, 70%, 71%, 72%, 73%, 74%, 75%, 76%, 77%, 78%, 79%, 80%, 81%, 82%, 83%, 84%, 85%, 86%, 87%, 88%, 89%, 90%, 91%, 92%, 93%, 94%, 95%, 96%, 97%, 98%, 99%, or more, or complete (100%) sequence identity (homology) to an exemplary sequence of the invention.

[0419] Homology (sequence identity) may be determined using any of the computer programs and parameters described herein. A nucleic acid or polypeptide sequence of the invention can be stored, recorded and manipulated on any medium which can be read and accessed by a computer. As used herein, the words “recorded” and “stored” refer to a process for storing information on a computer medium. A skilled artisan can readily adopt any of the presently known methods for recording information on a computer readable medium to generate manufactures comprising one or more of the nucleic acid sequences of the invention, one or more of the polypeptide sequences of the invention. Another aspect of the invention is a computer readable medium having recorded thereon at least 2, 5, 10, 15, or or more nucleic acid or polypeptide sequences of the invention.

[0420] Another aspect of the invention is a computer readable medium having recorded thereon one or more of the nucleic acid sequences of the invention. Another aspect of the invention is a computer readable medium having recorded thereon one or more of the polypeptide sequences of the invention. Another aspect of the invention is a computer readable medium having recorded thereon at least 2, 5, 10, 15, or 20 or more of the nucleic acid or polypeptide sequences as set forth above.

[0421] Computer readable media include magnetically readable media, optically readable media, electronically readable media and magnetic/optical media. For example, the computer readable media may be a hard disk, a floppy disk, a magnetic tape, CD-ROM, Digital Versatile Disk (DVD), Random Access Memory (RAM), or Read Only Memory (ROM) as well as other types of other media known to those skilled in the art.

[0422] Aspects of the invention include systems (e.g., internet based systems), particularly computer systems which store and manipulate the sequence information described herein. One example of a computer system 100 is illustrated in block diagram form in FIG. 1. As used herein, “a computer system” refers to the hardware components, software components and data storage components used to analyze a nucleotide sequence of a nucleic acid sequence of the invention, or a polypeptide sequence of the invention. The computer system 100 typically includes a processor for processing, accessing and manipulating the sequence data. The processor 105 can be any well-known type of central processing unit, such as, for example, the Pentium III from Intel Corporation, or similar processor from Sun, Motorola, Compaq, AMD or International Business Machines.

[0423] Typically the computer system 100 is a general purpose system that comprises the processor 105 and one or more internal data storage components 110 for storing data and one or more data retrieving devices for retrieving the data stored on the data storage components. A skilled artisan can readily appreciate that any one of the currently available computer systems are suitable.

[0424] In one particular aspect, the computer system 100 includes a processor 105 connected to a bus which is connected to a main memory 115 (in one aspect implemented as RAM) and one or more internal data storage devices 110, such as a hard drive and/or other computer readable media having data recorded thereon. In some aspects, the computer system 100 further includes one or more data retrieving device 118 for reading the data stored on the internal data storage devices 110.

[0425] The data retrieving device 118 may represent, for example, a floppy disk drive, a compact disk drive, a magnetic tape drive, or a modem capable of connection to a remote data storage system (e.g., via internet) etc. In some aspects, the internal data storage device 110 is a removable computer readable medium such as a floppy disk, a compact disk, a magnetic tape, etc. containing control logic and/or data recorded thereon. The computer system 100 may advantageously include or be programmed by appropriate software for reading the control logic and/or the data from the data storage component once inserted in the data retrieving device.

[0426] The computer system 100 includes a display 120 which is used to display output to a computer user. It should also be noted that the computer system 100 can be linked to other computer systems 125a-c in a network or wide area network to provide centralized access to the computer system 100.

[0427] Software for accessing and processing the nucleotide sequences of a nucleic acid sequence of the invention, or a polypeptide sequence of the invention, (such as search tools, compare tools and modeling tools etc.) may reside in main memory 115 during execution.

[0428] In some aspects, the computer system 100 may further comprise a sequence comparison algorithm for comparing a nucleic acid sequence of the invention, or a polypeptide sequence of the invention, stored on a computer readable medium to a reference nucleotide or polypeptide sequence(s) stored on a computer readable medium. A “sequence comparison algorithm” refers to one or more programs which are implemented (locally or remotely) on the computer system 100 to compare a nucleotide sequence with other nucleotide sequences and/or compounds stored within a data storage means. For example, the sequence comparison algorithm may compare the nucleotide sequences of a nucleic acid sequence of the invention, or a polypeptide sequence of the invention, stored on a computer readable medium to reference sequences stored on a computer readable medium to identify homologies or structural motifs.

[0429] FIG. 2 is a flow diagram illustrating one aspect of a process 200 for comparing a new nucleotide or protein sequence with a database of sequences in order to determine the homology levels between the new sequence and the sequences in the database. The database of sequences can be a private database stored within the computer system 100, or a public database such as GENBANK that is available through the Internet.

[0430] The process 200 begins at a start state 201 and then moves to a state 202 wherein the new sequence to be compared is stored to a memory in a computer system 100. As discussed above, the memory could be any type of memory, including RAM or an internal storage device.

[0431] The process 200 then moves to a state 204 wherein a database of sequences is opened for analysis and comparison. The process 200 then moves to a state 206 wherein the first sequence stored in the database is read into a memory on the computer. A comparison is then performed at a state 210 to determine if the first sequence is the same as the second sequence. It is important to note that this step is not limited to performing an exact comparison between the new sequence and the first sequence in the database. Well-known methods are known to those of skill in the art for comparing two nucleotide or protein sequences, even if they are not identical. For example, gaps can be introduced into one sequence in order to raise the homology level between the two tested sequences. The parameters that control whether gaps or other features are introduced into a sequence during comparison are normally entered by the user of the computer system.

[0432] Once a comparison of the two sequences has been performed at the state 210, a determination is made at a decision state 210 whether the two sequences are the same. Of course, the term “same” is not limited to sequences that are absolutely identical. Sequences that are within the homology parameters entered by the user will be marked as “same” in the process 200.

[0433] If a determination is made that the two sequences are the same, the process 200 moves to a state 214 wherein the name of the sequence from the database is displayed to the user. This state notifies the user that the sequence with the displayed name fulfills the homology constraints that were entered. Once the name of the stored sequence is displayed to the user, the process 200 moves to a decision state 218 wherein a determination is made whether more sequences exist in the database. If no more sequences exist in the database, then the process 200 terminates at an end state 220. However, if more sequences do exist in the database, then the process 200 moves to a state 224 wherein a pointer is moved to the next sequence in the database so that it can be compared to the new sequence. In this manner, the new sequence is aligned and compared with every sequence in the database.

[0434] It should be noted that if a determination had been made at the decision state 212 that the sequences were not homologous, then the process 200 would move immediately to the decision state 218 in order to determine if any other sequences were available in the database for comparison.

[0435] Accordingly, one aspect of the invention is a computer system comprising a processor, a data storage device having stored thereon a nucleic acid sequence of the invention, or a polypeptide sequence of the invention, a data storage device having retrievably stored thereon reference nucleotide sequences or polypeptide sequences to be compared to a nucleic acid sequence of the invention, or a polypeptide sequence of the invention and a sequence comparer for conducting the comparison. The sequence comparer may indicate a homology level between the sequences compared or identify structural motifs in the above described nucleic acid code a nucleic acid sequence of the invention, or a polypeptide sequence of the invention, or it may identify structural motifs in sequences which are compared to these nucleic acid codes and polypeptide codes. In some aspects, the data storage device may have stored thereon the sequences of at least 2, 5, 10, 15, 20, 25, 30 or 40 or more of the nucleic acid sequences of the invention, or the polypeptide sequences of the invention.

[0436] Another aspect of the invention is a method for determining the level of homology between a nucleic acid sequence of the invention, or a polypeptide sequence of the invention and a reference nucleotide sequence. The method including reading the nucleic acid code or the polypeptide code and the reference nucleotide or polypeptide sequence through the use of a computer program which determines homology levels and determining homology between the nucleic acid code or polypeptide code and the reference nucleotide or polypeptide sequence with the computer program. The computer program may be any of a number of computer programs for determining homology levels, including those specifically enumerated herein, (e.g., BLAST2N with the default parameters or with any modified parameters). The method may be implemented using the computer systems described above. The method may also be performed by reading at least 2, 5, 10, 15, 20, 25, or 40 or more of the above described nucleic acid sequences of the invention, or the polypeptide sequences of the invention through use of the computer program and determining homology between the nucleic acid codes or polypeptide codes and reference nucleotide sequences or polypeptide sequences.

[0437] FIG. 3 is a flow diagram illustrating one aspect of a process 250 in a computer for determining whether two sequences are homologous. The process 250 begins at a start state 252 and then moves to a state 254 wherein a first sequence to be compared is stored to a memory. The second sequence to be compared is then stored to a memory at a state 256. The process 250 then moves to a state 260 wherein the first character in the first sequence is read and then to a state 262 wherein the first character of the second sequence is read. It should be understood that if the sequence is a nucleotide sequence, then the character would normally be either A, T, C, G or U. If the sequence is a protein sequence, then it is in one aspect in the single letter amino acid code so that the first and sequence sequences can be easily compared.

[0438] A determination is then made at a decision state 264 whether the two characters are the same. If they are the same, then the process 250 moves to a state 268 wherein the next characters in the first and second sequences are read. A determination is then made whether the next characters are the same. If they are, then the process 250 continues this loop until two characters are not the same. If a determination is made that the next two characters are not the same, the process 250 moves to a decision state 274 to determine whether there are any more characters either sequence to read.

[0439] If there are not any more characters to read, then the process 250 moves to a state 276 wherein the level of homology between the first and second sequences is displayed to the user. The level of homology is determined by calculating the proportion of characters between the sequences that were the same out of the total number of sequences in the first sequence. Thus, if every character in a first 100 nucleotide sequence aligned with a every character in a second sequence, the homology level would be 100%.

[0440] Alternatively, the computer program may be a computer program which compares the nucleotide sequences of a nucleic acid sequence as set forth in the invention, to one or more reference nucleotide sequences in order to determine whether the nucleic acid code of the invention, differs from a reference nucleic acid sequence at one or more positions. Optionally such a program records the length and identity of inserted, deleted or substituted nucleotides with respect to the sequence of either the reference polynucleotide or a nucleic acid sequence of the invention. In one aspect, the computer program may be a program which determines whether a nucleic acid sequence of the invention, contains a single nucleotide polymorphism (SNP) with respect to a reference nucleotide sequence.

[0441] Accordingly, another aspect of the invention is a method for determining whether a nucleic acid sequence of the invention, differs at one or more nucleotides from a reference nucleotide sequence comprising the steps of reading the nucleic acid code and the reference nucleotide sequence through use of a computer program which identifies differences between nucleic acid sequences and identifying differences between the nucleic acid code and the reference nucleotide sequence with the computer program. In some aspects, the computer program is a program which identifies single nucleotide polymorphisms. The method may be implemented by the computer systems described above and the method illustrated in FIG. 3. The method may also be performed by reading at least 2, 5, 10, 15, 20, 25, 30, or 40 or more of the nucleic acid sequences of the invention and the reference nucleotide sequences through the use of the computer program and identifying differences between the nucleic acid codes and the reference nucleotide sequences with the computer program.

[0442] In other aspects the computer based system may further comprise an identifier for identifying features within a nucleic acid sequence of the invention or a polypeptide sequence of the invention.

[0443] An “identifier” refers to one or more programs which identifies certain features within a nucleic acid sequence of the invention, or a polypeptide sequence of the invention. In one aspect, the identifier may comprise a program which identifies an open reading frame in a nucleic acid sequence of the invention.

[0444] FIG. 4 is a flow diagram illustrating one aspect of an identifier process 300 for detecting the presence of a feature in a sequence. The process 300 begins at a start state 302 and then moves to a state 304 wherein a first sequence that is to be checked for features is stored to a memory 115 in the computer system 100. The process 300 then moves to a state 306 wherein a database of sequence features is opened. Such a database would include a list of each feature's attributes along with the name of the feature. For example, a feature name could be “Initiation Codon” and the attribute would be “ATG”. Another example would be the feature name “TAATAA Box” and the feature attribute would be “TAATAA”. An example of such a database is produced by the University of Wisconsin Genetics Computer Group. Alternatively, the features may be structural polypeptide motifs such as alpha helices, beta sheets, or functional polypeptide motifs such as enzymatic active sites, helix-turn-helix motifs or other motifs known to those skilled in the art.

[0445] Once the database of features is opened at the state 306, the process 300 moves to a state 308 wherein the first feature is read from the database. A comparison of the attribute of the first feature with the first sequence is then made at a state 310. A determination is then made at a decision state 316 whether the attribute of the feature was found in the first sequence. If the attribute was found, then the process 300 moves to a state 318 wherein the name of the found feature is displayed to the user.

[0446] The process 300 then moves to a decision state 320 wherein a determination is made whether move features exist in the database. If no more features do exist, then the process 300 terminates at an end state 324. However, if more features do exist in the database, then the process 300 reads the next sequence feature at a state 326 and loops back to the state 310 wherein the attribute of the next feature is compared against the first sequence. It should be noted, that if the feature attribute is not found in the first sequence at the decision state 316, the process 300 moves directly to the decision state 320 in order to determine if any more features exist in the database.

[0447] Accordingly, another aspect of the invention is a method of identifying a feature within a nucleic acid sequence of the invention, or a polypeptide sequence of the invention, comprising reading the nucleic acid code(s) or polypeptide code(s) through the use of a computer program which identifies features therein and identifying features within the nucleic acid code(s) with the computer program. In one aspect, computer program comprises a computer program which identifies open reading frames. The method may be performed by reading a single sequence or at least 2, 5, 10, 15, 20, 25, 30, or 40 of the nucleic acid sequences of the invention, or the polypeptide sequences of the invention, through the use of the computer program and identifying features within the nucleic acid codes or polypeptide codes with the computer program.

[0448] A nucleic acid sequence of the invention, or a polypeptide sequence of the invention, may be stored and manipulated in a variety of data processor programs in a variety of formats. For example, a nucleic acid sequence of the invention, or a polypeptide sequence of the invention, may be stored as text in a word processing file, such as Microsoft WORD™ or WORDPERFECT™ or as an ASCII file in a variety of database programs familiar to those of skill in the art, such as DB2™, SYBASE™, or ORACLE™. In addition, many computer programs and databases may be used as sequence comparison algorithms, identifiers, or sources of reference nucleotide sequences or polypeptide sequences to be compared to a nucleic acid sequence of the invention, or a polypeptide sequence of the invention. The following list is intended not to limit the invention but to provide guidance to programs and databases which are useful with the nucleic acid sequences of the invention, or the polypeptide sequences of the invention.

[0449] The programs and databases which may be used include, but are not limited to: MACPATTERN™ (EMBL), DISCOVERYBASE™ (Molecular Applications Group), GENEMINE™ (Molecular Applications Group), LOOK™ (Molecular Applications Group), MACLOOK™ (Molecular Applications Group), BLAST and BLAST2 (NCBI), BLASTN and BLASTX (Altschul et al, J. Mol. Biol. 215: 403, 1990), FASTA (Pearson and Lipman, Proc. Natl. Acad. Sci. USA, 85: 2444, 1988), FASTDB (Brutlag et al. Comp. App. Biosci. 6:237-245, 1990), CATALYST™ (Molecular Simulations Inc.), CATALYST™/SHAPE™ (Molecular Simulations Inc.), CERIUS².DBACCESS™ (Molecular Simulations Inc.), HYPOGEN™ (Molecular Simulations Inc.), INSIGHT II™, (Molecular Simulations Inc.), DISCOVER™ (Molecular Simulations Inc.), CHARMm™ (Molecular Simulations Inc.), FELIX™ (Molecular Simulations Inc.), DELPHI™, (Molecular Simulations Inc.), QUANTEMM™, (Molecular Simulations Inc.), HOMOLOGY™ (Molecular Simulations Inc.), MODELER™ (Molecular Simulations Inc.), ISIS™ (Molecular Simulations Inc.), QUANTA™/Protein Design (Molecular Simulations Inc.), WEBLAB™ (Molecular Simulations Inc.), WEBLAB DIVERSITY EXPLORER™ (Molecular Simulations Inc.), GENE EXPLORER™ (Molecular Simulations Inc.), SEQFOLD™ (Molecular Simulations Inc.), the MDL Available Chemicals Directory database, the MDL Drug Data Report data base, the Comprehensive Medicinal Chemistry database, Derwents' World Drug Index database, the BioByteMasterFile database, the Genbank database and the Genseqn database. Many other programs and data bases would be apparent to one of skill in the art given the present disclosure.

[0450] Motifs which may be detected using the above programs include sequences encoding leucine zippers, helix-turn-helix motifs, glycosylation sites, ubiquitination sites, alpha helices and beta sheets, signal sequences encoding signal peptides which direct the secretion of the encoded proteins, sequences implicated in transcription regulation such as homeoboxes, acidic stretches, enzymatic active sites, substrate binding sites and enzymatic cleavage sites.

### Hybridization of Nucleic Acids

[0451] The invention provides isolated, synthetic or recombinant nucleic acids that hybridize under stringent conditions to an exemplary sequence of the invention (e.g., SEQ ID NO:3, SEQ ID NO:5, SEQ ID NO:7, SEQ ID NO:9). The stringent conditions can be highly stringent conditions, medium stringent conditions and/or low stringent conditions, including the high and reduced stringency conditions described herein. In one aspect, it is the stringency of the wash conditions that set forth the conditions which determine whether a nucleic acid is within the scope of the invention, as discussed below.

[0452] “Hybridization” refers to the process by which a nucleic acid strand joins with a complementary strand through base pairing. Hybridization reactions can be sensitive and selective so that a particular sequence of interest can be identified even in samples in which it is present at low concentrations. Suitably stringent conditions can be defined by, for example, the concentrations of salt or formamide in the prehybridization and hybridization solutions, or by the hybridization temperature and are well known in the art. In particular, stringency can be increased by reducing the concentration of salt, increasing the concentration of formamide, or raising the hybridization temperature. In alternative aspects, nucleic acids of the invention are defined by their ability to hybridize under various stringency conditions (e.g., high, medium, and low), as set forth herein.

[0453] For example, hybridization under high stringency conditions could occur in about 50% formamide at about 37° C. to 42° C. Hybridization could occur under reduced stringency conditions in about 35% to 25% formamide at about 30° C. to 35° C. In one aspect, hybridization occurs under high stringency conditions, e.g., at 42° C. in 50% formamide, 5×SSPE, 0.3% SDS and 200 μg/ml sheared and denatured salmon sperm DNA. Hybridization could occur under these reduced stringency conditions, but in 35% formamide at a reduced temperature of 35° C. The temperature range corresponding to a particular level of stringency can be further narrowed by calculating the purine to pyrimidine ratio of the nucleic acid of interest and adjusting the temperature accordingly. Variations on the above ranges and conditions are well known in the art.

[0454] In alternative aspects, nucleic acids of the invention as defined by their ability to hybridize under stringent conditions can be between about five residues and the full length of nucleic acid of the invention; e.g., they can be at least 5, 10, 15, 20, 25, 30, 35, 40, 50, 55, 60, 65, 70, 75, 80, 90, 100, 150, 200, 250, 300, 350, 400, 450, 500, 550, 600, 650, 700, 750, 800, 850, 900, 950, 1000, or more, residues in length. Nucleic acids shorter than full length are also included. These nucleic acids can be useful as, e.g., hybridization probes, labeling probes, PCR oligonucleotide probes, iRNA (single or double stranded), antisense or sequences encoding antibody binding peptides (epitopes), motifs, active sites and the like.

[0455] In one aspect, nucleic acids of the invention are defined by their ability to hybridize under high stringency comprises conditions of about 50% formamide at about 37° C. to 42° C. In one aspect, nucleic acids of the invention are defined by their ability to hybridize under reduced stringency comprising conditions in about 35% to 25% formamide at about 30° C. to 35° C.

[0456] Alternatively, nucleic acids of the invention are defined by their ability to hybridize under high stringency comprising conditions at 42° C. in 50% formamide, 5×SSPE, 0.3% SDS, and a repetitive sequence blocking nucleic acid, such as cot-1 or salmon sperm DNA (e.g., 200 μg/ml sheared and denatured salmon sperm DNA). In one aspect, nucleic acids of the invention are defined by their ability to hybridize under reduced stringency conditions comprising 35% formamide at a reduced temperature of 35° C.

[0457] In nucleic acid hybridization reactions, the conditions used to achieve a particular level of stringency will vary, depending on the nature of the nucleic acids being hybridized. For example, the length, degree of complementarity, nucleotide sequence composition (e.g., GC v. AT content) and nucleic acid type (e.g., RNA v. DNA) of the hybridizing regions of the nucleic acids can be considered in selecting hybridization conditions. An additional consideration is whether one of the nucleic acids is immobilized, for example, on a filter.

[0458] Hybridization may be carried out under conditions of low stringency, moderate stringency or high stringency. As an example of nucleic acid hybridization, a polymer membrane containing immobilized denatured nucleic acids is first prehybridized for 30 minutes at 45° C. in a solution consisting of 0.9 M NaCl, 50 mM NaH₂PO₄, pH 7.0, 5.0 mM Na₂EDTA, 0.5% SDS, 10×Denhardt's and 0.5 mg/ml polyriboadenylic acid. Approximately 2×10⁷ cpm (specific activity 4−9×10⁸ cpm/ug) of ³²P end-labeled oligonucleotide probe are then added to the solution. After 12-16 hours of incubation, the membrane is washed for 30 minutes at room temperature in 1×SET (150 mM NaCl, 20 mM Tris hydrochloride, pH 7.8, 1 mM Na₂EDTA) containing 0.5% SDS, followed by a 30 minute wash in fresh 1×SET at Tₘ−10° C. for the oligonucleotide probe. The membrane is then exposed to auto-radiographic film for detection of hybridization signals.

[0459] All of the foregoing hybridizations would be considered to be under conditions of high stringency.

[0460] Following hybridization, a filter can be washed to remove any non-specifically bound detectable probe. The stringency used to wash the filters can also be varied depending on the nature of the nucleic acids being hybridized, the length of the nucleic acids being hybridized, the degree of complementarity, the nucleotide sequence composition (e.g., GC v. AT content) and the nucleic acid type (e.g., RNA v. DNA). Examples of progressively higher stringency condition washes are as follows: 2×SSC, 0.1% SDS at room temperature for 15 minutes (low stringency); 0.1×SSC, 0.5% SDS at room temperature for 30 minutes to 1 hour (moderate stringency); 0.1×SSC, 0.5% SDS for 15 to 30 minutes at between the hybridization temperature and 68° C. (high stringency); and 0.15M NaCl for 15 minutes at 72° C. (very high stringency). A final low stringency wash can be conducted in 0.1×SSC at room temperature. The examples above are merely illustrative of one set of conditions that can be used to wash filters. One of skill in the art would know that there are numerous recipes for different stringency washes. Some other examples are given below.

[0461] In one aspect, hybridization conditions comprise a wash step comprising a wash for 30 minutes at room temperature in a solution comprising 1×150 mM NaCl, 20 mM Tris hydrochloride, pH 7.8, 1 mM Na₂EDTA, 0.5% SDS, followed by a 30 minute wash in fresh solution.

[0462] Nucleic acids which have hybridized to the probe are identified by autoradiography or other conventional techniques.

[0463] The above procedure may be modified to identify nucleic acids having decreasing levels of homology to the probe sequence. For example, to obtain nucleic acids of decreasing homology to the detectable probe, less stringent conditions may be used. For example, the hybridization temperature may be decreased in increments of 5° C. from 68° C. to 42° C. in a hybridization buffer having a Na+ concentration of approximately 1M. Following hybridization, the filter may be washed with 2×SSC, 0.5% SDS at the temperature of hybridization. These conditions are considered to be “moderate” conditions above 50° C. and “low” conditions below 50° C. A specific example of “moderate” hybridization conditions is when the above hybridization is conducted at 55° C. A specific example of “low stringency” hybridization conditions is when the above hybridization is conducted at 45° C.

[0464] Alternatively, the hybridization may be carried out in buffers, such as 6×SSC, containing formamide at a temperature of 42° C. In this case, the concentration of formamide in the hybridization buffer may be reduced in 5% increments from 50% to 0% to identify clones having decreasing levels of homology to the probe. Following hybridization, the filter may be washed with 6×SSC, 0.5% SDS at 50° C. These conditions are considered to be “moderate” conditions above 25% formamide and “low” conditions below 25% formamide. A specific example of “moderate” hybridization conditions is when the above hybridization is conducted at 30% formamide. A specific example of “low stringency” hybridization conditions is when the above hybridization is conducted at 10% formamide.

[0465] However, the selection of a hybridization format is not critical—it is the stringency of the wash conditions that set forth the conditions which determine whether a nucleic acid is within the scope of the invention. Wash conditions used to identify nucleic acids within the scope of the invention include, e.g.: a salt concentration of about 0.02 molar at pH 7 and a temperature of at least about 50° C. or about 55° C. to about 60° C.; or, a salt concentration of about 0.15 M NaCl at 72° C. for about 15 minutes; or, a salt concentration of about 0.2×SSC at a temperature of at least about 50° C. or about 55° C. to about 60° C. for about 15 to about 20 minutes; or, the hybridization complex is washed twice with a solution with a salt concentration of about 2×SSC containing 0.1% SDS at room temperature for 15 minutes and then washed twice by 0.1×SSC containing 0.1% SDS at 68° C. for 15 minutes; or, equivalent conditions. See Sambrook, Tijssen and Ausubel for a description of SSC buffer and equivalent conditions.

[0466] These methods may be used to isolate nucleic acids of the invention. For example, the preceding methods may be used to isolate nucleic acids having a sequence with at least about 97%, at least 95%, at least 90%, at least 85%, at least 80%, at least 75%, at least 70%, at least 65%, at least 60%, at least 55%, or at least 50% sequence identity (homology) to a nucleic acid sequence selected from the group consisting of one of the sequences of the invention, or fragments comprising at least about 10, 15, 20, 25, 30, 35, 40, 50, 75, 100, 150, 200, 300, 400, or 500 consecutive bases thereof and the sequences complementary thereto. Sequence identity (homology) may be measured using the alignment algorithm. For example, the homologous polynucleotides may have a coding sequence which is a naturally occurring allelic variant of one of the coding sequences described herein. Such allelic variants may have a substitution, deletion or addition of one or more nucleotides when compared to the nucleic acids of the invention. Additionally, the above procedures may be used to isolate nucleic acids which encode polypeptides having at least about 99%, 95%, at least 90%, at least 85%, at least 80%, at least 75%, at least 70%, at least 65%, at least 60%, at least 55%, or at least 50% sequence identity (homology) to a polypeptide of the invention, or fragments comprising at least 5, 10, 15, 20, 25, 30, 35, 40, 50, 75, 100, or 150 consecutive amino acids thereof as determined using a sequence alignment algorithm (e.g., such as the FASTA version 3.0t78 algorithm with the default parameters).

### Oligonucleotides Probes and Methods for Using Them

[0467] The invention also provides nucleic acid probes that can be used, e.g., for identifying nucleic acids encoding a polypeptide with an enzyme, structural or binding activity or fragments thereof or for identifying polypeptide, enzyme, protein, e.g. structural or binding protein, genes. In one aspect, the probe comprises at least 10 consecutive bases of a nucleic acid of the invention. Alternatively, a probe of the invention can be at least about 5, 6, 7, 8, 9, 10, 11, 12, 13, 14, 15, 16, 17, 18, 19, 20, 21, 22, 23, 24, 25, 30, 35, 40, 45, 50, 55, 60, 65, 70, 75, 80, 85, 90, 95, 100, 110, 120, 130, 150 or about 10 to 50, about 20 to 60 about 30 to 70, consecutive bases of a sequence as set forth in a nucleic acid of the invention. The probes identify a nucleic acid by binding and/or hybridization. The probes can be used in arrays of the invention, see discussion below, including, e.g., capillary arrays. The probes of the invention can also be used to isolate other nucleic acids or polypeptides.

[0468] The isolated nucleic acids of the invention, the sequences complementary thereto, or a fragment comprising at least 10, 15, 20, 25, 30, 35, 40, 50, 75, 100, 150, 200, 300, 400, or 500 consecutive bases of one of the sequences of the invention, or the sequences complementary thereto may also be used as probes to determine whether a biological sample, such as a soil sample, contains an organism having a nucleic acid sequence of the invention or an organism from which the nucleic acid was obtained. In such procedures, a biological sample potentially harboring the organism from which the nucleic acid was isolated is obtained and nucleic acids are obtained from the sample. The nucleic acids are contacted with the probe under conditions which permit the probe to specifically hybridize to any complementary sequences from which are present therein.

[0469] Where necessary, conditions which permit the probe to specifically hybridize to complementary sequences may be determined by placing the probe in contact with complementary sequences from samples known to contain the complementary sequence as well as control sequences which do not contain the complementary sequence. Hybridization conditions, such as the salt concentration of the hybridization buffer, the formamide concentration of the hybridization buffer, or the hybridization temperature, may be varied to identify conditions which allow the probe to hybridize specifically to complementary nucleic acids.

[0470] If the sample contains the organism from which the nucleic acid was isolated, specific hybridization of the probe is then detected. Hybridization may be detected by labeling the probe with a detectable agent such as a radioactive isotope, a fluorescent dye or an enzyme capable of catalyzing the formation of a detectable product.

[0471] Many methods for using the labeled probes to detect the presence of complementary nucleic acids in a sample are familiar to those skilled in the art. These include Southern Blots, Northern Blots, colony hybridization procedures and dot blots. Protocols for each of these procedures are provided in Ausubel et al. Current Protocols in Molecular Biology, John Wiley 503 Sons, Inc. (1997) and Sambrook et al., Molecular Cloning: A Laboratory Manual 2nd Ed., Cold Spring Harbor Laboratory Press (1989.

[0472] Alternatively, more than one probe (at least one of which is capable of specifically hybridizing to any complementary sequences which are present in the nucleic acid sample), may be used in an amplification reaction to determine whether the sample contains an organism containing a nucleic acid sequence of the invention (e.g., an organism from which the nucleic acid was isolated). Typically, the probes comprise oligonucleotides. In one aspect, the amplification reaction may comprise a PCR reaction. PCR protocols are described in Ausubel and Sambrook, supra. Alternatively, the amplification may comprise a ligase chain reaction, 3SR, or strand displacement reaction. (See Barany, F., “The Ligase Chain Reaction in a PCR World”, PCR Methods and Applications 1:5-16, 1991; E. Fahy et al., “Self-sustained Sequence Replication (3SR): An Isothermal Transcription-based Amplification System Alternative to PCR”, PCR Methods and Applications 1:25-33, 1991; and Walker G. T. et al., “Strand Displacement Amplification-an Isothermal in vitro DNA Amplification Technique”, Nucleic Acid Research 20:1691-1696, 1992). In such procedures, the nucleic acids in the sample are contacted with the probes, the amplification reaction is performed and any resulting amplification product is detected. The amplification product may be detected by performing gel electrophoresis on the reaction products and staining the gel with an intercalator such as ethidium bromide. Alternatively, one or more of the probes may be labeled with a radioactive isotope and the presence of a radioactive amplification product may be detected by autoradiography after gel electrophoresis.

[0473] Probes derived from sequences near the ends of the sequences of the invention, may also be used in chromosome walking procedures to identify clones containing genomic sequences located adjacent to the sequences of the invention. Such methods allow the isolation of genes which encode additional proteins from the host organism.

[0474] The isolated nucleic acids of the invention, the sequences complementary thereto, or a fragment comprising at least 10, 15, 20, 25, 30, 35, 40, 50, 75, 100, 150, 200, 300, 400, or 500 consecutive bases of one of the sequences of the invention, or the sequences complementary thereto may be used as probes to identify and isolate related nucleic acids. In some aspects, the related nucleic acids may be cDNAs or genomic DNAs from organisms other than the one from which the nucleic acid was isolated. For example, the other organisms may be related organisms. In such procedures, a nucleic acid sample is contacted with the probe under conditions which permit the probe to specifically hybridize to related sequences. Hybridization of the probe to nucleic acids from the related organism is then detected using any of the methods described above.

[0475] By varying the stringency of the hybridization conditions used to identify nucleic acids, such as cDNAs or genomic DNAs, which hybridize to the detectable probe, nucleic acids having different levels of homology to the probe can be identified and isolated. Stringency may be varied by conducting the hybridization at varying temperatures below the melting temperatures of the probes. The melting temperature, T., is the temperature (under defined ionic strength and pH) at which 50% of the target sequence hybridizes to a perfectly complementary probe. Very stringent conditions are selected to be equal to or about 5° C. lower than the Tₘ for a particular probe. The melting temperature of the probe may be calculated using the following formulas:

[0476] For probes between 14 and 70 nucleotides in length the melting temperature (Tₘ) is calculated using the formula: Tₘ=81.5+16.6(log [Na+])+0.41(fraction G+C)−(600/N) where N is the length of the probe.

[0477] If the hybridization is carried out in a solution containing formamide, the melting temperature may be calculated using the equation: Tₘ=81.5+16.6(log [Na+])+0.41(fraction G+C)−(0.63% formamide)−(600/N) where N is the length of the probe.

[0478] Prehybridization may be carried out in 6×SSC, 5×Denhardt's reagent, 0.5% SDS, 100 μg/ml denatured fragmented salmon sperm DNA or 6×SSC, 5×Denhardt's reagent, 0.5% SDS, 100 μg/ml denatured fragmented salmon sperm DNA, 50% formamide. The formulas for SSC and Denhardt's solutions are listed in Sambrook et al., supra.

[0479] Hybridization is conducted by adding the detectable probe to the prehybridization solutions listed above. Where the probe comprises double stranded DNA, it is denatured before addition to the hybridization solution. The filter is contacted with the hybridization solution for a sufficient period of time to allow the probe to hybridize to cDNAs or genomic DNAs containing sequences complementary thereto or homologous thereto. For probes over 200 nucleotides in length, the hybridization may be carried out at 15-25° C. below the Tₘ. For shorter probes, such as oligonucleotide probes, the hybridization may be conducted at 5-10° C. below the Tₘ. In one aspect, for hybridizations in 6×SSC, the hybridization is conducted at approximately 68° C. Usually, for hybridizations in 50% formamide containing solutions, the hybridization is conducted at approximately 42° C.

### Inhibiting Expression of Polypeptides, Enzymes, Proteins

[0480] The invention provides nucleic acids complementary to (e.g., antisense sequences to) the nucleic acids of the invention, e.g., nucleic acids comprising antisense, iRNA, ribozymes. Nucleic acids of the invention comprising antisense sequences can be capable of inhibiting the transport, splicing or transcription of polypeptide, enzyme, protein, e.g. structural or binding protein genes. The inhibition can be effected through the targeting of genomic DNA or messenger RNA. The transcription or function of targeted nucleic acid can be inhibited, for example, by hybridization and/or cleavage. In one aspect, inhibitors of the invention include oligonucleotides which are able to either bind a polypeptide, enzyme, protein, e.g. structural or binding protein, gene or message, in either case preventing or inhibiting the production or function of a polypeptide, enzyme, protein, e.g. structural or binding protein. The association can be through sequence specific hybridization. Another useful class of inhibitors includes oligonucleotides which cause inactivation or cleavage of a polypeptide, enzyme, protein, e.g. structural or binding protein, message. The oligonucleotide of the invention can have enzyme activity, binding activity and/or structural activity to cause cleavage, e.g., of a message (transcript), for example, oligonucleotides of the invention can comprise or consist of a ribozyme, an RNAi, and antisense oligo, and the like. The oligonucleotide can be chemically modified or conjugated to an enzyme or composition capable of cleaving the complementary nucleic acid. A pool of many different such oligonucleotides can be screened for those with the desired activity. Thus, the invention provides various compositions for the inhibition of a polypeptide, enzyme, protein, e.g. structural or binding protein, expression on a nucleic acid and/or protein level, e.g., antisense, iRNA and ribozymes comprising a polypeptide, enzyme, protein, e.g. structural or binding protein, sequences of the invention and the anti-polypeptide, anti-enzyme, anti-protein, e.g. anti-structural or anti-binding protein antibodies of the invention.

[0481] Inhibition of a polypeptide, enzyme, protein, e.g. structural or binding protein, expression can have a variety of industrial applications. For example, inhibition of a polypeptide, enzyme, protein, e.g. structural or binding protein, expression can slow or prevent spoilage. In one aspect, use of compositions of the invention that inhibit the expression and/or activity of a polypeptide, enzyme, protein, e.g. structural or binding protein, e.g., antibodies, antisense oligonucleotides, ribozymes and RNAi, are used to slow or prevent spoilage. Thus, in one aspect, the invention provides methods and compositions comprising application onto a plant or plant product (e.g., a cereal, a grain, a fruit, seed, root, leaf, etc.) antibodies, antisense oligonucleotides, ribozymes and RNAi of the invention to slow or prevent spoilage. These compositions also can be expressed by the plant (e.g., a transgenic plant) or another organism (e.g., a bacterium or other microorganism transformed with a polypeptide, enzyme, protein, e.g. structural or binding protein, gene of the invention).

[0482] The compositions of the invention for the inhibition of a polypeptide, enzyme, protein, e.g. structural or binding protein, expression, e.g., antisense, iRNA (e.g., siRNA, miRNA), ribozymes, antibodies, can be used as pharmaceutical compositions, e.g., as anti-pathogen agents or in other therapies, e.g., as anti-microbials for, e.g., Salmonella, or to neutralize a biological warfare agent, e.g., anthrax.

[0483] Antisense Oligonucleotides

[0484] The invention provides antisense oligonucleotides capable of binding a polypeptide, enzyme, protein, e.g. structural or binding protein, message which, in one aspect, can inhibit a polypeptide, enzyme, protein, e.g. structural or binding protein, activity by targeting mRNA. Strategies for designing antisense oligonucleotides are well described in the scientific and patent literature, and the skilled artisan can design such a polypeptide, enzyme, protein, e.g. structural or binding protein, oligonucleotides using the novel reagents of the invention. For example, gene walking/RNA mapping protocols to screen for effective antisense oligonucleotides are well known in the art, see, e.g., Ho (2000) Methods Enzymol. 314:168-183, describing an RNA mapping assay, which is based on standard molecular techniques to provide an easy and reliable method for potent antisense sequence selection. See also Smith (2000) Eur. J. Pharm. Sci. 11:191-198.

[0485] Naturally occurring nucleic acids are used as antisense oligonucleotides. The antisense oligonucleotides can be of any length; for example, in alternative aspects, the antisense oligonucleotides are between about 5 to 100, about 10 to 80, about 15 to 60, about 18 to 40. The optimal length can be determined by routine screening. The antisense oligonucleotides can be present at any concentration. The optimal concentration can be determined by routine screening. A wide variety of synthetic, non-naturally occurring nucleotide and nucleic acid analogues are known which can address this potential problem. For example, peptide nucleic acids (PNAs) containing non-ionic backbones, such as N-(2-aminoethyl) glycine units can be used. Antisense oligonucleotides having phosphorothioate linkages can also be used, as described in WO 97/03211; WO 96/39154; Mata (1997) Toxicol Appl Pharmacol 144:189-197; Antisense Therapeutics, ed. Agrawal (Humana Press, Totowa, N.J., 1996). Antisense oligonucleotides having synthetic DNA backbone analogues provided by the invention can also include phosphoro-dithioate, methylphosphonate, phosphoramidate, alkyl phosphotriester, sulfamate, 3′-thioacetal, methylene(methylimino), 3′-N-carbamate, and morpholino carbamate nucleic acids, as described above.

[0486] Combinatorial chemistry methodology can be used to create vast numbers of oligonucleotides that can be rapidly screened for specific oligonucleotides that have appropriate binding affinities and specificities toward any target, such as the sense and antisense a polypeptide, enzyme, protein, e.g. structural or binding protein, sequences of the invention (see, e.g., Gold (1995) J. of Biol. Chem. 270:13581-13584).

[0487] Inhibitory Ribozymes

[0488] The invention provides ribozymes capable of binding a polypeptide, enzyme, protein, e.g. structural or binding protein, message. These ribozymes can inhibit a polypeptide, enzyme, protein, e.g. structural or binding protein, activity by, e.g., targeting mRNA. Strategies for designing ribozymes and selecting the polypeptide, enzyme, protein, e.g. structural or binding protein-specific antisense sequence for targeting are well described in the scientific and patent literature, and the skilled artisan can design such ribozymes using the novel reagents of the invention. Ribozymes act by binding to a target RNA through the target RNA binding portion of a ribozyme which is held in close proximity to an enzymatic portion of the RNA that cleaves the target RNA. Thus, the ribozyme recognizes and binds a target RNA through complementary base-pairing, and once bound to the correct site, acts enzymatically to cleave and inactivate the target RNA. Cleavage of a target RNA in such a manner will destroy its ability to direct synthesis of an encoded protein if the cleavage occurs in the coding sequence. After a ribozyme has bound and cleaved its RNA target, it can be released from that RNA to bind and cleave new targets repeatedly.

[0489] In some circumstances, the enzymatic nature of a ribozyme can be advantageous over other technologies, such as antisense technology (where a nucleic acid molecule simply binds to a nucleic acid target to block its transcription, translation or association with another molecule) as the effective concentration of ribozyme necessary to effect a therapeutic treatment can be lower than that of an antisense oligonucleotide. This potential advantage reflects the ability of the ribozyme to act enzymatically. Thus, a single ribozyme molecule is able to cleave many molecules of target RNA. In addition, a ribozyme is typically a highly specific inhibitor, with the specificity of inhibition depending not only on the base pairing mechanism of binding, but also on the mechanism by which the molecule inhibits the expression of the RNA to which it binds. That is, the inhibition is caused by cleavage of the RNA target and so specificity is defined as the ratio of the rate of cleavage of the targeted RNA over the rate of cleavage of non-targeted RNA. This cleavage mechanism is dependent upon factors additional to those involved in base pairing. Thus, the specificity of action of a ribozyme can be greater than that of antisense oligonucleotide binding the same RNA site.

[0490] The ribozyme of the invention, e.g., an enzymatic ribozyme RNA molecule, can be formed in a hammerhead motif, a hairpin motif, as a hepatitis delta virus motif, a group I intron motif and/or an RNaseP-like RNA in association with an RNA guide sequence. Examples of hammerhead motifs are described by, e.g., Rossi (1992) Aids Research and Human Retroviruses 8:183; hairpin motifs by Hampel (1989) Biochemistry 28:4929, and Hampel (1990) Nuc. Acids Res. 18:299; the hepatitis delta virus motif by Perrotta (1992) Biochemistry 31:16; the RNaseP motif by Guerrier-Takada (1983) Cell 35:849; and the group I intron by Cech U.S. Pat. No. 4,987,071. The recitation of these specific motifs is not intended to be limiting. Those skilled in the art will recognize that a ribozyme of the invention, e.g., an enzymatic RNA molecule of this invention, can have a specific substrate binding site complementary to one or more of the target gene RNA regions. A ribozyme of the invention can have a nucleotide sequence within or surrounding that substrate binding site which imparts an RNA cleaving activity to the molecule.

[0491] RNA Interference (RNAi)

[0492] In one aspect, the invention provides an RNA inhibitory molecule, a so-called “RNAi” molecule, comprising a polypeptide, enzyme, protein, e.g. structural or binding protein, sequence of the invention. The RNAi molecule comprises a double-stranded RNA (dsRNA) molecule. The RNAi can inhibit expression of a polypeptide, enzyme, protein, e.g. structural or binding protein, gene. In one aspect, the RNAi is about 15, 16, 17, 18, 19, 20, 21, 22, 23, 24, 25 or more duplex nucleotides in length. While the invention is not limited by any particular mechanism of action, the RNAi can enter a cell and cause the degradation of a single-stranded RNA (ssRNA) of similar or identical sequences, including endogenous mRNAs. When a cell is exposed to double-stranded RNA (dsRNA), mRNA from the homologous gene is selectively degraded by a process called RNA interference (RNAi). A possible basic mechanism behind RNAi, e.g., siRNA for inhibiting transcription and/or miRNA to inhibit translation, is the breaking of a double-stranded RNA (dsRNA) matching a specific gene sequence into short pieces called short interfering RNA, which trigger the degradation of mRNA that matches its sequence. In one aspect, the RNAi's of the invention are used in gene-silencing therapeutics, see, e.g., Shuey (2002) Drug Discov. Today 7:1040-1046. In one aspect, the invention provides methods to selectively degrade RNA using the RNAi's of the invention. The process may be practiced in vitro, ex vivo or in vivo. In one aspect, the RNAi molecules of the invention can be used to generate a loss-of-function mutation in a cell, an organ or an animal. Methods for making and using RNAi molecules for selectively degrade RNA are well known in the art, see, e.g., U.S. Pat. No. 6,506,559; 6,511,824; 6,515,109; 6,489,127.

### Modification of Nucleic Acids

[0493] The invention provides methods of generating variants of the nucleic acids of the invention, e.g., those encoding a polypeptide, enzyme, protein, e.g. structural or binding protein. These methods can be repeated or used in various combinations to generate a polypeptide, enzyme, protein, e.g. structural or binding protein, having an altered or different activity or an altered or different stability from that of a polypeptide, enzyme, protein, e.g. structural or binding protein, encoded by the template nucleic acid. These methods also can be repeated or used in various combinations, e.g., to generate variations in gene/message expression, message translation or message stability. In another aspect, the genetic composition of a cell is altered by, e.g., modification of a homologous gene ex vivo, followed by its reinsertion into the cell.

[0494] A nucleic acid of the invention can be altered by any means. For example, random or stochastic methods, or, non-stochastic, or “directed evolution,” methods, see, e.g., U.S. Pat. No. 6,361,974. Methods for random mutation of genes are well known in the art, see, e.g., U.S. Pat. No. 5,830,696. For example, mutagens can be used to randomly mutate a gene. Mutagens include, e.g., ultraviolet light or gamma irradiation, or a chemical mutagen, e.g., mitomycin, nitrous acid, photoactivated psoralens, alone or in combination, to induce DNA breaks amenable to repair by recombination. Other chemical mutagens include, for example, sodium bisulfite, nitrous acid, hydroxylamine, hydrazine or formic acid. Other mutagens are analogues of nucleotide precursors, e.g., nitrosoguanidine, 5-bromouracil, 2-aminopurine, or acridine. These agents can be added to a PCR reaction in place of the nucleotide precursor thereby mutating the sequence. Intercalating agents such as proflavine, acriflavine, quinacrine and the like can also be used.

[0495] Any technique in molecular biology can be used, e.g., random PCR mutagenesis, see, e.g., Rice (1992) Proc. Natl. Acad. Sci. USA 89:5467-5471; or, combinatorial multiple cassette mutagenesis, see, e.g., Crameri (1995) Biotechniques 18:194-196. Alternatively, nucleic acids, e.g., genes, can be reassembled after random, or “stochastic,” fragmentation, see, e.g., U.S. Pat. Nos. 6,291,242; 6,287,862; 6,287,861; 5,955,358; 5,830,721; 5,824,514; 5,811,238; 5,605,793. In alternative aspects, modifications, additions or deletions are introduced by error-prone PCR, shuffling, oligonucleotide-directed mutagenesis, assembly PCR, sexual PCR mutagenesis, in vivo mutagenesis, cassette mutagenesis, recursive ensemble mutagenesis, exponential ensemble mutagenesis, site-specific mutagenesis, gene reassembly, Gene Site Saturation Mutagenesis (GSSM), synthetic ligation reassembly (SLR), recombination, recursive sequence recombination, phosphothioate-modified DNA mutagenesis, uracil-containing template mutagenesis, gapped duplex mutagenesis, point mismatch repair mutagenesis, repair-deficient host strain mutagenesis, chemical mutagenesis, radiogenic mutagenesis, deletion mutagenesis, restriction-selection mutagenesis, restriction-purification mutagenesis, artificial gene synthesis, ensemble mutagenesis, chimeric nucleic acid multimer creation, and/or a combination of these and other methods.

[0496] The following publications describe a variety of recursive recombination procedures and/or methods which can be incorporated into the methods of the invention: Stemmer (1999) “Molecular breeding of viruses for targeting and other clinical properties” Tumor Targeting 4:1-4; Ness (1999) Nature Biotechnology 17:893-896; Chang (1999) “Evolution of a cytokine using DNA family shuffling” Nature Biotechnology 17:793-797; Minshull (1999) “Protein evolution by molecular breeding” Current Opinion in Chemical Biology 3:284-290; Christians (1999) “Directed evolution of thymidine kinase for AZT phosphorylation using DNA family shuffling” Nature Biotechnology 17:259-264; Crameri (1998) “DNA shuffling of a family of genes from diverse species accelerates directed evolution” Nature 391:288-291; Crameri (1997) “Molecular evolution of an arsenate detoxification pathway by DNA shuffling,” Nature Biotechnology 15:436-438; Zhang (1997) “Directed evolution of an effective fucosidase from a galactosidase by DNA shuffling and screening” Proc. Natl. Acad. Sci. USA 94:4504-4509; Patten et al. (1997) “Applications of DNA Shuffling to Pharmaceuticals and Vaccines” Current Opinion in Biotechnology 8:724-733; Crameri et al. (1996) “Construction and evolution of antibody-phage libraries by DNA shuffling” Nature Medicine 2:100-103; Gates et al. (1996) “Affinity selective isolation of ligands from peptide libraries through display on a lac repressor ‘headpiece dimer’” Journal of Molecular Biology 255:373-386; Stemmer (1996) “Sexual PCR and Assembly PCR” In: The Encyclopedia of Molecular Biology. VCH Publishers, New York. pp. 447-457; Crameri and Stemmer (1995) “Combinatorial multiple cassette mutagenesis creates all the permutations of mutant and wildtype cassettes” BioTechniques 18:194-195; Stemmer et al. (1995) “Single-step assembly of a gene and entire plasmid form large numbers of oligodeoxyribonucleotides” Gene, 164:49-53; Stemmer (1995) “The Evolution of Molecular Computation” Science 270: 1510; Stemmer (1995) “Searching Sequence Space” Bio/Technology 13:549-553; Stemmer (1994) “Rapid evolution of a protein in vitro by DNA shuffling” Nature 370:389-391; and Stemmer (1994) “DNA shuffling by random fragmentation and reassembly: In vitro recombination for molecular evolution.” Proc. Natl. Acad. Sci. USA 91:10747-10751.

[0497] Mutational methods of generating diversity include, for example, site-directed mutagenesis (Ling et al. (1997) “Approaches to DNA mutagenesis: an overview” Anal Biochem. 254(2): 157-178; Dale et al. (1996) “Oligonucleotide-directed random mutagenesis using the phosphorothioate method” Methods Mol. Biol. 57:369-374; Smith (1985) “In vitro mutagenesis” Ann. Rev. Genet. 19:423-462; Botstein & Shortle (1985) “Strategies and applications of in vitro mutagenesis” Science 229:1193-1201; Carter (1986) “Site-directed mutagenesis” Biochem. J. 237:1-7; and Kunkel (1987) “The efficiency of oligonucleotide directed mutagenesis” in Nucleic Acids & Molecular Biology (Eckstein, F. and Lilley, D. M. J. eds., Springer Verlag, Berlin)); mutagenesis using uracil containing templates (Kunkel (1985) “Rapid and efficient site-specific mutagenesis without phenotypic selection” Proc. Natl. Acad. Sci. USA 82:488-492; Kunkel et al. (1987) “Rapid and efficient site-specific mutagenesis without phenotypic selection” Methods in Enzymol. 154, 367-382; and Bass et al. (1988) “Mutant Trp repressors with new DNA-binding specificities” Science 242:240-245); oligonucleotide-directed mutagenesis (Methods in Enzymol. 100: 468-500 (1983); Methods in Enzymol. 154: 329-350 (1987); Zoller (1982) “Oligonucleotide-directed mutagenesis using M13-derived vectors: an efficient and general procedure for the production of point mutations in any DNA fragment” Nucleic Acids Res. 10:6487-6500; Zoller & Smith (1983) “Oligonucleotide-directed mutagenesis of DNA fragments cloned into M13 vectors” Methods in Enzymol. 100:468-500; and Zoller (1987) Oligonucleotide-directed mutagenesis: a simple method using two oligonucleotide primers and a single-stranded DNA template” Methods in Enzymol. 154:329-350); phosphorothioate-modified DNA mutagenesis (Taylor (1985) “The use of phosphorothioate-modified DNA in restriction enzyme reactions to prepare nicked DNA” Nucl. Acids Res. 13: 8749-8764; Taylor (1985) “The rapid generation of oligonucleotide-directed mutations at high frequency using phosphorothioate-modified DNA” Nucl. Acids Res. 13: 8765-8787 (1985); Nakamaye (1986) “Inhibition of restriction endonuclease Nci I cleavage by phosphorothioate groups and its application to oligonucleotide-directed mutagenesis” Nucl. Acids Res. 14: 9679-9698; Sayers (1988) “Y-T Exonucleases in phosphorothioate-based oligonucleotide-directed mutagenesis” Nucl. Acids Res. 16:791-802; and Sayers et al. (1988) “Strand specific cleavage of phosphorothioate-containing DNA by reaction with restriction endonucleases in the presence of ethidium bromide” Nucl. Acids Res. 16: 803-814); mutagenesis using gapped duplex DNA (Kramer et al. (1984) “The gapped duplex DNA approach to oligonucleotide-directed mutation construction” Nucl. Acids Res. 12: 9441-9456; Kramer & Fritz (1987) Methods in Enzymol. “Oligonucleotide-directed construction of mutations via gapped duplex DNA” 154:350-367; Kramer (1988) “Improved enzymatic in vitro reactions in the gapped duplex DNA approach to oligonucleotide-directed construction of mutations” Nucl. Acids Res. 16: 7207; and Fritz (1988) “Oligonucleotide-directed construction of mutations: a gapped duplex DNA procedure without enzymatic reactions in vitro” Nucl. Acids Res. 16: 6987-6999).

[0498] Additional protocols that can be used to practice the invention include point mismatch repair (Kramer (1984) “Point Mismatch Repair” Cell 38:879-887), mutagenesis using repair-deficient host strains (Carter et al. (1985) “Improved oligonucleotide site-directed mutagenesis using M13 vectors” Nucl. Acids Res. 13: 4431-4443; and Carter (1987) “Improved oligonucleotide-directed mutagenesis using M13 vectors” Methods in Enzymol. 154: 382-403), deletion mutagenesis (Eghtedarzadeh (1986) “Use of oligonucleotides to generate large deletions” Nucl. Acids Res. 14: 5115), restriction-selection and restriction-selection and restriction-purification (Wells et al. (1986) “Importance of hydrogen-bond formation in stabilizing the transition state of subtilisin” Phil. Trans. R. Soc. Lond. A 317: 415-423), mutagenesis by total gene synthesis (Nambiar et al. (1984) “Total synthesis and cloning of a gene coding for the ribonuclease S protein” Science 223: 1299-1301; Sakamar and Khorana (1988) “Total synthesis and expression of a gene for the a-subunit of bovine rod outer segment guanine nucleotide-binding protein (transducin)” Nucl. Acids Res. 14: 6361-6372; Wells et al. (1985) “Cassette mutagenesis: an efficient method for generation of multiple mutations at defined sites” Gene 34:315-323; and Grundstrom et al. (1985) “Oligonucleotide-directed mutagenesis by microscale ‘shot-gun’ gene synthesis” Nucl. Acids Res. 13: 3305-3316), double-strand break repair (Mandecki (1986); Arnold (1993) “Protein engineering for unusual environments” Current Opinion in Biotechnology 4:450-455. “Oligonucleotide-directed double-strand break repair in plasmids of Escherichia coli: a method for site-specific mutagenesis” Proc. Natl. Acad. Sci. USA, 83:7177-7181). Additional details on many of the above methods can be found in Methods in Enzymology Volume 154, which also describes useful controls for trouble-shooting problems with various mutagenesis methods.

[0499] Protocols that can be used to practice the invention are described, e.g., in U.S. Pat. No. 5,605,793 to Stemmer (Feb. 25, 1997), “Methods for In Vitro Recombination;” U.S. Pat. No. 5,811,238 to Stemmer et al. (Sep. 22, 1998) “Methods for Generating Polynucleotides having Desired Characteristics by Iterative Selection and Recombination;” U.S. Pat. No. 5,830,721 to Stemmer et al. (Nov. 3, 1998), “DNA Mutagenesis by Random Fragmentation and Reassembly;” U.S. Pat. No. 5,834,252 to Stemmer, et al. (Nov. 10, 1998) “End-Complementary Polymerase Reaction;” U.S. Pat. No. 5,837,458 to Minshull, et al. (Nov. 17, 1998), “Methods and Compositions for Cellular and Metabolic Engineering;” WO 95/22625, Stemmer and Crameri, “Mutagenesis by Random Fragmentation and Reassembly;” WO 96/33207 by Stemmer and Lipschutz “End Complementary Polymerase Chain Reaction;” WO 97/20078 by Stemmer and Crameri “Methods for Generating Polynucleotides having Desired Characteristics by Iterative Selection and Recombination;” WO 97/35966 by Minshull and Stemmer, “Methods and Compositions for Cellular and Metabolic Engineering;” WO 99/41402 by Punnonen et al. “Targeting of Genetic Vaccine Vectors;” WO 99/41383 by Punnonen et al. “Antigen Library Immunization;” WO 99/41369 by Punnonen et al. “Genetic Vaccine Vector Engineering;” WO 99/41368 by Punnonen et al. “Optimization of Immunomodulatory Properties of Genetic Vaccines;” EP 752008 by Stemmer and Crameri, “DNA Mutagenesis by Random Fragmentation and Reassembly;” EP 0932670 by Stemmer “Evolving Cellular DNA Uptake by Recursive Sequence Recombination;” WO 99/23107 by Stemmer et al., “Modification of Virus Tropism and Host Range by Viral Genome Shuffling;” WO 99/21979 by Apt et al., “Human Papillomavirus Vectors;” WO 98/31837 by del Cardayre et al. “Evolution of Whole Cells and Organisms by Recursive Sequence Recombination;” WO 98/27230 by Patten and Stemmer, “Methods and Compositions for Polypeptide Engineering;” WO 98/27230 by Stemmer et al., “Methods for Optimization of Gene Therapy by Recursive Sequence Shuffling and Selection,” WO 00/00632, “Methods for Generating Highly Diverse Libraries,” WO 00/09679, “Methods for Obtaining in Vitro Recombined Polynucleotide Sequence Banks and Resulting Sequences,” WO 98/42832 by Arnold et al., “Recombination of Polynucleotide Sequences Using Random or Defined Primers,” WO 99/29902 by Arnold et al., “Method for Creating Polynucleotide and Polypeptide Sequences,” WO 98/41653 by Vind, “An in Vitro Method for Construction of a DNA Library,” WO 98/41622 by Borchert et al., “Method for Constructing a Library Using DNA Shuffling,” and WO 98/42727 by Pati and Zarling, “Sequence Alterations using Homologous Recombination.”

[0500] Protocols that can be used to practice the invention (providing details regarding various diversity generating methods) are described, e.g., in U.S. patent application Ser. No. 09/407,800, “SHUFFLING OF CODON ALTERED GENES” by Patten et al. filed Sep. 28, 1999; “EVOLUTION OF WHOLE CELLS AND ORGANISMS BY RECURSIVE SEQUENCE RECOMBINATION” by del Cardayre et al., U.S. Pat. No. 6,379,964; “OLIGONUCLEOTIDE MEDIATED NUCLEIC ACID RECOMBINATION” by Crameri et al., U.S. Pat. Nos. 6,319,714; 6,368,861; 6,376,246; 6,423,542; 6,426,224 and PCT/US00/01203; “USE OF CODON-VARIED OLIGONUCLEOTIDE SYNTHESIS FOR SYNTHETIC SHUFFLING” by Welch et al., U.S. Pat. No. 6,436,675; “METHODS FOR MAKING CHARACTER STRINGS, POLYNUCLEOTIDES & POLYPEPTIDES HAVING DESIRED CHARACTERISTICS” by Selifonov et al., filed Jan. 18, 2000, (PCT/US00/01202) and, e.g. “METHODS FOR MAKING CHARACTER STRINGS, POLYNUCLEOTIDES & POLYPEPTIDES HAVING DESIRED CHARACTERISTICS” by Selifonov et al., filed Jul. 18, 2000 (U.S. Ser. No. 09/618,579); “METHODS OF POPULATING DATA STRUCTURES FOR USE IN EVOLUTIONARY SIMULATIONS” by Selifonov and Stemmer, filed Jan. 18, 2000 (PCT/US00/01138); and “SINGLE-STRANDED NUCLEIC ACID TEMPLATE-MEDIATED RECOMBINATION AND NUCLEIC ACID FRAGMENT ISOLATION” by Affholter, filed Sep. 6, 2000 (U.S. Ser. No. 09/656,549); and U.S. Pat. Nos. 6,177,263; 6,153,410.

[0501] Non-stochastic, or “directed evolution,” methods include, e.g., saturation mutagenesis, such as Gene Site Saturation Mutagenesis (GSSM), synthetic ligation reassembly (SLR), or a combination thereof are used to modify the nucleic acids of the invention to generate a polypeptide, enzyme, protein, e.g. structural or binding protein, with new or altered properties (e.g., activity under highly acidic or alkaline conditions, high or low temperatures, and the like). Polypeptides encoded by the modified nucleic acids can be screened for an activity before testing for glucan hydrolysis or other activity. Any testing modality or protocol can be used, e.g., using a capillary array platform. See, e.g., U.S. Pat. Nos. 6,361,974; 6,280,926; 5,939,250.

[0502] Gene Site Saturation Mutagenesis, or, GSSM

[0503] The invention also provides methods for making enzyme using Gene Site Saturation mutagenesis, or, GSSM, as described herein, and also in U.S. Pat. Nos. 6,171,820 and 6,579,258.

[0504] In one aspect, codon primers containing a degenerate N,N,G/T sequence are used to introduce point mutations into a polynucleotide, e.g., a polypeptide, enzyme, protein, e.g. structural or binding protein, or an antibody of the invention, so as to generate a set of progeny polypeptides in which a full range of single amino acid substitutions is represented at each amino acid position, e.g., an amino acid residue in an enzyme active site or ligand binding site targeted to be modified. These oligonucleotides can comprise a contiguous first homologous sequence, a degenerate N,N,G/T sequence, and, optionally, a second homologous sequence. The downstream progeny translational products from the use of such oligonucleotides include all possible amino acid changes at each amino acid site along the polypeptide, because the degeneracy of the N,N,G/T sequence includes codons for all 20 amino acids. In one aspect, one such degenerate oligonucleotide (comprised of, e.g., one degenerate N,N,G/T cassette) is used for subjecting each original codon in a parental polynucleotide template to a full range of codon substitutions. In another aspect, at least two degenerate cassettes are used—either in the same oligonucleotide or not, for subjecting at least two original codons in a parental polynucleotide template to a full range of codon substitutions. For example, more than one N,N,G/T sequence can be contained in one oligonucleotide to introduce amino acid mutations at more than one site. This plurality of N,N,G/T sequences can be directly contiguous, or separated by one or more additional nucleotide sequence(s). In another aspect, oligonucleotides serviceable for introducing additions and deletions can be used either alone or in combination with the codons containing an N,N,G/T sequence, to introduce any combination or permutation of amino acid additions, deletions, and/or substitutions.

[0505] In one aspect, simultaneous mutagenesis of two or more contiguous amino acid positions is done using an oligonucleotide that contains contiguous N,N,G/T triplets, i.e. a degenerate (N,N,G/T)n sequence. In another aspect, degenerate cassettes having less degeneracy than the N,N,G/T sequence are used. For example, it may be desirable in some instances to use (e.g. in an oligonucleotide) a degenerate triplet sequence comprised of only one N, where said N can be in the first second or third position of the triplet. Any other bases including any combinations and permutations thereof can be used in the remaining two positions of the triplet. Alternatively, it may be desirable in some instances to use (e.g. in an oligo) a degenerate N,N,N triplet sequence.

[0506] In one aspect, use of degenerate triplets (e.g., N,N,G/T triplets) allows for systematic and easy generation of a full range of possible natural amino acids (for a total of 20 amino acids) into each and every amino acid position in a polypeptide (in alternative aspects, the methods also include generation of less than all possible substitutions per amino acid residue, or codon, position). For example, for a 100 amino acid polypeptide, 2000 distinct species (i.e. 20 possible amino acids per position×100 amino acid positions) can be generated. Through the use of an oligonucleotide or set of oligonucleotides containing a degenerate N,N,G/T triplet, 32 individual sequences can code for all 20 possible natural amino acids. Thus, in a reaction vessel in which a parental polynucleotide sequence is subjected to saturation mutagenesis using at least one such oligonucleotide, there are generated 32 distinct progeny polynucleotides encoding 20 distinct polypeptides. In contrast, the use of a non-degenerate oligonucleotide in site-directed mutagenesis leads to only one progeny polypeptide product per reaction vessel. Nondegenerate oligonucleotides can optionally be used in combination with degenerate primers disclosed; for example, nondegenerate oligonucleotides can be used to generate specific point mutations in a working polynucleotide. This provides one means to generate specific silent point mutations, point mutations leading to corresponding amino acid changes, and point mutations that cause the generation of stop codons and the corresponding expression of polypeptide fragments.

[0507] In one aspect, each saturation mutagenesis reaction vessel contains polynucleotides encoding at least 20 progeny polypeptide (e.g., a polypeptide, enzyme, protein, e.g. structural or binding protein,) molecules such that all 20 natural amino acids are represented at the one specific amino acid position corresponding to the codon position mutagenized in the parental polynucleotide (other aspects use less than all 20 natural combinations). The 32-fold degenerate progeny polypeptides generated from each saturation mutagenesis reaction vessel can be subjected to clonal amplification (e.g. cloned into a suitable host, e.g., E. coli host, using, e.g., an expression vector) and subjected to expression screening. When an individual progeny polypeptide is identified by screening to display a favorable change in property (when compared to the parental polypeptide, such as increased glucan hydrolysis activity under alkaline or acidic conditions), it can be sequenced to identify the correspondingly favorable amino acid substitution contained therein.

[0508] In one aspect, upon mutagenizing each and every amino acid position in a parental polypeptide using saturation mutagenesis as disclosed herein, favorable amino acid changes may be identified at more than one amino acid position. One or more new progeny molecules can be generated that contain a combination of all or part of these favorable amino acid substitutions. For example, if 2 specific favorable amino acid changes are identified in each of 3 amino acid positions in a polypeptide, the permutations include 3 possibilities at each position (no change from the original amino acid, and each of two favorable changes) and 3 positions. Thus, there are 3×3×3 or 27 total possibilities, including 7 that were previously examined—6 single point mutations (i.e. 2 at each of three positions) and no change at any position.

[0509] In yet another aspect, site-saturation mutagenesis can be used together with shuffling, chimerization, recombination and other mutagenizing processes, along with screening. This invention provides for the use of any mutagenizing process(es), including saturation mutagenesis, in an iterative manner. In one exemplification, the iterative use of any mutagenizing process(es) is used in combination with screening.

[0510] The invention also provides for the use of proprietary codon primers (containing a degenerate N,N,N sequence) to introduce point mutations into a polynucleotide, so as to generate a set of progeny polypeptides in which a full range of single amino acid substitutions is represented at each amino acid position; e.g., with Gene Site Saturation Mutagenesis (GSSM). The oligos used are comprised contiguously of a first homologous sequence, a degenerate N,N,N sequence and in one aspect but not necessarily a second homologous sequence. The downstream progeny translational products from the use of such oligos include all possible amino acid changes at each amino acid site along the polypeptide, because the degeneracy of the N,N,N sequence includes codons for all 20 amino acids.

[0511] In one aspect, one such degenerate oligo (comprised of one degenerate N,N,N cassette) is used for subjecting each original codon in a parental polynucleotide template to a full range of codon substitutions. In another aspect, at least two degenerate N,N,N cassettes are used—either in the same oligo or not, for subjecting at least two original codons in a parental polynucleotide template to a full range of codon substitutions. Thus, more than one N,N,N sequence can be contained in one oligo to introduce amino acid mutations at more than one site. This plurality of N,N,N sequences can be directly contiguous, or separated by one or more additional nucleotide sequence(s). In another aspect, oligos serviceable for introducing additions and deletions can be used either alone or in combination with the codons containing an N,N,N sequence, to introduce any combination or permutation of amino acid additions, deletions and/or substitutions.

[0512] In a particular exemplification, it is possible to simultaneously mutagenize two or more contiguous amino acid positions using an oligo that contains contiguous N,N,N triplets, i.e. a degenerate (N,N,N)ₙ sequence.

[0513] In another aspect, the present invention provides for the use of degenerate cassettes having less degeneracy than the N,N,N sequence. For example, it may be desirable in some instances to use (e.g. in an oligo) a degenerate triplet sequence comprised of only one N, where the N can be in the first second or third position of the triplet. Any other bases including any combinations and permutations thereof can be used in the remaining two positions of the triplet. Alternatively, it may be desirable in some instances to use (e.g., in an oligo) a degenerate N,N,N triplet sequence, N,N,G/T, or an N,N, G/C triplet sequence.

[0514] It is appreciated, however, that the use of a degenerate triplet (such as N,N,G/T or an N,N, G/C triplet sequence) as disclosed in the instant invention is advantageous for several reasons. In one aspect, this invention provides a means to systematically and fairly easily generate the substitution of the full range of possible amino acids (for a total of 20 amino acids) into each and every amino acid position in a polypeptide. Thus, for a 100 amino acid polypeptide, the invention provides a way to systematically and fairly easily generate 2000 distinct species (i.e., 20 possible amino acids per position times 100 amino acid positions). It is appreciated that there is provided, through the use of an oligo containing a degenerate N,N,G/T or an N,N, G/C triplet sequence, 32 individual sequences that code for 20 possible amino acids. Thus, in a reaction vessel in which a parental polynucleotide sequence is subjected to saturation mutagenesis using one such oligo, there are generated 32 distinct progeny polynucleotides encoding 20 distinct polypeptides. In contrast, the use of a non-degenerate oligo in site-directed mutagenesis leads to only one progeny polypeptide product per reaction vessel.

[0515] This invention also provides for the use of nondegenerate oligos, which can optionally be used in combination with degenerate primers disclosed. It is appreciated that in some situations, it is advantageous to use nondegenerate oligos to generate specific point mutations in a working polynucleotide. This provides a means to generate specific silent point mutations, point mutations leading to corresponding amino acid changes and point mutations that cause the generation of stop codons and the corresponding expression of polypeptide fragments.

[0516] Thus, in one aspect of this invention, each saturation mutagenesis reaction vessel contains polynucleotides encoding at least 20 progeny polypeptide molecules such that all 20 amino acids are represented at the one specific amino acid position corresponding to the codon position mutagenized in the parental polynucleotide. The 32-fold degenerate progeny polypeptides generated from each saturation mutagenesis reaction vessel can be subjected to clonal amplification (e.g., cloned into a suitable E. coli host using an expression vector) and subjected to expression screening. When an individual progeny polypeptide is identified by screening to display a favorable change in property (when compared to the parental polypeptide), it can be sequenced to identify the correspondingly favorable amino acid substitution contained therein.

[0517] It is appreciated that upon mutagenizing each and every amino acid position in a parental polypeptide using saturation mutagenesis as disclosed herein, favorable amino acid changes may be identified at more than one amino acid position. One or more new progeny molecules can be generated that contain a combination of all or part of these favorable amino acid substitutions. For example, if 2 specific favorable amino acid changes are identified in each of 3 amino acid positions in a polypeptide, the permutations include 3 possibilities at each position (no change from the original amino acid and each of two favorable changes) and 3 positions. Thus, there are 3×3×3 or 27 total possibilities, including 7 that were previously examined—6 single point mutations (i.e., 2 at each of three positions) and no change at any position.

[0518] Thus, in a non-limiting exemplification, this invention provides for the use of saturation mutagenesis in combination with additional mutagenization processes, such as process where two or more related polynucleotides are introduced into a suitable host cell such that a hybrid polynucleotide is generated by recombination and reductive reassortment.

[0519] In addition to performing mutagenesis along the entire sequence of a gene, the instant invention provides that mutagenesis can be use to replace each of any number of bases in a polynucleotide sequence, wherein the number of bases to be mutagenized is in one aspect every integer from 15 to 100,000. Thus, instead of mutagenizing every position along a molecule, one can subject every or a discrete number of bases (in one aspect a subset totaling from 15 to 100,000) to mutagenesis. In one aspect, a separate nucleotide is used for mutagenizing each position or group of positions along a polynucleotide sequence. A group of 3 positions to be mutagenized may be a codon. The mutations can be introduced using a mutagenic primer, containing a heterologous cassette, also referred to as a mutagenic cassette. Exemplary cassettes can have from 1 to 500 bases. Each nucleotide position in such heterologous cassettes be N, A, C, G, T, A/C, A/G, A/T, C/G, C/T, G/T, C/G/T, A/G/T, A/C/T, A/C/G, or E, where E is any base that is not A, C, G, or T (E can be referred to as a designer oligo).

[0520] In a general sense, saturation mutagenesis is comprised of mutagenizing a complete set of mutagenic cassettes (wherein each cassette is in one aspect about 1-500 bases in length) in defined polynucleotide sequence to be mutagenized (wherein the sequence to be mutagenized is in one aspect from about 15 to 100,000 bases in length). Thus, a group of mutations (ranging from 1 to 100 mutations) is introduced into each cassette to be mutagenized. A grouping of mutations to be introduced into one cassette can be different or the same from a second grouping of mutations to be introduced into a second cassette during the application of one round of saturation mutagenesis. Such groupings are exemplified by deletions, additions, groupings of particular codons and groupings of particular nucleotide cassettes.

[0521] Defined sequences to be mutagenized include a whole gene, pathway, cDNA, an entire open reading frame (ORF) and entire promoter, enhancer, repressor/transactivator, origin of replication, intron, operator, or any polynucleotide functional group. Generally, a “defined sequences” for this purpose may be any polynucleotide that a 15 base-polynucleotide sequence and polynucleotide sequences of lengths between 15 bases and 15,000 bases (this invention specifically names every integer in between). Considerations in choosing groupings of codons include types of amino acids encoded by a degenerate mutagenic cassette.

[0522] In one exemplification a grouping of mutations that can be introduced into a mutagenic cassette, this invention specifically provides for degenerate codon substitutions (using degenerate oligos) that code for 2, 3, 4, 5, 6, 7, 8, 9, 10, 11, 12, 13, 14, 15, 16, 17, 18, 19 and 20 amino acids at each position and a library of polypeptides encoded thereby.

[0523] Synthetic Ligation Reassembly (SLR)

[0524] The invention provides a non-stochastic gene modification system termed “synthetic ligation reassembly,” or simply “SLR,” a “directed evolution process,” to generate polypeptides, e.g., a polypeptide, enzyme, protein, e.g. structural or binding protein, or antibodies of the invention, with new or altered properties. SLR is a method of ligating oligonucleotide fragments together non-stochastically. This method differs from stochastic oligonucleotide shuffling in that the nucleic acid building blocks are not shuffled, concatenated or chimerized randomly, but rather are assembled non-stochastically. See, e.g., U.S. Pat. Nos. 6,773,900; 6,740,506; 6,713,282; 6,635,449; 6,605,449; 6,537,776.

[0525] In one aspect, SLR comprises the following steps: (a) providing a template polynucleotide, wherein the template polynucleotide comprises sequence encoding a homologous gene; (b) providing a plurality of building block polynucleotides, wherein the building block polynucleotides are designed to cross-over reassemble with the template polynucleotide at a predetermined sequence, and a building block polynucleotide comprises a sequence that is a variant of the homologous gene and a sequence homologous to the template polynucleotide flanking the variant sequence; (c) combining a building block polynucleotide with a template polynucleotide such that the building block polynucleotide cross-over reassembles with the template polynucleotide to generate polynucleotides comprising homologous gene sequence variations.

[0526] SLR does not depend on the presence of high levels of homology between polynucleotides to be rearranged. Thus, this method can be used to non-stochastically generate libraries (or sets) of progeny molecules comprised of over 10¹⁰⁰ different chimeras. SLR can be used to generate libraries comprised of over 10¹⁰⁰⁰ different progeny chimeras. Thus, aspects of the present invention include non-stochastic methods of producing a set of finalized chimeric nucleic acid molecule shaving an overall assembly order that is chosen by design. This method includes the steps of generating by design a plurality of specific nucleic acid building blocks having serviceable mutually compatible ligatable ends, and assembling these nucleic acid building blocks, such that a designed overall assembly order is achieved.

[0527] The mutually compatible ligatable ends of the nucleic acid building blocks to be assembled are considered to be “serviceable” for this type of ordered assembly if they enable the building blocks to be coupled in predetermined orders. Thus, the overall assembly order in which the nucleic acid building blocks can be coupled is specified by the design of the ligatable ends. If more than one assembly step is to be used, then the overall assembly order in which the nucleic acid building blocks can be coupled is also specified by the sequential order of the assembly step(s). In one aspect, the annealed building pieces are treated with an enzyme, such as a ligase (e.g. T4 DNA ligase), to achieve covalent bonding of the building pieces.

[0528] In one aspect, the design of the oligonucleotide building blocks is obtained by analyzing a set of progenitor nucleic acid sequence templates that serve as a basis for producing a progeny set of finalized chimeric polynucleotides. These parental oligonucleotide templates thus serve as a source of sequence information that aids in the design of the nucleic acid building blocks that are to be mutagenized, e.g., chimerized or shuffled. In one aspect of this method, the sequences of a plurality of parental nucleic acid templates are aligned in order to select one or more demarcation points. The demarcation points can be located at an area of homology, and are comprised of one or more nucleotides. These demarcation points are in one aspect shared by at least two of the progenitor templates. The demarcation points can thereby be used to delineate the boundaries of oligonucleotide building blocks to be generated in order to rearrange the parental polynucleotides. The demarcation points identified and selected in the progenitor molecules serve as potential chimerization points in the assembly of the final chimeric progeny molecules. A demarcation point can be an area of homology (comprised of at least one homologous nucleotide base) shared by at least two parental polynucleotide sequences. Alternatively, a demarcation point can be an area of homology that is shared by at least half of the parental polynucleotide sequences, or, it can be an area of homology that is shared by at least two thirds of the parental polynucleotide sequences. Even more in one aspect a serviceable demarcation points is an area of homology that is shared by at least three fourths of the parental polynucleotide sequences, or, it can be shared by at almost all of the parental polynucleotide sequences. In one aspect, a demarcation point is an area of homology that is shared by all of the parental polynucleotide sequences.

[0529] In one aspect, a ligation reassembly process is performed exhaustively in order to generate an exhaustive library of progeny chimeric polynucleotides. In other words, all possible ordered combinations of the nucleic acid building blocks are represented in the set of finalized chimeric nucleic acid molecules. At the same time, in another aspect, the assembly order (i.e. the order of assembly of each building block in the 5′ to 3 sequence of each finalized chimeric nucleic acid) in each combination is by design (or non-stochastic) as described above. Because of the non-stochastic nature of this invention, the possibility of unwanted side products is greatly reduced.

[0530] In another aspect, the ligation reassembly method is performed systematically. For example, the method is performed in order to generate a systematically compartmentalized library of progeny molecules, with compartments that can be screened systematically, e.g. one by one. In other words this invention provides that, through the selective and judicious use of specific nucleic acid building blocks, coupled with the selective and judicious use of sequentially stepped assembly reactions, a design can be achieved where specific sets of progeny products are made in each of several reaction vessels. This allows a systematic examination and screening procedure to be performed. Thus, these methods allow a potentially very large number of progeny molecules to be examined systematically in smaller groups. Because of its ability to perform chimerizations in a manner that is highly flexible yet exhaustive and systematic as well, particularly when there is a low level of homology among the progenitor molecules, these methods provide for the generation of a library (or set) comprised of a large number of progeny molecules. Because of the non-stochastic nature of the instant ligation reassembly invention, the progeny molecules generated in one aspect comprise a library of finalized chimeric nucleic acid molecules having an overall assembly order that is chosen by design. The saturation mutagenesis and optimized directed evolution methods also can be used to generate different progeny molecular species. It is appreciated that the invention provides freedom of choice and control regarding the selection of demarcation points, the size and number of the nucleic acid building blocks, and the size and design of the couplings. It is appreciated, furthermore, that the requirement for intermolecular homology is highly relaxed for the operability of this invention. In fact, demarcation points can even be chosen in areas of little or no intermolecular homology. For example, because of codon wobble, i.e. the degeneracy of codons, nucleotide substitutions can be introduced into nucleic acid building blocks without altering the amino acid originally encoded in the corresponding progenitor template. Alternatively, a codon can be altered such that the coding for an originally amino acid is altered. This invention provides that such substitutions can be introduced into the nucleic acid building block in order to increase the incidence of intermolecular homologous demarcation points and thus to allow an increased number of couplings to be achieved among the building blocks, which in turn allows a greater number of progeny chimeric molecules to be generated.

[0531] In one aspect, the present invention provides a non-stochastic method termed synthetic gene reassembly, that is somewhat related to stochastic shuffling, save that the nucleic acid building blocks are not shuffled or concatenated or chimerized randomly, but rather are assembled non-stochastically.

[0532] The synthetic gene reassembly method does not depend on the presence of a high level of homology between polynucleotides to be shuffled. The invention can be used to non-stochastically generate libraries (or sets) of progeny molecules comprised of over 10¹⁰⁰ different chimeras. Conceivably, synthetic gene reassembly can even be used to generate libraries comprised of over 10¹⁰⁰⁰ different progeny chimeras.

[0533] Thus, in one aspect, the invention provides a non-stochastic method of producing a set of finalized chimeric nucleic acid molecules having an overall assembly order that is chosen by design, which method is comprised of the steps of generating by design a plurality of specific nucleic acid building blocks having serviceable mutually compatible ligatable ends and assembling these nucleic acid building blocks, such that a designed overall assembly order is achieved.

[0534] The mutually compatible ligatable ends of the nucleic acid building blocks to be assembled are considered to be “serviceable” for this type of ordered assembly if they enable the building blocks to be coupled in predetermined orders. Thus, in one aspect, the overall assembly order in which the nucleic acid building blocks can be coupled is specified by the design of the ligatable ends and, if more than one assembly step is to be used, then the overall assembly order in which the nucleic acid building blocks can be coupled is also specified by the sequential order of the assembly step(s). In a one aspect of the invention, the annealed building pieces are treated with an enzyme, such as a ligase (e.g., T4 DNA ligase) to achieve covalent bonding of the building pieces.

[0535] In a another aspect, the design of nucleic acid building blocks is obtained upon analysis of the sequences of a set of progenitor nucleic acid templates that serve as a basis for producing a progeny set of finalized chimeric nucleic acid molecules. These progenitor nucleic acid templates thus serve as a source of sequence information that aids in the design of the nucleic acid building blocks that are to be mutagenized, i.e. chimerized or shuffled.

[0536] In one exemplification, the invention provides for the chimerization of a family of related genes and their encoded family of related products. In a particular exemplification, the encoded products are enzymes. The polypeptide, enzyme, protein, e.g. structural or binding proteins of the present invention can be mutagenized in accordance with the methods described herein.

[0537] Thus according to one aspect of the invention, the sequences of a plurality of progenitor nucleic acid templates (e.g., polynucleotides of the invention) are aligned in order to select one or more demarcation points, which demarcation points can be located at an area of homology. The demarcation points can be used to delineate the boundaries of nucleic acid building blocks to be generated. Thus, the demarcation points identified and selected in the progenitor molecules serve as potential chimerization points in the assembly of the progeny molecules.

[0538] Typically a serviceable demarcation point is an area of homology (comprised of at least one homologous nucleotide base) shared by at least two progenitor templates, but the demarcation point can be an area of homology that is shared by at least half of the progenitor templates, at least two thirds of the progenitor templates, at least three fourths of the progenitor templates and in one aspect at almost all of the progenitor templates. Even more in one aspect still a serviceable demarcation point is an area of homology that is shared by all of the progenitor templates.

[0539] In a one aspect, the gene reassembly process is performed exhaustively in order to generate an exhaustive library. In other words, all possible ordered combinations of the nucleic acid building blocks are represented in the set of finalized chimeric nucleic acid molecules. At the same time, the assembly order (i.e. the order of assembly of each building block in the 5′ to 3 sequence of each finalized chimeric nucleic acid) in each combination is by design (or non-stochastic). Because of the non-stochastic nature of the method, the possibility of unwanted side products is greatly reduced.

[0540] In another aspect, the method provides that the gene reassembly process is performed systematically, for example to generate a systematically compartmentalized library, with compartments that can be screened systematically, e.g., one by one. In other words the invention provides that, through the selective and judicious use of specific nucleic acid building blocks, coupled with the selective and judicious use of sequentially stepped assembly reactions, an experimental design can be achieved where specific sets of progeny products are made in each of several reaction vessels. This allows a systematic examination and screening procedure to be performed. Thus, it allows a potentially very large number of progeny molecules to be examined systematically in smaller groups.

[0541] Because of its ability to perform chimerizations in a manner that is highly flexible yet exhaustive and systematic as well, particularly when there is a low level of homology among the progenitor molecules, the instant invention provides for the generation of a library (or set) comprised of a large number of progeny molecules. Because of the non-stochastic nature of the instant gene reassembly invention, the progeny molecules generated in one aspect comprise a library of finalized chimeric nucleic acid molecules having an overall assembly order that is chosen by design. In a particularly aspect, such a generated library is comprised of greater than 10³ to greater than 10¹⁰⁰⁰ different progeny molecular species.

[0542] In one aspect, a set of finalized chimeric nucleic acid molecules, produced as described is comprised of a polynucleotide encoding a polypeptide. According to one aspect, this polynucleotide is a gene, which may be a man-made gene. According to another aspect, this polynucleotide is a gene pathway, which may be a man-made gene pathway. The invention provides that one or more man-made genes generated by the invention may be incorporated into a man-made gene pathway, such as pathway operable in a eukaryotic organism (including a plant).

[0543] In another exemplification, the synthetic nature of the step in which the building blocks are generated allows the design and introduction of nucleotides (e.g., one or more nucleotides, which may be, for example, codons or introns or regulatory sequences) that can later be optionally removed in an in vitro process (e.g., by mutagenesis) or in an in vivo process (e.g., by utilizing the gene splicing ability of a host organism). It is appreciated that in many instances the introduction of these nucleotides may also be desirable for many other reasons in addition to the potential benefit of creating a serviceable demarcation point.

[0544] Thus, according to another aspect, the invention provides that a nucleic acid building block can be used to introduce an intron. Thus, the invention provides that functional introns may be introduced into a man-made gene of the invention. The invention also provides that functional introns may be introduced into a man-made gene pathway of the invention. Accordingly, the invention provides for the generation of a chimeric polynucleotide that is a man-made gene containing one (or more) artificially introduced intron(s).

[0545] Accordingly, the invention also provides for the generation of a chimeric polynucleotide that is a man-made gene pathway containing one (or more) artificially introduced intron(s). In one aspect, the artificially introduced intron(s) are functional in one or more host cells for gene splicing much in the way that naturally-occurring introns serve functionally in gene splicing. The invention provides a process of producing man-made intron-containing polynucleotides to be introduced into host organisms for recombination and/or splicing.

[0546] A man-made gene produced using the invention can also serve as a substrate for recombination with another nucleic acid. Likewise, a man-made gene pathway produced using the invention can also serve as a substrate for recombination with another nucleic acid. In one aspect, the recombination is facilitated by, or occurs at, areas of homology between the man-made, intron-containing gene and a nucleic acid, which serves as a recombination partner. In one aspect, the recombination partner may also be a nucleic acid generated by the invention, including a man-made gene or a man-made gene pathway. Recombination may be facilitated by or may occur at areas of homology that exist at the one (or more) artificially introduced intron(s) in the man-made gene.

[0547] The synthetic gene reassembly method of the invention utilizes a plurality of nucleic acid building blocks, each of which in one aspect has two ligatable ends. The two ligatable ends on each nucleic acid building block may be two blunt ends (i.e. each having an overhang of zero nucleotides), or in one aspect one blunt end and one overhang, or more in one aspect still two overhangs.

[0548] A useful overhang for this purpose may be a 3′ overhang or a 5′ overhang. Thus, a nucleic acid building block may have a 3′ overhang or alternatively a 5′ overhang or alternatively two 3′ overhangs or alternatively two 5′ overhangs. The overall order in which the nucleic acid building blocks are assembled to form a finalized chimeric nucleic acid molecule is determined by purposeful experimental design and is not random.

[0549] In one aspect, a nucleic acid building block is generated by chemical synthesis of two single-stranded nucleic acids (also referred to as single-stranded oligos) and contacting them so as to allow them to anneal to form a double-stranded nucleic acid building block.

[0550] A double-stranded nucleic acid building block can be of variable size. The sizes of these building blocks can be small or large. Exemplary sizes for building block range from 1 base pair (not including any overhangs) to 100,000 base pairs (not including any overhangs). Other exemplary size ranges are also provided, which have lower limits of from 1 by to 10,000 bp (including every integer value in between) and upper limits of from 2 by to 100,000 bp (including every integer value in between).

[0551] Many methods exist by which a double-stranded nucleic acid building block can be generated that is serviceable for the invention; and these are known in the art and can be readily performed by the skilled artisan.

[0552] According to one aspect, a double-stranded nucleic acid building block is generated by first generating two single stranded nucleic acids and allowing them to anneal to form a double-stranded nucleic acid building block. The two strands of a double-stranded nucleic acid building block may be complementary at every nucleotide apart from any that form an overhang; thus containing no mismatches, apart from any overhang(s). According to another aspect, the two strands of a double-stranded nucleic acid building block are complementary at fewer than every nucleotide apart from any that form an overhang. Thus, according to this aspect, a double-stranded nucleic acid building block can be used to introduce codon degeneracy. In one aspect the codon degeneracy is introduced using the site-saturation mutagenesis described herein, using one or more N,N,G/T cassettes or alternatively using one or more N,N,N cassettes.

[0553] The in vivo recombination method of the invention can be performed blindly on a pool of unknown hybrids or alleles of a specific polynucleotide or sequence. However, it is not necessary to know the actual DNA or RNA sequence of the specific polynucleotide.

[0554] The approach of using recombination within a mixed population of genes can be useful for the generation of any useful proteins, for example, interleukin I, antibodies, tPA and growth hormone. This approach may be used to generate proteins having altered specificity or activity. The approach may also be useful for the generation of hybrid nucleic acid sequences, for example, promoter regions, introns, exons, enhancer sequences, 31 untranslated regions or 51 untranslated regions of genes. Thus this approach may be used to generate genes having increased rates of expression. This approach may also be useful in the study of repetitive DNA sequences. Finally, this approach may be useful to mutate ribozymes or aptamers.

[0555] In one aspect the invention described herein is directed to the use of repeated cycles of reductive reassortment, recombination and selection which allow for the directed molecular evolution of highly complex linear sequences, such as DNA, RNA or proteins thorough recombination.

[0556] Optimized Directed Evolution System

[0557] The invention provides a non-stochastic gene modification system termed “optimized directed evolution system” to generate polypeptides, e.g., a polypeptide, enzyme, protein, e.g. structural or binding protein, or antibodies of the invention, with new or altered properties. Optimized directed evolution is directed to the use of repeated cycles of reductive reassortment, recombination and selection that allow for the directed molecular evolution of nucleic acids through recombination. Optimized directed evolution allows generation of a large population of evolved chimeric sequences, wherein the generated population is significantly enriched for sequences that have a predetermined number of crossover events.

[0558] A crossover event is a point in a chimeric sequence where a shift in sequence occurs from one parental variant to another parental variant. Such a point is normally at the juncture of where oligonucleotides from two parents are ligated together to form a single sequence. This method allows calculation of the correct concentrations of oligonucleotide sequences so that the final chimeric population of sequences is enriched for the chosen number of crossover events. This provides more control over choosing chimeric variants having a predetermined number of crossover events.

[0559] In addition, this method provides a convenient means for exploring a tremendous amount of the possible protein variant space in comparison to other systems. Previously, if one generated, for example, 10¹³ chimeric molecules during a reaction, it would be extremely difficult to test such a high number of chimeric variants for a particular activity. Moreover, a significant portion of the progeny population would have a very high number of crossover events which resulted in proteins that were less likely to have increased levels of a particular activity. By using these methods, the population of chimerics molecules can be enriched for those variants that have a particular number of crossover events. Thus, although one can still generate 10¹³ chimeric molecules during a reaction, each of the molecules chosen for further analysis most likely has, for example, only three crossover events. Because the resulting progeny population can be skewed to have a predetermined number of crossover events, the boundaries on the functional variety between the chimeric molecules is reduced. This provides a more manageable number of variables when calculating which oligonucleotide from the original parental polynucleotides might be responsible for affecting a particular trait.

[0560] One method for creating a chimeric progeny polynucleotide sequence is to create oligonucleotides corresponding to fragments or portions of each parental sequence. Each oligonucleotide in one aspect includes a unique region of overlap so that mixing the oligonucleotides together results in a new variant that has each oligonucleotide fragment assembled in the correct order. Alternatively protocols for practicing these methods of the invention can be found in U.S. Pat. Nos. 6,773,900; 6,740,506; 6,713,282; 6,635,449; 6,605,449; 6,537,776; 6,361,974.

[0561] The number of oligonucleotides generated for each parental variant bears a relationship to the total number of resulting crossovers in the chimeric molecule that is ultimately created. For example, three parental nucleotide sequence variants might be provided to undergo a ligation reaction in order to find a chimeric variant having, for example, greater activity at high temperature. As one example, a set of 50 oligonucleotide sequences can be generated corresponding to each portions of each parental variant. Accordingly, during the ligation reassembly process there could be up to 50 crossover events within each of the chimeric sequences. The probability that each of the generated chimeric polynucleotides will contain oligonucleotides from each parental variant in alternating order is very low. If each oligonucleotide fragment is present in the ligation reaction in the same molar quantity it is likely that in some positions oligonucleotides from the same parental polynucleotide will ligate next to one another and thus not result in a crossover event. If the concentration of each oligonucleotide from each parent is kept constant during any ligation step in this example, there is a ⅓ chance (assuming 3 parents) that an oligonucleotide from the same parental variant will ligate within the chimeric sequence and produce no crossover.

[0562] Accordingly, a probability density function (PDF) can be determined to predict the population of crossover events that are likely to occur during each step in a ligation reaction given a set number of parental variants, a number of oligonucleotides corresponding to each variant, and the concentrations of each variant during each step in the ligation reaction. The statistics and mathematics behind determining the PDF is described below. By utilizing these methods, one can calculate such a probability density function, and thus enrich the chimeric progeny population for a predetermined number of crossover events resulting from a particular ligation reaction. Moreover, a target number of crossover events can be predetermined, and the system then programmed to calculate the starting quantities of each parental oligonucleotide during each step in the ligation reaction to result in a probability density function that centers on the predetermined number of crossover events. These methods are directed to the use of repeated cycles of reductive reassortment, recombination and selection that allow for the directed molecular evolution of a nucleic acid encoding a polypeptide through recombination. This system allows generation of a large population of evolved chimeric sequences, wherein the generated population is significantly enriched for sequences that have a predetermined number of crossover events. A crossover event is a point in a chimeric sequence where a shift in sequence occurs from one parental variant to another parental variant. Such a point is normally at the juncture of where oligonucleotides from two parents are ligated together to form a single sequence. The method allows calculation of the correct concentrations of oligonucleotide sequences so that the final chimeric population of sequences is enriched for the chosen number of crossover events. This provides more control over choosing chimeric variants having a predetermined number of crossover events.

[0563] In addition, these methods provide a convenient means for exploring a tremendous amount of the possible protein variant space in comparison to other systems. By using the methods described herein, the population of chimerics molecules can be enriched for those variants that have a particular number of crossover events. Thus, although one can still generate 10¹³ chimeric molecules during a reaction, each of the molecules chosen for further analysis most likely has, for example, only three crossover events. Because the resulting progeny population can be skewed to have a predetermined number of crossover events, the boundaries on the functional variety between the chimeric molecules is reduced. This provides a more manageable number of variables when calculating which oligonucleotide from the original parental polynucleotides might be responsible for affecting a particular trait.

[0564] In one aspect, the method creates a chimeric progeny polynucleotide sequence by creating oligonucleotides corresponding to fragments or portions of each parental sequence. Each oligonucleotide in one aspect includes a unique region of overlap so that mixing the oligonucleotides together results in a new variant that has each oligonucleotide fragment assembled in the correct order. See also U.S. Pat. Nos. 6,537,776; 6,605,449.

[0565] Determining Crossover Events

[0566] Aspects of the invention include a system and software that receive a desired crossover probability density function (PDF), the number of parent genes to be reassembled, and the number of fragments in the reassembly as inputs. The output of this program is a “fragment PDF” that can be used to determine a recipe for producing reassembled genes, and the estimated crossover PDF of those genes. The processing described herein is in one aspect performed in MATLAB™ (The Mathworks, Natick, Mass.) a programming language and development environment for technical computing.

[0567] Iterative Processes

[0568] In practicing the invention, these processes can be iteratively repeated. For example, a nucleic acid (or, the nucleic acid) responsible for an altered or new a polypeptide, enzyme, protein, e.g. structural or binding protein, phenotype is identified, re-isolated, again modified, re-tested for activity. This process can be iteratively repeated until a desired phenotype is engineered. For example, an entire biochemical anabolic or catabolic pathway can be engineered into a cell, including, e.g., a polypeptide, enzyme, protein, e.g. structural or binding protein, activity.

[0569] Similarly, if it is determined that a particular oligonucleotide has no affect at all on the desired trait (e.g., a new a polypeptide, enzyme, protein, e.g. structural or binding protein, phenotype), it can be removed as a variable by synthesizing larger parental oligonucleotides that include the sequence to be removed. Since incorporating the sequence within a larger sequence prevents any crossover events, there will no longer be any variation of this sequence in the progeny polynucleotides. This iterative practice of determining which oligonucleotides are most related to the desired trait, and which are unrelated, allows more efficient exploration all of the possible protein variants that might be provide a particular trait or activity.

[0570] In Vivo Shuffling

[0571] In vivo shuffling of molecules is use in methods of the invention that provide variants of polypeptides of the invention, e.g., antibodies, a polypeptide, enzyme, protein, e.g. structural or binding protein, and the like. In vivo shuffling can be performed utilizing the natural property of cells to recombine multimers. While recombination in vivo has provided the major natural route to molecular diversity, genetic recombination remains a relatively complex process that involves 1) the recognition of homologies; 2) strand cleavage, strand invasion, and metabolic steps leading to the production of recombinant chiasma; and finally 3) the resolution of chiasma into discrete recombined molecules. The formation of the chiasma requires the recognition of homologous sequences.

[0572] In another aspect, the invention includes a method for producing a hybrid polynucleotide from at least a first polynucleotide and a second polynucleotide. The invention can be used to produce a hybrid polynucleotide by introducing at least a first polynucleotide and a second polynucleotide (e.g., one, or both, being an exemplary polypeptide-, enzyme-, protein-, e.g. structural or binding protein-encoding sequence of the invention) which share at least one region of partial sequence homology into a suitable host cell. The regions of partial sequence homology promote processes which result in sequence reorganization producing a hybrid polynucleotide. The term “hybrid polynucleotide”, as used herein, is any nucleotide sequence which results from the method of the present invention and contains sequence from at least two original polynucleotide sequences. Such hybrid polynucleotides can result from intermolecular recombination events which promote sequence integration between DNA molecules. In addition, such hybrid polynucleotides can result from intramolecular reductive reassortment processes which utilize repeated sequences to alter a nucleotide sequence within a DNA molecule.

[0573] In vivo reassortment is focused on “inter-molecular” processes collectively referred to as “recombination” which in bacteria, is generally viewed as a “RecA-dependent” phenomenon. The invention can rely on recombination processes of a host cell to recombine and re-assort sequences, or the cells' ability to mediate reductive processes to decrease the complexity of quasi-repeated sequences in the cell by deletion. This process of “reductive reassortment” occurs by an “intra-molecular”, RecA-independent process.

[0574] Therefore, in another aspect of the invention, novel polynucleotides can be generated by the process of reductive reassortment. The method involves the generation of constructs containing consecutive sequences (original encoding sequences), their insertion into an appropriate vector and their subsequent introduction into an appropriate host cell. The reassortment of the individual molecular identities occurs by combinatorial processes between the consecutive sequences in the construct possessing regions of homology, or between quasi-repeated units. The reassortment process recombines and/or reduces the complexity and extent of the repeated sequences and results in the production of novel molecular species. Various treatments may be applied to enhance the rate of reassortment. These could include treatment with ultra-violet light, or DNA damaging chemicals and/or the use of host cell lines displaying enhanced levels of “genetic instability”. Thus the reassortment process may involve homologous recombination or the natural property of quasi-repeated sequences to direct their own evolution.

[0575] Repeated or “quasi-repeated” sequences play a role in genetic instability. In the present invention, “quasi-repeats” are repeats that are not restricted to their original unit structure. Quasi-repeated units can be presented as an array of sequences in a construct; consecutive units of similar sequences. Once ligated, the junctions between the consecutive sequences become essentially invisible and the quasi-repetitive nature of the resulting construct is now continuous at the molecular level. The deletion process the cell performs to reduce the complexity of the resulting construct operates between the quasi-repeated sequences. The quasi-repeated units provide a practically limitless repertoire of templates upon which slippage events can occur. The constructs containing the quasi-repeats thus effectively provide sufficient molecular elasticity that deletion (and potentially insertion) events can occur virtually anywhere within the quasi-repetitive units.

[0576] When the quasi-repeated sequences are all ligated in the same orientation, for instance head to tail or vice versa, the cell cannot distinguish individual units. Consequently, the reductive process can occur throughout the sequences. In contrast, when for example, the units are presented head to head, rather than head to tail, the inversion delineates the endpoints of the adjacent unit so that deletion formation will favor the loss of discrete units. Thus, it is preferable with the present method that the sequences are in the same orientation. Random orientation of quasi-repeated sequences will result in the loss of reassortment efficiency, while consistent orientation of the sequences will offer the highest efficiency. However, while having fewer of the contiguous sequences in the same orientation decreases the efficiency, it may still provide sufficient elasticity for the effective recovery of novel molecules. Constructs can be made with the quasi-repeated sequences in the same orientation to allow higher efficiency.

[0577] Sequences can be assembled in a head to tail orientation using any of a variety of methods, including the following:
[0578] a) Primers that include a poly-A head and poly-T tail which when made single-stranded would provide orientation can be utilized. This is accomplished by having the first few bases of the primers made from RNA and hence easily removed RNaseH.
[0579] b) Primers that include unique restriction cleavage sites can be utilized. Multiple sites, a battery of unique sequences and repeated synthesis and ligation steps would be required.
[0580] c) The inner few bases of the primer could be thiolated and an exonuclease used to produce properly tailed molecules.

[0581] The recovery of the re-assorted sequences relies on the identification of cloning vectors with a reduced repetitive index (RI). The re-assorted encoding sequences can then be recovered by amplification. The products are re-cloned and expressed. The recovery of cloning vectors with reduced RI can be affected by:
[0582] 1) The use of vectors only stably maintained when the construct is reduced in complexity.
[0583] 2) The physical recovery of shortened vectors by physical procedures. In this case, the cloning vector would be recovered using standard plasmid isolation procedures and size fractionated on either an agarose gel, or column with a low molecular weight cut off utilizing standard procedures.
[0584] 3) The recovery of vectors containing interrupted genes which can be selected when insert size decreases.
[0585] 4) The use of direct selection techniques with an expression vector and the appropriate selection.

[0586] Encoding sequences (for example, genes) from related organisms may demonstrate a high degree of homology and encode quite diverse protein products. These types of sequences are particularly useful in the present invention as quasi-repeats. However, while the examples illustrated below demonstrate the reassortment of nearly identical original encoding sequences (quasi-repeats), this process is not limited to such nearly identical repeats.

[0587] The following example demonstrates a method of the invention. Encoding nucleic acid sequences (quasi-repeats) derived from three (3) unique species are described. Each sequence encodes a protein with a distinct set of properties. Each of the sequences differs by a single or a few base pairs at a unique position in the sequence. The quasi-repeated sequences are separately or collectively amplified and ligated into random assemblies such that all possible permutations and combinations are available in the population of ligated molecules. The number of quasi-repeat units can be controlled by the assembly conditions. The average number of quasi-repeated units in a construct is defined as the repetitive index (RI).

[0588] Once formed, the constructs may, or may not be size fractionated on an agarose gel according to published protocols, inserted into a cloning vector and transfected into an appropriate host cell. The cells are then propagated and “reductive reassortment” is effected. The rate of the reductive reassortment process may be stimulated by the introduction of DNA damage if desired. Whether the reduction in RI is mediated by deletion formation between repeated sequences by an “intra-molecular” mechanism, or mediated by recombination-like events through “inter-molecular” mechanisms is immaterial. The end result is a reassortment of the molecules into all possible combinations.

[0589] Optionally, the method comprises the additional step of screening the library members of the shuffled pool to identify individual shuffled library members having the ability to bind or otherwise interact, or catalyze a particular reaction (e.g., such as catalytic domain of an enzyme) with a predetermined macromolecule, such as for example a proteinaceous receptor, an oligosaccharide, virion, or other predetermined compound or structure.

[0590] The polypeptides that are identified from such libraries can be used for therapeutic, diagnostic, research and related purposes (e.g., catalysts, solutes for increasing osmolarity of an aqueous solution and the like) and/or can be subjected to one or more additional cycles of shuffling and/or selection.

[0591] In another aspect, it is envisioned that prior to or during recombination or reassortment, polynucleotides generated by the method of the invention can be subjected to agents or processes which promote the introduction of mutations into the original polynucleotides. The introduction of such mutations would increase the diversity of resulting hybrid polynucleotides and polypeptides encoded therefrom. The agents or processes which promote mutagenesis can include, but are not limited to: (+)-CC-1065, or a synthetic analog such as (+)-CC-1065-(N-3-Adenine (See Sun and Hurley, (1992); an N-acetylated or deacetylated 4′-fluoro-4-aminobiphenyl adduct capable of inhibiting DNA synthesis (See, for example, van de Poll et al. (1992)); or a N-acetylated or deacetylated 4-aminobiphenyl adduct capable of inhibiting DNA synthesis (See also, van de Poll et al. (1992), pp. 751-758); trivalent chromium, a trivalent chromium salt, a polycyclic aromatic hydrocarbon (PAH) DNA adduct capable of inhibiting DNA replication, such as 7-bromomethyl-benz[α]anthracene (“BMA”), tris(2,3-dibromopropyl)phosphate (“Tris-BP”), 1,2-dibromo-3-chloropropane (“DBCP”), 2-bromoacrolein (2BA), benzo[α]pyrene-7,8-dihydrodiol-9-10-epoxide (“BPDE”), a platinum(II) halogen salt, N-hydroxy-2-amino-3-methylimidazo[4,5-f]-quinoline (“N-hydroxy-IQ”) and N-hydroxy-2-amino-1-methyl-6-phenylimidazo[4,5-f]-pyridine (“N-hydroxy-PhIP”). Exemplary means for slowing or halting PCR amplification consist of UV light (+)—CC-1065 and (+)-CC-1065-(N3-Adenine). Particularly encompassed means are DNA adducts or polynucleotides comprising the DNA adducts from the polynucleotides or polynucleotides pool, which can be released or removed by a process including heating the solution comprising the polynucleotides prior to further processing.

[0592] In another aspect the invention is directed to a method of producing recombinant proteins having biological activity by treating a sample comprising double-stranded template polynucleotides encoding a wild-type protein under conditions according to the invention which provide for the production of hybrid or re-assorted polynucleotides.

[0593] Producing Sequence Variants

[0594] The invention also provides additional methods for making sequence variants of the nucleic acid (e.g., polypeptide, enzyme, protein, e.g. structural or binding protein) sequences of the invention. The invention also provides additional methods for isolating a polypeptide, enzyme, protein, e.g. structural or binding protein, using the nucleic acids and polypeptides of the invention. In one aspect, the invention provides for variants of a polypeptide, enzyme, protein, e.g. structural or binding protein, coding sequence (e.g., a gene, cDNA or message) of the invention, which can be altered by any means, including, e.g., random or stochastic methods, or, non-stochastic, or “directed evolution,” methods, as described above.

[0595] The isolated variants may be naturally occurring. Variant can also be created in vitro. Variants may be created using genetic engineering techniques such as site directed mutagenesis, random chemical mutagenesis, Exonuclease III deletion procedures, and standard cloning techniques. Alternatively, such variants, fragments, analogs, or derivatives may be created using chemical synthesis or modification procedures. Other methods of making variants are also familiar to those skilled in the art. These include procedures in which nucleic acid sequences obtained from natural isolates are modified to generate nucleic acids which encode polypeptides having characteristics which enhance their value in industrial or laboratory applications. In such procedures, a large number of variant sequences having one or more nucleotide differences with respect to the sequence obtained from the natural isolate are generated and characterized. These nucleotide differences can result in amino acid changes with respect to the polypeptides encoded by the nucleic acids from the natural isolates.

[0596] For example, variants may be created using error prone PCR. In error prone PCR, PCR is performed under conditions where the copying fidelity of the DNA polymerase is low, such that a high rate of point mutations is obtained along the entire length of the PCR product. Error prone PCR is described, e.g., in Leung (1989) Technique 1:11-15) and Caldwell (1992) PCR Methods Applic. 2:28-33. Briefly, in such procedures, nucleic acids to be mutagenized are mixed with PCR primers, reaction buffer, MgCl₂, MnCl₂, Taq polymerase and an appropriate concentration of dNTPs for achieving a high rate of point mutation along the entire length of the PCR product. For example, the reaction may be performed using 20 fmoles of nucleic acid to be mutagenized, 30 pmole of each PCR primer, a reaction buffer comprising 50 mM KCl, 10 mM Tris HCl (pH 8.3) and 0.01% gelatin, 7 mM MgCl₂, 0.5 mM MnCl₂, 5 units of Taq polymerase, 0.2 mM dGTP, 0.2 mM dATP, 1 mM dCTP, and 1 mM dTTP. PCR may be performed for 30 cycles of 94° C. for 1 min, 45° C. for 1 min, and 72° C. for 1 min. However, it will be appreciated that these parameters may be varied as appropriate. The mutagenized nucleic acids are cloned into an appropriate vector and the activities of the polypeptides encoded by the mutagenized nucleic acids are evaluated.

[0597] Variants may also be created using oligonucleotide directed mutagenesis to generate site-specific mutations in any cloned DNA of interest. Oligonucleotide mutagenesis is described, e.g., in Reidhaar-Olson (1988) Science 241:53-57. Briefly, in such procedures a plurality of double stranded oligonucleotides bearing one or more mutations to be introduced into the cloned DNA are synthesized and inserted into the cloned DNA to be mutagenized. Clones containing the mutagenized DNA are recovered and the activities of the polypeptides they encode are assessed.

[0598] Another method for generating variants is assembly PCR. Assembly PCR involves the assembly of a PCR product from a mixture of small DNA fragments. A large number of different PCR reactions occur in parallel in the same vial, with the products of one reaction priming the products of another reaction. Assembly PCR is described in, e.g., U.S. Pat. No. 5,965,408.

[0599] Still another method of generating variants is sexual PCR mutagenesis. In sexual PCR mutagenesis, forced homologous recombination occurs between DNA molecules of different but highly related DNA sequence in vitro, as a result of random fragmentation of the DNA molecule based on sequence homology, followed by fixation of the crossover by primer extension in a PCR reaction. Sexual PCR mutagenesis is described, e.g., in Stemmer (1994) Proc. Natl. Acad. Sci. USA 91:10747-10751. Briefly, in such procedures a plurality of nucleic acids to be recombined are digested with DNase to generate fragments having an average size of 50-200 nucleotides. Fragments of the desired average size are purified and resuspended in a PCR mixture. PCR is conducted under conditions which facilitate recombination between the nucleic acid fragments. For example, PCR may be performed by resuspending the purified fragments at a concentration of 10-30 ng/μl in a solution of 0.2 mM of each dNTP, 2.2 mM MgCl₂, 50 mM KCL, 10 mM Tris HCl, pH 9.0, and 0.1% Triton X-100. 2.5 units of Taq polymerase per 100:1 of reaction mixture is added and PCR is performed using the following regime: 94° C. for 60 seconds, 94° C. for 30 seconds, 50-55° C. for 30 seconds, 72° C. for 30 seconds (30-45 times) and 72° C. for 5 minutes. However, it will be appreciated that these parameters may be varied as appropriate. In some aspects, oligonucleotides may be included in the PCR reactions. In other aspects, the Klenow fragment of DNA polymerase I may be used in a first set of PCR reactions and Taq polymerase may be used in a subsequent set of PCR reactions. Recombinant sequences are isolated and the activities of the polypeptides they encode are assessed.

[0600] Variants may also be created by in vivo mutagenesis. In some aspects, random mutations in a sequence of interest are generated by propagating the sequence of interest in a bacterial strain, such as an E. coli strain, which carries mutations in one or more of the DNA repair pathways. Such “mutator” strains have a higher random mutation rate than that of a wild-type parent. Propagating the DNA in one of these strains will eventually generate random mutations within the DNA. Mutator strains suitable for use for in vivo mutagenesis are described in PCT Publication No. WO 91/16427, published Oct. 31, 1991, entitled “Methods for Phenotype Creation from Multiple Gene Populations”.

[0601] Variants may also be generated using cassette mutagenesis. In cassette mutagenesis a small region of a double stranded DNA molecule is replaced with a synthetic oligonucleotide “cassette” that differs from the native sequence. The oligonucleotide often contains completely and/or partially randomized native sequence.

[0602] Recursive ensemble mutagenesis may also be used to generate variants. Recursive ensemble mutagenesis is an algorithm for protein engineering (protein mutagenesis) developed to produce diverse populations of phenotypically related mutants whose members differ in amino acid sequence. This method uses a feedback mechanism to control successive rounds of combinatorial cassette mutagenesis. Recursive ensemble mutagenesis is described, e.g., in Arkin (1992) Proc. Natl. Acad. Sci. USA 89:7811-7815.

[0603] In some aspects, variants are created using exponential ensemble mutagenesis. Exponential ensemble mutagenesis is a process for generating combinatorial libraries with a high percentage of unique and functional mutants, wherein small groups of residues are randomized in parallel to identify, at each altered position, amino acids which lead to functional proteins. Exponential ensemble mutagenesis is described, e.g., in Delegrave (1993) Biotechnology Res. 11:1548-1552. Random and site-directed mutagenesis are described, e.g., in Arnold (1993) Current Opinion in Biotechnology 4:450-455.

[0604] In some aspects, the variants are created using shuffling procedures wherein portions of a plurality of nucleic acids which encode distinct polypeptides are fused together to create chimeric nucleic acid sequences which encode chimeric polypeptides as described in U.S. Pat. No. 5,965,408, filed Jul. 9, 1996, entitled, “Method of DNA Reassembly by Interrupting Synthesis” and U.S. Pat. No. 5,939,250, filed May 22, 1996, entitled, “Production of Enzymes Having Desired Activities by Mutagenesis.

[0605] The variants of the polypeptides of the invention may be variants in which one or more of the amino acid residues of the polypeptides of the sequences of the invention are substituted with a conserved or non-conserved amino acid residue (in one aspect a conserved amino acid residue) and such substituted amino acid residue may or may not be one encoded by the genetic code.

[0606] Conservative substitutions are those that substitute a given amino acid in a polypeptide by another amino acid of like characteristics. Typically seen as conservative substitutions are the following replacements: replacements of an aliphatic amino acid such as Alanine, Valine, Leucine and Isoleucine with another aliphatic amino acid; replacement of a Serine with a Threonine or vice versa; replacement of an acidic residue such as Aspartic acid and Glutamic acid with another acidic residue; replacement of a residue bearing an amide group, such as Asparagine and Glutamine, with another residue bearing an amide group; exchange of a basic residue such as Lysine and Arginine with another basic residue; and replacement of an aromatic residue such as Phenylalanine, Tyrosine with another aromatic residue.

[0607] Other variants are those in which one or more of the amino acid residues of a polypeptide of the invention includes a substituent group.

[0608] Still other variants are those in which the polypeptide is associated with another compound, such as a compound to increase the half-life of the polypeptide (for example, polyethylene glycol).

[0609] Additional variants are those in which additional amino acids are fused to the polypeptide, such as a leader sequence, a secretory sequence, a proprotein sequence or a sequence which facilitates purification, enrichment, or stabilization of the polypeptide.

[0610] In some aspects, the fragments, derivatives and analogs retain the same biological function or activity as the polypeptides of the invention. In other aspects, the fragment, derivative, or analog includes a proprotein, such that the fragment, derivative, or analog can be activated by cleavage of the proprotein portion to produce an active polypeptide.

[0611] Optimizing Codons to Achieve High Levels of Protein Expression in Host Cells

[0612] The invention provides methods for modifying polypeptide-, enzyme-, protein-, e.g. structural or binding protein-encoding nucleic acids to modify codon usage. In one aspect, the invention provides methods for modifying codons in a nucleic acid encoding a polypeptide, enzyme, protein, e.g. structural or binding protein, to increase or decrease its expression in a host cell. The invention also provides nucleic acids encoding a polypeptide, enzyme, protein, e.g. structural or binding protein, modified to increase its expression in a host cell, a polypeptide, enzyme, protein, e.g. structural or binding protein, so modified, and methods of making the modified a polypeptide, enzyme, protein, e.g. structural or binding protein. The method comprises identifying a “non-preferred” or a “less preferred” codon in a polypeptide-, enzyme-, protein-, e.g. structural or binding protein-encoding nucleic acid and replacing one or more of these non-preferred or less preferred codons with a “preferred codon” encoding the same amino acid as the replaced codon and at least one non-preferred or less preferred codon in the nucleic acid has been replaced by a preferred codon encoding the same amino acid. A preferred codon is a codon over-represented in coding sequences in genes in the host cell and a non-preferred or less preferred codon is a codon under-represented in coding sequences in genes in the host cell.

[0613] Host cells for expressing the nucleic acids, expression cassettes and vectors of the invention include bacteria, yeast, fungi, plant cells, insect cells and mammalian cells. Thus, the invention provides methods for optimizing codon usage in all of these cells, codon-altered nucleic acids and polypeptides made by the codon-altered nucleic acids. Exemplary host cells include gram negative bacteria, such as Escherichia coli; gram positive bacteria, such as Streptomyces sp., Lactobacillus gasseri, Lactococcus lactis, Lactococcus cremoris, Bacillus subtilis, Bacillus cereus. Exemplary host cells also include eukaryotic organisms, e.g., various yeast, such as Saccharomyces sp., including Saccharomyces cerevisiae, Schizosaccharomyces pombe, Pichia pastoris, and Kluyveromyces lactis, Hansenula polymorpha, Aspergillus niger, and mammalian cells and cell lines and insect cells and cell lines. Thus, the invention also includes nucleic acids and polypeptides optimized for expression in these organisms and species.

[0614] For example, the codons of a nucleic acid encoding a polypeptide, enzyme, protein, e.g. structural or binding protein, isolated from a bacterial cell are modified such that the nucleic acid is optimally expressed in a bacterial cell different from the bacteria from which the polypeptide, enzyme, protein, e.g. structural or binding protein was derived, a yeast, a fungi, a plant cell, an insect cell or a mammalian cell. Methods for optimizing codons are well known in the art, see, e.g., U.S. Pat. No. 5,795,737; Baca (2000) Int. J. Parasitol. 30:113-118; Hale (1998) Protein Expr. Purif. 12:185-188; Narum (2001) Infect. Immun. 69:7250-7253. See also Narum (2001) Infect. Immun. 69:7250-7253, describing optimizing codons in mouse systems; Outchkourov (2002) Protein Expr. Purif. 24:18-24, describing optimizing codons in yeast; Feng (2000) Biochemistry 39:15399-15409, describing optimizing codons in E. coli; Humphreys (2000) Protein Expr. Purif. 20:252-264, describing optimizing codon usage that affects secretion in E. coli.

### Transgenic Non-Human Animals

[0615] The invention provides transgenic non-human animals comprising a nucleic acid, a polypeptide (e.g., a polypeptide, enzyme, protein, e.g. structural or binding protein,), an expression cassette or vector or a transfected or transformed cell of the invention. The invention also provides methods of making and using these transgenic non-human animals.

[0616] The transgenic non-human animals can be, e.g., goats, rabbits, sheep, pigs (including all swine, hogs and related animals), cows, rats and mice, comprising the nucleic acids of the invention. These animals can be used, e.g., as in vivo models to study a polypeptide, enzyme, protein, e.g. structural or binding protein, activity, or, as models to screen for agents that change the polypeptide, enzyme, protein, e.g. structural or binding protein activity in vivo. The coding sequences for the polypeptides to be expressed in the transgenic non-human animals can be designed to be constitutive, or, under the control of tissue-specific, developmental-specific or inducible transcriptional regulatory factors. Transgenic non-human animals can be designed and generated using any method known in the art; see, e.g., U.S. Pat. Nos. 6,211,428; 6,187,992; 6,156,952; 6,118,044; 6,111,166; 6,107,541; 5,959,171; 5,922,854; 5,892,070; 5,880,327; 5,891,698; 5,639,940; 5,573,933; 5,387,742; 5,087,571, describing making and using transformed cells and eggs and transgenic mice, rats, rabbits, sheep, pigs and cows. See also, e.g., Pollock (1999) J. Immunol. Methods 231:147-157, describing the production of recombinant proteins in the milk of transgenic dairy animals; Baguisi (1999) Nat. Biotechnol. 17:456-461, demonstrating the production of transgenic goats. U.S. Patent No. 6,211,428, describes making and using transgenic non-human mammals which express in their brains a nucleic acid construct comprising a DNA sequence. U.S. Pat. No. 5,387,742, describes injecting cloned recombinant or synthetic DNA sequences into fertilized mouse eggs, implanting the injected eggs in pseudo-pregnant females, and growing to term transgenic mice. U.S. Pat. No. 6,187,992, describes making and using a transgenic mouse.

[0617] “Knockout animals” can also be used to practice the methods of the invention. For example, in one aspect, the transgenic or modified animals of the invention comprise a “knockout animal,” e.g., a “knockout mouse,” engineered not to express an endogenous gene, which is replaced with a gene expressing a polypeptide, enzyme, protein, e.g. structural or binding protein, of the invention, or, a fusion protein comprising a polypeptide, enzyme, protein, e.g. structural or binding protein, of the invention.

### Transgenic Plants and Seeds

[0618] The invention provides transgenic plants and seeds comprising a nucleic acid, a polypeptide (e.g., a polypeptide, enzyme, protein, e.g. structural or binding protein,), an expression cassette or vector or a transfected or transformed cell of the invention. The invention also provides plant products, e.g., oils, seeds, leaves, extracts and the like, comprising a nucleic acid and/or a polypeptide (e.g., a polypeptide, enzyme, protein, e.g. structural or binding protein,) of the invention. The transgenic plant can be dicotyledonous (a dicot) or monocotyledonous (a monocot). The invention also provides methods of making and using these transgenic plants and seeds. The transgenic plant or plant cell expressing a polypeptide of the present invention may be constructed in accordance with any method known in the art. See, for example, U.S. Pat. No. 6,309,872.

[0619] Nucleic acids and expression constructs of the invention can be introduced into a plant cell by any means. For example, nucleic acids or expression constructs can be introduced into the genome of a desired plant host, or, the nucleic acids or expression constructs can be episomes. Introduction into the genome of a desired plant can be such that the host's a polypeptide, enzyme, protein, e.g. structural or binding protein, production is regulated by endogenous transcriptional or translational control elements. The invention also provides “knockout plants” where insertion of gene sequence by, e.g., homologous recombination, has disrupted the expression of the endogenous gene. Means to generate “knockout” plants are well-known in the art, see, e.g., Strepp (1998) Proc Natl. Acad. Sci. USA 95:4368-4373; Miao (1995) Plant J 7:359-365. See discussion on transgenic plants, below.

[0620] The nucleic acids of the invention can be used to confer desired traits on essentially any plant, e.g., on starch-producing plants, such as potato, wheat, rice, barley, and the like. Nucleic acids of the invention can be used to manipulate metabolic pathways of a plant in order to optimize or alter host's expression of polypeptide, enzyme, protein, e.g. structural or binding protein. The can change a polypeptide, enzyme, protein, e.g. structural or binding protein, activity in a plant. Alternatively, a polypeptide, enzyme, protein, e.g. structural or binding protein, of the invention can be used in production of a transgenic plant to produce a compound not naturally produced by that plant. This can lower production costs or create a novel product.

[0621] In one aspect, the first step in production of a transgenic plant involves making an expression construct for expression in a plant cell. These techniques are well known in the art. They can include selecting and cloning a promoter, a coding sequence for facilitating efficient binding of ribosomes to mRNA and selecting the appropriate gene terminator sequences. One exemplary constitutive promoter is CaMV35S, from the cauliflower mosaic virus, which generally results in a high degree of expression in plants. Other promoters are more specific and respond to cues in the plant's internal or external environment. An exemplary light-inducible promoter is the promoter from the cab gene, encoding the major chlorophyll a/b binding protein.

[0622] In one aspect, the nucleic acid is modified to achieve greater expression in a plant cell. For example, a sequence of the invention is likely to have a higher percentage of A-T nucleotide pairs compared to that seen in a plant, some of which prefer G-C nucleotide pairs. Therefore, A-T nucleotides in the coding sequence can be substituted with G-C nucleotides without significantly changing the amino acid sequence to enhance production of the gene product in plant cells.

[0623] Selectable marker gene can be added to the gene construct in order to identify plant cells or tissues that have successfully integrated the transgene. This may be necessary because achieving incorporation and expression of genes in plant cells is a rare event, occurring in just a few percent of the targeted tissues or cells. Selectable marker genes encode proteins that provide resistance to agents that are normally toxic to plants, such as antibiotics or herbicides. Only plant cells that have integrated the selectable marker gene will survive when grown on a medium containing the appropriate antibiotic or herbicide. As for other inserted genes, marker genes also require promoter and termination sequences for proper function.

[0624] In one aspect, making transgenic plants or seeds comprises incorporating sequences of the invention and, optionally, marker genes into a target expression construct (e.g., a plasmid), along with positioning of the promoter and the terminator sequences. This can involve transferring the modified gene into the plant through a suitable method. For example, a construct may be introduced directly into the genomic DNA of the plant cell using techniques such as electroporation and microinjection of plant cell protoplasts, or the constructs can be introduced directly to plant tissue using ballistic methods, such as DNA particle bombardment. For example, see, e.g., Christou (1997) Plant Mol. Biol. 35:197-203; Pawlowski (1996) Mol. Biotechnol. 6:17-30; Klein (1987) Nature 327:70-73; Takumi (1997) Genes Genet. Syst. 72:63-69, discussing use of particle bombardment to introduce transgenes into wheat; and Adam (1997) supra, for use of particle bombardment to introduce YACs into plant cells. For example, Rinehart (1997) supra, used particle bombardment to generate transgenic cotton plants. Apparatus for accelerating particles is described U.S. Pat. No. 5,015,580; and, the commercially available BioRad (Biolistics) PDS-2000 particle acceleration instrument; see also, John, U.S. Pat. No. 5,608,148; and Ellis, U.S. Pat. No. 5,681,730, describing particle-mediated transformation of gymnosperms.

[0625] In one aspect, protoplasts can be immobilized and injected with a nucleic acids, e.g., an expression construct. Although plant regeneration from protoplasts is not easy with cereals, plant regeneration is possible in legumes using somatic embryogenesis from protoplast derived callus. Organized tissues can be transformed with naked DNA using gene gun technique, where DNA is coated on tungsten microprojectiles, shot 1/100th the size of cells, which carry the DNA deep into cells and organelles. Transformed tissue is then induced to regenerate, usually by somatic embryogenesis. This technique has been successful in several cereal species including maize and rice.

[0626] Nucleic acids, e.g., expression constructs, can also be introduced in to plant cells using recombinant viruses. Plant cells can be transformed using viral vectors, such as, e.g., tobacco mosaic virus derived vectors (Rouwendal (1997) Plant Mol. Biol. 33:989-999), see Porta (1996) “Use of viral replicons for the expression of genes in plants,” Mol. Biotechnol. 5:209-221.

[0627] Alternatively, nucleic acids, e.g., an expression construct, can be combined with suitable T-DNA flanking regions and introduced into a conventional Agrobacterium tumefaciens host vector. The virulence functions of the Agrobacterium tumefaciens host will direct the insertion of the construct and adjacent marker into the plant cell DNA when the cell is infected by the bacteria. Agrobacterium tumefaciens-mediated transformation techniques, including disarming and use of binary vectors, are well described in the scientific literature. See, e.g., Horsch (1984) Science 233:496-498; Fraley (1983) Proc. Natl. Acad. Sci. USA 80:4803 (1983); Gene Transfer to Plants, Potrykus, ed. (Springer-Verlag, Berlin 1995). The DNA in an A. tumefaciens cell is contained in the bacterial chromosome as well as in another structure known as a Ti (tumor-inducing) plasmid. The Ti plasmid contains a stretch of DNA termed T-DNA (˜20 kb long) that is transferred to the plant cell in the infection process and a series of vir (virulence) genes that direct the infection process. A. tumefaciens can only infect a plant through wounds: when a plant root or stem is wounded it gives off certain chemical signals, in response to which, the vir genes of A. tumefaciens become activated and direct a series of events necessary for the transfer of the T-DNA from the Ti plasmid to the plant's chromosome. The T-DNA enters the plant cell through the wound. One speculation is that the T-DNA waits until the plant DNA is being replicated or transcribed, then inserts itself into the exposed plant DNA. In order to use A. tumefaciens as a transgene vector, the tumor-inducing section of T-DNA have to be removed, while retaining the T-DNA border regions and the vir genes. The transgene is then inserted between the T-DNA border regions, where it is transferred to the plant cell and becomes integrated into the plant's chromosomes.

[0628] The invention provides for the transformation of monocotyledonous plants using the nucleic acids of the invention, including important cereals, see Hiei (1997) Plant Mol. Biol. 35:205-218. See also, e.g., Horsch, Science (1984) 233:496; Fraley (1983) Proc. Natl. Acad. Sci. USA 80:4803; Thykjaer (1997) supra; Park (1996) Plant Mol. Biol. 32:1135-1148, discussing T-DNA integration into genomic DNA. See also D'Halluin, U.S. Pat. No. 5,712,135, describing a process for the stable integration of a DNA comprising a gene that is functional in a cell of a cereal, or other monocotyledonous plant.

[0629] In one aspect, the third step can involve selection and regeneration of whole plants capable of transmitting the incorporated target gene to the next generation. Such regeneration techniques rely on manipulation of certain phytohormones in a tissue culture growth medium, typically relying on a biocide and/or herbicide marker that has been introduced together with the desired nucleotide sequences. Plant regeneration from cultured protoplasts is described in Evans et al., Protoplasts Isolation and Culture, Handbook of Plant Cell Culture, pp. 124-176, MacMillilan Publishing Company, New York, 1983; and Binding, Regeneration of Plants, Plant Protoplasts, pp. 21-73, CRC Press, Boca Raton, 1985. Regeneration can also be obtained from plant callus, explants, organs, or parts thereof. Such regeneration techniques are described generally in Klee (1987) Ann. Rev. of Plant Phys. 38:467-486. To obtain whole plants from transgenic tissues such as immature embryos, they can be grown under controlled environmental conditions in a series of media containing nutrients and hormones, a process known as tissue culture. Once whole plants are generated and produce seed, evaluation of the progeny begins.

[0630] After the expression cassette is stably incorporated in transgenic plants, it can be introduced into other plants by sexual crossing. Any of a number of standard breeding techniques can be used, depending upon the species to be crossed. Since transgenic expression of the nucleic acids of the invention leads to phenotypic changes, plants comprising the recombinant nucleic acids of the invention can be sexually crossed with a second plant to obtain a final product. Thus, the seed of the invention can be derived from a cross between two transgenic plants of the invention, or a cross between a plant of the invention and another plant. The desired effects (e.g., expression of the polypeptides of the invention to produce a plant in which flowering behavior is altered) can be enhanced when both parental plants express the polypeptides (e.g., a polypeptide, enzyme, protein, e.g. structural or binding protein,) of the invention. The desired effects can be passed to future plant generations by standard propagation means.

[0631] The nucleic acids and polypeptides of the invention are expressed in or inserted in any plant or seed. Transgenic plants of the invention can be dicotyledonous or monocotyledonous. Examples of monocot transgenic plants of the invention are grasses, such as meadow grass (blue grass, Poa), forage grass such as festuca, lolium, temperate grass, such as Agrostis, and cereals, e.g., wheat, oats, rye, barley, rice, sorghum, and maize (corn). Examples of dicot transgenic plants of the invention are tobacco, legumes, such as lupins, potato, sugar beet, pea, bean and soybean, and cruciferous plants (family Brassicaceae), such as cauliflower, rape seed, and the closely related model organism Arabidopsis thaliana. Thus, the transgenic plants and seeds of the invention include a broad range of plants, including, but not limited to, species from the genera Anacardium, Arachis, Asparagus, Atropa, Avena, Brassica, Citrus, Citrullus, Capsicum, Carthamus, Cocos, Coffea, Cucumis, Cucurbita, Daucus, Elaeis, Fragaria, Glycine, Gossypium, Helianthus, Heterocallis, Hordeum, Hyoscyamus, Lactuca, Linum, Lolium, Lupinus, Lycopersicon, Malus, Manihot, Majorana, Medicago, Nicotiana, Olea, Oryza, Panieum, Pannisetum, Persea, Phaseolus, Pistachia, Pisum, Pyrus, Prunus, Raphanus, Ricinus, Secale, Senecio, Sinapis, Solanum, Sorghum, Theobromus, Trigonella, Triticum, Vicia, Vitis, Vigna, and Zea.

[0632] In alternative embodiments, the nucleic acids of the invention are expressed in plants which contain fiber cells, including, e.g., cotton, silk cotton tree (Kapok, Ceiba pentandra), desert willow, creosote bush, winterfat, balsa, ramie, kenaf, hemp, roselle, jute, sisal abaca and flax. In alternative embodiments, the transgenic plants of the invention can be members of the genus Gossypium, including members of any Gossypium species, such as G. arboreum; G. herbaceum, G. barbadense, and G. hirsutum.

[0633] The invention also provides for transgenic plants to be used for producing large amounts of the polypeptides (e.g., a polypeptide, enzyme, protein, e.g. structural or binding protein, or antibody) of the invention. For example, see Palmgren (1997) Trends Genet. 13:348; Chong (1997) Transgenic Res. 6:289-296 (producing human milk protein beta-casein in transgenic potato plants using an auxin-inducible, bidirectional mannopine synthase (mas1′,2′) promoter with Agrobacterium tumefaciens-mediated leaf disc transformation methods).

[0634] Using known procedures, one of skill can screen for plants of the invention by detecting the increase or decrease of transgene mRNA or protein in transgenic plants. Means for detecting and quantitation of mRNAs or proteins are well known in the art.

### Polypeptides and Peptides

[0635] In one aspect, the invention provides isolated, synthetic or recombinant polypeptides having a sequence identity (e.g., at least about 50%, 51%, 52%, 53%, 54%, 55%, 56%, 57%, 58%, 59%, 60%, 61%, 62%, 63%, 64%, 65%, 66%, 67%, 68%, 69%, 70%, 71%, 72%, 73%, 74%, 75%, 76%, 77%, 78%, 79%, 80%, 81%, 82%, 83%, 84%, 85%, 86%, 87%, 88%, 89%, 90%, 91%, 92%, 93%, 94%, 95%, 96%, 97%, 98%, 99%, or more, or complete (100%) sequence identity, or homology) to an exemplary sequence of the invention, e.g., proteins having the sequence of (a sequence as set forth in) SEQ ID NO:2, SEQ ID NO:4, SEQ ID NO:6, SEQ ID NO:8, SEQ ID NO:10, etc., and all polypeptides (amino acid sequences) disclosed in the SEQ ID listing, which include all even numbered SEQ ID NO:s from SEQ ID NO:2 through SEQ ID NO:108,699). The percent sequence identity can be over the full length of the polypeptide, or, the identity can be over a region of at least about 50, 60, 70, 80, 90, 100, 150, 200, 250, 300, 350, 400, 450, 500, 550, 600, 650, 700 or more residues.

[0636] “Amino acid” or “amino acid sequence” as used herein refer to an oligopeptide, peptide, polypeptide, or protein sequence, or to a fragment, portion, or subunit of any of these and to naturally occurring or synthetic molecules. “Amino acid” or “amino acid sequence” include an oligopeptide, peptide, polypeptide, or protein sequence, or to a fragment, portion, or subunit of any of these, and to naturally occurring or synthetic molecules. The term “polypeptide” as used herein, refers to amino acids joined to each other by peptide bonds or modified peptide bonds, i.e., peptide isosteres and may contain modified amino acids other than the 20 gene-encoded amino acids. The polypeptides may be modified by either natural processes, such as post-translational processing, or by chemical modification techniques which are well known in the art. Modifications can occur anywhere in the polypeptide, including the peptide backbone, the amino acid side-chains and the amino or carboxyl termini. It will be appreciated that the same type of modification may be present in the same or varying degrees at several sites in a given polypeptide. Also a given polypeptide may have many types of modifications. Modifications include acetylation, acylation, ADP-ribosylation, amidation, covalent attachment of flavin, covalent attachment of a heme moiety, covalent attachment of a nucleotide or nucleotide derivative, covalent attachment of a lipid or lipid derivative, covalent attachment of a phosphatidylinositol, cross-linking cyclization, disulfide bond formation, demethylation, formation of covalent cross-links, formation of cysteine, formation of pyroglutamate, formylation, gamma-carboxylation, glycosylation, GPI anchor formation, hydroxylation, iodination, methylation, myristolyation, oxidation, pegylation, glucan hydrolase processing, phosphorylation, prenylation, racemization, selenoylation, sulfation and transfer-RNA mediated addition of amino acids to protein such as arginylation. (See Creighton, T.E., Proteins—Structure and Molecular Properties 2nd Ed., W.H. Freeman and Company, New York (1993); Posttranslational Covalent Modification of Proteins, B. C. Johnson, Ed., Academic Press, New York, pp. 1-12 (1983)). The peptides and polypeptides of the invention also include all “mimetic” and “peptidomimetic” forms, as described in further detail, below.

[0637] As used herein, the term “isolated” means that the material is removed from its original environment (e.g., the natural environment if it is naturally occurring). For example, a naturally-occurring polynucleotide or polypeptide present in a living animal is not isolated, but the same polynucleotide or polypeptide, separated from some or all of the coexisting materials in the natural system, is isolated. Such polynucleotides could be part of a vector and/or such polynucleotides or polypeptides could be part of a composition and still be isolated in that such vector or composition is not part of its natural environment. As used herein, the term “purified” does not require absolute purity; rather, it is intended as a relative definition. Individual nucleic acids obtained from a library have been conventionally purified to electrophoretic homogeneity. The sequences obtained from these clones could not be obtained directly either from the library or from total human DNA. In one embodiment, purified nucleic acids of the invention have been purified from the remainder of the genomic DNA in the organism by at least 10⁴-10⁶ fold. However, the term “purified” also includes nucleic acids which have been purified from the remainder of the genomic DNA or from other sequences in a library or other environment by at least one order of magnitude, typically two or three orders and more typically four or five orders of magnitude.

[0638] “Recombinant” polypeptides or proteins refer to polypeptides or proteins produced by recombinant DNA techniques; i.e., produced from cells transformed by an exogenous DNA construct encoding the desired polypeptide or protein. “Synthetic” polypeptides or proteins of the invention can be those prepared by chemical synthesis. Solid-phase chemical peptide synthesis methods can also be used to synthesize the polypeptide or fragments of the invention. Such method have been known in the art since the early 1960's (Merrifield, R. B., J. Am. Chem. Soc., 85:2149-2154, 1963) (See also Stewart, J. M. and Young, J. D., Solid Phase Peptide Synthesis, 2nd Ed., Pierce Chemical Co., Rockford, Ill., pp. 11-12)) and have recently been employed in commercially available laboratory peptide design and synthesis kits (Cambridge Research Biochemicals). Such commercially available laboratory kits have generally utilized the teachings of H. M. Geysen et al, Proc. Natl. Acad. Sci., USA, 81:3998 (1984) and provide for synthesizing peptides upon the tips of a multitude of “rods” or “pins” all of which are connected to a single plate.

[0639] The invention provides polypeptides and peptides having amino acid sequences that are “substantially identical” to a polypeptide of the invention, e.g., an exemplary sequence of the invention; in one aspect, a “substantially identical” sequence comprises an amino acid sequence that differs from a reference sequence (exemplary sequence of the invention) by one or more conservative or non-conservative amino acid substitutions, deletions, or insertions. In one aspect, the substitution occurs at a site that is not the active site of the molecule, or, alternatively the substitution occurs at a site that is the active site of the molecule, provided that the polypeptide essentially retains its functional (enzymatic) properties. A conservative amino acid substitution, for example, substitutes one amino acid for another of the same class (e.g., substitution of one hydrophobic amino acid, such as isoleucine, valine, leucine, or methionine, for another, or substitution of one polar amino acid for another, such as substitution of arginine for lysine, glutamic acid for aspartic acid or glutamine for asparagine). One or more amino acids can be deleted, for example, from a polypeptide, resulting in modification of the structure of the polypeptide, without significantly altering its biological activity. For example, amino- or carboxyl-terminal amino acids that are not required for a polypeptide, enzyme, protein, e.g. structural or binding protein, biological activity can be removed. Modified polypeptide sequences of the invention can be assayed for enzyme, structural or binding activity by any number of methods, including contacting the modified polypeptide sequence with a substrate and determining whether the modified polypeptide decreases the amount of specific substrate in the assay or increases the bioproducts of the reaction of a functional polypeptide, enzyme, protein, e.g. structural or binding protein, with the substrate. Assays for enzyme activity, binding activity and/or structural activity are well known in the art.

[0640] “Fragments” as used herein are a portion of a naturally occurring protein which can exist in at least two different conformations. Fragments can have the same or substantially the same amino acid sequence as the naturally occurring protein. Fragments which have different three dimensional structures as the naturally occurring protein are also included. An example of this, is a “pro-form” molecule, such as a low activity proprotein that can be modified by cleavage to produce a mature enzyme with significantly higher activity.

[0641] Polypeptides or peptides of the invention can also be shorter than the full length of exemplary polypeptides. In alternative aspects, the invention provides polypeptides (peptides, fragments) ranging in size between about 5 and the full length of a polypeptide, e.g., an enzyme, such as a polypeptide, enzyme, protein, e.g. structural or binding protein; exemplary sizes being of about 5, 10, 15, 20, 25, 30, 35, 40, 45, 50, 55, 60, 65, 70, 75, 80, 85, 90, 100, 125, 150, 175, 200, 250, 300, 350, 400, 450, 500, 550, 600, 650, 700, or more residues, e.g., contiguous residues of an exemplary a polypeptide, enzyme, protein, e.g. structural or binding protein, of the invention. Peptides of the invention (e.g., a subsequence of an exemplary polypeptide of the invention) can be useful as, e.g., labeling probes, antigens, toleragens, motifs, a polypeptide, enzyme, protein, e.g. structural or binding protein, active sites (e.g., “catalytic domains”), signal sequences and/or prepro domains.

[0642] In alternative aspects, polypeptides of the invention having enzyme, structural or binding activity are members of a genus of polypeptides sharing specific structural elements, e.g., amino acid residues, that correlate with enzyme, structural or binding activity. These shared structural elements can be used for the routine generation of polypeptide, enzyme, protein, e.g. structural or binding protein, variants. These shared structural elements of a polypeptide, enzyme, protein, e.g. structural or binding protein, of the invention can be used as guidance for the routine generation of a polypeptide, enzyme, protein, e.g. structural or binding protein, variants within the scope of the genus of polypeptides of the invention.

[0643] Polypeptides and peptides of the invention can be isolated from natural sources, be synthetic, or be recombinantly generated polypeptides. Peptides and proteins can be recombinantly expressed in vitro or in vivo. The peptides and polypeptides of the invention can be made and isolated using any method known in the art. Polypeptide and peptides of the invention can also be synthesized, whole or in part, using chemical methods well known in the art. See e.g., Caruthers (1980) Nucleic Acids Res. Symp. Ser. 215-223; Horn (1980) Nucleic Acids Res. Symp. Ser. 225-232; Banga, A. K., Therapeutic Peptides and Proteins, Formulation, Processing and Delivery Systems (1995) Technomic Publishing Co., Lancaster, Pa. For example, peptide synthesis can be performed using various solid-phase techniques (see e.g., Roberge (1995) Science 269:202; Merrifield (1997) Methods Enzymol. 289:3-13) and automated synthesis may be achieved, e.g., using the ABI 431A Peptide Synthesizer (Perkin Elmer) in accordance with the instructions provided by the manufacturer.

[0644] In some embodiments, the isolated, synthetic or recombinant polypeptide of the invention have an enzyme activity, a binding activity and/or a structural activity which is thermostable or thermotolerant, or the isolated, synthetic or recombinant nucleic acids encode a polypeptide having an enzyme activity, a binding activity and/or a structural activity which is thermostable or thermotolerant. In alternative embodiments, a thermostable polypeptide of the invention can retain an enzyme activity, a binding activity and/or a structural activity, under conditions comprising a temperature range from about −100° C. to about −80° C., about −80° C. to about −40° C., about −40° C. to about −20° C., about −20° C. to about 0° C., about 0° C. to about 37° C., about 0° C. to about 5° C., about 5° C. to about 15° C., about 15° C. to about 25° C., about 25° C. to about 37° C., about 37° C. to about 45° C., about 45° C. to about 55° C., about 55° C. to about 70° C., about 70° C. to about 75° C., about 75° C. to about 85° C., about 85° C. to about 90° C., about 90° C. to about 95° C., about 95° C. to about 100° C., about 100° C. to about 105° C., about 105° C. to about 110° C., about 110° C. to about 120° C., or 95° C., 96° C., 97° C., 98° C., 99° C., 100° C., 101° C., 102° C., 103° C., 104° C., 105° C., 106° C., 107° C., 108° C., 109° C., 110° C., 111° C., 112° C., 113° C., 114° C., 115° C. or more. The thermostable polypeptides according to the invention can retain an enzyme activity, a binding activity and/or a structural activity in temperatures in the range from about −100° C. to about −80° C., about −80° C. to about −40° C., about −40° C. to about −20° C., about −20° C. to about 0° C., about 0° C. to about 5° C., about 5° C. to about 15° C., about 15° C. to about 25° C., about 25° C. to about 37° C., about 37° C. to about 45° C., about 45° C. to about 55° C., about 55° C. to about 70° C., about 70° C. to about 75° C., about 75° C. to about 85° C., about 85° C. to about 90° C., about 90° C. to about 95° C., about 95° C. to about 100° C., about 100° C. to about 105° C., about 105° C. to about 110° C., about 110° C. to about 120° C., or 95° C., 96° C., 97° C., 98° C., 99° C., 100° C., 101° C., 102° C., 103° C., 104° C., 105° C., 106° C., 107° C., 108° C., 109° C., 110° C., 111° C., 112° C., 113° C., 114° C., 115° C. or more. In some embodiments, the thermostable polypeptides of this invention retains an enzyme activity, a binding activity and/or a structural activity at a temperature in the ranges described above, at about pH 3.0, about pH 3.5, about pH 4.0, about pH 4.5, about pH 5.0, about pH 5.5, about pH 6.0, about pH 6.5, about pH 7.0, about pH 7.5, about pH 8.0, about pH 8.5, about pH 9.0, about pH 9.5, about pH 10.0, about pH 10.5, about pH 11.0, about pH 11.5, about pH 12.0 or more.

[0645] In other embodiments, the isolated, synthetic or recombinant polypeptide of the invention has an enzyme activity, a binding activity and/or a structural activity which is thermotolerant, or the isolated, synthetic or recombinant nucleic acids encode a polypeptide having an enzyme activity, a binding activity and/or a structural activity which is thermotolerant. The thermotolerant polypeptides of the invention can retain an enzyme activity, a binding activity and/or a structural activity after exposure to conditions comprising a temperature in the range from about −100° C. to about −80° C., about −80° C. to about −40° C., about −40° C. to about −20° C., about −20° C. to about 0° C., about 0° C. to about 5° C., about 5° C. to about 15° C., about 15° C. to about 25° C., about 25° C. to about 37° C., about 37° C. to about 45° C., about 45° C. to about 55° C., about 55° C. to about 70° C., about 70° C. to about 75° C., about 75° C. to about 85° C., about 85° C. to about 90° C., about 90° C. to about 95° C., about 95° C. to about 100° C., about 100° C. to about 105° C., about 105° C. to about 110° C., about 110° C. to about 120° C., or 95° C., 96° C., 97° C., 98° C., 99° C., 100° C., 101° C., 102° C., 103° C., 104° C., 105° C., 106° C., 107° C., 108° C., 109° C., 110° C., 111° C., 112° C., 113° C., 114° C., 115° C. or more. The thermotolerant polypeptides of the invention can retain an enzyme activity, a binding activity and/or a structural activity after exposure to a temperature in the range from about −100° C. to about −80° C., about −80° C. to about −40° C., about −40° C. to about −20° C., about −20° C. to about 0° C., about 0° C. to about 5° C., about 5° C. to about 15° C., about 15° C. to about 25° C., about 25° C. to about 37° C., about 37° C. to about 45° C., about 45° C. to about 55° C., about 55° C. to about 70° C., about 70° C. to about 75° C., about 75° C. to about 85° C., about 85° C. to about 90° C., about 90° C. to about 95° C., about 95° C. to about 100° C., about 100° C. to about 105° C., about 105° C. to about 110° C., about 110° C. to about 120° C., or 95° C., 96° C., 97° C., 98° C., 99° C., 100° C., 101° C., 102° C., 103° C., 104° C., 105° C., 106° C., 107° C., 108° C., 109° C., 110° C., 111° C., 112° C., 113° C., 114° C., 115° C. or more. In some embodiments, the thermotolerant polypeptides of the invention retain an enzyme activity, a binding activity and/or a structural activity after exposure to a temperature in the ranges described above, at about pH 3.0, about pH 3.5, about pH 4.0, about pH 4.5, about pH 5.0, about pH 5.5, about pH 6.0, about pH 6.5, about pH 7.0, about pH 7.5, about pH 8.0, about pH 8.5, about pH 9.0, about pH 9.5, about pH 10.0, about pH 10.5, about pH 11.0, about pH 11.5, about pH 12.0 or more.

[0646] In some embodiments, the polypeptide can retain an enzyme activity, a binding activity and/or a structural activity under conditions comprising about pH 6.5, pH 6, pH 5.5, pH 5, pH 4.5, pH 4.0, pH 3.5, pH 3.0 or less (more acidic) pH. In other embodiments, the polypeptide can retain an enzyme activity, a binding activity and/or a structural activity under conditions comprising about pH 7, pH 7.5 pH 8.0, pH 8.5, pH 9, pH 9.5, pH 10, pH 10.5, pH 11.0, pH 11.5, pH 12, pH 12.5 or more (more basic) pH. In some embodiments, the polypeptide can retain an enzyme activity, a binding activity and/or a structural activity after exposure to conditions comprising about pH 6.5, pH 6, pH 5.5, pH 5, pH 4.5, pH 4.0, pH 3.5, pH 3.0 or less (more acidic) pH. In other embodiments, the polypeptide can retain an enzyme activity, a binding activity and/or a structural activity after exposure to conditions comprising about pH 7, pH 7.5 pH 8.0, pH 8.5, pH 9, pH 9.5, pH 10, pH 10.5, pH 11.0, pH 11.5, pH 12, pH 12.5 or more (more basic) pH.

[0647] The peptides and polypeptides of the invention can also be glycosylated. The glycosylation can be added post-translationally either chemically or by cellular biosynthetic mechanisms, wherein the later incorporates the use of known glycosylation motifs, which can be native to the sequence or can be added as a peptide or added in the nucleic acid coding sequence. The glycosylation can be O-linked or N-linked.

[0648] The peptides and polypeptides of the invention, as defined above, include all “mimetic” and “peptidomimetic” forms. The terms “mimetic” and “peptidomimetic” refer to a synthetic chemical compound which has substantially the same structural and/or functional characteristics of the polypeptides of the invention. The mimetic can be either entirely composed of synthetic, non-natural analogues of amino acids, or, is a chimeric molecule of partly natural peptide amino acids and partly non-natural analogs of amino acids. The mimetic can also incorporate any amount of natural amino acid conservative substitutions as long as such substitutions also do not substantially alter the mimetic's structure and/or activity. As with polypeptides of the invention which are conservative variants or members of a genus of polypeptides of the invention (e.g., having about 50% or more sequence identity to an exemplary sequence of the invention), routine experimentation will determine whether a mimetic is within the scope of the invention, i.e., that its structure and/or function is not substantially altered. Thus, in one aspect, a mimetic composition is within the scope of the invention if it has a polypeptide, enzyme, protein, e.g. structural or binding protein's activity.

[0649] Polypeptide mimetic compositions of the invention can contain any combination of non-natural structural components. In alternative aspect, mimetic compositions of the invention include one or all of the following three structural groups: a) residue linkage groups other than the natural amide bond (“peptide bond”) linkages; b) non-natural residues in place of naturally occurring amino acid residues; or c) residues which induce secondary structural mimicry, i.e., to induce or stabilize a secondary structure, e.g., a beta turn, gamma turn, beta sheet, alpha helix conformation, and the like. For example, a polypeptide of the invention can be characterized as a mimetic when all or some of its residues are joined by chemical means other than natural peptide bonds. Individual peptidomimetic residues can be joined by peptide bonds, other chemical bonds or coupling means, such as, e.g., glutaraldehyde, N-hydroxysuccinimide esters, bifunctional maleimides, N,N′-dicyclohexylcarbodiimide (DCC) or N,N′-diisopropylcarbodiimide (DIC). Linking groups that can be an alternative to the traditional amide bond (“peptide bond”) linkages include, e.g., ketomethylene (e.g., —C(═O)—CH₂— for —C(═O)—NH—), aminomethylene (CH₂—NH), ethylene, olefin (CH═CH), ether (CH₂—O), thioether (CH₂—S), tetrazole (CN₄—), thiazole, retroamide, thioamide, or ester (see, e.g., Spatola (1983) in Chemistry and Biochemistry of Amino Acids, Peptides and Proteins, Vol. 7, pp 267-357, “Peptide Backbone Modifications,” Marcell Dekker, NY).

[0650] A polypeptide of the invention can also be characterized as a mimetic by containing all or some non-natural residues in place of naturally occurring amino acid residues. Non-natural residues are well described in the scientific and patent literature; a few exemplary non-natural compositions useful as mimetics of natural amino acid residues and guidelines are described below. Mimetics of aromatic amino acids can be generated by replacing by, e.g., D- or L-naphylalanine; D- or L-phenylglycine; D- or L-2 thieneylalanine; D- or L-1, -2,3-, or 4-pyreneylalanine; D- or L-3 thieneylalanine; D- or L-(2-pyridinyl)-alanine; D- or L-(3-pyridinyl)-alanine; D- or L-(2-pyrazinyl)-alanine; D- or L-(4-isopropyl)-phenylglycine; D-(trifluoromethyl)-phenylglycine; D-(trifluoromethyl)-phenylalanine; D-p-fluoro-phenylalanine; D- or L-p-biphenylphenylalanine; D- or L-p-methoxy-biphenylphenylalanine; D- or L-2-indole(alkyl)alanines; and, D- or L-alkylainines, where alkyl can be substituted or unsubstituted methyl, ethyl, propyl, hexyl, butyl, pentyl, isopropyl, iso-butyl, sec-isotyl, iso-pentyl, or a non-acidic amino acids. Aromatic rings of a non-natural amino acid include, e.g., thiazolyl, thiophenyl, pyrazolyl, benzimidazolyl, naphthyl, furanyl, pyrrolyl, and pyridyl aromatic rings.

[0651] Mimetics of acidic amino acids can be generated by substitution by, e.g., non-carboxylate amino acids while maintaining a negative charge; (phosphono)alanine; sulfated threonine. Carboxyl side groups (e.g., aspartyl or glutamyl) can also be selectively modified by reaction with carbodiimides (R′—N—C—N—R′) such as, e.g., 1-cyclohexyl-3(2-morpholinyl-(4-ethyl) carbodiimide or 1-ethyl-3(4-azonia-4,4-dimetholpentyl) carbodiimide. Aspartyl or glutamyl can also be converted to asparaginyl and glutaminyl residues by reaction with ammonium ions. Mimetics of basic amino acids can be generated by substitution with, e.g., (in addition to lysine and arginine) the amino acids ornithine, citrulline, or (guanidino)-acetic acid, or (guanidino)alkyl-acetic acid, where alkyl is defined above. Nitrile derivative (e.g., containing the CN-moiety in place of COOH) can be substituted for asparagine or glutamine. Asparaginyl and glutaminyl residues can be deaminated to the corresponding aspartyl or glutamyl residues. Arginine residue mimetics can be generated by reacting arginyl with, e.g., one or more conventional reagents, including, e.g., phenylglyoxal, 2,3-butanedione, 1,2-cyclo-hexanedione, or ninhydrin, in one aspect under alkaline conditions. Tyrosine residue mimetics can be generated by reacting tyrosyl with, e.g., aromatic diazonium compounds or tetranitromethane. N-acetylimidizol and tetranitromethane can be used to form O-acetyl tyrosyl species and 3-nitro derivatives, respectively. Cysteine residue mimetics can be generated by reacting cysteinyl residues with, e.g., alpha-haloacetates such as 2-chloroacetic acid or chloroacetamide and corresponding amines; to give carboxymethyl or carboxyamidomethyl derivatives. Cysteine residue mimetics can also be generated by reacting cysteinyl residues with, e.g., bromo-trifluoroacetone, alpha-bromo-beta-(5-imidozoyl) propionic acid; chloroacetyl phosphate, N-alkylmaleimides, 3-nitro-2-pyridyl disulfide; methyl 2-pyridyl disulfide; p-chloromercuribenzoate; 2-chloromercuri-4 nitrophenol; or, chloro-7-nitrobenzo-oxa-1,3-diazole. Lysine mimetics can be generated (and amino terminal residues can be altered) by reacting lysinyl with, e.g., succinic or other carboxylic acid anhydrides. Lysine and other alpha-amino-containing residue mimetics can also be generated by reaction with imidoesters, such as methyl picolinimidate, pyridoxal phosphate, pyridoxal, chloroborohydride, trinitro-benzenesulfonic acid, O-methylisourea, 2,4, pentanedione, and transamidase-catalyzed reactions with glyoxylate. Mimetics of methionine can be generated by reaction with, e.g., methionine sulfoxide. Mimetics of proline include, e.g., pipecolic acid, thiazolidine carboxylic acid, 3- or 4-hydroxy proline, dehydroproline, 3- or 4-methylproline, or 3,3,-dimethylproline. Histidine residue mimetics can be generated by reacting histidyl with, e.g., diethylprocarbonate or para-bromophenacyl bromide. Other mimetics include, e.g., those generated by hydroxylation of proline and lysine; phosphorylation of the hydroxyl groups of seryl or threonyl residues; methylation of the alpha-amino groups of lysine, arginine and histidine; acetylation of the N-terminal amine; methylation of main chain amide residues or substitution with N-methyl amino acids; or amidation of C-terminal carboxyl groups.

[0652] A residue, e.g., an amino acid, of a polypeptide of the invention can also be replaced by an amino acid (or peptidomimetic residue) of the opposite chirality. Thus, any amino acid naturally occurring in the L-configuration (which can also be referred to as the R or S, depending upon the structure of the chemical entity) can be replaced with the amino acid of the same chemical structural type or a peptidomimetic, but of the opposite chirality, referred to as the D-amino acid, but also can be referred to as the R- or S-form.

[0653] The invention also provides methods for modifying the polypeptides of the invention by either natural processes, such as post-translational processing (e.g., phosphorylation, acylation, etc), or by chemical modification techniques, and the resulting modified polypeptides. Modifications can occur anywhere in the polypeptide, including the peptide backbone, the amino acid side-chains and the amino or carboxyl termini. In one aspect, the same type of modification may be present in the same or varying degrees at several sites in a given polypeptide. Also a given polypeptide may have many types of modifications. Modifications of peptides or polypeptides of the invention include acetylation, acylation, ADP-ribosylation, amidation, covalent attachment of flavin, covalent attachment of a heme moiety, covalent attachment of a nucleotide or nucleotide derivative, covalent attachment of a lipid or lipid derivative, covalent attachment of a phosphatidylinositol, cross-linking cyclization, disulfide bond formation, demethylation, formation of covalent cross-links, formation of cysteine, formation of pyroglutamate, formylation, gamma-carboxylation, glycosylation, GPI anchor formation, hydroxylation, iodination, methylation, myristolyation, oxidation, pegylation, proteolytic processing, phosphorylation, prenylation, racemization, selenoylation, sulfation, and transfer-RNA mediated addition of amino acids to protein such as arginylation. See, e.g., Creighton, T. E., Proteins—Structure and Molecular Properties 2nd Ed., W.H. Freeman and Company, New York (1993); Posttranslational Covalent Modification of Proteins, B. C. Johnson, Ed., Academic Press, New York, pp. 1-12 (1983).

[0654] Solid-phase chemical peptide synthesis methods can also be used to synthesize the polypeptide or fragments of the invention. Such method have been known in the art since the early 1960's (Merrifield, R. B., J. Am. Chem. Soc., 85:2149-2154, 1963) (See also Stewart, J. M. and Young, J. D., Solid Phase Peptide Synthesis, 2nd Ed., Pierce Chemical Co., Rockford, Ill., pp. 11-12)) and have recently been employed in commercially available laboratory peptide design and synthesis kits (Cambridge Research Biochemicals). Such commercially available laboratory kits have generally utilized the teachings of H. M. Geysen et al, Proc. Natl. Acad. Sci., USA, 81:3998 (1984) and provide for synthesizing peptides upon the tips of a multitude of “rods” or “pins” all of which are connected to a single plate. When such a system is utilized, a plate of rods or pins is inverted and inserted into a second plate of corresponding wells or reservoirs, which contain solutions for attaching or anchoring an appropriate amino acid to the pin's or rod's tips. By repeating such a process step, i.e., inverting and inserting the rod's and pin's tips into appropriate solutions, amino acids are built into desired peptides. In addition, a number of available FMOC peptide synthesis systems are available. For example, assembly of a polypeptide or fragment can be carried out on a solid support using an Applied Biosystems, Inc. model 431A™ automated peptide synthesizer. Such equipment provides ready access to the peptides of the invention, either by direct synthesis or by synthesis of a series of fragments that can be coupled using other known techniques.

[0655] The polypeptides of the invention include a polypeptide, enzyme, protein, e.g. structural or binding protein, in an active or inactive form. For example, the polypeptides of the invention include proproteins before “maturation” or processing of prepro sequences, e.g., by a proprotein-processing enzyme, such as a proprotein convertase to generate an “active” mature protein. The polypeptides of the invention include a polypeptide, enzyme, protein, e.g. structural or binding protein, inactive for other reasons, e.g., before “activation” by a post-translational processing event, e.g., an endo- or exo-peptidase or proteinase action, a phosphorylation event, an amidation, a glycosylation or a sulfation, a dimerization event, and the like. The polypeptides of the invention include all active forms, including active subsequences, e.g., catalytic domains or active sites, of the enzyme.

[0656] The invention includes immobilized polypeptides, enzymes, proteins, e.g. structural or binding proteins, anti-polypeptides, anti-enzymes, anti-proteins, e.g. anti-structural or anti-binding proteins, antibodies and fragments thereof. The invention provides methods for inhibiting a polypeptide, enzyme, protein, e.g. structural or binding protein, activity, e.g., using dominant negative mutants or anti-polypeptide, anti-enzyme, anti-protein, e.g. anti-structural or anti-binding protein antibodies of the invention. The invention includes heterocomplexes, e.g., fusion proteins, heterodimers, etc., comprising the polypeptide, enzyme, protein, e.g. structural or binding proteins of the invention.

[0657] Polypeptides of the invention can have an enzyme, structural or binding activity under various conditions, e.g., extremes in pH and/or temperature, oxidizing agents, and the like. The invention provides methods leading to alternative a polypeptide, enzyme, protein, e.g. structural or binding protein, preparations with different catalytic efficiencies and stabilities, e.g., towards temperature, oxidizing agents and changing wash conditions. In one aspect, a polypeptide, enzyme, protein, e.g. structural or binding protein, variants can be produced using techniques of site-directed mutagenesis and/or random mutagenesis. In one aspect, directed evolution can be used to produce a great variety of a polypeptide, enzyme, protein, e.g. structural or binding protein, variants with alternative specificities and stability.

[0658] The proteins of the invention are also useful as research reagents to identify a polypeptide, enzyme, protein, e.g. structural or binding protein, modulators, e.g., activators or inhibitors of a polypeptide, enzyme, protein, e.g. structural or binding protein, activity. Briefly, test samples (compounds, broths, extracts, and the like) are added to a polypeptide, enzyme, protein, e.g. structural or binding protein, assays to determine their ability to inhibit substrate cleavage. Inhibitors identified in this way can be used in industry and research to reduce or prevent undesired proteolysis. As with a polypeptide, enzyme, protein, e.g. structural or binding protein, inhibitors can be combined to increase the spectrum of activity.

[0659] The enzymes of the invention are also useful as research reagents to digest proteins or in protein sequencing. For example, the polypeptide, enzyme, protein, e.g. structural or binding proteins may be used to break polypeptides into smaller fragments for sequencing using, e.g. an automated sequencer.

[0660] The invention also provides methods of discovering new a polypeptide, enzyme, protein, e.g. structural or binding protein, using the nucleic acids, polypeptides and antibodies of the invention. In one aspect, phagemid libraries are screened for expression-based discovery of a polypeptide, enzyme, protein, e.g. structural or binding protein. In another aspect, lambda phage libraries are screened for expression-based discovery of a polypeptide, enzyme, protein, e.g. structural or binding protein. Screening of the phage or phagemid libraries can allow the detection of toxic clones; improved access to substrate; reduced need for engineering a host, by-passing the potential for any bias resulting from mass excision of the library; and, faster growth at low clone densities. Screening of phage or phagemid libraries can be in liquid phase or in solid phase. In one aspect, the invention provides screening in liquid phase. This gives a greater flexibility in assay conditions; additional substrate flexibility; higher sensitivity for weak clones; and ease of automation over solid phase screening.

[0661] The invention provides screening methods using the proteins and nucleic acids of the invention and robotic automation to enable the execution of many thousands of biocatalytic reactions and screening assays in a short period of time, e.g., per day, as well as ensuring a high level of accuracy and reproducibility (see discussion of arrays, below). As a result, a library of derivative compounds can be produced in a matter of weeks. For further teachings on modification of molecules, including small molecules, see PCT/US94/09174.

[0662] In one aspect, polypeptides or fragments of the invention may be obtained through biochemical enrichment or purification procedures. The sequence of potentially homologous polypeptides or fragments may be determined by a polypeptide, enzyme, protein, e.g. structural or binding protein, assays, gel electrophoresis and/or microsequencing. The sequence of the prospective polypeptide or fragment of the invention can be compared to an exemplary polypeptide of the invention, or a fragment, e.g., comprising at least about 5, 10, 15, 20, 25, 30, 35, 40, 50, 75, 100, or 150 or more consecutive amino acids thereof using any of the programs described above.

[0663] Another aspect of the invention is an assay for identifying fragments or variants of the invention, which retain the enzymatic function of the polypeptides of the invention. For example the fragments or variants of said polypeptides, may be used to catalyze biochemical reactions (e.g., production of a nootkatone from a valencene), which indicate that the fragment or variant retains the enzymatic activity of a polypeptide of the invention.

[0664] An exemplary assay for determining if fragments of variants retain the enzymatic activity of the polypeptides of the invention includes the steps of: contacting the polypeptide fragment or variant with a substrate molecule under conditions which allow the polypeptide fragment or variant to function and detecting either a decrease in the level of substrate or an increase in the level of the specific reaction product of the reaction between the polypeptide and substrate.

[0665] The present invention exploits the unique catalytic properties of enzymes. Whereas the use of biocatalysts (i.e., purified or crude enzymes, non-living or living cells) in chemical transformations normally requires the identification of a particular biocatalyst that reacts with a specific starting compound, the present invention uses selected biocatalysts and reaction conditions that are specific for functional groups that are present in many starting compounds, such as small molecules. Each biocatalyst is specific for one functional group, or several related functional groups and can react with many starting compounds containing this functional group.

[0666] The biocatalytic reactions produce a population of derivatives from a single starting compound. These derivatives can be subjected to another round of biocatalytic reactions to produce a second population of derivative compounds. Thousands of variations of the original small molecule or compound can be produced with each iteration of biocatalytic derivatization.

[0667] Enzymes react at specific sites of a starting compound without affecting the rest of the molecule, a process which is very difficult to achieve using traditional chemical methods. This high degree of biocatalytic specificity provides the means to identify a single active compound within the library. The library is characterized by the series of biocatalytic reactions used to produce it, a so-called “biosynthetic history”. Screening the library for biological activities and tracing the biosynthetic history identifies the specific reaction sequence producing the active compound. The reaction sequence is repeated and the structure of the synthesized compound determined. This mode of identification, unlike other synthesis and screening approaches, does not require immobilization technologies and compounds can be synthesized and tested free in solution using virtually any type of screening assay. It is important to note, that the high degree of specificity of enzyme reactions on functional groups allows for the “tracking” of specific enzymatic reactions that make up the biocatalytically produced library.

[0668] Many of the procedural steps are performed using robotic automation enabling the execution of many thousands of biocatalytic reactions and screening assays per day as well as ensuring a high level of accuracy and reproducibility. As a result, a library of derivative compounds can be produced in a matter of weeks, which would take years to produce using current chemical methods.

[0669] In a particular aspect, the invention provides a method for modifying small molecules, comprising contacting a polypeptide encoded by a polynucleotide described herein or enzymatically active fragments thereof with a small molecule to produce a modified small molecule. A library of modified small molecules is tested to determine if a modified small molecule is present within the library, which exhibits a desired activity. A specific biocatalytic reaction which produces the modified small molecule of desired activity is identified by systematically eliminating each of the biocatalytic reactions used to produce a portion of the library and then testing the small molecules produced in the portion of the library for the presence or absence of the modified small molecule with the desired activity. The specific biocatalytic reactions which produce the modified small molecule of desired activity is optionally repeated. The biocatalytic reactions are conducted with a group of biocatalysts that react with distinct structural moieties found within the structure of a small molecule, each biocatalyst is specific for one structural moiety or a group of related structural moieties; and each biocatalyst reacts with many different small molecules which contain the distinct structural moiety.

[0670] a Polypeptide, Enzyme, Protein, E.G. Structural or Binding Protein, Signal Sequences, Prepro and Catalytic Domains

[0671] The invention provides a polypeptide, enzyme, protein, e.g. structural or binding protein, signal sequences (e.g., signal peptides (SPs)), prepro domains and catalytic domains (CDs). The SPs, prepro domains and/or CDs of the invention can be isolated, synthetic or recombinant peptides or can be part of a fusion protein, e.g., as a heterologous domain in a chimeric protein. The invention provides nucleic acids encoding these catalytic domains (CDs), prepro domains and signal sequences (SPs, e.g., a peptide having a sequence comprising/consisting of amino terminal residues of a polypeptide of the invention).

[0672] The invention provides isolated, synthetic or recombinant signal sequences (e.g., signal peptides) consisting of or comprising a sequence as set forth in residues 1 to 14, 1 to 15, 1 to 16, 1 to 17, 1 to 18, 1 to 19, 1 to 20, 1 to 21, 1 to 22, 1 to 23, 1 to 24, 1 to 25, 1 to 26, 1 to 27, 1 to 28, 1 to 28, 1 to 30, 1 to 31, 1 to 32, 1 to 33, 1 to 34, 1 to 35, 1 to 36, 1 to 37, 1 to 38, 1 to 40, 1 to 41, 1 to 42, 1 to 43, 1 to 44, 1 to 45, 1 to 46, or 1 to 47, or more, of a polypeptide of the invention, e.g., an exemplary polypeptide of the invention including SEQ ID NO:3, SEQ ID NO:5, SEQ ID NO:7, SEQ ID NO:9, SEQ ID NO:11, SEQ ID NO:13, SEQ ID NO:15, SEQ ID NO:17, SEQ ID NO:19, SEQ ID NO:21, SEQ ID NO:23, SEQ ID NO:25, SEQ ID NO:27, SEQ ID NO:29, SEQ ID NO:31, SEQ ID NO:33, SEQ ID NO:35, SEQ ID NO:37, SEQ ID NO:39, SEQ ID NO:41, SEQ ID NO:43, SEQ ID NO:45, SEQ ID NO:47, SEQ ID NO:49, SEQ ID NO:51, SEQ ID NO:53, SEQ ID NO:55, SEQ ID NO:57, SEQ ID NO:59, SEQ ID NO:61, SEQ ID NO:63, SEQ ID NO:65, SEQ ID NO:67, SEQ ID NO:69, SEQ ID NO:71, SEQ ID NO:73, SEQ ID NO:75, SEQ ID NO:77, SEQ ID NO:79, SEQ ID NO:81, SEQ ID NO:83, SEQ ID NO:85, SEQ ID NO:87, SEQ ID NO:89, SEQ ID NO:91, SEQ ID NO:93, SEQ ID NO:95, SEQ ID NO:97, SEQ ID NO:99, SEQ ID NO:101, SEQ ID NO:103, SEQ ID NO:105, and all polypeptides (amino acid sequences) disclosed in the SEQ ID listing, which include all odd numbered SEQ ID NO:s from SEQ ID NO:3 through SEQ ID NO:108,699. In one aspect, the invention provides signal sequences (leader peptides, leader sequences) comprising, or consisting of, the first 10, 11, 12, 13, 14, 15, 16, 17, 18, 19, 20, 21, 22, 23, 24, 25, 26, 27, 28, 29, 30, 31, 32, 33, 34, 35, 36, 37, 38, 39, 40, 41, 42, 43, 44, 45, 46, 47, 48, 49, 50, 51, 52, 53, 54, 55, 56, 57, 58, 59, 60, 61, 62, 63, 64, 65, 66, 67, 68, 69, 70 or more amino terminal residues of a polypeptide of the invention, or comprising, or consisting of, the signal sequences (leader peptides, leader sequences) set forth in Table 2.

[0673] In one aspect, novel a polypeptide, enzyme, protein, e.g. structural or binding protein, signal peptides are identified by a method referred to as SignalP. SignalP uses a combined neural network which recognizes both signal peptides and their cleavage sites. See, e.g., Nielsen (1997) “Identification of prokaryotic and eukaryotic signal peptides and prediction of their cleavage sites.” Protein Engineering 10:1-6. For example, in alternative embodiments, the invention provides isolated, synthetic or recombinant signal sequences comprising/consisting of the signal sequences set forth in Table 2, below, and polypeptides comprising these signal sequences. The polypeptide can be an enzyme, peptide or protein of the invention. For example, as an aid to reading Table 2, the invention provides an isolated, synthetic or recombinant signal sequence as set forth by residues 1 to 23 of SEQ ID NO:78,304 (encoded, e.g., by SEQ ID NO:78,303), i.e., having the sequence MAAALAATALASAAAASSFHITA. This can be determined by reading the second column for the first row “Signalp Cleavage Site”/“Probability: 0.998 AA1: 23 AA2: 24”, i.e., the cleavage of signal sequence takes place between amino acid 23 (AA23) and amino acid 24 (AA24) with a probability of 0.992 that this is the correct cleavage site. Therefore, the signal sequence is predicted to be from the amino acid in position 1 of SEQ ID NO:78,304 up to and including the amino acid in position 23 of SEQ ID NO:78,304. This signal sequence, in one aspect, is encoded by a subsequence of SEQ ID NO:78,303.

Lengthy table referenced here
US20110296543A1-20111201-T00001
Please refer to the end of the specification for access instructions.

[0674] Any methods can be used for identifying “prepro” domain sequences and signal sequences, and many are well known in the art, see, e.g., Van de Ven (1993) Crit. Rev. Oncog. 4(2):115-136. For example, to identify a prepro sequence, the protein is purified from the extracellular space and the N-terminal protein sequence is determined and compared to the unprocessed form.

[0675] The invention includes polypeptides with or without a signal sequence and/or a prepro sequence. The invention includes polypeptides with heterologous signal sequences and/or prepro sequences. The prepro sequence (including a sequence of the invention used as a heterologous prepro domain) can be located on the amino terminal or the carboxy terminal end of the protein. The invention also includes isolated, synthetic or recombinant signal sequences, prepro sequences and catalytic domains (e.g., “active sites”) comprising sequences of the invention. The polypeptide comprising a signal sequence of the invention can be a polypeptide, enzyme, protein, e.g. structural or binding protein, of the invention or another polypeptide, enzyme, protein, e.g. structural or binding protein, or another enzyme or other polypeptide.

[0676] The polypeptide, enzyme, protein, e.g. structural or binding protein signal sequences (SPs) and/or prepro sequences of the invention can be isolated peptides, or, sequences joined to another a polypeptide, enzyme, protein, e.g. structural or binding protein, or a non-polypeptide, non-enzyme, non-protein, e.g. non-structural or non-binding protein, e.g., as a fusion (chimeric) protein. In one aspect, the invention provides polypeptides comprising a polypeptide, enzyme, protein, e.g. structural or binding protein, signal sequences of the invention. In one aspect, polypeptides comprising polypeptide, enzyme, protein, e.g. structural or binding protein signal sequences SPs and/or prepro of the invention comprise sequences heterologous to a polypeptide, enzyme, protein, e.g. structural or binding protein, of the invention (e.g., a fusion protein comprising an SP and/or prepro of the invention and sequences from another a polypeptide, enzyme, protein, e.g. structural or binding protein, or a non-polypeptide, non-enzyme, non-protein, e.g. non-structural or non-binding protein). In one aspect, the invention provides a polypeptide, enzyme, protein, e.g. structural or binding protein, of the invention with heterologous SPs and/or prepro sequences, e.g., sequences with a yeast signal sequence. A polypeptide, enzyme, protein, e.g. structural or binding protein, of the invention can comprise a heterologous SP and/or prepro in a vector, e.g., a pPIC series vector (Invitrogen, Carlsbad, Calif.).

[0677] In one aspect, SPs and/or prepro sequences of the invention are identified following identification of novel a polypeptide, enzyme, protein, e.g. structural or binding protein. The pathways by which proteins are sorted and transported to their proper cellular location are often referred to as protein targeting pathways. One of the most important elements in all of these targeting systems is a short amino acid sequence at the amino terminus of a newly synthesized polypeptide called the signal sequence. This signal sequence directs a protein to its appropriate location in the cell and is removed during transport or when the protein reaches its final destination. Most lysosomal, membrane, or secreted proteins have an amino-terminal signal sequence that marks them for translocation into the lumen of the endoplasmic reticulum. The signal sequences can vary in length from about 10 to 65, or more, amino acid residues. Various methods of recognition of signal sequences are known to those of skill in the art, e.g., SignalP, as discussed above.

[0678] It should be understood that in some aspects a polypeptide, enzyme, protein, e.g. structural or binding protein, of the invention may not have SPs and/or prepro sequences, or “domains.” In one aspect, the invention provides the polypeptide, enzyme, protein, e.g. structural or binding proteins of the invention lacking all or part of an SP and/or a prepro domain. In one aspect, the invention provides a nucleic acid sequence encoding a signal sequence (SP) and/or prepro from one a polypeptide, enzyme, protein, e.g. structural or binding protein, operably linked to a nucleic acid sequence of a different a polypeptide, enzyme, protein, e.g. structural or binding protein, or, optionally, a signal sequence (SPs) and/or prepro domain from a non-enzyme or non-protein, e.g. non-structural or non-binding protein, may be desired.

[0679] The invention also provides isolated, synthetic or recombinant polypeptides comprising signal sequences (SPs), prepro domain and/or catalytic domains (CDs) of the invention and heterologous sequences. The heterologous sequences are sequences not naturally associated (e.g., to a enzyme) with an SP, prepro domain and/or CD. The sequence to which the SP, prepro domain and/or CD are not naturally associated can be on the SP's, prepro domain and/or CD's amino terminal end, carboxy terminal end, and/or on both ends of the SP and/or CD. In one aspect, the invention provides an isolated, synthetic or recombinant polypeptide comprising (or consisting of) a polypeptide comprising a signal sequence (SP), prepro domain and/or catalytic domain (CD) of the invention with the proviso that it is not associated with any sequence to which it is naturally associated (e.g., a polypeptide, enzyme, protein, e.g. structural or binding protein, sequence). Similarly in one aspect, the invention provides isolated, synthetic or recombinant nucleic acids encoding these polypeptides. Thus, in one aspect, the isolated, synthetic or recombinant nucleic acid of the invention comprises coding sequence for a signal sequence (SP), prepro domain and/or catalytic domain (CD) of the invention and a heterologous sequence (i.e., a sequence not naturally associated with the a signal sequence (SP), prepro domain and/or catalytic domain (CD) of the invention). The heterologous sequence can be on the 3′ terminal end, 5′ terminal end, and/or on both ends of the SP, prepro domain and/or CD coding sequence.

[0680] Hybrid (Chimeric) a Polypeptide, Enzyme, Protein, E.G. Structural or Binding Protein, and Peptide Libraries

[0681] In one aspect, the invention provides hybrid a polypeptide, enzyme, protein, e.g. structural or binding protein, and fusion proteins, including peptide libraries, comprising sequences of the invention. The peptide libraries of the invention can be used to isolate peptide modulators (e.g., activators or inhibitors) of targets, such as a polypeptide, enzyme, protein, e.g. structural or binding protein, substrates, receptors, enzymes. The peptide libraries of the invention can be used to identify formal binding partners of targets, such as ligands, e.g., cytokines, hormones and the like. In one aspect, the invention provides chimeric proteins comprising a signal sequence (SP), prepro domain and/or catalytic domain (CD) of the invention or a combination thereof and a heterologous sequence (see above).

[0682] In one aspect, the fusion proteins of the invention (e.g., the peptide moiety) are conformationally stabilized (relative to linear peptides) to allow a higher binding affinity for targets. The invention provides fusions of a polypeptide, enzyme, protein, e.g. structural or binding protein, of the invention and other peptides, including known and random peptides. They can be fused in such a manner that the structure of the polypeptide, enzyme, protein, e.g. structural or binding proteins is not significantly perturbed and the peptide is metabolically or structurally conformationally stabilized. This allows the creation of a peptide library that is easily monitored both for its presence within cells and its quantity.

[0683] Amino acid sequence variants of the invention can be characterized by a predetermined nature of the variation, a feature that sets them apart from a naturally occurring form, e.g., an allelic or interspecies variation of a polypeptide, enzyme, protein, e.g. structural or binding protein, sequence. In one aspect, the variants of the invention exhibit the same qualitative biological activity as the naturally occurring analogue. Alternatively, the variants can be selected for having modified characteristics. In one aspect, while the site or region for introducing an amino acid sequence variation is predetermined, the mutation per se need not be predetermined. For example, in order to optimize the performance of a mutation at a given site, random mutagenesis may be conducted at the target codon or region and the expressed a polypeptide, enzyme, protein, e.g. structural or binding protein, variants screened for the optimal combination of desired activity. Techniques for making substitution mutations at predetermined sites in DNA having a known sequence are well known, as discussed herein for example, M13 primer mutagenesis and PCR mutagenesis. Screening of the mutants can be done using, e.g., assays of glucan hydrolysis. In alternative aspects, amino acid substitutions can be single residues; insertions can be on the order of from about 1 to 20 amino acids, although considerably larger insertions can be done. Deletions can range from about 1 to about 20, 30, 40, 50, 60, 70 residues or more. To obtain a final derivative with the optimal properties, substitutions, deletions, insertions or any combination thereof may be used. Generally, these changes are done on a few amino acids to minimize the alteration of the molecule. However, larger changes may be tolerated in certain circumstances.

[0684] The invention provides a polypeptide, enzyme, protein, e.g. structural or binding protein, where the structure of the polypeptide backbone, the secondary or the tertiary structure, e.g., an alpha-helical or beta-sheet structure, has been modified. In one aspect, the charge or hydrophobicity has been modified. In one aspect, the bulk of a side chain has been modified. Substantial changes in function or immunological identity are made by selecting substitutions that are less conservative. For example, substitutions can be made which more significantly affect: the structure of the polypeptide backbone in the area of the alteration, for example a alpha-helical or a beta-sheet structure; a charge or a hydrophobic site of the molecule, which can be at an active site; or a side chain. The invention provides substitutions in polypeptide of the invention where (a) a hydrophilic residues, e.g. seryl or threonyl, is substituted for (or by) a hydrophobic residue, e.g. leucyl, isoleucyl, phenylalanyl, valyl or alanyl; (b) a cysteine or proline is substituted for (or by) any other residue; (c) a residue having an electropositive side chain, e.g. lysyl, arginyl, or histidyl, is substituted for (or by) an electronegative residue, e.g. glutamyl or aspartyl; or (d) a residue having a bulky side chain, e.g. phenylalanine, is substituted for (or by) one not having a side chain, e.g. glycine. The variants can exhibit the same qualitative biological activity (i.e., an enzyme, structural or binding activity) although variants can be selected to modify the characteristics of the polypeptide, enzyme, protein, e.g. structural or binding proteins as needed.

[0685] In one aspect, a polypeptide, enzyme, protein, e.g. structural or binding protein, of the invention comprise epitopes or purification tags, signal sequences or other fusion sequences, etc. In one aspect, the polypeptide, enzyme, protein, e.g. structural or binding proteins of the invention can be fused to a random peptide to form a fusion polypeptide. By “fused” or “operably linked” herein is meant that the random peptide and the polypeptide, enzyme, protein, e.g. structural or binding protein are linked together, in such a manner as to minimize the disruption to the stability of the polypeptide, enzyme, protein, e.g. structural or binding protein structure, e.g., it retains a polypeptide, enzyme, protein, e.g. structural or binding protein, activity. The fusion polypeptide (or fusion polynucleotide encoding the fusion polypeptide) can comprise further components as well, including multiple peptides at multiple loops.

[0686] In one aspect, the peptides and nucleic acids encoding them are randomized, either fully randomized or they are biased in their randomization, e.g. in nucleotide/residue frequency generally or per position. “Randomized” means that each nucleic acid and peptide consists of essentially random nucleotides and amino acids, respectively. In one aspect, the nucleic acids which give rise to the peptides can be chemically synthesized, and thus may incorporate any nucleotide at any position. Thus, when the nucleic acids are expressed to form peptides, any amino acid residue may be incorporated at any position. The synthetic process can be designed to generate randomized nucleic acids, to allow the formation of all or most of the possible combinations over the length of the nucleic acid, thus forming a library of randomized nucleic acids. The library can provide a sufficiently structurally diverse population of randomized expression products to affect a probabilistically sufficient range of cellular responses to provide one or more cells exhibiting a desired response. Thus, the invention provides an interaction library large enough so that at least one of its members will have a structure that gives it affinity for some molecule, protein, or other factor.

[0687] In one aspect, a polypeptide, enzyme, protein, e.g. structural or binding protein, of the invention is a multidomain enzyme that comprises a signal peptide, a carbohydrate binding module, a polypeptide, enzyme, protein, e.g. structural or binding protein, catalytic domain, a linker and/or another catalytic domain.

[0688] The invention provides a means for generating chimeric polypeptides which may encode biologically active hybrid polypeptides (e.g., hybrid a polypeptide, enzyme, protein, e.g. structural or binding protein,). In one aspect, the original polynucleotides encode biologically active polypeptides. The method of the invention produces new hybrid polypeptides by utilizing cellular processes which integrate the sequence of the original polynucleotides such that the resulting hybrid polynucleotide encodes a polypeptide demonstrating activities derived from the original biologically active polypeptides. For example, the original polynucleotides may encode a particular enzyme from different microorganisms. An enzyme encoded by a first polynucleotide from one organism or variant may, for example, function effectively under a particular environmental condition, e.g. high salinity. An enzyme encoded by a second polynucleotide from a different organism or variant may function effectively under a different environmental condition, such as extremely high temperatures. A hybrid polynucleotide containing sequences from the first and second original polynucleotides may encode an enzyme which exhibits characteristics of both enzymes encoded by the original polynucleotides. Thus, the enzyme encoded by the hybrid polynucleotide may function effectively under environmental conditions shared by each of the enzymes encoded by the first and second polynucleotides, e.g., high salinity and extreme temperatures.

[0689] A hybrid polypeptide resulting from the method of the invention may exhibit specialized enzyme activity, binding activity and/or structural activity not displayed in the original enzymes. For example, following recombination and/or reductive reassortment of polynucleotides encoding a polypeptide, enzyme, protein, e.g. structural or binding protein, the resulting hybrid polypeptide encoded by a hybrid polynucleotide can be screened for specialized non-enzyme, non-structural or non-binding activities, obtained from each of the original enzymes. Thus, for example, the hybrid polypeptide may be screened to ascertain those chemical functionalities which distinguish the hybrid polypeptide from the original parent polypeptides, such as the temperature, pH or salt concentration at which the hybrid polypeptide functions.

[0690] In one aspect, the invention relates to a method for producing a biologically active hybrid polypeptide and screening such a polypeptide for enhanced activity by:
[0691] 1) introducing at least a first polynucleotide in operable linkage and a second polynucleotide in operable linkage, the at least first polynucleotide and second polynucleotide sharing at least one region of partial sequence homology, into a suitable host cell;
[0692] 2) growing the host cell under conditions which promote sequence reorganization resulting in a hybrid polynucleotide in operable linkage;
[0693] 3) expressing a hybrid polypeptide encoded by the hybrid polynucleotide;
[0694] 4) screening the hybrid polypeptide under conditions which promote identification of enhanced biological activity; and
[0695] 5) isolating the a polynucleotide encoding the hybrid polypeptide.

### Isolating, Discovering Polypeptides, Enzymes, Proteins, E.G. Structural or Binding Protein

[0696] The invention provides methods for isolating and discovering a polypeptide, enzyme, protein, e.g. structural or binding protein, and the nucleic acids that encode them. Polynucleotides or enzymes may be isolated from individual organisms (“isolates”), collections of organisms that have been grown in defined media (“enrichment cultures”), or, uncultivated organisms (“environmental samples”). The organisms can be isolated by, e.g., in vivo biopanning (see discussion, below). The use of a culture-independent approach to derive polynucleotides encoding novel bioactivities from environmental samples is most preferable since it allows one to access untapped resources of biodiversity. Polynucleotides or enzymes also can be isolated from any one of numerous organisms, e.g. bacteria. In addition to whole cells, polynucleotides or enzymes also can be isolated from crude enzyme preparations derived from cultures of these organisms, e.g., bacteria.

[0697] “Environmental libraries” are generated from environmental samples and represent the collective genomes of naturally occurring organisms archived in cloning vectors that can be propagated in suitable prokaryotic hosts. Because the cloned DNA is initially extracted directly from environmental samples, the libraries are not limited to the small fraction of prokaryotes that can be grown in pure culture. Additionally, a normalization of the environmental DNA present in these samples could allow more equal representation of the DNA from all of the species present in the original sample. This can dramatically increase the efficiency of finding interesting genes from minor constituents of the sample which may be under-represented by several orders of magnitude compared to the dominant species.

[0698] For example, gene libraries generated from one or more uncultivated microorganisms are screened for an activity of interest. Potential pathways encoding bioactive molecules of interest are first captured in prokaryotic cells in the form of gene expression libraries. Polynucleotides encoding activities of interest are isolated from such libraries and introduced into a host cell. The host cell is grown under conditions which promote recombination and/or reductive reassortment creating potentially active biomolecules with novel or enhanced activities.

[0699] In vivo biopanning may be performed utilizing a FACS-based and non-optical (e.g., magnetic) based machines. Complex gene libraries are constructed with vectors which contain elements which stabilize transcribed RNA. For example, the inclusion of sequences which result in secondary structures such as hairpins which are designed to flank the transcribed regions of the RNA would serve to enhance their stability, thus increasing their half life within the cell. The probe molecules used in the biopanning process consist of oligonucleotides labeled with reporter molecules that only fluoresce upon binding of the probe to a target molecule. These probes are introduced into the recombinant cells from the library using one of several transformation methods. The probe molecules bind to the transcribed target mRNA resulting in DNA/RNA heteroduplex molecules. Binding of the probe to a target will yield a fluorescent signal which is detected and sorted by the FACS machine during the screening process.

[0700] Additionally, subcloning may be performed to further isolate sequences of interest. In subcloning, a portion of DNA is amplified, digested, generally by restriction enzymes, to cut out the desired sequence, the desired sequence is ligated into a recipient vector and is amplified. At each step in subcloning, the portion is examined for the activity of interest, in order to ensure that DNA that encodes the structural protein has not been excluded. The insert may be purified at any step of the subcloning, for example, by gel electrophoresis prior to ligation into a vector or where cells containing the recipient vector and cells not containing the recipient vector are placed on selective media containing, for example, an antibiotic, which will kill the cells not containing the recipient vector. Specific methods of subcloning cDNA inserts into vectors are well-known in the art (Sambrook et al., Molecular Cloning: A Laboratory Manual, 2nd Ed., Cold Spring Harbor Laboratory Press (1989)). In another aspect, the enzymes of the invention are subclones. Such subclones may differ from the parent clone by, for example, length, a mutation, a tag or a label.

[0701] In one aspect, the signal sequences of the invention are identified following identification of a novel polypeptide, enzyme, protein, e.g. structural or binding protein. The pathways by which proteins are sorted and transported to their proper cellular location are often referred to as protein targeting pathways. One of the most important elements in all of these targeting systems is a short amino acid sequence at the amino terminus of a newly synthesized polypeptide called the signal sequence. This signal sequence directs a protein to its appropriate location in the cell and is removed during transport or when the protein reaches its final destination. Most lysosomal, membrane, or secreted proteins have an amino-terminal signal sequence that marks them for translocation into the lumen of the endoplasmic reticulum. More than 100 signal sequences for proteins in this group have been determined. The sequences vary in length from 13 to 36 amino acid residues. Various methods of recognition of signal sequences are known to those of skill in the art. In one aspect, the peptides are identified by a method referred to as SignalP. SignalP uses a combined neural network which recognizes both signal peptides and their cleavage sites. See, e.g., Nielsen (1997) “Identification of prokaryotic and eukaryotic signal peptides and prediction of their cleavage sites.” Protein Engineering, vol. 10, no. 1, p. 1-6. It should be understood that some of the polypeptide, enzyme, protein, e.g. structural or binding proteins of the invention may or may not contain signal sequences. It may be desirable to include a nucleic acid sequence encoding a signal sequence from a polypeptide, enzyme, protein, e.g. structural or binding protein, operably linked to a nucleic acid sequence of a different a polypeptide, enzyme, protein, e.g. structural or binding protein may be desired.

[0702] The microorganisms from which the polynucleotide may be discovered, isolated or prepared include prokaryotic microorganisms, such as Eubacteria and Archaebacteria and lower eukaryotic microorganisms such as fungi, some algae and protozoa. Polynucleotides may be discovered, isolated or prepared from samples, such as environmental samples, in which case the nucleic acid may be recovered without culturing of an organism or recovered from one or more cultured organisms. In one aspect, such microorganisms may be extremophiles, such as hyperthermophiles, psychrophiles, psychrotrophs, halophiles, barophiles and acidophiles. Polynucleotides encoding enzymes isolated from extremophilic microorganisms can be used. Such enzymes may function at temperatures above 100° C. in terrestrial hot springs and deep searmal vents, at temperatures below 0° C. in arctic waters, in the saturated salt environment of the Dead Sea, at pH values around 0 in coal deposits and geothermal sulfur-rich springs, or at pH values greater than 11 in sewage sludge. For example, several esterases and lipases cloned and expressed from extremophilic organisms show high activity throughout a wide range of temperatures and pHs.

[0703] Polynucleotides selected and isolated as hereinabove described are introduced into a suitable host cell. A suitable host cell is any cell which is capable of promoting recombination and/or reductive reassortment. The selected polynucleotides are in one aspect already in a vector which includes appropriate control sequences. The host cell can be a higher eukaryotic cell, such as a mammalian cell, or a lower eukaryotic cell, such as a yeast cell, or in one aspect, the host cell can be a prokaryotic cell, such as a bacterial cell. Introduction of the construct into the host cell can be effected by calcium phosphate transfection, DEAE-Dextran mediated transfection, or electroporation (Davis et al., 1986).

[0704] As representative examples of appropriate hosts, there may be mentioned: bacterial cells, such as E. coli, Streptomyces, Salmonella typhimurium; fungal cells, such as yeast; insect cells such as Drosophila S2 and Spodoptera Sf9; animal cells such as CHO, COS or Bowes melanoma; adenoviruses; and plant cells. The selection of an appropriate host is deemed to be within the scope of those skilled in the art from the teachings herein.

[0705] With particular references to various mammalian cell culture systems that can be employed to express recombinant protein, examples of mammalian expression systems include the COS-7 lines of monkey kidney fibroblasts, described in “SV40-transformed simian cells support the replication of early SV40 mutants” (Gluzman, 1981) and other cell lines capable of expressing a compatible vector, for example, the C127, 3T3, CHO, HeLa and BHK cell lines. Mammalian expression vectors will comprise an origin of replication, a suitable promoter and enhancer and also any necessary ribosome binding sites, polyadenylation site, splice donor and acceptor sites, transcriptional termination sequences and 5′ flanking nontranscribed sequences. DNA sequences derived from the SV40 splice and polyadenylation sites may be used to provide the required nontranscribed genetic elements.

[0706] In another aspect, it is envisioned the method of the present invention can be used to generate novel polynucleotides encoding biochemical pathways from one or more operons or gene clusters or portions thereof. For example, bacteria and many eukaryotes have a coordinated mechanism for regulating genes whose products are involved in related processes. The genes are clustered, in structures referred to as “gene clusters,” on a single chromosome and are transcribed together under the control of a single regulatory sequence, including a single promoter which initiates transcription of the entire cluster. Thus, a gene cluster is a group of adjacent genes that are either identical or related, usually as to their function. An example of a biochemical pathway encoded by gene clusters are polyketides.

[0707] Gene cluster DNA can be isolated from different organisms and ligated into vectors, particularly vectors containing expression regulatory sequences which can control and regulate the production of a detectable protein or protein-related array activity from the ligated gene clusters. Use of vectors which have an exceptionally large capacity for exogenous DNA introduction are particularly appropriate for use with such gene clusters and are described by way of example herein to include the f-factor (or fertility factor) of E. coli. This f-factor of E. coli is a plasmid which affects high-frequency transfer of itself during conjugation and is ideal to achieve and stably propagate large DNA fragments, such as gene clusters from mixed microbial samples. One aspect is to use cloning vectors, referred to as “fosmids” or bacterial artificial chromosome (BAC) vectors. These are derived from E. coli f-factor which is able to stably integrate large segments of genomic DNA. When integrated with DNA from a mixed uncultured environmental sample, this makes it possible to achieve large genomic fragments in the form of a stable “environmental DNA library.” Another type of vector for use in the present invention is a cosmid vector. Cosmid vectors were originally designed to clone and propagate large segments of genomic DNA. Cloning into cosmid vectors is described in detail in Sambrook et al., Molecular Cloning: A Laboratory Manual, 2nd Ed., Cold Spring Harbor Laboratory Press (1989). Once ligated into an appropriate vector, two or more vectors containing different polyketide synthase gene clusters can be introduced into a suitable host cell. Regions of partial sequence homology shared by the gene clusters will promote processes which result in sequence reorganization resulting in a hybrid gene cluster. The novel hybrid gene cluster can then be screened for enhanced activities not found in the original gene clusters.

[0708] Methods for screening for various enzyme activities are known to those of skill in the art and are discussed throughout the present specification. Such methods may be employed when isolating the polypeptides and polynucleotides of the invention.

[0709] In one aspect, the invention provides methods for discovering and isolating polypeptides, enzymes, proteins, e.g. structural or binding proteins or compounds to modify the enzymatic activity, using a whole cell approach. Putative clones encoding polypeptides, enzymes, proteins, e.g. structural or binding proteins from genomic DNA library can be screened.

### Screening Methodologies and “On-line” Monitoring Devices

[0710] In practicing the methods of the invention, a variety of apparatus and methodologies can be used to in conjunction with the polypeptides and nucleic acids of the invention, e.g., to screen polypeptides for a polypeptide, enzyme, protein, e.g. structural or binding protein, activity, to screen compounds as potential modulators, e.g., activators or inhibitors, of an enzyme, structural or binding activity, for antibodies that bind to a polypeptide of the invention, for nucleic acids that hybridize to a nucleic acid of the invention, to screen for cells expressing a polypeptide of the invention and the like. In addition to the array formats described in detail below for screening samples, alternative formats can also be used to practice the methods of the invention. Such formats include, for example, mass spectrometers, chromatographs, e.g., high-throughput HPLC and other forms of liquid chromatography, and smaller formats, such as 1536-well plates, 384-well plates and so on. High throughput screening apparatus can be adapted and used to practice the methods of the invention, see, e.g., U.S. Patent Application No. 20020001809.

[0711] Capillary Arrays

[0712] Nucleic acids or polypeptides of the invention can be immobilized to or applied to an array. Arrays can be used to screen for or monitor libraries of compositions (e.g., small molecules, antibodies, nucleic acids, etc.) for their ability to bind to or modulate the activity of a nucleic acid or a polypeptide of the invention. Capillary arrays, such as the GIGAMATRIX™, Diversa Corporation, San Diego, Calif.; and arrays described in, e.g., U.S. Patent Application No. 20020080350 A1; WO 0231203 A; WO 0244336 A, provide an alternative apparatus for holding and screening samples. In one aspect, the capillary array includes a plurality of capillaries formed into an array of adjacent capillaries, wherein each capillary comprises at least one wall defining a lumen for retaining a sample. The lumen may be cylindrical, square, hexagonal or any other geometric shape so long as the walls form a lumen for retention of a liquid or sample. The capillaries of the capillary array can be held together in close proximity to form a planar structure. The capillaries can be bound together, by being fused (e.g., where the capillaries are made of glass), glued, bonded, or clamped side-by-side. Additionally, the capillary array can include interstitial material disposed between adjacent capillaries in the array, thereby forming a solid planar device containing a plurality of through-holes.

[0713] A capillary array can be formed of any number of individual capillaries, for example, a range from 100 to 4,000,000 capillaries. Further, a capillary array having about 100,000 or more individual capillaries can be formed into the standard size and shape of a Microtiter® plate for fitment into standard laboratory equipment. The lumens are filled manually or automatically using either capillary action or microinjection using a thin needle. Samples of interest may subsequently be removed from individual capillaries for further analysis or characterization. For example, a thin, needle-like probe is positioned in fluid communication with a selected capillary to either add or withdraw material from the lumen.

[0714] In a single-pot screening assay, the assay components are mixed yielding a solution of interest, prior to insertion into the capillary array. The lumen is filled by capillary action when at least a portion of the array is immersed into a solution of interest. Chemical or biological reactions and/or activity in each capillary are monitored for detectable events. A detectable event is often referred to as a “hit”, which can usually be distinguished from “non-hit” producing capillaries by optical detection. Thus, capillary arrays allow for massively parallel detection of “hits”.

[0715] In a multi-pot screening assay, a polypeptide or nucleic acid, e.g., a ligand, can be introduced into a first component, which is introduced into at least a portion of a capillary of a capillary array. An air bubble can then be introduced into the capillary behind the first component. A second component can then be introduced into the capillary, wherein the second component is separated from the first component by the air bubble. The first and second components can then be mixed by applying hydrostatic pressure to both sides of the capillary array to collapse the bubble. The capillary array is then monitored for a detectable event resulting from reaction or non-reaction of the two components.

[0716] In a binding screening assay, a sample of interest can be introduced as a first liquid labeled with a detectable particle into a capillary of a capillary array, wherein the lumen of the capillary is coated with a binding material for binding the detectable particle to the lumen. The first liquid may then be removed from the capillary tube, wherein the bound detectable particle is maintained within the capillary, and a second liquid may be introduced into the capillary tube. The capillary is then monitored for a detectable event resulting from reaction or non-reaction of the particle with the second liquid.

[0717] Arrays, or “Biochips”

[0718] Nucleic acids or polypeptides of the invention can be immobilized to or applied to an array. Arrays can be used to screen for or monitor libraries of compositions (e.g., small molecules, antibodies, nucleic acids, etc.) for their ability to bind to or modulate the activity of a nucleic acid or a polypeptide of the invention. For example, in one aspect of the invention, a monitored parameter is transcript expression of a polypeptide, enzyme, protein, e.g. structural or binding protein, gene. One or more, or, all the transcripts of a cell can be measured by hybridization of a sample comprising transcripts of the cell, or, nucleic acids representative of or complementary to transcripts of a cell, by hybridization to immobilized nucleic acids on an array, or “biochip.” By using an “array” of nucleic acids on a microchip, some or all of the transcripts of a cell can be simultaneously quantified. Alternatively, arrays comprising genomic nucleic acid can also be used to determine the genotype of a newly engineered strain made by the methods of the invention. Polypeptide arrays” can also be used to simultaneously quantify a plurality of proteins. The present invention can be practiced with any known “array,” also referred to as a “microarray” or “nucleic acid array” or “polypeptide array” or “antibody array” or “biochip,” or variation thereof. Arrays are generically a plurality of “spots” or “target elements,” each target element comprising a defined amount of one or more biological molecules, e.g., oligonucleotides, immobilized onto a defined area of a substrate surface for specific binding to a sample molecule, e.g., mRNA transcripts.

[0719] The terms “array” or “microarray” or “biochip” or “chip” as used herein is a plurality of target elements, each target element comprising a defined amount of one or more polypeptides (including antibodies) or nucleic acids immobilized onto a defined area of a substrate surface, as discussed in further detail, below.

[0720] In practicing the methods of the invention, any known array and/or method of making and using arrays can be incorporated in whole or in part, or variations thereof, as described, for example, in U.S. Pat. Nos. 6,277,628; 6,277,489; 6,261,776; 6,258,606; 6,054,270; 6,048,695; 6,045,996; 6,022,963; 6,013,440; 5,965,452; 5,959,098; 5,856,174; 5,830,645; 5,770,456; 5,632,957; 5,556,752; 5,143,854; 5,807,522; 5,800,992; 5,744,305; 5,700,637; 5,556,752; 5,434,049; see also, e.g., WO 99/51773; WO 99/09217; WO 97/46313; WO 96/17958; see also, e.g., Johnston (1998) Curr. Biol. 8:R171-R174; Schummer (1997) Biotechniques 23:1087-1092; Kern (1997) Biotechniques 23:120-124; Solinas-Toldo (1997) Genes, Chromosomes & Cancer 20:399-407; Bowtell (1999) Nature Genetics Supp. 21:25-32. See also published U.S. patent applications Nos. 20010018642; 20010019827; 20010016322; 20010014449; 20010014448; 20010012537; 20010008765.

### Antibodies and Antibody-Based Screening Methods

[0721] The invention provides isolated, synthetic or recombinant antibodies that specifically bind to a polypeptide, enzyme, protein, e.g. structural or binding protein, of the invention. These antibodies can be used to isolate, identify or quantify the polypeptide, enzyme, protein, e.g. structural or binding proteins of the invention or related polypeptides. These antibodies can be used to isolate other polypeptides within the scope the invention or other related a polypeptide, enzyme, protein, e.g. structural or binding protein. The antibodies can be designed to bind to an active site of a polypeptide, enzyme, protein, e.g. structural or binding protein. Thus, the invention provides methods of inhibiting a polypeptide, enzyme, protein, e.g. structural or binding protein, using the antibodies of the invention (see discussion above regarding applications for anti-polypeptide, anti-enzyme, anti-protein, e.g., anti-structural or anti-binding protein compositions of the invention).

[0722] The invention provides fragments of the enzymes of the invention, including immunogenic fragments of a polypeptide of the invention. The invention provides compositions comprising a polypeptide or peptide of the invention and adjuvants or carriers and the like.

[0723] The term “antibody” includes a peptide or polypeptide derived from, modeled after or substantially encoded by an immunoglobulin gene or immunoglobulin genes, or fragments thereof, capable of specifically binding an antigen or epitope, see, e.g. Fundamental Immunology, Third Edition, W. E. Paul, ed., Raven Press, N.Y. (1993); Wilson (1994) J. Immunol. Methods 175:267-273; Yarmush (1992) J. Biochem. Biophys. Methods 25:85-97. The term antibody includes antigen-binding portions, i.e., “antigen binding sites,” (e.g., fragments, subsequences, complementarity determining regions (CDRs)) that retain capacity to bind antigen, including (i) a Fab fragment, a monovalent fragment consisting of the VL, VH, CL and CH1 domains; (ii) a F(ab′)2 fragment, a bivalent fragment comprising two Fab fragments linked by a disulfide bridge at the hinge region; (iii) a Fd fragment consisting of the VH and CH1 domains; (iv) a Fv fragment consisting of the VL and VH domains of a single arm of an antibody, (v) a dAb fragment (Ward et al., (1989) Nature 341:544-546), which consists of a VH domain; and (vi) an isolated complementarity determining region (CDR). Single chain antibodies are also included by reference in the term “antibody.”

[0724] The antibodies can be used in immunoprecipitation, staining, immunoaffinity columns, and the like. If desired, nucleic acid sequences encoding for specific antigens can be generated by immunization followed by isolation of polypeptide or nucleic acid, amplification or cloning and immobilization of polypeptide onto an array of the invention. Alternatively, the methods of the invention can be used to modify the structure of an antibody produced by a cell to be modified, e.g., an antibody's affinity can be increased or decreased. Furthermore, the ability to make or modify antibodies can be a phenotype engineered into a cell by the methods of the invention.

[0725] Methods of immunization, producing and isolating antibodies (polyclonal and monoclonal) are known to those of skill in the art and described in the scientific and patent literature, see, e.g., Coligan, CURRENT PROTOCOLS IN IMMUNOLOGY, Wiley/Greene, N.Y. (1991); Stites (eds.) BASIC AND CLINICAL IMMUNOLOGY (7th ed.) Lange Medical Publications, Los Altos, Calif. (“Stites”); Goding, MONOCLONAL ANTIBODIES: PRINCIPLES AND PRACTICE (2d ed.) Academic Press, New York, N.Y. (1986); Kohler (1975) Nature 256:495; Harlow (1988) ANTIBODIES, A LABORATORY MANUAL, Cold Spring Harbor Publications, New York. Antibodies also can be generated in vitro, e.g., using recombinant antibody binding site expressing phage display libraries, in addition to the traditional in vivo methods using animals. See, e.g., Hoogenboom (1997) Trends Biotechnol. 15:62-70; Katz (1997) Annu. Rev. Biophys. Biomol. Struct. 26:27-45.

[0726] The polypeptides of the invention or fragments comprising at least 5, 10, 15, 20, 25, 30, 35, 40, 50, 75, 100, or 150 consecutive amino acids thereof, may also be used to generate antibodies which bind specifically to the polypeptides or fragments. The resulting antibodies may be used in immunoaffinity chromatography procedures to isolate or purify the polypeptide or to determine whether the polypeptide is present in a biological sample. In such procedures, a protein preparation, such as an extract, or a biological sample is contacted with an antibody capable of specifically binding to one of the polypeptides of the invention, or fragments comprising at least 5, 10, 15, 20, 25, 30, 35, 40, 50, 75, 100, or 150 consecutive amino acids thereof.

[0727] In immunoaffinity procedures, the antibody is attached to a solid support, such as a bead or other column matrix. The protein preparation is placed in contact with the antibody under conditions in which the antibody specifically binds to one of the polypeptides of the invention, or fragment thereof. After a wash to remove non-specifically bound proteins, the specifically bound polypeptides are eluted.

[0728] The ability of proteins in a biological sample to bind to the antibody may be determined using any of a variety of procedures familiar to those skilled in the art. For example, binding may be determined by labeling the antibody with a detectable label such as a fluorescent agent, an enzymatic label, or a radioisotope. Alternatively, binding of the antibody to the sample may be detected using a secondary antibody having such a detectable label thereon. Particular assays include ELISA assays, sandwich assays, radioimmunoassays and Western Blots.

[0729] Polyclonal antibodies generated against the polypeptides of the invention, or fragments comprising at least 5, 10, 15, 20, 25, 30, 35, 40, 50, 75, 100, or 150 consecutive amino acids thereof can be obtained by direct injection of the polypeptides into an animal or by administering the polypeptides to an animal, for example, a nonhuman. The antibody so obtained can bind the polypeptide itself. In this manner, even a sequence encoding only a fragment of the polypeptide can be used to generate antibodies which may bind to the whole native polypeptide. Such antibodies can then be used to isolate the polypeptide from cells expressing that polypeptide.

[0730] For preparation of monoclonal antibodies, any technique which provides antibodies produced by continuous cell line cultures can be used. Examples include the hybridoma technique (Kohler and Milstein, Nature, 256:495-497, 1975), the trioma technique, the human B-cell hybridoma technique (Kozbor et al., Immunology Today 4:72, 1983) and the EBV-hybridoma technique (Cole, et al., 1985, in Monoclonal Antibodies and Cancer Therapy, Alan R. Liss, Inc., pp. 77-96).

[0731] Techniques described for the production of single chain antibodies (U.S. Pat. No. 4,946,778) can be adapted to produce single chain antibodies to the polypeptides of the invention, or fragments comprising at least 5, 10, 15, 20, 25, 30, 35, 40, 50, 75, 100, or 150 consecutive amino acids thereof. Alternatively, transgenic mice may be used to express humanized antibodies to these polypeptides or fragments thereof.

[0732] Antibodies generated against the polypeptides of the invention, or fragments comprising at least 5, 10, 15, 20, 25, 30, 35, 40, 50, 75, 100, or 150 consecutive amino acids thereof may be used in screening for similar polypeptides from other organisms and samples. In such techniques, polypeptides from the organism are contacted with the antibody and those polypeptides which specifically bind the antibody are detected. Any of the procedures described above may be used to detect antibody binding. One such screening assay is described in “Methods for Measuring Cellulase Activities”, Methods in Enzymology, Vol 160, pp. 87-116.

### Kits

[0733] The invention provides kits comprising the compositions, e.g., nucleic acids, expression cassettes, vectors, cells, transgenic seeds or plants or plant parts, polypeptides and/or antibodies of the invention. The kits also can contain instructional material teaching the methodologies and uses of the enzymes of the invention (see, e.g., Table 1, Table 3 and/or Table 4), including the industrial, experimental, food and feed processing and medical uses of the compositions and methods of the invention, as described herein.

### Whole Cell Engineering and Measuring Metabolic Parameters

[0734] The methods of the invention provide whole cell evolution, or whole cell engineering, of a cell to develop a new cell strain having a new phenotype, e.g., a new or modified a polypeptide, enzyme, protein, e.g. structural or binding protein, activity, by modifying the genetic composition of the cell. The genetic composition can be modified by addition to the cell of a nucleic acid of the invention, e.g., a coding sequence for an enzyme of the invention. See, e.g., WO0229032; WO0196551.

[0735] To detect the new phenotype, at least one metabolic parameter of a modified cell is monitored in the cell in a “real time” or “on-line” time frame. In one aspect, a plurality of cells, such as a cell culture, is monitored in “real time” or “on-line.” In one aspect, a plurality of metabolic parameters is monitored in “real time” or “on-line.” Metabolic parameters can be monitored using the polypeptide, enzyme, protein, e.g. structural or binding proteins of the invention.

[0736] Metabolic flux analysis (MFA) is based on a known biochemistry framework. A linearly independent metabolic matrix is constructed based on the law of mass conservation and on the pseudo-steady state hypothesis (PSSH) on the intracellular metabolites. In practicing the methods of the invention, metabolic networks are established, including the:
[0737] identity of all pathway substrates, products and intermediary metabolites
[0738] identity of all the chemical reactions interconverting the pathway metabolites, the stoichiometry of the pathway reactions,
[0739] identity of all the enzymes catalyzing the reactions, the enzyme reaction kinetics,
[0740] the regulatory interactions between pathway components, e.g. allosteric interactions, enzyme-enzyme interactions etc,
[0741] intracellular compartmentalization of enzymes or any other supramolecular organization of the enzymes, and,
[0742] the presence of any concentration gradients of metabolites, enzymes or effector molecules or diffusion barriers to their movement.

[0743] Once the metabolic network for a given strain is built, mathematic presentation by matrix notion can be introduced to estimate the intracellular metabolic fluxes if the on-line metabolome data is available. Metabolic phenotype relies on the changes of the whole metabolic network within a cell. Metabolic phenotype relies on the change of pathway utilization with respect to environmental conditions, genetic regulation, developmental state and the genotype, etc. In one aspect of the methods of the invention, after the on-line MFA calculation, the dynamic behavior of the cells, their phenotype and other properties are analyzed by investigating the pathway utilization. For example, if the glucose supply is increased and the oxygen decreased during the yeast fermentation, the utilization of respiratory pathways will be reduced and/or stopped, and the utilization of the fermentative pathways will dominate. Control of physiological state of cell cultures will become possible after the pathway analysis. The methods of the invention can help determine how to manipulate the fermentation by determining how to change the substrate supply, temperature, use of inducers, etc. to control the physiological state of cells to move along desirable direction. In practicing the methods of the invention, the MFA results can also be compared with transcriptome and proteome data to design experiments and protocols for metabolic engineering or gene shuffling, etc.

[0744] In practicing the methods of the invention, any modified or new phenotype can be conferred and detected, including new or improved characteristics in the cell. Any aspect of metabolism or growth can be monitored.

[0745] Monitoring Expression of an mRNA Transcript

[0746] In one aspect of the invention, the engineered phenotype comprises increasing or decreasing the expression of an mRNA transcript (e.g., a polypeptide, enzyme, protein, e.g. structural or binding protein, message) or generating new (e.g., polypeptide, enzyme, protein, e.g. structural or binding protein) transcripts in a cell. This increased or decreased expression can be traced by testing for the presence of a polypeptide, enzyme, protein, e.g. structural or binding protein, of the invention or by a polypeptide, enzyme, protein, e.g. structural or binding protein, activity assays. Such assays are well known in the art. mRNA transcripts, or messages, also can be detected and quantified by any method known in the art, including, e.g., Northern blots, quantitative amplification reactions, hybridization to arrays, and the like. Quantitative amplification reactions include, e.g., quantitative PCR, including, e.g., quantitative reverse transcription polymerase chain reaction, or RT-PCR; quantitative real time RT-PCR, or “real-time kinetic RT-PCR” (see, e.g., Kreuzer (2001) Br. J. Haematol. 114:313-318; Xia (2001) Transplantation 72:907-914).

[0747] In one aspect of the invention, the engineered phenotype is generated by knocking out expression of a homologous gene. The gene's coding sequence or one or more transcriptional control elements can be knocked out, e.g., promoters or enhancers. Thus, the expression of a transcript can be completely ablated or only decreased.

[0748] In one aspect of the invention, the engineered phenotype comprises increasing the expression of a homologous gene. This can be effected by knocking out of a negative control element, including a transcriptional regulatory element acting in cis- or trans-, or, mutagenizing a positive control element. One or more, or, all the transcripts of a cell can be measured by hybridization of a sample comprising transcripts of the cell, or, nucleic acids representative of or complementary to transcripts of a cell, by hybridization to immobilized nucleic acids on an array.

[0749] Monitoring Expression of a Polypeptides, Peptides and Amino Acids

[0750] In one aspect of the invention, the engineered phenotype comprises increasing or decreasing the expression of a polypeptide (e.g., a polypeptide, enzyme, protein, e.g. structural or binding protein,) or generating new polypeptides in a cell. This increased or decreased expression can be traced by determining the amount of a polypeptide, enzyme, protein, e.g. structural or binding protein, present or by a polypeptide, enzyme, protein, e.g. structural or binding protein, activity assays.

[0751] Polypeptides, peptides and amino acids also can be detected and quantified by any method known in the art, including, e.g., nuclear magnetic resonance (NMR), spectrophotometry, radiography (protein radiolabeling), electrophoresis, capillary electrophoresis, high performance liquid chromatography (HPLC), thin layer chromatography (TLC), hyperdiffusion chromatography, various immunological methods, e.g. immunoprecipitation, immunodiffusion, immuno-electrophoresis, radioimmunoassays (RIAs), enzyme-linked immunosorbent assays (ELISAs), immuno-fluorescent assays, gel electrophoresis (e.g., SDS-PAGE), staining with antibodies, fluorescent activated cell sorter (FACS), pyrolysis mass spectrometry, Fourier-Transform Infrared Spectrometry, Raman spectrometry, GC-MS, and LC-Electrospray and cap-LC-tandem-electrospray mass spectrometries, and the like. Novel bioactivities can also be screened using methods, or variations thereof, described in U.S. Pat. No. 6,057,103. Furthermore, as discussed below in detail, one or more, or, all the polypeptides of a cell can be measured using a protein array.

### Pharmaceutical Compositions and Dietary Supplements

[0752] The invention provides pharmaceutical compositions, e.g., formulations, comprising a composition (including polypeptide, nucleic acid, or antibody) of the invention and a pharmaceutically acceptable excipient. The invention provides enteral and parenteral formulations comprising compositions of the invention. For example, the invention provides oral formulations (including or dietary supplements) comprising a composition of the invention. The invention provides formulations and methods for treating, ameliorating, diagnosing or preventing disease of condition of interest; e.g., in one aspect the invention provides methods comprising providing a pharmaceutical composition or dietary supplement comprising a composition of the invention; and administering an effective amount of the pharmaceutical composition or dietary supplement to a subject in need thereof.

[0753] The compositions and methods of the invention can also be practiced ex vivo or in vitro, or on a non-biological fluid or substance. In one aspect, the compositions and methods comprise providing a pharmaceutical composition or dietary supplement comprising a formulation of the invention; and administering an effective amount of the pharmaceutical composition or dietary supplement to a subject in need thereof.

[0754] The pharmaceutical compositions and dietary supplements used in the methods of the invention can be administered by any means known in the art, e.g., parenterally, topically, orally, or by local administration, such as by aerosol or transdermally. The compositions and dietary supplements of the invention can be formulated as a tablet, gel, geltab, pill, implant, liquid, spray, powder, food, feed pellet, as an injectable formulation or as an encapsulated formulation. The pharmaceutical compositions and dietary supplements can be formulated in any way and can be administered in a variety of unit dosage forms depending upon the condition or disease and the degree of illness, the general medical condition of each patient, the resulting preferred method of administration and the like. Details on techniques for formulation and administration are well described in the scientific and patent literature, see, e.g., the latest edition of Remington's Pharmaceutical Sciences, Maack Publishing Co, Easton Pa. (“Remington's”) (e.g., Remington, The Science and Practice of Pharmacy, 21st Edition, by University of the Sciences in Philadelphia, Editor).

[0755] Pharmaceutical formulations and dietary supplements can be prepared according to any method known to the art for the manufacture of pharmaceuticals and dietary supplements. Such drugs and dietary supplements can contain sweetening agents, flavoring agents, coloring agents and preserving agents. A formulation (which includes “dietary supplements”) can be admixtured with nontoxic pharmaceutically or orally acceptable excipients which are suitable for manufacture. Formulations may comprise one or more diluents, emulsifiers, preservatives, buffers, excipients, etc. and may be provided in such forms as liquids, powders, emulsions, lyophilized powders, sprays, creams, lotions, controlled release formulations, tablets, pills, gels, on patches, in implants, etc.

[0756] Pharmaceutical formulations and dietary supplements for oral administration can be formulated using pharmaceutically acceptable carriers well known in the art in appropriate and suitable dosages. Such carriers enable the pharmaceuticals and dietary supplements to be formulated in unit dosage forms as tablets, pills, powder, dragees, capsules, liquids, lozenges, gels, syrups, slurries, suspensions, etc., suitable for ingestion by the patient. Pharmaceutical preparations and dietary supplements for oral use can be formulated as a solid excipient, optionally grinding a resulting mixture, and processing the mixture of granules, after adding suitable additional compounds, if desired, to obtain tablets or dragee cores. Suitable solid excipients are carbohydrate or protein fillers include, e.g., sugars, including lactose, sucrose, mannitol, or sorbitol; starch from corn, wheat, rice, potato, or other plants; cellulose such as methyl cellulose, hydroxypropylmethyl-cellulose, or sodium carboxy-methylcellulose; and gums including arabic and tragacanth; and proteins, e.g., gelatin and collagen. Disintegrating or solubilizing agents may be added, such as the cross-linked polyvinyl pyrrolidone, agar, alginic acid, or a salt thereof, such as sodium alginate.

[0757] Dragee cores are provided with suitable coatings such as concentrated sugar solutions, which may also contain gum arabic, talc, polyvinylpyrrolidone, carbopol gel, polyethylene glycol, and/or titanium dioxide, lacquer solutions, and suitable organic solvents or solvent mixtures. Dyestuffs or pigments may be added to the tablets or dragee coatings for product identification or to characterize the quantity of active compound (i.e., dosage). Pharmaceutical preparations and dietary supplements of the invention can also be used orally using, e.g., push-fit capsules made of gelatin, as well as soft, sealed capsules made of gelatin and a coating such as glycerol or sorbitol. Push-fit capsules can contain active agents mixed with a filler or binders such as lactose or starches, lubricants such as talc or magnesium stearate, and, optionally, stabilizers. In soft capsules, the active agents can be dissolved or suspended in suitable liquids, such as fatty oils, liquid paraffin, or liquid polyethylene glycol with or without stabilizers.

[0758] Aqueous suspensions can contain an active agent (e.g., an enzyme or peptidomimetic of the invention) in admixture with excipients suitable for the manufacture of aqueous suspensions. Such excipients include a suspending agent, such as sodium carboxymethylcellulose, methylcellulose, hydroxypropylmethylcellulose, sodium alginate, polyvinylpyrrolidone, gum tragacanth and gum acacia, and dispersing or wetting agents such as a naturally occurring phosphatide (e.g., lecithin), a condensation product of an alkylene oxide with a fatty acid (e.g., polyoxyethylene stearate), a condensation product of ethylene oxide with a long chain aliphatic alcohol (e.g., heptadecaethylene oxycetanol), a condensation product of ethylene oxide with a partial ester derived from a fatty acid and a hexitol (e.g., polyoxyethylene sorbitol mono-oleate), or a condensation product of ethylene oxide with a partial ester derived from fatty acid and a hexitol anhydride (e.g., polyoxyethylene sorbitan mono-oleate). The aqueous suspension can also contain one or more preservatives such as ethyl or n-propyl p-hydroxybenzoate, one or more coloring agents, one or more flavoring agents and one or more sweetening agents, such as sucrose, aspartame or saccharin. Formulations can be adjusted for osmolarity.

[0759] Oil-based pharmaceuticals are particularly useful for administration of hydrophobic formulations or active agents of the invention. Oil-based suspensions can be formulated by suspending an active agent (e.g., a composition of the invention) in a vegetable oil, such as arachis oil, olive oil, sesame oil or coconut oil, or in a mineral oil such as liquid paraffin; or a mixture of these. See e.g., U.S. Pat. No. 5,716,928 describing using essential oils or essential oil components for increasing bioavailability and reducing inter- and intra-individual variability of orally administered hydrophobic pharmaceutical compounds (see also U.S. Pat. No. 5,858,401). The oil suspensions can contain a thickening agent, such as beeswax, hard paraffin or cetyl alcohol. Sweetening agents can be added to provide a palatable oral preparation, such as glycerol, sorbitol or sucrose. These formulations and dietary supplements can be preserved by the addition of an antioxidant such as ascorbic acid. As an example of an injectable oil vehicle, see Minto (1997) J. Pharmacol. Exp. Ther. 281:93-102.

[0760] The pharmaceutical formulations and dietary supplements of the invention can also be in the form of oil-in-water emulsions. The oily phase can be a vegetable oil or a mineral oil, described above, or a mixture of these. Suitable emulsifying agents include naturally-occurring gums, such as gum acacia and gum tragacanth, naturally occurring phosphatides, such as soybean lecithin, esters or partial esters derived from fatty acids and hexitol anhydrides, such as sorbitan mono-oleate, and condensation products of these partial esters with ethylene oxide, such as polyoxyethylene sorbitan mono-oleate. The emulsion can also contain sweetening agents and flavoring agents, as in the formulation of syrups and elixirs. Such formulations can also contain a demulcent, a preservative, or a coloring agent.

[0761] In the methods of the invention, the pharmaceutical compounds and dietary supplements can also be administered by in intranasal, intraocular and intravaginal routes including suppositories, insufflation, powders and aerosol formulations (for examples of steroid inhalants, see Rohatagi (1995) J. Clin. Pharmacol. 35:1187-1193; Tjwa (1995) Ann. Allergy Asthma Immunol. 75:107-111). Suppositories formulations can be prepared by mixing the drug with a suitable non-irritating excipient which is solid at ordinary temperatures but liquid at body temperatures and will therefore melt in the body to release the drug. Such materials are cocoa butter and polyethylene glycols.

[0762] In the methods of the invention, the pharmaceutical compounds and dietary supplements can be delivered by transdermally, by a topical route, formulated as applicator sticks, solutions, suspensions, emulsions, gels, creams, ointments, pastes, jellies, paints, powders, and aerosols.

[0763] In the methods of the invention, the pharmaceutical compounds and dietary supplements can also be delivered as microspheres for slow release in the body. For example, microspheres can be administered via intradermal injection of drug which slowly release subcutaneously; see Rao (1995) J. Biomater Sci. Polym. Ed. 7:623-645; as biodegradable and injectable gel formulations, see, e.g., Gao (1995) Pharm. Res. 12:857-863 (1995); or, as microspheres for oral administration, see, e.g., Eyles (1997) J. Pharm. Pharmacol. 49:669-674.

[0764] In the methods of the invention, the pharmaceutical compounds can be parenterally administered, such as by intravenous (IV) administration or administration into a body cavity or lumen of an organ. These formulations can comprise a solution of active agent dissolved in a pharmaceutically acceptable carrier. Acceptable vehicles and solvents that can be employed are water and Ringer's solution, an isotonic sodium chloride. In addition, sterile fixed oils can be employed as a solvent or suspending medium. For this purpose any bland fixed oil can be employed including synthetic mono- or diglycerides. In addition, fatty acids such as oleic acid can likewise be used in the preparation of injectables. These solutions are sterile and generally free of undesirable matter. These formulations may be sterilized by conventional, well known sterilization techniques. The formulations may contain pharmaceutically acceptable auxiliary substances as required to approximate physiological conditions such as pH adjusting and buffering agents, toxicity adjusting agents, e.g., sodium acetate, sodium chloride, potassium chloride, calcium chloride, sodium lactate and the like. The concentration of active agent in these formulations can vary widely, and will be selected primarily based on fluid volumes, viscosities, body weight, and the like, in accordance with the particular mode of administration selected and the patient's needs. For IV administration, the formulation can be a sterile injectable preparation, such as a sterile injectable aqueous or oleaginous suspension. This suspension can be formulated using those suitable dispersing or wetting agents and suspending agents. The sterile injectable preparation can also be a suspension in a nontoxic parenterally-acceptable diluent or solvent, such as a solution of 1,3-butanediol. The administration can be by bolus or continuous infusion (e.g., substantially uninterrupted introduction into a blood vessel for a specified period of time).

[0765] The pharmaceutical compounds, formulations and dietary supplements of the invention can be lyophilized. The invention provides a stable lyophilized formulation comprising a composition of the invention, which can be made by lyophilizing a solution comprising a pharmaceutical of the invention and a bulking agent, e.g., mannitol, trehalose, raffinose, and sucrose or mixtures thereof. A process for preparing a stable lyophilized formulation can include the equivalent of lyophilizing a solution about 2.5 mg/mL protein, about 15 mg/mL sucrose, about 19 mg/mL NaCl, and a sodium citrate buffer having a pH greater than 5.5 but less than 6.5. See, e.g., U.S. patent app. no. 20040028670.

[0766] The compositions (e.g., formulations, including dietary supplements) of the invention can be delivered by the use of liposomes. By using liposomes, particularly where the liposome surface carries ligands specific for target cells, or are otherwise preferentially directed to a specific organ, one can focus the delivery of the active agent into target cells in vivo. See, e.g., U.S. Pat. Nos. 6,063,400; 6,007,839; Al-Muhammed (1996) J. Microencapsul. 13:293-306; Chonn (1995) Curr. Opin. Biotechnol. 6:698-708; Ostro (1989) Am. J. Hosp. Pharm. 46:1576-1587.

[0767] The compositions (e.g., formulations, including dietary supplements) of the invention can be administered for prophylactic and/or therapeutic treatments. In therapeutic applications, compositions are administered to a subject already suffering from a condition, infection or disease of interest in an amount sufficient to cure, alleviate or partially arrest the clinical manifestations of the condition, infection or disease and its complications (a “therapeutically effective amount”). In the methods of the invention, a pharmaceutical composition is administered in an amount sufficient to treat (e.g., ameliorate) or prevent a disease-related condition, a diseases or a symptoms, or to decrease or increase the amount of substance in a body fluid such as blood, serum, CSF and the like. The amount of composition (e.g., pharmaceutical compositions, formulations, including dietary supplements) adequate to accomplish this is defined as a “therapeutically effective dose.” The dosage schedule and amounts effective for this use, i.e., the “dosing regimen,” will depend upon a variety of factors, including the stage of the disease or condition, the severity of the disease or condition, the general state of the patient's health, the patient's physical status, age and the like. In calculating the dosage regimen for a patient, the mode of administration also is taken into consideration.

[0768] The dosage regimen also takes into consideration pharmacokinetics parameters well known in the art, i.e., the active agents' rate of absorption, bioavailability, metabolism, clearance, and the like (see, e.g., Hidalgo-Aragones (1996) J. Steroid Biochem. Mol. Biol. 58:611-617; Groning (1996) Pharmazie 51:337-341; Fotherby (1996) Contraception 54:59-69; Johnson (1995) J. Pharm. Sci. 84:1144-1146; Rohatagi (1995) Pharmazie 50:610-613; Brophy (1983) Eur. J. Clin. Pharmacol. 24:103-108; the latest Remington's, supra). The state of the art allows the clinician to determine the dosage regimen for each individual patient, active agent and disease or condition treated. Guidelines provided for similar compositions used as pharmaceuticals can be used as guidance to determine the dosage regiment, i.e., dose schedule and dosage levels, administered practicing the methods of the invention are correct and appropriate.

[0769] Single or multiple administrations of compositions (e.g., pharmaceutical compositions, formulations, including dietary supplements) of the invention can be given depending on the dosage and frequency as required and tolerated by the patient. The compositions should provide a sufficient quantity of active agent to effectively treat, ameliorate or prevent PKU or other PKU-related conditions, diseases or symptoms. For example, an exemplary pharmaceutical formulation for oral administration of a protein of the invention is in a daily amount of between about 0.1 to 0.5 to about 20, 50, 100 or 1000 or more ug per kilogram of body weight per day. In an alternative embodiment, dosages are from about 1 mg to about 4 mg per kg of body weight per patient per day are used. Lower dosages can be used, in contrast to administration orally, into the blood stream, into a body cavity or into a lumen of an organ. Substantially higher dosages can be used in topical or oral administration or administering by powders, spray or inhalation. Actual methods for preparing parenterally or non-parenterally administrable formulations will be known or apparent to those skilled in the art and are described in more detail in such publications as Remington's, supra.

[0770] The compositions (e.g., pharmaceutical compositions, formulations, including dietary supplements) of the invention can further comprise other drugs or pharmaceuticals, e.g., compositions for treating a disease of interest and related symptoms or conditions. The methods of the invention can further comprise co-administration with other drugs or pharmaceuticals, e.g., compositions for treating septic shock, infection, fever, pain and related symptoms or conditions. For example, the methods and/or compositions and formulations of the invention can be co-formulated with and/or co-administered with antibiotics (e.g., antibacterial or bacteriostatic peptides or proteins), particularly those effective against bacteria or toxins, e.g., germ warfare agents, gram negative bacteria, fluids, cytokines, immunoregulatory agents, anti-inflammatory agents, complement activating agents, such as peptides or proteins comprising collagen-like domains or fibrinogen-like domains (e.g., a ficolin), carbohydrate-binding domains, and the like and combinations thereof.

[0771] In one aspect, the polypeptide (e.g., including a pharmaceutical composition or dietary supplement) of the invention is chemically modified. For example, the polypeptide can be chemically modified to produce a protected form that possesses better specific activity, prolonged half-life, and/or reduced immunogenicity in vivo. A polypeptide of the invention can be modified by any means known in the art, for example, by glycosylation, pegylation or a combination thereof.

[0772] In one aspect, the polypeptide (e.g., including a pharmaceutical composition or dietary supplement) of the invention is formulated by encapsulation in a liposome, or a micro- or nano-structure, such as a nanotubule or a nano- or microcapsule.

[0773] In one aspect, the polypeptide is formulated in a matrix stabilized enzyme crystal. The invention also provides matrix stabilized enzyme crystals comprising a polypeptide of the invention for use as pharmaceutical composition or dietary supplement, e.g., to treat or ameliorate a disease or condition of interest, e.g., as described in U.S. Patent App. No. 20020182201; for example, the formulation can be a cross-linked crystalline enzyme and a polymer with a reactive moiety effective to adhere to the crystal layer of the crystalline enzyme. The invention also provides polypeptides of the invention as polymers in the form of multimerized (e.g., multi-functional) cross-linking forms; which in one aspect comprise a matrix stabilized enzyme crystal, e.g., a form resistant to degradation by proteolytic enzymes; and in alternative aspects, the cross-linking reagents comprise a dialdehyde cross-linking reagent, such as a linear or branched dialdehyde, or a substituted or unsubstituted glutaraldehyde (1,5-pentanedial), malonaldehyde (1,3-propanedial), succinaldehyde (1,4-butanedial), adipaldehyde (1,6-hexanedial), pimelaldehyde (1,7-heptanedial), or, glutaraldehyde; in other alternative aspects, the cross-linking reagents comprise carbodiimides, isoxazolium derivatives, chloroformates, carbonyldiimidazole, bis-imidoesters, bis-succinimidyl derivatives, di-isocyanates, di-isothiocyanates, di-sylfonyl halides, bis-nitrophenyl esters, dialdehydes, diacylazides, bis-maleimides, bis-haloacetyl derivatives, di-alkyl halides and bis-oxiranes (e.g., as described in U.S. Pat. No. 5,753,487).

[0774] The compositions of the invention can also be manufactured into biocompatible matrices, e.g., sol-gels, for encapsulating a polypeptide of the invention for use as pharmaceutical composition or dietary supplement, e.g., to treat or ameliorate a disease or condition of interest. In one aspect, compositions of the invention are manufactured as silica-based (e.g., oxysilane) sol-gel matrices, e.g., as described in U.S. Pat. No. 6,395,299, Pat. App. No. 20040241205. The invention also provides nano- or microcapsules comprising a composition of the invention for use as pharmaceutical composition or dietary supplement, e.g., to treat or ameliorate a disease or condition of interest, e.g., as described in U.S. Patent App. No. 20030157181.

[0775] The pharmaceutical compositions of the invention can be manufactured using any conventional method, e.g., mixing, dissolving, granulating, dragée-making, levigating, emulsifying, encapsulating, entrapping, melt-spinning, spray-drying, or lyophilizing processes. Alternative pharmaceutical formulations can be determined depending on the patient (e.g., adult or pediatric), condition, route of administration (e.g., oral) and the desired dosage.

### Applications—Industrial, Medical, Experimental, Food and Feed Processing

[0776] Polypeptides (including enzymes and antibodies) and nucleic acids of the invention can be used for a variety of industrial, experimental, food and feed processing, nutritional and pharmaceutical applications, e.g., for food and feed supplements, colorants, neutraceuticals, cosmetic and pharmaceutical needs, making fuels such as bioethanol, biopropanol, biobutanol, biopropanol, biomethanol, biodiesel and the like.

[0777] Polypeptides of the invention (e.g., having enzyme, structural or binding activity) can be highly selective catalysts. The invention provides methods using enzymes of the invention in the food and feed industries, e.g., in methods for making food and feed products and food and feed additives. In one aspect, the invention provides processes using enzymes of the invention in the medical industry, e.g., to make pharmaceuticals.

[0778] The enzymes of the invention can catalyze reactions with exquisite stereo-, regio- and chemo-selectivities. The polypeptide, enzyme, protein, e.g. structural or binding proteins of the invention can be engineered to function in various solvents, operate at extreme pHs (for example, high pHs and low pHs) extreme temperatures (for example, high temperatures and low temperatures), extreme salinity levels (for example, high salinity and low salinity) and catalyze reactions with compounds that are structurally unrelated to their natural, physiological substrates.

[0779] Animal Feeds and Food or Feed Additives

[0780] The invention provides compositions (e.g., enzymes of the invention, as those described in Tables 1, 2, and 3) methods for treating animal feeds and foods and food or feed additives using a polypeptide, enzyme, protein, e.g. structural or binding protein, of the invention, and/or the antibodies of the invention. The invention provides animal feeds, foods, and additives comprising a polypeptide, enzyme, protein, e.g. structural or binding protein, of the invention, antibodies of the invention. The animal can be any farm animal or any animal raised for its meat, e.g., a pig, goat, cattle, sheep, horse and the like.

[0781] The animal feed additive of the invention may be a granulated enzyme product that may readily be mixed with feed components. Alternatively, feed additives of the invention can form a component of a pre-mix. The granulated enzyme product of the invention may be coated or uncoated. The particle size of the enzyme granulates can be compatible with that of feed and pre-mix components. This provides a safe and convenient mean of incorporating enzymes into feeds. Alternatively, the animal feed additive of the invention may be a stabilized liquid composition. This may be an aqueous or oil-based slurry. See, e.g., U.S. Pat. No. 6,245,546.

[0782] A polypeptide, enzyme, protein, e.g. structural or binding protein, of the present invention, in the modification of animal feed or a food, can process the food or feed either in vitro (by modifying components of the feed or food) or in vivo. Polypeptides of the invention can be added to animal feed or food compositions.

[0783] In one aspect, an enzyme of the invention has any of the following enzyme activities, or is added in combination with another enzyme, e.g., beta-galactosidases, catalases, laccases, cellulases, endoglycosidases, endo-beta-1,4-laccases, amyloglucosidases, glucose isomerases, glycosyltransferases, lipases, phospholipases, lipooxygenases, beta-laccases, endo-beta-1,3(4)-laccases, cutinases, peroxidases, amylases, glucoamylases, pectinases, reductases, oxidases, decarboxylases, phenoloxidases, ligninases, pullulanases, arabinanases, hemicellulases, mannanases, xylolaccases, xylanases, pectin acetyl esterases, rhamnogalacturonan acetyl esterases, proteases, peptidases, proteinases, polygalacturonases, rhamnogalacturonases, galactanases, pectin lyases, transglutaminases, pectin methylesterases, cellobiohydrolases and/or transglutaminases. These enzyme digestion products are more digestible by the animal. Thus, a polypeptide, enzyme, protein, e.g. structural or binding protein, of the invention can contribute to the available energy of the feed or food. Also, a polypeptide, enzyme, protein, e.g. structural or binding protein, of the invention can improve the digestibility and uptake of carbohydrate and non-carbohydrate feed or food constituents such as protein, fat and minerals.

[0784] In another aspect, a polypeptide, enzyme, protein, e.g. structural or binding protein, of the invention can be supplied by expressing the enzymes directly in transgenic feed crops (as, e.g., transgenic plants, seeds and the like), such as grains, cereals, corn, soy bean, rape seed, lupin and the like. As discussed above, the invention provides transgenic plants, plant parts and plant cells comprising a nucleic acid sequence encoding a polypeptide of the invention. In one aspect, the nucleic acid is expressed such that the polypeptide, enzyme, protein, e.g. structural or binding protein of the invention is produced in recoverable quantities. The polypeptide, enzyme, protein, e.g. structural or binding protein can be recovered from any plant or plant part. Alternatively, the plant or plant part containing the recombinant polypeptide can be used as such for improving the quality of a food or feed, e.g., improving nutritional value, palatability, etc.

[0785] The enzyme delivery matrix of the invention is in the form of discrete plural particles, pellets or granules. By “granules” is meant particles that are compressed or compacted, such as by a pelletizing, extrusion, or similar compacting to remove water from the matrix. Such compression or compacting of the particles also promotes intraparticle cohesion of the particles. For example, the granules can be prepared by pelletizing the grain-based substrate in a pellet mill. The pellets prepared thereby are ground or crumbled to a granule size suitable for use as an adjuvant in animal feed. Since the matrix is itself approved for use in animal feed, it can be used as a diluent for delivery of enzymes in animal feed.

[0786] The polypeptide, enzyme, protein, e.g. structural or binding protein contained in the invention enzyme delivery matrix and methods is in one aspect thermostable polypeptide, enzyme, protein, e.g. structural or binding protein, as described herein, so as to resist inactivation of the polypeptide, enzyme, protein, e.g. structural or binding protein during manufacture where elevated temperatures and/or steam may be employed to prepare the palletized enzyme delivery matrix. During digestion of feed containing the invention enzyme delivery matrix, aqueous digestive fluids will cause release of the active enzyme. Other types of thermostable enzymes and nutritional supplements that are thermostable can also be incorporated in the delivery matrix for release under any type of aqueous conditions.

[0787] A coating can be applied to the invention enzyme matrix particles for many different purposes, such as to add a flavor or nutrition supplement to animal feed, to delay release of animal feed supplements and enzymes in gastric conditions, and the like. Or, the coating may be applied to achieve a functional goal, for example, whenever it is desirable to slow release of the enzyme from the matrix particles or to control the conditions under which the enzyme will be released. The composition of the coating material can be such that it is selectively broken down by an agent to which it is susceptible (such as heat, acid or base, enzymes or other chemicals). Alternatively, two or more coatings susceptible to different such breakdown agents may be consecutively applied to the matrix particles.

[0788] The invention is also directed towards a process for preparing an enzyme-releasing matrix. In accordance with the invention, the process comprises providing discrete plural particles of a grain-based substrate in a particle size suitable for use as an enzyme-releasing matrix, wherein the particles comprise a polypeptide, enzyme, protein, e.g. structural or binding protein, encoded by an amino acid sequence of the invention. In one aspect, the process includes compacting or compressing the particles of enzyme-releasing matrix into granules, which most in one aspect is accomplished by pelletizing. The mold inhibitor and cohesiveness agent, when used, can be added at any suitable time, and in one aspect are mixed with the grain-based substrate in the desired proportions prior to pelletizing of the grain-based substrate. Moisture content in the pellet mill feed in one aspect is in the ranges set forth above with respect to the moisture content in the finished product, and in one aspect is about 14-15%. In one aspect, moisture is added to the feedstock in the form of an aqueous preparation of the enzyme to bring the feedstock to this moisture content. The temperature in the pellet mill in one aspect is brought to about 82° C. with steam. The pellet mill may be operated under any conditions that impart sufficient work to the feedstock to provide pellets. The pelleting process itself is a cost-effective process for removing water from the enzyme-containing composition.

The compositions and methods of the invention can be practiced in conjunction with various nutritional and environmental factors including, e.g., (1) manipulation of gut microflora by supplementing feed with prebiotics and/or antibiotics, (2) low fiber diet (low energy and low purine diet), (3) restricting feed for 48 hours and withholding feed for 12 hours before slaughter, (4) increasing consumption of water, and/or (5) keeping animals clean.

[0789] The compositions and methods of the invention can be practiced in conjunction with administration of prebiotics, which are high molecular weight sugars, e.g., fructo-oligosaccharides (FOS); galacto-oligosaccharides (GOS), GRAS (Generally Recognized As Safe) material. These prebiotics can be metabolized by some probiotic lactic acid bacteria (LAB). They are non-digestible by the majority of intestinal microbes.

[0790] Treating Foods and Food Processing

[0791] The polypeptide, enzyme, protein, e.g. structural or binding proteins of the invention, e.g., as described in Tables 1, 2, and 3, have numerous applications in food processing industry. The invention provides treatment compositions, including, e.g., a plant cell, a bacterial cell, a yeast cell, an insect cell, or an animal cell, or any plant or plant part, or any food or feed, a waste product and the like.

[0792] The invention provides feeds or foods comprising a polypeptide, enzyme, protein, e.g. structural or binding protein, the invention, e.g., a feed, a liquid, e.g., a beverage (such as a fruit juice or a beer), a bread or a dough or a bread product, or a beverage precursor (e.g., a wort).

[0793] The food treatment processes of the invention can comprise use of any enzyme of the invention, which can have the following enzymatic activities, and also include the use of any combination of any enzyme, including lyases, laccases, catalases, laccases, cellulases, endoglycosidases, endo-beta-1,4-laccases, amyloglucosidases, glucose isomerases, glycosyltransferases, lipases, phospholipases, lipooxygenases, beta-laccases, endo-beta-1,3(4)-laccases, cutinases, peroxidases, amylases, glucoamylases, pectinases, reductases, oxidases, decarboxylases, phenoloxidases, ligninases, pullulanases, arabinanases, hemicellulases, mannanases, xylolaccases, xylanases, pectin acetyl esterases, rhamnogalacturonan acetyl esterases, proteases, peptidases, proteinases, polygalacturonases, rhamnogalacturonases, galactanases, pectin lyases, transglutaminases, pectin methylesterases, cellobiohydrolases and/or transglutaminases.

[0794] Confectionaries, Cacao Butter and Foods

[0795] In one aspect, the compositions and methods of the invention can be used to make and process hard butters, such as cacao butter (cocao butter). The compositions and methods of the invention can be used to make cocoa butter alternatives by “structured” synthetic techniques using the enzymes of the invention, e.g., as described in Tables 1, 2, and 3, including esterases, acylases, lipases, phospholipases or proteases of the invention. For example, in one aspect, the methods of the invention process or synthesize triacylglycerides, diacylglycerides and/or monoacylglycerides for use as, e.g., cocoa butter alternatives. In one aspect, the methods of the invention generate a hard butter with a defined “plastic region” to maintain sufficient hardness below or at room temperature. In one aspect, the processed or synthesized lipid is designed to have a very narrow “plastic region,” e.g., in one aspect, where it rapidly melts at about body temperature. Natural cacao butter begins to soften at approximately 30° C. to 32° C., and completely melts at approximately 36° C. Natural cacao butter can contain 70 wt % or more of three 1,3-disaturated-2-oleoyl glycerols, which are 1,3-dipalmitoyl-2-oleoyl glycerol (POP), 1-palmitoyl-2-oleoyl glycerol (POSt) and 1,3-distearoyl-2-oleoyl glycerol (StOSt). These three glycerols show a similar melting behavior to each other and are responsible for melting properties of the cacao butter, exhibiting a very narrow plastic region. The invention provides synthetic cacao butters or processed cacao butters (synthesized or processed using a hydrolase of the invention, all possible composition are referred to as cocoa-butter alternatives) with varying percentages of, 3-dipalmitoyl-2-oleoyl glycerol (POP), 1-palmitoyl-2-oleoyl glycerol (POSt) and 1,3-distearoyl-2-oleoyl glycerol (StOSt), depending on the desired properties of the synthetic cacao butter, and, synthetic cacao butters with more or less than 70 wt % of the three 1,3-disaturated-2-oleoyl glycerols. The synthetic cacao butters of the invention can partially or completely replace natural or unprocessed cacao butters and can maintain or improve essential hard butter properties.

[0796] The invention provides synthetic cacao butters or processed cacao butters (synthesized or processed using a hydrolase of the invention) with desired properties for use in confectionary, bakery and pharmaceutical products. In one aspect, the invention provides confectionary, bakery and pharmaceutical products comprising a hydrolase of the invention. In one aspect, the methods of the invention make or process a lipid (a fat) from a confection (e.g., a chocolate) or to be used in a confection. In one aspect, a lipid is made or processed such that the chocolate shows less finger-imprinting than chocolate made from natural cocoa butter, while still having sharp melting characteristics in the mouth. In one aspect, a lipid is made or processed such that a confection (e.g., chocolate) can be made at a comparatively high ambient temperature, or, be made using a cooling water at a comparatively high temperature. In one aspect, the lipid is made or processed such that a confection (e.g., chocolate) can be stored under relatively warmer conditions, e.g., tropical or semi-tropical conditions or in centrally heated buildings. In one aspect, the lipids are made or processed such that a confection (e.g., chocolate) will have a lipid (fat) content of consistent composition and quality. The enzymes of the invention can be used to provide a substitute composition for cacao butter which can significantly improve its thermal stability and replace it in a wide range of applications.

[0797] Margarine and Shortening Production

[0798] The invention provides synthetic or processed fats, e.g., margarine and shortening synthesized or processed using an enzyme of the invention, e.g., as described in Tables 1, 2, and 3, such as a hydrolase of the invention. In one aspect, the invention provides processed fats comprising a vegetable oil, such as soybean oil, corn oil, rapeseed oil, palm oil or lauric type oils synthesized or processed using a hydrolase of the invention. The synthetic or processed fats, e.g., margarine and shortening, are designed to have a desired “plasticity.” Many of the plastic fat products, such as margarine and shortening, are produced from hard stocks and liquid oils as raw materials. For example, liquid oils such as soybean oil, corn oil, palm oil and rapeseed oil, are blended with their hardened oils (hard stocks), and the blend is adjusted to have an appropriate consistency (plasticity). The plastic fat products such as margarine and shortening so produced tend to cause the formation of relatively coarse crystallines because fats and oils used as the raw materials are composed of fatty acids having almost the same carbon chain length. In other words, they have a highly-unified composition of fatty acids. For this reason, the plasticity of these products can be maintained at an appropriate degree only within a narrow temperature range, so that the liquid oils contained therein have a tendency to exude. In one aspect, the invention provides methods of making or processing fats designed such that they have a varied (and defined) composition of fatty acids. The resultant oil, e.g., margarine or shortening, can have a broader range of plasticity.

[0799] In one aspect, the methods and compositions of the invention are used to make or process vegetable oils, such as soybean oil, corn oil, rapeseed oil, palm oil or lauric type oils using the hydrolases of the invention, including inter-esterification and enzymatic transesterification, see e.g., U.S. Pat. No. 5,288,619. The methods and compositions of the invention can be used in place of random inter-esterification as described in, e.g., U.S. Pat. No. 3,949,105. In one aspect, the methods and compositions of the invention are used to in enzymatic transesterification for preparing an oil, e.g., a margarine oil, having both low trans-acid and low intermediate chain fatty acid content.

[0800] In one aspect, the symmetric structure of an oil, e.g., a palm or lauric type oils is modified, e.g., into a random structure. Thus, the methods of the invention can be used to modify the properties of plastic fat products. In one aspect, the modification of oils by the methods of the invention can be designed to prevent or slow gradually hardening of the oil with time, particularly when the products are being stored.

[0801] In one aspect, the methods and compositions of the invention in a trans-esterification reaction mixture comprising a stearic acid source material and an edible liquid vegetable oil, trans-esterifying the stearic acid source material and the vegetable oil using a 1-, 3-positionally specific lipase of the invention, and then hydrogenating the fatty acid mixture to provide a recycle stearic acid source material for a recyclic reaction with the vegetable oil. See e.g., U.S. Pat. No. 5,288,619.

[0802] In one aspect, an inter-esterification reaction is conducted with a lipase of the invention. In one aspect, the lipase of the invention has a selectivity for the 1- and 3-positions of triglyceride to slow or inhibit an increase in the amount of tri-saturated triglycerides in the oil. In this reaction of the invention, deficiencies of conventional random inter-esterification and the difficulty of inter-esterification with a non-specific lipase can be overcome because the inter-esterification is conducted by an enzyme of the invention having a specificity for the 1- and 3-positions of triglycerides. In one aspect, the exudation of liquid oils contained in the products is slowed or prevented with a temperature increase in the reaction to inhibit a rise in the melting point caused by an increase in the amount of tri-saturated triglycerides. This addresses the problem of hardening of products during long-term storage.

[0803] Brewing and Fermenting

[0804] The invention provides methods of brewing (e.g., fermenting) beer comprising hydrolases of the invention. In one exemplary process, starch-containing raw materials are disintegrated and processed to form a malt. A hydrolase of the invention is used at any point in the fermentation process. For example, hydrolases (e.g., proteases) of the invention can be used in the processing of barley malt. The major raw material of beer brewing is barley malt. This can be a three stage process. First, the barley grain can be steeped to increase water content, e.g., to around about 40%. Second, the grain can be germinated by incubation at 15 to 25° C. for 3 to 6 days when enzyme synthesis is stimulated under the control of gibberellins. In one aspect, hydrolases of the invention are added at this (or any other) stage of the process. The action of hydrolases results in an increase in fermentable reducing sugars. This can be expressed as the diastatic power, DP, which can rise from around 80 to 190 in 5 days at 12° C. Hydrolases (e.g., proteases) of the invention can be used in any beer or alcoholic beverage producing process, as described, e.g., in U.S. Pat. Nos. 5,762,991; 5,536,650; 5,405,624; 5,021,246; 4,788,066.

[0805] Waste Treatment

[0806] The polypeptide, enzyme, protein, e.g. structural or binding proteins of the invention, e.g., as described in Tables 1, 2, and 3, can be used in a variety of other industrial applications, e.g., in waste treatment (in addition to, e.g., biomass conversion to a fuel, e.g., bioethanol, biopropanol, biobutanol, biopropanol, biomethanol, biodiesel, and the like). For example, in one aspect, the invention provides a solid waste digestion process using a polypeptide, enzyme, protein, e.g. structural or binding protein, of the invention. The methods can comprise reducing the mass and volume of substantially untreated solid waste. Solid waste can be treated with an enzymatic digestive process in the presence of an enzymatic solution (including a polypeptide, enzyme, protein, e.g. structural or binding protein, of the invention) at a controlled temperature. This results in a reaction without appreciable bacterial fermentation from added microorganisms. The solid waste is converted into a liquefied waste and any residual solid waste. The resulting liquefied waste can be separated from said any residual solidified waste. See e.g., U.S. Pat. No. 5,709,796.

[0807] In one aspect, the compositions and methods of the invention are used for odor removal or odor reduction in animal waste lagoons, e.g., on swine farms, and other animal waste management systems.

[0808] The waste treatment processes of the invention can comprise use of any enzyme of the invention, which can have the following enzymatic activities, and also include the use of any combination of any enzyme or protein, including e.g. structural or binding protein, catalases, lyases, laccases, cellulases, endoglycosidases, endo-beta-1,4-laccases, amyloglucosidases, glucose isomerases, glycosyltransferases, lipases, phospholipases, lipooxygenases, beta-laccases, endo-beta-1,3(4)-laccases, cutinases, peroxidases, amylases, glucoamylases, pectinases, reductases, oxidases, decarboxylases, phenoloxidases, ligninases, pullulanases, phytases, arabinanases, hemicellulases, mannanases, xylolaccases, xylanases, pectin acetyl esterases, rhamnogalacturonan acetyl esterases, proteases, peptidases, proteinases, polygalacturonases, rhamnogalacturonases, galactanases, pectin lyases, transglutaminases, pectin methylesterases, cellobiohydrolases and/or transglutaminases.

[0809] Increasing the Flow of Production Fluids from a Subterranean Formation

[0810] The invention also includes a method using an enzyme of the invention, e.g., as described in Tables 1, 2, and 3, wherein the method increases the flow of production fluids from a subterranean formation by removing viscous (e.g., starch-containing) damaging fluids formed during production operations; these fluids can be found within the subterranean formation which surrounds a completed well bore. Thus, this method of the invention results in production fluids being able to flow from the well bore. This method of the invention also addresses the problem of damaging fluids reducing the flow of production fluids from a formation below expected flow rates. In one aspect, the invention provides for formulating an enzyme treatment (using an enzyme of the invention) by blending together an aqueous fluid and a polypeptide of the invention; pumping the enzyme treatment to a desired location within the well bore; allowing the enzyme treatment to degrade the viscous (e.g., starch-containing) damaging fluid, whereby the fluid can be removed from the subterranean formation to the well surface; and wherein the enzyme treatment is effective to attack linkages in the viscous (e.g., starch-containing) fluid.

[0811] The subterranean formation enzyme treatment processes of the invention can comprise use of any enzyme of the invention, which can have the following enzymatic activities, and also include the use of any combination of any enzyme, including tryptophanases or tyrosine decarboxylases, laccases, catalases, lyases, laccases, other cellulases, endoglycosidases, endo-beta-1,4-laccases, amyloglucosidases, other glucosidases, glucose isomerases, glycosyltransferases, lipases, phospholipases, lipooxygenases, beta-laccases, endo-beta-1,3(4)-laccases, cutinases, peroxidases, amylases, glucoamylases, pectinases, reductases, oxidases, decarboxylases, phenoloxidases, ligninases, pullulanases, arabinanases, hemicellulases, mannanases, xylolaccases, xylanases, pectin acetyl esterases, rhamnogalacturonan acetyl esterases, proteases, peptidases, proteinases, polygalacturonases, rhamnogalacturonases, galactanases, pectin lyases, transglutaminases, pectin methylesterases, other cellobiohydrolases and/or transglutaminases.

[0812] Latex Processing

[0813] The methods and compositions (e.g., enzymes of the invention, e.g., as described in Tables 1, 2, and 3, including esterases, acylases, lipases, phospholipases or proteases of the invention) of the invention can be used to selectively hydrolyze saturated esters over unsaturated esters into acids or alcohols. In one aspect, the invention provides for the selective hydrolysis of ethyl propionate over ethyl acrylate. In one aspect, these methods are used to remove undesired esters from monomer feeds used in latex polymerization and from the latexes after polymerization. The methods and compositions (hydrolases) of the invention can be used to treat latexes for a variety of purposes, e.g., to treat latexes used in hair fixative compositions to remove unpleasant odors. Latexes treated by the methods and compositions of the invention include, e.g., polymers containing acrylic, vinyl and unsaturated acid monomers, including alkyl acrylate monomers such as methyl acrylate, ethyl acrylate, propyl acrylate and butyl acrylate, and acrylate acids such as acrylic acid, methacrylic acid, crotonic acid, itaconic acid and mixtures thereof. See, e.g., U.S. Pat. No. 5,856,150.

[0814] Biomass Conversion and Production of Clean Bio Fuels

[0815] The invention provides enzymes, e.g., as described in Tables 1, 2, and 3 (including mixtures, or “cocktails” of enzymes) and methods for the conversion of a biomass or any lignocellulosic material (e.g., any composition comprising cellulose, hemicellulose and lignin), to a fuel (e.g., bioethanol, biopropanol, biobutanol, biopropanol, biomethanol, biodiesel), in addition to feeds, foods and chemicals. Thus, the compositions and methods of the invention provide effective and sustainable alternatives or adjuncts to use of petroleum-based products, e.g., as a mixture of a biofuel such as biomethanol, bioethanol, biopropanol, biobutanol, and the like, to diesel fuel, gasoline, kerosene and the like. The invention provides organisms expressing enzymes of the invention for participation in chemical cycles involving natural biomass conversion. In one aspect, enzymes and methods for the conversion are used in enzyme ensembles for the efficient depolymerization of cellulosic and hemicellulosic polymers to metabolizeable carbon moieties. The invention provides methods for discovering and implementing the most effective of enzymes to enable these important new “biomass conversion” and alternative energy industrial processes.

[0816] The methods of the invention also include taking the converted lignocellulosic material (processed by enzymes of the invention) and making it into a fuel (e.g. a bioethanol, a biodiesel) by fermentation and/or by chemical synthesis. In one aspect, the produced sugars are fermented and/or the non-fermentable products are gasified.

[0817] The enzymes of the invention (including, for example, organisms, such as microorganisms, e.g., fungi, yeast or bacteria, making and in some aspects secreting recombinant enzymes of the invention) can be used in or included/integrated at any stage of any biomass conversion process, e.g., at any one step, several steps, or included in all of the steps, or all of the following methods of biomass conversion processes, or all of these biofuel alternatives:
[0818] Direct combustion: the burning of material by direct heat and is the simplest biomass technology; can be very economical if a biomass source is nearby.
[0819] Pyrolysis: is the thermal degradation of biomass by heat in the absence of oxygen. In one aspect, biomass is heated to a temperature between about 800 and 1400 degrees Fahrenheit, but no oxygen is introduced to support combustion resulting in the creation of gas, fuel oil and charcoal.
[0820] Gasification: biomass can be used to produce methane through heating or anaerobic digestion. Syngas, a mixture of carbon monoxide and hydrogen, can be derived from biomass.
   [0821] Landfill Gas: is generated by the decay (anaerobic digestion) of buried garbage in landfills. When the organic waste decomposes, it generates gas consisting of approximately 50% methane, the major component of natural gas.
[0822] Anaerobic digestion: converts organic matter to a mixture of methane, the major component of natural gas, and carbon dioxide. In one aspect, biomass such as waterwaste (sewage), manure, or food processing waste, is mixed with water and fed into a digester tank without air.
[0823] Fermentation
   [0824] Alcohol Fermentation: fuel alcohol is produced by converting starch to sugar, fermenting the sugar to alcohol, then separating the alcohol water mixture by distillation. Feedstocks such as wheat, barley, potatoes, and waste paper, sawdust, and straw containing sugar, starch, or cellulose can be converted to alcohol by fermentation with yeast.
[0825] Transesterification: An exemplary reaction for converting oil to biodiesel is called transesterification. The transesterification process reacts an alcohol (like methanol) with the triglyceride oils contained in vegetable oils, animal fats, or recycled greases, forming fatty acid alkyl esters (biodiesel) and glycerin. The reaction requires heat and a strong base catalyst, such as sodium hydroxide or potassium hydroxide.
   [0826] Biodiesel: Biodiesel is a mixture of fatty acid alkyl esters made from vegetable oils, animal fats or recycled greases. Biodiesel can be used as a fuel for vehicles in its pure form, but it is usually used as a petroleum diesel additive to reduce levels of particulates, carbon monoxide, hydrocarbons and air toxics from diesel-powered vehicles.
[0827] Hydrolysis: includes hydrolysis of a compound, e.g., a biomass, such as a lignocellulosic material, catalyzed using an enzyme of the instant invention.
[0828] Congeneration: is the simultaneous production of more than one form of energy using a single fuel and facility. In one aspect, biomass cogeneration has more potential growth than biomass generation alone because cogeneration produces both heat and electricity.

[0829] In one aspect, the polypeptides of the invention have cellulolytic activity, e.g., cellulases activity, such as endoglucanase, cellobiohydrolase and/or β-glucosidase (beta-glucosidase) activity, or other enzymatic activity for generating bioethanol, biopropanol, biobutanol, biopropanol, biomethanol and/or biodiesel from an organic material, e.g., a biomass, such as compositions derived from plants and animals, including any agricultural crop or other renewable feedstock, an agricultural residue or an animal waste, or the organic components of municipal and industrial wastes, or microorganisms such as algae or yeast. In one aspect, polypeptides of the invention are used in processes for converting lignocellulosic biomass to bioethanol, biopropanol, biobutanol, biopropanol, biomethanol and/or biodiesel, or otherwise are used in processes for hydrolyzing or digesting biomaterials such that they can be used as a biofuel (including bioethanol, biopropanol, biobutanol, biopropanol, biomethanol and/or biodiesel), or for making it easier for the biomass to be processed into a fuel. In an alternative aspect, polypeptides of the invention are used in processes for a transesterification process reacting an alcohol (like ethanol, propanol, butanol, propanol, methanol) with a triglyceride oil contained in a vegetable oil, animal fat or recycled greases, forming fatty acid alkyl esters (biodiesel) and glycerin. In one aspect, biodiesel is made from soybean oil or recycled cooking oils. Animal's fats, other vegetable oils, and other recycled oils can also be used to produce biodiesel, depending on their costs and availability. In another aspect, blends of all kinds of fats and oils are used to produce a biodiesel fuel of the invention.

[0830] Enzymes of the invention can also be used in glycerin refining. The glycerin by-product contains unreacted catalyst and soaps that are neutralized with an acid. Water and alcohol are removed to produce 50% to 80% crude glycerin. The remaining contaminants include unreacted fats and oils, which can be processes using the polypeptides of the invention. In a large biodiesel plants of the invention, the glycerin can be further purified, e.g., to 99% or higher purity, for the pharmaceutical and cosmetic industries.

[0831] Bioethanol, biopropanol, biobutanol, biopropanol, biomethanol, and/or biodiesel made using the polypeptides of the invention can be used with fuel oxygenates to improve combustion characteristics. Adding oxygen results in more complete combustion, which reduces carbon monoxide emissions. This is another environmental benefit of replacing petroleum fuels with biofuels (e.g., a fuel of the invention). A bioethanol made using the compositions and/or methods of this invention can be blended with gasoline to form an E10 blend (about 5% to 10% ethanol and about 90% to 95% gasoline), but it can be used in higher concentrations such as E85 or in its pure form. A bioethanol made using the compositions and/or methods of this invention can be blended with petroleum diesel to form a B20 blend (20% biodiesel and 80% petroleum diesel), although other blend levels can be used up to B100 (pure biodiesel).

[0832] The invention also provides processes for making ethanol (“bioethanol”), butanol (“biobutanol”), propanol (“biopropanol”), methanol (“biomethanol”), and/or diesel (“biodiesel”) from compositions comprising any biomass, e.g., a lignocellulosic biomass. The biomass, e.g., lignocellulosic biomass, material can be obtained from agricultural crops, as a byproduct of food or feed production, or as lignocellulosic waste products, such as plant residues and waste paper, from algae, and the like. Examples of suitable plant or algae sources or plant or algae residues for treatment with polypeptides of the invention include kelp, various algae, grains, seeds, stems, leaves, hulls, husks, corn cobs, corn stover, straw, grasses (e.g., Indian grass, such as Sorghastrum nutans; or, switch grass, e.g., Panicum species, such as Panicum virgatum), and the like, as well as wood, wood chips, wood pulp, and sawdust. Examples of paper waste suitable for treatment with polypeptides of the invention include discard photocopy paper, computer printer paper, notebook paper, notepad paper, typewriter paper, and the like, as well as newspapers, magazines, cardboard, and paper-based packaging materials.

[0833] In one embodiment, the enzymes and methods of the invention can be used in conjunction with more “traditional” means of making ethanol, methanol, propanol, butanol, propanol and/or diesel from biomass, e.g., as methods comprising hydrolyzing lignocellulosic materials by subjecting dried lignocellulosic material in a reactor to a catalyst comprised of a dilute solution of a strong acid and a metal salt; this can lower the activation energy, or the temperature, of cellulose hydrolysis to obtain higher sugar yields; see, e.g., U.S. Pat. Nos. 6,660,506 and 6,423,145.

[0834] Another exemplary method that incorporated use of enzymes of the invention comprises hydrolyzing lignocellulosic material containing hemicellulose, cellulose and lignin by subjecting the material to a first stage hydrolysis step in an aqueous medium at a temperature and a pressure chosen to effect primarily depolymerization of hemicellulose without major depolymerization of cellulose to glucose. This step results in a slurry in which the liquid aqueous phase contains dissolved monosaccharides resulting from depolymerization of hemicellulose and a solid phase containing cellulose and lignin. A second stage hydrolysis step can comprise conditions such that at least a major portion of the cellulose is depolymerized, such step resulting in a liquid aqueous phase containing dissolved/soluble depolymerization products of cellulose. See, e.g., U.S. Pat. No. 5,536,325. Enzymes of the invention (including the invention's mixtures, or “cocktails” of enzymes) can be added at any stage of this exemplary process.

[0835] Another exemplary method that incorporated use of enzymes of the invention comprises processing a lignocellulose-containing biomass material by one or more stages of dilute acid hydrolysis with about 0.4% to 2% strong acid; and treating an unreacted solid lignocellulosic component of the acid hydrolyzed biomass material by alkaline delignification to produce precursors for biodegradable thermoplastics and derivatives. See, e.g., U.S. Pat. No. 6,409,841. Enzymes of the invention can be added at any stage of this exemplary process.

[0836] Another exemplary method that incorporated use of enzymes of the invention comprises prehydrolyzing lignocellulosic material in a prehydrolysis reactor; adding an acidic liquid to the solid lignocellulosic material to make a mixture; heating the mixture to reaction temperature; maintaining reaction temperature for time sufficient to fractionate the lignocellulosic material into a solubilized portion containing at least about 20% of the lignin from the lignocellulosic material and a solid fraction containing cellulose; removing a solubilized portion from the solid fraction while at or near reaction temperature wherein the cellulose in the solid fraction is rendered more amenable to enzymatic digestion; and recovering a solubilized portion. See, e.g., U.S. Pat. No. 5,705,369. Enzymes of the invention can be added at any stage of this exemplary process.

[0837] The invention provides methods for making motor fuel compositions (e.g., for spark ignition motors) based on liquid hydrocarbons blended with a fuel grade alcohol made by using an enzyme or a method of the invention. In one aspect, the fuels made by use of an enzyme of the invention comprise, e.g., coal gas liquid- or natural gas liquid-ethanol blends. In one aspect, a co-solvent is biomass-derived 2-methyltetrahydrofuran (MTHF). See, e.g., U.S. Pat. No. 6,712,866.

[0838] In one aspect, methods of the invention for the enzymatic degradation of lignocellulose, e.g., for production of ethanol from lignocellulosic material, can also comprise use of ultrasonic treatment of the biomass material; see, e.g., U.S. Pat. No. 6,333,181.

[0839] In another aspect, methods of the invention for producing bioethanol, biopropanol, biobutanol, biopropanol, biomethanol, and/or biodiesel from a cellulosic substrate comprise providing a reaction mixture in the form of a slurry comprising cellulosic substrate, an enzyme of this invention and a fermentation agent (e.g., within a reaction vessel, such as a semi-continuously solids-fed bioreactor), and the reaction mixture is reacted under conditions sufficient to initiate and maintain a fermentation reaction (as described, e.g., in U.S. Pat. App. No. 20060014260). In one aspect, experiment or theoretical calculations can determine an optimum feeding frequency. In one aspect, additional quantities of the cellulosic substrate and the enzyme are provided into the reaction vessel at an interval(s) according to the optimized feeding frequency.

[0840] One exemplary process for making a biofuel (e.g., bioethanol, biopropanol, biobutanol, biopropanol, biomethanol) and/or biodiesel of the invention is described in U.S. Pat. App. Pub. Nos. 20050069998; 20020164730; and in one aspect comprises stages of grinding the lignocellulosic biomass (e.g., to a size of 15-30 mm), subjecting the product obtained to steam explosion pre-treatment (e.g., at a temperature of 190-230° C.) for between 1 and 10 minutes in a reactor; collecting the pre-treated material in a cyclone or related product of manufacture; and separating the liquid and solid fractions by filtration in a filter press, introducing the solid fraction in a fermentation deposit and adding one or more enzymes of the invention, e.g., a cellulase and/or beta-glucosidase enzyme (e.g., dissolved in citrate buffer pH 4.8).

[0841] Another exemplary process for making a biofuels (such as bioethanol, biopropanol, biobutanol, biopropanol, biomethanol) and/or biodiesels of the invention comprising ethanol using enzymes of the invention comprises pretreating a starting material comprising a lignocellulosic feedstock comprising at least hemicellulose and cellulose. In one aspect, the starting material comprises potatoes, soybean (rapeseed), barley, rye, corn, oats, wheat, beets or sugar cane or a component or waste or food or feed production byproduct. The starting material (“feedstock”) is reacted at conditions which disrupt the plant's fiber structure to effect at least a partial hydrolysis of the hemicellulose and cellulose. Disruptive conditions can comprise, e.g., subjecting the starting material to an average temperature of 180° C. to 270° C. at pH 0.5 to 2.5 for a period of about 5 seconds to 60 minutes; or, temperature of 220° C. to 270° C., at pH 0.5 to 2.5 for a period of 5 seconds to 120 seconds, or equivalent. This generates a feedstock with increased accessibility to being digested by an enzyme, e.g., a cellulase enzyme of the invention. U.S. Pat. No. 6,090,595.

[0842] Exemplary conditions for cellulase hydrolysis of lignocellulosic material include reactions at temperatures between about 30° C. and 48° C., and/or a pH between about 4.0 and 6.0. Other exemplary conditions include a temperature between about 30° C. and 60° C. and a pH between about 4.0 and 8.0.

[0843] Detergent Compositions

[0844] The invention provides detergent compositions comprising one or more polypeptides of the invention (e.g., enzymes as described in Tables 1, 2, and 3, e.g., having cellulase, endoglucanase, cellobiohydrolase, mannanase and/or beta-glucosidase activity) and methods of making and using these compositions. The invention incorporates all methods of making and using detergent compositions, see, e.g., U.S. Pat. Nos. 6,413,928; 6,399,561; 6,365,561; 6,380,147. The detergent compositions can be a one and two part aqueous composition, a non-aqueous liquid composition, a cast solid, a granular form, a particulate form, a compressed tablet, a gel and/or a paste and a slurry form. The invention also provides methods capable of a rapid removal of gross food soils, films of food residue and other minor food compositions using these detergent compositions. Enzymes of the invention can facilitate the removal of starchy stains by means of catalytic hydrolysis of the starch polysaccharide. Enzymes of the invention can be used in dishwashing detergents in textile laundering detergents.

[0845] The actual active enzyme content depends upon the method of manufacture of a detergent composition and is not critical, assuming the detergent solution has the desired enzymatic activity. In one aspect, the amount of glucosidase present in the final solution ranges from about 0.001 mg to 0.5 mg per gram of the detergent composition. The particular enzyme chosen for use in the process and products of this invention depends upon the conditions of final utility, including the physical product form, use pH, use temperature, and soil types to be degraded or altered. The enzyme can be chosen to provide optimum activity and stability for any given set of utility conditions. In one aspect, the polypeptides of the present invention are active in the pH ranges of from about 4 to about 12 and in the temperature range of from about 20° C. to about 95° C. The detergents of the invention can comprise cationic, semi-polar nonionic or zwitterionic surfactants; or, mixtures thereof.

[0846] Enzymes of the present invention (e.g., enzymes having cellulase, endoglucanase, cellobiohydrolase, mannanase and/or beta-glucosidase activity) can be formulated into powdered and liquid detergents having pH between 4.0 and 12.0 at levels of about 0.01 to about 5% (preferably 0.1% to 0.5%) by weight. These detergent compositions can also include other enzymes such as known proteases, cellulases, lipases or endoglycosidases, as well as builders and stabilizers. The addition of enzymes of the invention to conventional cleaning compositions does not create any special use limitation. In other words, any temperature and pH suitable for the detergent is also suitable for the present compositions as long as the pH is within the above range, and the temperature is below the described enzyme's denaturing temperature. In addition, the polypeptides of the invention can be used in a cleaning composition without detergents, again either alone or in combination with builders and stabilizers.

[0847] The present invention provides cleaning compositions including detergent compositions for cleaning hard surfaces, detergent compositions for cleaning fabrics, dishwashing compositions, oral cleaning compositions, denture cleaning compositions, and contact lens cleaning solutions.

[0848] In one aspect, the invention provides a method for washing an object comprising contacting the object with a polypeptide of the invention under conditions sufficient for washing. A polypeptide of the invention may be included as a detergent additive. The detergent composition of the invention may, for example, be formulated as a hand or machine laundry detergent composition comprising a polypeptide of the invention. A laundry additive suitable for pre-treatment of stained fabrics can comprise a polypeptide of the invention. A fabric softener composition can comprise a polypeptide of the invention. Alternatively, a polypeptide of the invention can be formulated as a detergent composition for use in general household hard surface cleaning operations. In alternative aspects, detergent additives and detergent compositions of the invention may comprise one or more other enzymes such as a protease, a lipase, a cutinase, another glucosidase, a carbohydrase, another cellulase, a pectinase, a mannanase, an arabinase, a galactanase, a xylanase, an oxidase, e.g., a lactase, and/or a peroxidase. The properties of the enzyme(s) of the invention are chosen to be compatible with the selected detergent (i.e. pH-optimum, compatibility with other enzymatic and non-enzymatic ingredients, etc.) and the enzyme(s) is present in effective amounts. In one aspect, enzymes of the invention are used to remove malodorous materials from fabrics. Various detergent compositions and methods for making them that can be used in practicing the invention are described in, e.g., U.S. Pat. Nos. 6,333,301; 6,329,333; 6,326,341; 6,297,038; 6,309,871; 6,204,232; 6,197,070; 5,856,164.

[0849] The detergents and related processes of the invention can also include the use of any combination of other enzymes such as tryptophanases or tyrosine decarboxylases, laccases, catalases, laccases, other cellulases, endoglycosidases, endo-beta-1,4-laccases, amyloglucosidases, other glucosidases, glucose isomerases, glycosyltransferases, lipases, phospholipases, lipooxygenases, beta-laccases, endo-beta-1,3(4)-laccases, cutinases, peroxidases, amylases, glucoamylases, pectinases, reductases, oxidases, decarboxylases, phenoloxidases, ligninases, pullulanases, arabinanases, hemicellulases, mannanases, xylolaccases, xylanases, pectin acetyl esterases, rhamnogalacturonan acetyl esterases, proteases, peptidases, proteinases, polygalacturonases, rhamnogalacturonases, galactanases, pectin lyases, transglutaminases, pectin methylesterases, other cellobiohydrolases and/or transglutaminases.

[0850] Treating Fabrics and Textiles

[0851] The invention provides compositions and methods of treating fabrics and textiles using one or more polypeptides of the invention, e.g., enzymes as described in Tables 1, 2, and 3, including enzymes having cellulase, endoglucanase, cellobiohydrolase, mannanase and/or beta-glucosidase activity. The polypeptides of the invention can be used in any fabric-treating method, which are well known in the art, see, e.g., U.S. Pat. No. 6,077,316. For example, in one aspect, the feel and appearance of a fabric is improved by a method comprising contacting the fabric with an enzyme of the invention in a solution. In one aspect, the fabric is treated with the solution under pressure.

[0852] In one aspect, the enzymes of the invention are applied during or after the weaving of textiles, or during the desizing stage, or one or more additional fabric processing steps. During the weaving of textiles, the threads are exposed to considerable mechanical strain. Prior to weaving on mechanical looms, warp yarns are often coated with sizing starch or starch derivatives in order to increase their tensile strength and to prevent breaking. The enzymes of the invention can be applied to remove these sizing starch or starch derivatives. After the textiles have been woven, a fabric can proceed to a desizing stage. This can be followed by one or more additional fabric processing steps. Desizing is the act of removing size from textiles. After weaving, the size coating must be removed before further processing the fabric in order to ensure a homogeneous and wash-proof result. The invention provides a method of desizing comprising enzymatic hydrolysis of the size by the action of an enzyme of the invention.

[0853] The enzymes of the invention (e.g., enzymes having cellulase, endoglucanase, cellobiohydrolase, mannanase and/or beta-glucosidase activity) can be used to desize fabrics, including cotton-containing fabrics, as detergent additives, e.g., in aqueous compositions. The invention provides methods for producing a stonewashed look on indigo-dyed denim fabric and garments. For the manufacture of clothes, the fabric can be cut and sewn into clothes or garments, which is afterwards finished. In particular, for the manufacture of denim jeans, different enzymatic finishing methods have been developed. The finishing of denim garment normally is initiated with an enzymatic desizing step, during which garments are subjected to the action of amylolytic enzymes in order to provide softness to the fabric and make the cotton more accessible to the subsequent enzymatic finishing steps. The invention provides methods of finishing denim garments (e.g., a “bio-stoning process”), enzymatic desizing and providing softness to fabrics using the Enzymes of the invention. The invention provides methods for quickly softening denim garments in a desizing and/or finishing process.

[0854] The invention also provides disinfectants comprising enzymes of the invention (e.g., enzymes having cellulase, endoglucanase, cellobiohydrolase, mannanase and/or beta-glucosidase activity).

[0855] The fabric or textile treatment processes of the invention can also include the use of any combination of other enzymes such as tryptophanases or tyrosine decarboxylases, laccases, catalases, laccases, other cellulases, endoglycosidases, endo-beta-1,4-laccases, amyloglucosidases, other glucosidases, glucose isomerases, glycosyltransferases, lipases, phospholipases, lipooxygenases, beta-laccases, endo-beta-1,3(4)-laccases, cutinases, peroxidases, amylases, glucoamylases, pectinases, reductases, oxidases, decarboxylases, phenoloxidases, ligninases, pullulanases, arabinanases, hemicellulases, mannanases, xylolaccases, xylanases, pectin acetyl esterases, rhamnogalacturonan acetyl esterases, proteases, peptidases, proteinases, polygalacturonases, rhamnogalacturonases, galactanases, pectin lyases, transglutaminases, pectin methylesterases, other cellobiohydrolases and/or transglutaminases.

[0856] Paper or Pulp Treatment

[0857] The enzymes of the invention e.g., enzymes as described in Tables 1, 2, and 3, including enzymes having cellulase, endoglucanase, cellobiohydrolase, mannanase and/or beta-glucosidase activity) can be in paper or pulp treatment or paper deinking. For example, in one aspect, the invention provides a paper treatment process using enzymes of the invention. In one aspect, the enzymes of the invention can be used to modify starch in the paper thereby converting it into a liquefied form. In another aspect, paper components of recycled photocopied paper during chemical and enzymatic deinking processes. In one aspect, Enzymes of the invention can be used in combination with other enzymes, including other cellulases (including other endoglucanases, cellobiohydrolases and/or beta-glucosidases). The wood, paper, paper product or pulp can be treated by the following three processes: 1) disintegration in the presence of an enzyme of the invention, 2) disintegration with a deinking chemical and an enzyme of the invention, and/or 3) disintegration after soaking with an enzyme of the invention. The recycled paper treated with an enzyme of the invention can have a higher brightness due to removal of toner particles as compared to the paper treated with just cellulase. While the invention is not limited by any particular mechanism, the effect of an enzyme of the invention may be due to its behavior as surface-active agents in pulp suspension.

[0858] The invention provides methods of treating paper and paper pulp using one or more polypeptides of the invention. The polypeptides of the invention can be used in any paper- or pulp-treating method, which are well known in the art, see, e.g., U.S. Pat. No. 6,241,849; 6,066,233; 5,582,681. For example, in one aspect, the invention provides a method for deinking and decolorizing a printed paper containing a dye, comprising pulping a printed paper to obtain a pulp slurry, and dislodging an ink from the pulp slurry in the presence of an enzyme of the invention (other enzymes can also be added). In another aspect, the invention provides a method for enhancing the freeness of pulp, e.g., pulp made from secondary fiber, by adding an enzymatic mixture comprising an enzyme of the invention (can also include other enzymes, e.g., pectinase enzymes) to the pulp and treating under conditions to cause a reaction to produce an enzymatically treated pulp. The freeness of the enzymatically treated pulp is increased from the initial freeness of the secondary fiber pulp without a loss in brightness.

[0859] The paper, wood or pulp treatment or recycling processes of the invention can also include the use of any combination of other enzymes such as tryptophanases or tyrosine decarboxylases, laccases, catalases, laccases, other cellulases, endoglycosidases, endo-beta-1,4-laccases, amyloglucosidases, other glucosidases, glucose isomerases, glycosyltransferases, lipases, phospholipases, lipooxygenases, beta-laccases, endo-beta-1,3(4)-laccases, cutinases, peroxidases, amylases, glucoamylases, pectinases, reductases, oxidases, decarboxylases, phenoloxidases, ligninases, pullulanases, arabinanases, hemicellulases, mannanases, xylolaccases, xylanases, pectin acetyl esterases, rhamnogalacturonan acetyl esterases, proteases, peptidases, proteinases, polygalacturonases, rhamnogalacturonases, galactanases, pectin lyases, transglutaminases, pectin methylesterases, other cellobiohydrolases and/or transglutaminases.

[0860] Repulping: Treatment of Lignocellulosic Materials

[0861] The invention also provides a method for the treatment of lignocellulosic fibers, wherein the fibers are treated with a polypeptide of the invention e.g., enzymes as described in Tables 1, 2, and 3, including enzymes having cellulase, endoglucanase, cellobiohydrolase, mannanase and/or beta-glucosidase activity), in an amount which is efficient for improving the fiber properties. The enzymes of the invention may also be used in the production or recycling of lignocellulosic materials such as pulp, paper and cardboard, from starch reinforced waste paper and cardboard, especially where repulping or recycling occurs at pH above 7 and where the enzymes of the invention can facilitate the disintegration of the waste material through degradation of the reinforcing starch. The enzymes of the invention can be useful in a process for producing a papermaking pulp from starch-coated printed paper. The process may be performed as described in, e.g., WO 95/14807. An exemplary process comprises disintegrating the paper to produce a pulp, treating with a starch-degrading enzyme before, during or after the disintegrating, and separating ink particles from the pulp after disintegrating and enzyme treatment. See also U.S. Pat. No. 6,309,871 and other US patents cited herein. Thus, the invention includes a method for enzymatic deinking of recycled paper pulp, wherein the polypeptide is applied in an amount which is efficient for effective de-inking of the fiber surface.

[0862] Brewing and Fermenting

[0863] The invention provides compositions for and methods of brewing (e.g., fermenting) beer comprising an enzyme of the invention, e.g., enzymes as described in Tables 1, 2, and 3, including enzymes having cellulase, endoglucanase, cellobiohydrolase, mannanase and/or beta-glucosidase activity. In one exemplary process, starch-containing raw materials are disintegrated and processed to form a malt. An enzyme of the invention is used at any point in the fermentation process. For example, enzymes of the invention can be used in the processing of barley malt. The major raw material of beer brewing is barley malt. This can be a three stage process. First, the barley grain can be steeped to increase water content, e.g., to around about 40%. Second, the grain can be germinated by incubation at 15-25° C. for 3 to 6 days when enzyme synthesis is stimulated under the control of gibberellins. During this time enzyme levels rise significantly. In one aspect, enzymes of the invention are added at this (or any other) stage of the process. The action of the enzyme results in an increase in fermentable reducing sugars. This can be expressed as the diastatic power, DP, which can rise from around 80 to 190 in 5 days at 12° C.

[0864] Enzymes of the invention can be used in any beer producing process, as described, e.g., in U.S. Pat. Nos. 5,762,991; 5,536,650; 5,405,624; 5,021,246; 4,788,066.

[0865] Pharmaceutical Compositions and Dietary Supplements

[0866] The invention also provides pharmaceutical compositions and dietary supplements (e.g., dietary aids) comprising an enzyme of the invention (e.g., an exemplary enzyme of the invention, including those described in Tables 1, 2, and 3). In one aspect, the pharmaceutical compositions and dietary supplements (e.g., dietary aids) are formulated for oral ingestion, e.g., to improve the digestibility of foods and feeds having a high cellulose or lignocellulosic component. See also discussion, above.

[0867] Periodontal treatment compounds can comprise an enzyme of the invention, e.g., as described in U.S. Pat. No. 6,776,979. Compositions and methods for the treatment or prophylaxis of acidic gut syndrome can comprise an enzyme of the invention, e.g., as described in U.S. Pat. No. 6,468,964.

[0868] In another aspect, wound dressings, implants and the like comprise antimicrobial (e.g., antibiotic-acting) enzymes, including an enzyme of the invention (including, e.g., exemplary sequences of the invention). Enzymes of the invention can also be used in alginate dressings, antimicrobial barrier dressings, burn dressings, compression bandages, diagnostic tools, gel dressings, hydro-selective dressings, hydrocellular (foam) dressings, hydrocolloid dressings, I.V dressings, incise drapes, low adherent dressings, odor absorbing dressings, paste bandages, post operative dressings, scar management, skin care, transparent film dressings and/or wound closure. Enzymes of the invention can be used in wound cleansing, wound bed preparation, to treat pressure ulcers, leg ulcers, burns, diabetic foot ulcers, scars, IV fixation, surgical wounds and minor wounds. Enzymes of the invention can be used to in sterile enzymatic debriding compositions, e.g., ointments. In various aspects, the cellulase is formulated as a tablet, gel, pill, implant, liquid, spray, powder, food, feed pellet or as an encapsulated formulation.

[0869] The polypeptides of the invention, such as those having hydrolases activity (e.g., lipases, esterase, protease and/or phospholipases) of the invention can be used in detoxification processes, e.g., for the detoxification of endotoxins, e.g., compositions comprising lipopolysaccharides (LPS), and, the invention provides detoxification processes using at least one enzyme of the invention. In one aspect, a lipase and/or an esterase of the invention is used to detoxify a lipopolysaccharide (LPS). In one aspect, this detoxification is by deacylation of 2′ and/or 3′ fatty acid chains from lipid A. In one aspect, a hydrolase (e.g., a lipase and/or an esterase) of the invention is used to hydrolyze a 2′-lauroyl and/or a 3′-myristoyl chain from a lipid, e.g., a lipid A (e.g., from a bacterial endotoxin). In one aspect, the process of the invention is used to destroy an endotoxin, e.g., a toxin from a gram negative bacteria, as from E. coli. In one aspect, a hydrolase (e.g., a lipase and/or an esterase) of the invention is used to ameliorate the effects of toxin poisoning (e.g., from an on-going gram negative infection), or, to prophylactically to prevent the effects of endotoxin during an infection (e.g., an infection in an animal or a human). Accordingly, the invention provides a pharmaceutical composition comprising a hydrolase (e.g., a lipase and/or an esterase) of the invention, and method using a hydrolase of the invention, for the amelioration or prevention of lipopolysaccharide (LPS) toxic effects, e.g., during sepsis.

[0870] Biodefense Applications

[0871] In other aspects, an enzyme of the invention (e.g., an exemplary enzyme of the invention, including those described in Tables 1, 2, and 3) can be used in biodefense (e.g., destruction of spores or bacteria comprising a lignocellulosic material). Use of enzymes of the invention in biodefense applications offer a significant benefit, in that they can be very rapidly developed against any currently unknown or biological warfare agents of the future. In addition, enzymes of the invention can be used for decontamination of affected environments. In aspect, the invention provides a biodefense or bio-detoxifying agent comprising a polypeptide of the invention (including, e.g., exemplary sequences of the invention), or a polypeptide encoded by a nucleic acid of the invention (including, e.g., exemplary sequences of the invention).

[0872] Nutraceuticals

[0873] In one aspect, the compositions, e.g., an exemplary enzyme of the invention, including those described in Tables 1, 2, and 3, and methods of the invention can be used to make nutraceuticals by processing or synthesizing lipids and oils using the enzymes of the invention, e.g., esterases, acylases, lipases, phospholipases or proteases of the invention. In one aspect, the processed or synthesized lipids or oils include poly-unsaturated fatty acids (PUFAs), diacylglycerides, e.g., 1,3-diacyl glycerides (DAGs), monoacylglycerides, e.g., 2-monoacylglycerides (MAGs) and triacylglycerides (TAGs). In one aspect, the nutraceuticals is made by processing diacylglycerides, e.g., 1,3-diacyl glycerides (DAGs), monoacylglycerides, e.g., 2-monoacylglycerides (MAGs) and/or triacylglycerides (TAGs) from plant (e.g., oilseed) sources or from animal (e.g., fish oil) sources.

[0874] In one aspect, the compositions and methods of the invention can be used to fortify dietary compositions, especially cow's milk based products, e.g., cow's milk-based infant formulas, with bile salt-activated hydrolases. The compositions made by the methods and compositions of the invention can be used to feed newborn and premature infants, including administration of a bile salt-activated hydrolase of the invention to increase fat digestion and therefore growth rate. Similarly, the invention provides compositions and methods for treating subjects for inadequate pancreatic enzyme production by administration of bile salt-activated hydrolase in conjunction with ingestion of fats; see also discussion, below.

[0875] In one aspect, the invention provides a dietary composition comprising a hydrolase of the invention, e.g., bile salt-activated hydrolase of the invention. In one aspect, the invention provides a dietary composition comprising a nutritional base comprising a fat and an effective amount of bile salt-activated hydrolase of the invention. In one aspect, the invention provides a cow's milk-based infant formula comprising a hydrolase of the invention, e.g., bile salt-activated hydrolase of the invention. In one aspect, the hydrolase of the invention is active in the digestion of long chain fatty acids, e.g., C₁₂ to C₂₂, which make up a very high percentage of most milks, e.g., 99% of human breast milk. See, e.g., U.S. Pat. No. 5,000,975.

[0876] In one aspect, the invention provides a dietary composition comprising a vegetable oil fat and a hydrolase of the invention. The invention provides methods of processing milk based products and/or vegetable oil-comprising compositions to make dietary compositions. In one aspect, the processed compositions comprise a lauric acid oil, an oleic acid oil, a palmitic acid oil and/or a linoleic acid oil. In one aspect, a rice bran oil, sunflower oleic oil and/or canola oil may be used as oleic acids oils. In one aspect, fats and oils, e.g., oilseeds, from plants, including, e.g., rice, canola, sunflower, olive, palm, soy or lauric type oils for use in the nutraceuticals and dietary compositions are processed or made using a hydrolase of the invention. See, e.g., U.S. Pat. No. 4,944,944.

[0877] In one aspect, the enzymes of the invention are provided in a form that is stable to storage in the formula and/or the stomach, but active when the formulation reaches the portion of the gastrointestinal tract where the formula would normally be digested. Formulations (e.g., microcapsules) for release in the intestine are well known in the art, e.g., biodegradable polymers such as polylactide and polyglycolide, as described, e.g., in U.S. Pat. Nos. 4,767,628; 4,897,268; 4,925,673; 5,902,617.

[0878] The invention will be further described with reference to the following examples; however, it is to be understood that the invention is not limited to such examples.

### EXAMPLES

### Example 1

### Proteomic Analysis of Exemplary Polypeptides of the Invention

[0879] The following example demonstrates a protocol used for proteomic analysis of exemplary polypeptides of the invention. All of the exemplary nucleic acid sequences were initially isolated from termite gut samples (termite hind gut fluid samples).

[0880] This proteomic analysis of exemplary polypeptides of the invention found small peptides of whole open reading frames (ORFs); where the ORFs were identified by even SEQ ID NO: in the first column of the Table 4, below (listing exemplary amino acid sequences of the invention). The greater the number of peptides that were identified (see third column of the table), the better the confidence that a correct ORF was identified (by sequence). The 2nd column (spectral count) is abundance—the number of times the peptides were found.

[0881] SAMPLE DIGESTION: The termite hind gut fluid samples were centrifuged for 10 min (4° C.) at 13000 rpm using bench top microfuge to remove insoluble fraction of the fluid. 500 micro gram proteins from the soluble fraction was heat treated at 100° C. for 5 min in the presence of 0.5% RAPIGEST™ (Waters Corporation, Milford, Mass.). The samples where reduced with 1 mM DTT and alkylated with 0.4 mg/mL of iodoacetamide. After digestion with endoproteinase Lys-C ( 1/200 of protein), the protein samples were further digested twice with trypsin ( 1/100 of protein). The second batch of trypsin was added 4 h after the addition of the first batch. The RAPIGEST™ was removed from the solution by addition of HCl to final concentration of 0.05M. Samples where incubated at 37° C. for 60 minutes and centrifuged at 13000 rpm using bench top microfuge to remove insoluble fraction. The pH of the soluble fraction was adjusted using ammonium hydroxide to pH 2-3.

[0882] Online 3D LC-MS/MS. The digested termite protein samples were analyzed by the 3D LC-MS/MS system as described by Jing Wei et al (2005) J. Proteome Res. May-June;4(3):801-8. The LTQ mass spectrometer was set to divide the full MS scan into three smaller sections covering a total range of 400-2000 m/z. Each of the smaller MS scans was followed by 4 MS/MS scans of the most intense ions from the preceding MS scan. The typical collision energy for collision-induced dissociation was set to 35% with a 30-ms activation time. Dynamic exclusion was enabled with a repeat count of 1 and a 3-min exclusion duration window.

[0883] Data Analysis. The LC-MS/MS raw data were extracted using the XCALIBUR RAWFILE CONVERTER V1.0.0a™ (Advanced Chemistry Development, Inc., (ACD/Labs), Toronto, Ontario, Canada) and then searched against the termite meta genome predicted open reading frames using the SEQUEST™ program (The Scripps Research Institute, La Jolla, Calif.). The nonspecific cleavage rule was designated during the SEQUEST™ search. Differential modifications of Met oxidation (+16) and Cys alkylation (+57) were allowed for the database search. The results were filtered using the same criteria set as previously described-6,8 to obtain the peptide identifications. Briefly, all peptide identifications had a ÄCn>0.1; peptides with a +1 charge state were fully tryptic with XCorr>1.9; peptides with a +2 charge state were with XCorr>3.0 or fully or partially tryptic with XCorr ranging between 2.2 and 3.0; peptides with a +3 charge state were fully or partially tryptic with XCorr>3.5. The PORTFOLIO™ program was used for protein identification and summarizing the results. For each protein sequence in SGD, the program assembled the peptide identifications that matched its substring. The protein identification was established if one or more peptide identifications were matched. The peptide identifications were allowed for multiple protein identifications. The number of distinct peptides and sequence coverage per protein identification were also calculated. Proteins identified by a single peptide are considered at a reduced level of confidence. These protein identifications by single peptide were included in all results and their percentages in the total protein identifications were compared among all systems. The cumulative total of protein identifications was calculated as the sum of yeast sequences from SGD that were detected in at least one of the protein samples.

[0884] To aid in reading Table 5, below, for example, in the first row, the data confirms that the exemplary nucleic acid of the invention SEQ ID NO:10011 (encoding SEQ ID NO:10012) is expressed, and two unique peptides were confirmed by this analysis, and as noted above, spectral count denotes abundance, or the number of times the peptides were found.

TABLE 5

| | | number of unique |
|---|---|---|
| SEQ ID NO: | total spectral count | peptides |
| 10011, 10012 | 6 | 2 |
| 10017, 10018 | 1 | 1 |
| 10155, 10156 | 6 | 3 |
| 10233, 10234 | 2 | 1 |
| 10337, 10338 | 1 | 1 |
| 10419, 10420 | 1 | 1 |
| 10453, 10454 | 1 | 1 |
| 10467, 10468 | 4 | 2 |
| 10507, 10508 | 1 | 1 |
| 10569, 10570 | 1 | 1 |
| 1059, 1060 | 2 | 1 |
| 10595, 10596 | 1 | 1 |
| 10599, 10600 | 4 | 1 |
| 10653, 10654 | 1 | 1 |
| 1067, 1068 | 1 | 1 |
| 10679, 10680 | 90 | 6 |
| 10685, 10686 | 1 | 1 |
| 10697, 10698 | 1 | 1 |
| 1071, 1072 | 1 | 1 |
| 1073, 1074 | 24 | 5 |
| 10799, 10800 | 1 | 1 |
| 10815, 10816 | 1 | 1 |
| 10851, 10852 | 99 | 7 |
| 10867, 10868 | 4 | 2 |
| 10891, 10892 | 136 | 10 |
| 10895, 10896 | 1 | 1 |
| 10959, 10960 | 1 | 1 |
| 10965, 10966 | 1 | 1 |
| 10985, 10986 | 1 | 1 |
| 10993, 10994 | 1 | 1 |
| 10995, 10996 | 18 | 4 |
| 11055, 11056 | 4 | 1 |
| 11091, 11092 | 1 | 1 |
| 11199, 11200 | 15 | 2 |
| 11239, 11240 | 4 | 3 |
| 11307, 11308 | 89 | 7 |
| 11309, 11310 | 1 | 1 |
| 11335, 11336 | 3 | 1 |
| 11355, 11356 | 5 | 2 |
| 11377, 11378 | 2 | 1 |
| 11381, 11382 | 1 | 1 |
| 11425, 11426 | 1 | 1 |
| 11443, 11444 | 2 | 1 |
| 11449, 11450 | 1 | 1 |
| 11587, 11588 | 2 | 1 |
| 11595, 11596 | 17 | 3 |
| 11623, 11624 | 1 | 1 |
| 11661, 11662 | 4 | 1 |
| 11681, 11682 | 1 | 1 |
| 11687, 11688 | 1 | 1 |
| 11699, 11700 | 1 | 1 |
| 11703, 11704 | 1 | 1 |
| 1171, 1172 | 16 | 5 |
| 11779, 11780 | 1 | 1 |
| 11783, 11784 | 1 | 1 |
| 11795, 11796 | 1 | 1 |
| 1183, 1184 | 1 | 1 |
| 11861, 11862 | 1 | 1 |
| 11865, 11866 | 1 | 1 |
| 11883, 11884 | 1 | 1 |
| 11929, 11930 | 1 | 1 |
| 11941, 11942 | 16 | 1 |
| 1197, 1198 | 10 | 4 |
| 11995, 11996 | 17 | 5 |
| 11999, 12000 | 2 | 1 |
| 12051, 12052 | 1 | 1 |
| 12069, 12070 | 1 | 1 |
| 12091, 12092 | 15 | 2 |
| 12099, 12100 | 1 | 1 |
| 12123, 12124 | 1 | 1 |
| 12155, 12156 | 10 | 1 |
| 12173, 12174 | 3 | 2 |
| 12203, 12204 | 1 | 1 |
| 1225, 1226 | 1 | 1 |
| 1229, 1230 | 43 | 4 |
| 1233, 1234 | 2 | 1 |
| 12347, 12348 | 8 | 4 |
| 12373, 12374 | 1 | 1 |
| 12387, 12388 | 7 | 1 |
| 12405, 12406 | 4 | 2 |
| 12409, 12410 | 2 | 2 |
| 12419, 12420 | 3 | 3 |
| 12447, 12448 | 1 | 1 |
| 12449, 12450 | 1 | 1 |
| 12455, 12456 | 1 | 1 |
| 12471, 12472 | 2 | 1 |
| 12493, 12494 | 80 | 8 |
| 1253, 1254 | 3 | 2 |
| 12543, 12544 | 1 | 1 |
| 12591, 12592 | 6 | 3 |
| 12617, 12618 | 1 | 1 |
| 12621, 12622 | 41 | 10 |
| 12703, 12704 | 1 | 1 |
| 12749, 12750 | 57 | 4 |
| 12765, 12766 | 1 | 1 |
| 12883, 12884 | 18 | 4 |
| 12965, 12966 | 1 | 1 |
| 12971, 12972 | 7 | 1 |
| 1303, 1304 | 28 | 3 |
| 13075, 13076 | 22 | 4 |
| 13195, 13196 | 2 | 1 |
| 13241, 13242 | 1 | 1 |
| 13289, 13290 | 1 | 1 |
| 13299, 13300 | 1 | 1 |
| 13317, 13318 | 1 | 1 |
| 1337, 1338 | 1 | 1 |
| 13409, 13410 | 9 | 3 |
| 13441, 13442 | 2 | 1 |
| 13451, 13452 | 1 | 1 |
| 13481, 13482 | 1 | 1 |
| 1349, 1350 | 2 | 1 |
| 13529, 13530 | 10 | 3 |
| 13597, 13598 | 1 | 1 |
| 13605, 13606 | 2 | 2 |
| 1363, 1364 | 17 | 4 |
| 1365, 1366 | 55 | 2 |
| 13667, 13668 | 3 | 1 |
| 13675, 13676 | 1 | 1 |
| 13711, 13712 | 8 | 2 |
| 13747, 13748 | 1 | 1 |
| 13757, 13758 | 1 | 1 |
| 13795, 13796 | 146 | 7 |
| 13803, 13804 | 3 | 2 |
| 1381, 1382 | 1 | 1 |
| 13813, 13814 | 4 | 1 |
| 13835, 13836 | 2 | 1 |
| 13847, 13848 | 1 | 1 |
| 1387, 1388 | 2 | 1 |
| 13875, 13876 | 1 | 1 |
| 13915, 13916 | 1 | 1 |
| 14003, 14004 | 1 | 1 |
| 14011, 14012 | 1 | 1 |
| 14015, 14016 | 68 | 5 |
| 14057, 14058 | 2 | 1 |
| 14073, 14074 | 1 | 1 |
| 14079, 14080 | 2 | 2 |
| 14237, 14238 | 5 | 1 |
| 14261, 14262 | 4 | 1 |
| 14357, 14358 | 17 | 2 |
| 14411, 14412 | 4 | 1 |
| 14415, 14416 | 1 | 1 |
| 14423, 14424 | 3 | 1 |
| 14509, 14510 | 9 | 1 |
| 14513, 14514 | 1 | 1 |
| 14519, 14520 | 1 | 1 |
| 14597, 14598 | 12 | 4 |
| 14603, 14604 | 94 | 5 |
| 14605, 14606 | 1 | 1 |
| 14641, 14642 | 1 | 1 |
| 14653, 14654 | 2 | 1 |
| 14693, 14694 | 1 | 1 |
| 14785, 14786 | 138 | 9 |
| 14807, 14808 | 1 | 1 |
| 14927, 14928 | 1 | 1 |
| 14999, 15000 | 1 | 1 |
| 15037, 15038 | 5 | 1 |
| 15081, 15082 | 2 | 1 |
| 15143, 15144 | 3 | 2 |
| 15167, 15168 | 1 | 1 |
| 1521, 1522 | 3 | 1 |
| 15221, 15222 | 4 | 1 |
| 15249, 15250 | 6 | 1 |
| 15309, 15310 | 1 | 1 |
| 15313, 15314 | 1 | 1 |
| 15347, 15348 | 1 | 1 |
| 15349, 15350 | 2 | 1 |
| 15353, 15354 | 1 | 1 |
| 1537, 1538 | 1 | 1 |
| 15463, 15464 | 1 | 1 |
| 15493, 15494 | 5 | 2 |
| 15497, 15498 | 1 | 1 |
| 15505, 15506 | 20 | 3 |
| 15515, 15516 | 1 | 1 |
| 15541, 15542 | 2 | 1 |
| 15543, 15544 | 1 | 1 |
| 15627, 15628 | 6 | 2 |
| 15643, 15644 | 1 | 1 |
| 15649, 15650 | 1 | 1 |
| 15687, 15688 | 1 | 1 |
| 15721, 15722 | 1 | 1 |
| 15869, 15870 | 1 | 1 |
| 159, 160 | 1 | 1 |
| 1593, 1594 | 1 | 1 |
| 15945, 15946 | 1 | 1 |
| 16019, 16020 | 1 | 1 |
| 16069, 16070 | 1 | 1 |
| 16091, 16092 | 1 | 1 |
| 16111, 16112 | 14 | 1 |
| 16183, 16184 | 4 | 1 |
| 16219, 16220 | 1 | 1 |
| 16239, 16240 | 15 | 1 |
| 16287, 16288 | 4 | 1 |
| 16323, 16324 | 1 | 1 |
| 16325, 16326 | 1 | 1 |
| 16343, 16344 | 2 | 1 |
| 1637, 1638 | 1 | 1 |
| 16413, 16414 | 1 | 1 |
| 16427, 16428 | 1 | 1 |
| 16441, 16442 | 19 | 4 |
| 16447, 16448 | 4 | 2 |
| 16465, 16466 | 1 | 1 |
| 16467, 16468 | 18 | 2 |
| 16483, 16484 | 1 | 1 |
| 16495, 16496 | 1 | 1 |
| 1651, 1652 | 39 | 1 |
| 16529, 16530 | 10 | 1 |
| 16539, 16540 | 2 | 1 |
| 16567, 16568 | 6 | 1 |
| 16579, 16580 | 1 | 1 |
| 16645, 16646 | 7 | 1 |
| 1669, 1670 | 1 | 1 |
| 16753, 16754 | 65 | 8 |
| 16839, 16840 | 1 | 1 |
| 1689, 1690 | 2 | 2 |
| 16917, 16918 | 9 | 5 |
| 1701, 1702 | 2 | 2 |
| 17179, 17180 | 3 | 2 |
| 17205, 17206 | 1 | 1 |
| 17225, 17226 | 2 | 1 |
| 17349, 17350 | 3 | 1 |
| 17355, 17356 | 1 | 1 |
| 17363, 17364 | 3 | 1 |
| 17377, 17378 | 1 | 1 |
| 17393, 17394 | 4 | 2 |
| 17437, 17438 | 1 | 1 |
| 17449, 17450 | 1 | 1 |
| 1747, 1748 | 7 | 3 |
| 17541, 17542 | 91 | 3 |
| 17559, 17560 | 1 | 1 |
| 17625, 17626 | 1 | 1 |
| 17639, 17640 | 1 | 1 |
| 17653, 17654 | 1 | 1 |
| 17655, 17656 | 18 | 1 |
| 17683, 17684 | 1 | 1 |
| 177, 178 | 1 | 1 |
| 17723, 17724 | 1 | 1 |
| 17733, 17734 | 5 | 3 |
| 17803, 17804 | 66 | 7 |
| 17861, 17862 | 23 | 4 |
| 17871, 17872 | 20 | 3 |
| 17873, 17874 | 1 | 1 |
| 17887, 17888 | 2 | 2 |
| 17895, 17896 | 1 | 1 |
| 17941, 17942 | 1 | 1 |
| 1797, 1798 | 2 | 1 |
| 18031, 18032 | 1 | 1 |
| 18035, 18036 | 2 | 1 |
| 1809, 1810 | 5 | 1 |
| 18181, 18182 | 2 | 1 |
| 18183, 18184 | 4 | 3 |
| 18197, 18198 | 5 | 3 |
| 18255, 18256 | 1 | 1 |
| 18287, 18288 | 1 | 1 |
| 18295, 18296 | 1 | 1 |
| 18331, 18332 | 23 | 2 |
| 18395, 18396 | 2 | 1 |
| 18435, 18436 | 1 | 1 |
| 18447, 18448 | 2 | 1 |
| 18611, 18612 | 4 | 1 |
| 18631, 18632 | 21 | 4 |
| 18645, 18646 | 1 | 1 |
| 18647, 18648 | 1 | 1 |
| 18661, 18662 | 17 | 3 |
| 18689, 18690 | 6 | 2 |
| 18749, 18750 | 5 | 1 |
| 18751, 18752 | 1 | 1 |
| 18785, 18786 | 5 | 2 |
| 18809, 18810 | 2 | 1 |
| 18883, 18884 | 6 | 4 |
| 19007, 19008 | 1 | 1 |
| 19013, 19014 | 1 | 1 |
| 1907, 1908 | 14 | 4 |
| 19093, 19094 | 2 | 1 |
| 19113, 19114 | 1 | 1 |
| 19121, 19122 | 1 | 1 |
| 19147, 19148 | 1 | 1 |
| 19159, 19160 | 4 | 1 |
| 19183, 19184 | 3 | 2 |
| 19185, 19186 | 1 | 1 |
| 1919, 1920 | 1 | 1 |
| 19193, 19194 | 2 | 2 |
| 19265, 19266 | 13 | 2 |
| 19311, 19312 | 4 | 1 |
| 19331, 19332 | 1 | 1 |
| 19357, 19358 | 4 | 2 |
| 19361, 19362 | 1 | 1 |
| 19369, 19370 | 1 | 1 |
| 1939, 1940 | 1 | 1 |
| 19415, 19416 | 1 | 1 |
| 19509, 19510 | 1 | 1 |
| 19607, 19608 | 1 | 1 |
| 19609, 19610 | 1 | 1 |
| 19625, 19626 | 1 | 1 |
| 19745, 19746 | 39 | 7 |
| 19781, 19782 | 4 | 2 |
| 1981, 1982 | 1 | 1 |
| 1983, 1984 | 8 | 1 |
| 19899, 19900 | 1 | 1 |
| 19925, 19926 | 1 | 1 |
| 19967, 19968 | 8 | 2 |
| 20009, 20010 | 2 | 1 |
| 20011, 20012 | 1 | 1 |
| 20037, 20038 | 4 | 1 |
| 20051, 20052 | 3 | 1 |
| 20065, 20066 | 1 | 1 |
| 20085, 20086 | 1 | 1 |
| 20087, 20088 | 2 | 1 |
| 20159, 20160 | 1 | 1 |
| 20215, 20216 | 3 | 2 |
| 2027, 2028 | 1 | 1 |
| 20287, 20288 | 1 | 1 |
| 20289, 20290 | 2 | 2 |
| 20295, 20296 | 4 | 1 |
| 203, 204 | 5 | 2 |
| 20313, 20314 | 1 | 1 |
| 20319, 20320 | 26 | 7 |
| 20367, 20368 | 41 | 5 |
| 20417, 20418 | 1 | 1 |
| 2045, 2046 | 61 | 3 |
| 20479, 20480 | 54 | 5 |
| 20527, 20528 | 1 | 1 |
| 20531, 20532 | 15 | 5 |
| 2057, 2058 | 1 | 1 |
| 20581, 20582 | 1 | 1 |
| 20611, 20612 | 9 | 3 |
| 20651, 20652 | 39 | 4 |
| 20749, 20750 | 1 | 1 |
| 2077, 2078 | 3 | 1 |
| 20885, 20886 | 11 | 1 |
| 20887, 20888 | 1 | 1 |
| 20925, 20926 | 1 | 1 |
| 20963, 20964 | 1 | 1 |
| 20973, 20974 | 126 | 4 |
| 21131, 21132 | 1 | 1 |
| 2115, 2116 | 9 | 3 |
| 2117, 2118 | 2 | 1 |
| 21183, 21184 | 7 | 3 |
| 21191, 21192 | 2 | 2 |
| 21241, 21242 | 1 | 1 |
| 21245, 21246 | 3 | 1 |
| 2137, 2138 | 1 | 1 |
| 21443, 21444 | 1 | 1 |
| 21483, 21484 | 2 | 1 |
| 21531, 21532 | 3 | 3 |
| 21549, 21550 | 1 | 1 |
| 21747, 21748 | 1 | 1 |
| 21779, 21780 | 1 | 1 |
| 21801, 21802 | 1 | 1 |
| 21847, 21848 | 1 | 1 |
| 21861, 21862 | 1 | 1 |
| 21873, 21874 | 2 | 1 |
| 21955, 21956 | 1 | 1 |
| 21971, 21972 | 2 | 1 |
| 22007, 22008 | 1 | 1 |
| 2201, 2202 | 1 | 1 |
| 221, 222 | 5 | 1 |
| 22121, 22122 | 1 | 1 |
| 22165, 22166 | 6 | 2 |
| 22203, 22204 | 1 | 1 |
| 22209, 22210 | 23 | 3 |
| 22217, 22218 | 1 | 1 |
| 22223, 22224 | 1 | 1 |
| 22237, 22238 | 9 | 2 |
| 22261, 22262 | 1 | 1 |
| 22267, 22268 | 1 | 1 |
| 2231, 2232 | 28 | 2 |
| 22363, 22364 | 1 | 1 |
| 22365, 22366 | 1 | 1 |
| 22379, 22380 | 1 | 1 |
| 22401, 22402 | 1 | 1 |
| 22403, 22404 | 2 | 1 |
| 22451, 22452 | 35 | 3 |
| 22477, 22478 | 1 | 1 |
| 22493, 22494 | 2 | 1 |
| 2253, 2254 | 2 | 1 |
| 22557, 22558 | 11 | 2 |
| 22559, 22560 | 8 | 5 |
| 22605, 22606 | 1 | 1 |
| 2283, 2284 | 1 | 1 |
| 22857, 22858 | 2 | 1 |
| 23141, 23142 | 37 | 4 |
| 23183, 23184 | 1 | 1 |
| 23235, 23236 | 1 | 1 |
| 23267, 23268 | 1 | 1 |
| 23269, 23270 | 1 | 1 |
| 233, 234 | 1 | 1 |
| 2335, 2336 | 1 | 1 |
| 2337, 2338 | 59 | 5 |
| 23381, 23382 | 1 | 1 |
| 2341, 2342 | 1 | 1 |
| 23421, 23422 | 5 | 1 |
| 23441, 23442 | 2 | 2 |
| 2347, 2348 | 1 | 1 |
| 23471, 23472 | 26 | 4 |
| 23477, 23478 | 1 | 1 |
| 235, 236 | 1 | 1 |
| 23507, 23508 | 1 | 1 |
| 23621, 23622 | 2 | 1 |
| 23651, 23652 | 104 | 9 |
| 23653, 23654 | 76 | 8 |
| 2369, 2370 | 2 | 1 |
| 23705, 23706 | 1 | 1 |
| 23709, 23710 | 2 | 1 |
| 2373, 2374 | 1 | 1 |
| 23795, 23796 | 12 | 5 |
| 23809, 23810 | 2 | 1 |
| 23845, 23846 | 1 | 1 |
| 23847, 23848 | 1 | 1 |
| 23905, 23906 | 11 | 2 |
| 23925, 23926 | 1 | 1 |
| 23931, 23932 | 2 | 1 |
| 23961, 23962 | 12 | 6 |
| 23987, 23988 | 1 | 1 |
| 24025, 24026 | 1 | 1 |
| 24033, 24034 | 2 | 1 |
| 24041, 24042 | 10 | 3 |
| 24055, 24056 | 53 | 8 |
| 24101, 24102 | 1 | 1 |
| 24113, 24114 | 1 | 1 |
| 2415, 2416 | 1 | 1 |
| 24191, 24192 | 1 | 1 |
| 2425, 2426 | 1 | 1 |
| 24283, 24284 | 5 | 1 |
| 2433, 2434 | 2 | 2 |
| 24341, 24342 | 5 | 1 |
| 24377, 24378 | 19 | 6 |
| 24389, 24390 | 7 | 1 |
| 2439, 2440 | 15 | 5 |
| 2445, 2446 | 11 | 2 |
| 24493, 24494 | 69 | 5 |
| 24549, 24550 | 1 | 1 |
| 24579, 24580 | 1 | 1 |
| 24597, 24598 | 1 | 1 |
| 24621, 24622 | 1 | 1 |
| 24719, 24720 | 1 | 1 |
| 24767, 24768 | 2 | 1 |
| 24807, 24808 | 5 | 3 |
| 24853, 24854 | 1 | 1 |
| 24891, 24892 | 1 | 1 |
| 24899, 24900 | 1 | 1 |
| 24937, 24938 | 1 | 1 |
| 24989, 24990 | 7 | 1 |
| 25005, 25006 | 1 | 1 |
| 25063, 25064 | 1 | 1 |
| 25089, 25090 | 1 | 1 |
| 25113, 25114 | 1 | 1 |
| 25177, 25178 | 1 | 1 |
| 25183, 25184 | 2 | 1 |
| 25243, 25244 | 35 | 2 |
| 25245, 25246 | 1 | 1 |
| 25251, 25252 | 2 | 1 |
| 25279, 25280 | 1 | 1 |
| 2529, 2530 | 1 | 1 |
| 25293, 25294 | 4 | 1 |
| 25323, 25324 | 29 | 2 |
| 25369, 25370 | 102 | 6 |
| 25373, 25374 | 1 | 1 |
| 2545, 2546 | 1 | 1 |
| 25451, 25452 | 7 | 5 |
| 25471, 25472 | 1 | 1 |
| 25479, 25480 | 1 | 1 |
| 25511, 25512 | 2 | 1 |
| 25513, 25514 | 1 | 1 |
| 2555, 2556 | 3 | 1 |
| 25633, 25634 | 14 | 2 |
| 25717, 25718 | 1 | 1 |
| 25763, 25764 | 1 | 1 |
| 25781, 25782 | 6 | 3 |
| 25799, 25800 | 2 | 2 |
| 25875, 25876 | 2 | 1 |
| 25919, 25920 | 1 | 1 |
| 25937, 25938 | 9 | 1 |
| 25947, 25948 | 5 | 1 |
| 26111, 26112 | 5 | 1 |
| 26133, 26134 | 1 | 1 |
| 26195, 26196 | 1 | 1 |
| 26213, 26214 | 69 | 9 |
| 26263, 26264 | 14 | 2 |
| 26265, 26266 | 1 | 1 |
| 26273, 26274 | 5 | 1 |
| 26317, 26318 | 1 | 1 |
| 26375, 26376 | 1 | 1 |
| 26391, 26392 | 2 | 1 |
| 26421, 26422 | 2 | 2 |
| 2645, 2646 | 14 | 6 |
| 26465, 26466 | 1 | 1 |
| 26491, 26492 | 4 | 2 |
| 26545, 26546 | 1 | 1 |
| 26581, 26582 | 1 | 1 |
| 26587, 26588 | 1 | 1 |
| 2659, 2660 | 1 | 1 |
| 26619, 26620 | 1 | 1 |
| 26671, 26672 | 1 | 1 |
| 267, 268 | 1 | 1 |
| 26705, 26706 | 1 | 1 |
| 26717, 26718 | 68 | 10 |
| 26741, 26742 | 1 | 1 |
| 26743, 26744 | 55 | 3 |
| 26745, 26746 | 63 | 1 |
| 26749, 26750 | 1 | 1 |
| 26775, 26776 | 44 | 8 |
| 2679, 2680 | 1 | 1 |
| 26791, 26792 | 1 | 1 |
| 26841, 26842 | 2 | 2 |
| 26907, 26908 | 1 | 1 |
| 26927, 26928 | 1 | 1 |
| 26945, 26946 | 1 | 1 |
| 26971, 26972 | 51 | 7 |
| 26973, 26974 | 25 | 3 |
| 2703, 2704 | 8 | 1 |
| 27067, 27068 | 2 | 1 |
| 271, 272 | 5 | 2 |
| 27103, 27104 | 7 | 2 |
| 27153, 27154 | 1 | 1 |
| 27157, 27158 | 20 | 1 |
| 27159, 27160 | 2 | 1 |
| 27187, 27188 | 1 | 1 |
| 27229, 27230 | 1 | 1 |
| 27263, 27264 | 2 | 1 |
| 27267, 27268 | 1 | 1 |
| 27283, 27284 | 1 | 1 |
| 27383, 27384 | 1 | 1 |
| 2741, 2742 | 115 | 8 |
| 27415, 27416 | 1 | 1 |
| 27433, 27434 | 1 | 1 |
| 27461, 27462 | 2 | 2 |
| 27493, 27494 | 1 | 1 |
| 27511, 27512 | 1 | 1 |
| 27521, 27522 | 1 | 1 |
| 27631, 27632 | 1 | 1 |
| 27653, 27654 | 1 | 1 |
| 27685, 27686 | 1 | 1 |
| 27707, 27708 | 1 | 1 |
| 27793, 27794 | 1 | 1 |
| 27805, 27806 | 2 | 1 |
| 27851, 27852 | 2 | 1 |
| 27873, 27874 | 12 | 4 |
| 27923, 27924 | 5 | 1 |
| 2793, 2794 | 1 | 1 |
| 27947, 27948 | 1 | 1 |
| 27975, 27976 | 1 | 1 |
| 27981, 27982 | 2 | 1 |
| 2799, 2800 | 1 | 1 |
| 28011, 28012 | 1 | 1 |
| 28045, 28046 | 2 | 1 |
| 2809, 2810 | 1 | 1 |
| 28141, 28142 | 1 | 1 |
| 2819, 2820 | 39 | 8 |
| 2821, 2822 | 1 | 1 |
| 28243, 28244 | 2 | 1 |
| 28269, 28270 | 18 | 5 |
| 28307, 28308 | 1 | 1 |
| 28369, 28370 | 1 | 1 |
| 28403, 28404 | 1 | 1 |
| 285, 286 | 20 | 5 |
| 28553, 28554 | 3 | 1 |
| 28715, 28716 | 1 | 1 |
| 28749, 28750 | 5 | 2 |
| 28751, 28752 | 2 | 1 |
| 28793, 28794 | 2 | 1 |
| 28835, 28836 | 2 | 1 |
| 2891, 2892 | 1 | 1 |
| 28917, 28918 | 55 | 5 |
| 28929, 28930 | 1 | 1 |
| 28949, 28950 | 4 | 2 |
| 28957, 28958 | 6 | 1 |
| 29061, 29062 | 4 | 1 |
| 29081, 29082 | 1 | 1 |
| 29091, 29092 | 4 | 2 |
| 29093, 29094 | 5 | 2 |
| 29127, 29128 | 10 | 3 |
| 29167, 29168 | 2 | 1 |
| 29169, 29170 | 2 | 1 |
| 29185, 29186 | 3 | 1 |
| 29247, 29248 | 2 | 1 |
| 29257, 29258 | 15 | 5 |
| 29259, 29260 | 1 | 1 |
| 29275, 29276 | 1 | 1 |
| 29321, 29322 | 2 | 1 |
| 29363, 29364 | 1 | 1 |
| 29383, 29384 | 1 | 1 |
| 29387, 29388 | 2 | 1 |
| 29419, 29420 | 1 | 1 |
| 29583, 29584 | 1 | 1 |
| 2961, 2962 | 1 | 1 |
| 29629, 29630 | 1 | 1 |
| 29771, 29772 | 2 | 2 |
| 29779, 29780 | 5 | 1 |
| 29789, 29790 | 1 | 1 |
| 29815, 29816 | 1 | 1 |
| 29821, 29822 | 2 | 1 |
| 29961, 29962 | 1 | 1 |
| 29975, 29976 | 8 | 2 |
| 29985, 29986 | 1 | 1 |
| 30067, 30068 | 1 | 1 |
| 30109, 30110 | 1 | 1 |
| 30155, 30156 | 11 | 1 |
| 3023, 3024 | 2 | 2 |
| 30239, 30240 | 1 | 1 |
| 30275, 30276 | 1 | 1 |
| 3031, 3032 | 3 | 2 |
| 30339, 30340 | 2 | 1 |
| 3045, 3046 | 1 | 1 |
| 30563, 30564 | 41 | 2 |
| 30653, 30654 | 1 | 1 |
| 30765, 30766 | 1 | 1 |
| 30787, 30788 | 2 | 1 |
| 30811, 30812 | 6 | 2 |
| 30817, 30818 | 1 | 1 |
| 30841, 30842 | 1 | 1 |
| 30843, 30844 | 1 | 1 |
| 30853, 30854 | 47 | 6 |
| 30911, 30912 | 1 | 1 |
| 30945, 30946 | 1 | 1 |
| 30993, 30994 | 1 | 1 |
| 31007, 31008 | 1 | 1 |
| 31043, 31044 | 2 | 1 |
| 31047, 31048 | 2 | 1 |
| 3113, 3114 | 9 | 3 |
| 31133, 31134 | 1 | 1 |
| 31151, 31152 | 1 | 1 |
| 31175, 31176 | 1 | 1 |
| 31177, 31178 | 1 | 1 |
| 31211, 31212 | 13 | 1 |
| 31303, 31304 | 6 | 3 |
| 31395, 31396 | 1 | 1 |
| 31431, 31432 | 1 | 1 |
| 31473, 31474 | 1 | 1 |
| 31557, 31558 | 4 | 1 |
| 31605, 31606 | 1 | 1 |
| 31609, 31610 | 1 | 1 |
| 31633, 31634 | 1 | 1 |
| 31725, 31726 | 4 | 2 |
| 31789, 31790 | 10 | 3 |
| 31859, 31860 | 8 | 1 |
| 31875, 31876 | 10 | 1 |
| 31883, 31884 | 1 | 1 |
| 31893, 31894 | 21 | 7 |
| 31897, 31898 | 1 | 1 |
| 32159, 32160 | 2 | 1 |
| 32205, 32206 | 1 | 1 |
| 32261, 32262 | 1 | 1 |
| 32307, 32308 | 2 | 1 |
| 32309, 32310 | 3 | 1 |
| 32333, 32334 | 1 | 1 |
| 32353, 32354 | 1 | 1 |
| 32369, 32370 | 16 | 4 |
| 32371, 32372 | 4 | 1 |
| 32461, 32462 | 75 | 4 |
| 3247, 3248 | 1 | 1 |
| 32483, 32484 | 1 | 1 |
| 32571, 32572 | 1 | 1 |
| 32573, 32574 | 1 | 1 |
| 32605, 32606 | 1 | 1 |
| 3261, 3262 | 1 | 1 |
| 32675, 32676 | 1 | 1 |
| 3277, 3278 | 1 | 1 |
| 3279, 3280 | 2 | 1 |
| 3281, 3282 | 1 | 1 |
| 32813, 32814 | 1 | 1 |
| 32839, 32840 | 71 | 9 |
| 32863, 32864 | 1 | 1 |
| 3287, 3288 | 1 | 1 |
| 32883, 32884 | 9 | 4 |
| 32899, 32900 | 1 | 1 |
| 3297, 3298 | 1 | 1 |
| 33019, 33020 | 1 | 1 |
| 33051, 33052 | 1 | 1 |
| 33085, 33086 | 7 | 2 |
| 33103, 33104 | 8 | 1 |
| 33143, 33144 | 4 | 1 |
| 33245, 33246 | 30 | 4 |
| 3325, 3326 | 7 | 2 |
| 33257, 33258 | 1 | 1 |
| 33303, 33304 | 1 | 1 |
| 33333, 33334 | 2 | 1 |
| 3339, 3340 | 1 | 1 |
| 33409, 33410 | 1 | 1 |
| 33421, 33422 | 6 | 3 |
| 33497, 33498 | 1 | 1 |
| 33515, 33516 | 4 | 1 |
| 33521, 33522 | 2 | 1 |
| 33529, 33530 | 21 | 5 |
| 33557, 33558 | 1 | 1 |
| 33571, 33572 | 1 | 1 |
| 33615, 33616 | 2 | 1 |
| 33677, 33678 | 1 | 1 |
| 33679, 33680 | 1 | 1 |
| 33707, 33708 | 1 | 1 |
| 33741, 33742 | 40 | 7 |
| 33743, 33744 | 20 | 2 |
| 33755, 33756 | 14 | 1 |
| 33757, 33758 | 1 | 1 |
| 33809, 33810 | 2 | 1 |
| 33853, 33854 | 1 | 1 |
| 33871, 33872 | 2 | 1 |
| 33879, 33880 | 3 | 2 |
| 33903, 33904 | 4 | 3 |
| 33925, 33926 | 9 | 1 |
| 33979, 33980 | 1 | 1 |
| 33993, 33994 | 1 | 1 |
| 33997, 33998 | 10 | 3 |
| 3405, 3406 | 1 | 1 |
| 34083, 34084 | 192 | 6 |
| 34105, 34106 | 1 | 1 |
| 34115, 34116 | 1 | 1 |
| 34163, 34164 | 1 | 1 |
| 34197, 34198 | 1 | 1 |
| 34233, 34234 | 114 | 7 |
| 34237, 34238 | 1 | 1 |
| 34239, 34240 | 1 | 1 |
| 34305, 34306 | 1 | 1 |
| 34309, 34310 | 1 | 1 |
| 3437, 3438 | 53 | 7 |
| 34381, 34382 | 2 | 1 |
| 3439, 3440 | 13 | 3 |
| 3441, 3442 | 1 | 1 |
| 3445, 3446 | 82 | 6 |
| 34573, 34574 | 1 | 1 |
| 34581, 34582 | 1 | 1 |
| 34603, 34604 | 1 | 1 |
| 3461, 3462 | 1 | 1 |
| 3469, 3470 | 1 | 1 |
| 34775, 34776 | 4 | 1 |
| 34777, 34778 | 1 | 1 |
| 3479, 3480 | 1 | 1 |
| 34799, 34800 | 3 | 2 |
| 34833, 34834 | 2 | 1 |
| 34883, 34884 | 2 | 2 |
| 3491, 3492 | 15 | 1 |
| 34921, 34922 | 25 | 3 |
| 34947, 34948 | 1 | 1 |
| 34967, 34968 | 1 | 1 |
| 3497, 3498 | 1 | 1 |
| 34975, 34976 | 1 | 1 |
| 35009, 35010 | 1 | 1 |
| 35011, 35012 | 1 | 1 |
| 35025, 35026 | 1 | 1 |
| 35041, 35042 | 1 | 1 |
| 35123, 35124 | 1 | 1 |
| 35139, 35140 | 1 | 1 |
| 35161, 35162 | 1 | 1 |
| 35183, 35184 | 1 | 1 |
| 35291, 35292 | 1 | 1 |
| 35303, 35304 | 1 | 1 |
| 35321, 35322 | 1 | 1 |
| 35323, 35324 | 1 | 1 |
| 35465, 35466 | 1 | 1 |
| 35477, 35478 | 1 | 1 |
| 35487, 35488 | 1 | 1 |
| 35501, 35502 | 1 | 1 |
| 35503, 35504 | 4 | 2 |
| 3555, 3556 | 1 | 1 |
| 35621, 35622 | 1 | 1 |
| 35629, 35630 | 1 | 1 |
| 35651, 35652 | 4 | 1 |
| 3567, 3568 | 26 | 1 |
| 35735, 35736 | 3 | 3 |
| 35755, 35756 | 1 | 1 |
| 35817, 35818 | 1 | 1 |
| 35905, 35906 | 2 | 2 |
| 35929, 35930 | 1 | 1 |
| 36037, 36038 | 138 | 8 |
| 36079, 36080 | 1 | 1 |
| 36155, 36156 | 1 | 1 |
| 36269, 36270 | 1 | 1 |
| 36295, 36296 | 3 | 1 |
| 36323, 36324 | 16 | 1 |
| 3633, 3634 | 2 | 2 |
| 36343, 36344 | 2 | 2 |
| 36435, 36436 | 3 | 1 |
| 36489, 36490 | 1 | 1 |
| 36497, 36498 | 1 | 1 |
| 36531, 36532 | 1 | 1 |
| 36545, 36546 | 3 | 1 |
| 36689, 36690 | 2 | 1 |
| 36789, 36790 | 1 | 1 |
| 36795, 36796 | 1 | 1 |
| 37049, 37050 | 1 | 1 |
| 37083, 37084 | 4 | 1 |
| 37089, 37090 | 1 | 1 |
| 37091, 37092 | 2 | 1 |
| 37095, 37096 | 1 | 1 |
| 37103, 37104 | 1 | 1 |
| 37195, 37196 | 1 | 1 |
| 37251, 37252 | 1 | 1 |
| 37367, 37368 | 1 | 1 |
| 37401, 37402 | 1 | 1 |
| 37427, 37428 | 1 | 1 |
| 37449, 37450 | 1 | 1 |
| 37489, 37490 | 2 | 1 |
| 37499, 37500 | 1 | 1 |
| 37515, 37516 | 1 | 1 |
| 37605, 37606 | 1 | 1 |
| 37627, 37628 | 1 | 1 |
| 37651, 37652 | 1 | 1 |
| 3769, 3770 | 2 | 2 |
| 3777, 3778 | 661 | 14 |
| 3781, 3782 | 1 | 1 |
| 37819, 37820 | 1 | 1 |
| 3783, 3784 | 3 | 1 |
| 37851, 37852 | 2 | 1 |
| 37939, 37940 | 1 | 1 |
| 38035, 38036 | 1 | 1 |
| 38055, 38056 | 3 | 3 |
| 38061, 38062 | 222 | 10 |
| 38063, 38064 | 1 | 1 |
| 38103, 38104 | 1 | 1 |
| 38109, 38110 | 1 | 1 |
| 3813, 3814 | 1 | 1 |
| 38191, 38192 | 1 | 1 |
| 38211, 38212 | 2 | 1 |
| 38337, 38338 | 1 | 1 |
| 38357, 38358 | 1 | 1 |
| 38371, 38372 | 2 | 1 |
| 38411, 38412 | 1 | 1 |
| 38457, 38458 | 1 | 1 |
| 38461, 38462 | 2 | 1 |
| 38483, 38484 | 1 | 1 |
| 38531, 38532 | 1 | 1 |
| 38543, 38544 | 4 | 2 |
| 38559, 38560 | 1 | 1 |
| 38581, 38582 | 4 | 1 |
| 38619, 38620 | 1 | 1 |
| 38621, 38622 | 2 | 1 |
| 38637, 38638 | 51 | 5 |
| 38643, 38644 | 54 | 3 |
| 387, 388 | 5 | 2 |
| 38747, 38748 | 1 | 1 |
| 38767, 38768 | 1 | 1 |
| 38773, 38774 | 1 | 1 |
| 38777, 38778 | 1 | 1 |
| 38853, 38854 | 18 | 2 |
| 38863, 38864 | 1 | 1 |
| 38925, 38926 | 2 | 1 |
| 38929, 38930 | 1 | 1 |
| 39043, 39044 | 1 | 1 |
| 39055, 39056 | 1 | 1 |
| 39151, 39152 | 1 | 1 |
| 39159, 39160 | 14 | 2 |
| 3917, 3918 | 4 | 1 |
| 39173, 39174 | 1 | 1 |
| 39189, 39190 | 9 | 1 |
| 39199, 39200 | 3 | 1 |
| 39273, 39274 | 1 | 1 |
| 39311, 39312 | 1 | 1 |
| 39391, 39392 | 1 | 1 |
| 39397, 39398 | 1 | 1 |
| 39495, 39496 | 1 | 1 |
| 39511, 39512 | 1 | 1 |
| 39581, 39582 | 1 | 1 |
| 39599, 39600 | 1 | 1 |
| 39601, 39602 | 1 | 1 |
| 39655, 39656 | 1 | 1 |
| 39669, 39670 | 1 | 1 |
| 39729, 39730 | 29 | 7 |
| 3977, 3978 | 1 | 1 |
| 39793, 39794 | 4 | 1 |
| 39911, 39912 | 15 | 1 |
| 40025, 40026 | 1 | 1 |
| 4013, 4014 | 275 | 8 |
| 4023, 4024 | 1 | 1 |
| 4025, 4026 | 10 | 2 |
| 40253, 40254 | 1 | 1 |
| 40319, 40320 | 40 | 2 |
| 40487, 40488 | 10 | 3 |
| 40513, 40514 | 30 | 1 |
| 40515, 40516 | 14 | 2 |
| 40521, 40522 | 1 | 1 |
| 40615, 40616 | 1 | 1 |
| 40671, 40672 | 13 | 2 |
| 40675, 40676 | 1 | 1 |
| 40717, 40718 | 1 | 1 |
| 40727, 40728 | 1 | 1 |
| 40749, 40750 | 1 | 1 |
| 40831, 40832 | 2 | 1 |
| 40839, 40840 | 19 | 2 |
| 40905, 40906 | 1 | 1 |
| 40919, 40920 | 3 | 1 |
| 40943, 40944 | 1 | 1 |
| 40949, 40950 | 1 | 1 |
| 40963, 40964 | 1 | 1 |
| 40969, 40970 | 2 | 1 |
| 41095, 41096 | 1 | 1 |
| 41103, 41104 | 1 | 1 |
| 4113, 4114 | 1 | 1 |
| 41137, 41138 | 1 | 1 |
| 41145, 41146 | 8 | 1 |
| 41165, 41166 | 1 | 1 |
| 41247, 41248 | 1 | 1 |
| 41263, 41264 | 3 | 1 |
| 41299, 41300 | 1 | 1 |
| 41303, 41304 | 1 | 1 |
| 4133, 4134 | 4 | 1 |
| 41353, 41354 | 11 | 2 |
| 41397, 41398 | 1 | 1 |
| 41423, 41424 | 1 | 1 |
| 41467, 41468 | 1 | 1 |
| 41531, 41532 | 23 | 3 |
| 41533, 41534 | 58 | 5 |
| 41539, 41540 | 1 | 1 |
| 41573, 41574 | 3 | 3 |
| 41629, 41630 | 1 | 1 |
| 41685, 41686 | 1 | 1 |
| 41743, 41744 | 1 | 1 |
| 41799, 41800 | 1 | 1 |
| 41815, 41816 | 1 | 1 |
| 41819, 41820 | 2 | 1 |
| 41893, 41894 | 2 | 1 |
| 41913, 41914 | 2 | 1 |
| 41915, 41916 | 1 | 1 |
| 41947, 41948 | 1 | 1 |
| 4197, 4198 | 6 | 3 |
| 42215, 42216 | 1 | 1 |
| 42277, 42278 | 1 | 1 |
| 42369, 42370 | 1 | 1 |
| 42419, 42420 | 1 | 1 |
| 42539, 42540 | 1 | 1 |
| 42553, 42554 | 4 | 1 |
| 42583, 42584 | 2 | 1 |
| 42641, 42642 | 1 | 1 |
| 42653, 42654 | 1 | 1 |
| 42655, 42656 | 1 | 1 |
| 42657, 42658 | 1 | 1 |
| 42659, 42660 | 2 | 1 |
| 42689, 42690 | 1 | 1 |
| 42799, 42800 | 1 | 1 |
| 42961, 42962 | 1 | 1 |
| 43095, 43096 | 2 | 2 |
| 43107, 43108 | 33 | 1 |
| 43155, 43156 | 1 | 1 |
| 43169, 43170 | 1 | 1 |
| 43235, 43236 | 1 | 1 |
| 43351, 43352 | 2 | 1 |
| 43359, 43360 | 1 | 1 |
| 43425, 43426 | 1 | 1 |
| 4343, 4344 | 49 | 7 |
| 43443, 43444 | 1 | 1 |
| 43445, 43446 | 1 | 1 |
| 43503, 43504 | 3 | 1 |
| 43551, 43552 | 1 | 1 |
| 43695, 43696 | 1 | 1 |
| 4373, 4374 | 3 | 1 |
| 43749, 43750 | 17 | 4 |
| 43769, 43770 | 12 | 2 |
| 43829, 43830 | 5 | 2 |
| 4385, 4386 | 2 | 1 |
| 43851, 43852 | 21 | 1 |
| 4387, 4388 | 18 | 1 |
| 43883, 43884 | 6 | 1 |
| 4391, 4392 | 3 | 1 |
| 44115, 44116 | 2 | 1 |
| 44129, 44130 | 3 | 1 |
| 44159, 44160 | 3 | 1 |
| 44175, 44176 | 5 | 3 |
| 44179, 44180 | 1 | 1 |
| 44209, 44210 | 3 | 1 |
| 4423, 4424 | 1 | 1 |
| 44277, 44278 | 7 | 4 |
| 44289, 44290 | 2 | 1 |
| 44295, 44296 | 1 | 1 |
| 44313, 44314 | 9 | 2 |
| 44373, 44374 | 1 | 1 |
| 44375, 44376 | 1 | 1 |
| 44385, 44386 | 1 | 1 |
| 44403, 44404 | 1 | 1 |
| 44405, 44406 | 1 | 1 |
| 44407, 44408 | 1 | 1 |
| 44411, 44412 | 1 | 1 |
| 44447, 44448 | 1 | 1 |
| 4451, 4452 | 7 | 2 |
| 44591, 44592 | 2 | 1 |
| 44779, 44780 | 1 | 1 |
| 44801, 44802 | 1 | 1 |
| 44809, 44810 | 1 | 1 |
| 44857, 44858 | 13 | 3 |
| 44895, 44896 | 1 | 1 |
| 44907, 44908 | 2 | 1 |
| 44935, 44936 | 2 | 1 |
| 44965, 44966 | 1 | 1 |
| 45129, 45130 | 1 | 1 |
| 45263, 45264 | 1 | 1 |
| 45265, 45266 | 1 | 1 |
| 45271, 45272 | 3 | 1 |
| 45391, 45392 | 6 | 3 |
| 45435, 45436 | 4 | 1 |
| 45481, 45482 | 2 | 2 |
| 45519, 45520 | 18 | 3 |
| 45521, 45522 | 1 | 1 |
| 45583, 45584 | 7 | 1 |
| 45633, 45634 | 1 | 1 |
| 45697, 45698 | 135 | 3 |
| 45701, 45702 | 1 | 1 |
| 45705, 45706 | 5 | 1 |
| 45711, 45712 | 1 | 1 |
| 45743, 45744 | 1 | 1 |
| 45767, 45768 | 1 | 1 |
| 45781, 45782 | 1 | 1 |
| 45795, 45796 | 1 | 1 |
| 45885, 45886 | 1 | 1 |
| 45909, 45910 | 3 | 1 |
| 45931, 45932 | 1 | 1 |
| 45943, 45944 | 1 | 1 |
| 45963, 45964 | 1 | 1 |
| 46009, 46010 | 2 | 2 |
| 46017, 46018 | 1 | 1 |
| 46107, 46108 | 1 | 1 |
| 46113, 46114 | 3 | 2 |
| 46187, 46188 | 1 | 1 |
| 46229, 46230 | 3 | 1 |
| 46263, 46264 | 4 | 2 |
| 46343, 46344 | 3 | 2 |
| 46345, 46346 | 1 | 1 |
| 46361, 46362 | 11 | 1 |
| 46401, 46402 | 2 | 1 |
| 46411, 46412 | 7 | 1 |
| 46415, 46416 | 14 | 1 |
| 46499, 46500 | 1 | 1 |
| 46509, 46510 | 10 | 5 |
| 4651, 4652 | 3 | 1 |
| 46511, 46512 | 1 | 1 |
| 46543, 46544 | 2 | 1 |
| 46637, 46638 | 3 | 2 |
| 46643, 46644 | 1 | 1 |
| 46649, 46650 | 1 | 1 |
| 46661, 46662 | 1 | 1 |
| 46679, 46680 | 1 | 1 |
| 46743, 46744 | 1 | 1 |
| 46829, 46830 | 2 | 2 |
| 46899, 46900 | 1 | 1 |
| 46903, 46904 | 1 | 1 |
| 46935, 46936 | 1 | 1 |
| 46937, 46938 | 1 | 1 |
| 46957, 46958 | 1 | 1 |
| 4703, 4704 | 1 | 1 |
| 47053, 47054 | 1 | 1 |
| 47063, 47064 | 1 | 1 |
| 47093, 47094 | 57 | 8 |
| 47103, 47104 | 1 | 1 |
| 47115, 47116 | 1 | 1 |
| 47169, 47170 | 1 | 1 |
| 47271, 47272 | 1 | 1 |
| 47277, 47278 | 1 | 1 |
| 47311, 47312 | 1 | 1 |
| 47341, 47342 | 1 | 1 |
| 47383, 47384 | 4 | 1 |
| 47481, 47482 | 1 | 1 |
| 475, 476 | 1 | 1 |
| 47571, 47572 | 1 | 1 |
| 4759, 4760 | 1 | 1 |
| 47609, 47610 | 3 | 2 |
| 47617, 47618 | 1 | 1 |
| 47631, 47632 | 1 | 1 |
| 47647, 47648 | 2 | 1 |
| 47787, 47788 | 3 | 2 |
| 47837, 47838 | 1 | 1 |
| 4789, 4790 | 1 | 1 |
| 47961, 47962 | 2 | 2 |
| 47963, 47964 | 1 | 1 |
| 48017, 48018 | 16 | 5 |
| 48041, 48042 | 1 | 1 |
| 48071, 48072 | 2 | 1 |
| 48095, 48096 | 50 | 2 |
| 48097, 48098 | 49 | 11 |
| 48207, 48208 | 1 | 1 |
| 48225, 48226 | 2 | 1 |
| 48279, 48280 | 3 | 2 |
| 48319, 48320 | 1 | 1 |
| 48325, 48326 | 1 | 1 |
| 48369, 48370 | 1 | 1 |
| 48395, 48396 | 2 | 1 |
| 48411, 48412 | 1 | 1 |
| 48479, 48480 | 2 | 2 |
| 4849, 4850 | 3 | 1 |
| 48539, 48540 | 5 | 1 |
| 48573, 48574 | 4 | 1 |
| 48669, 48670 | 1 | 1 |
| 48751, 48752 | 1 | 1 |
| 48753, 48754 | 17 | 3 |
| 48755, 48756 | 1 | 1 |
| 48773, 48774 | 1 | 1 |
| 48821, 48822 | 9 | 4 |
| 48825, 48826 | 1 | 1 |
| 48915, 48916 | 1 | 1 |
| 48931, 48932 | 1 | 1 |
| 48959, 48960 | 1 | 1 |
| 4897, 4898 | 1 | 1 |
| 48989, 48990 | 2 | 1 |
| 49005, 49006 | 1 | 1 |
| 49157, 49158 | 9 | 4 |
| 49237, 49238 | 3 | 3 |
| 49251, 49252 | 1 | 1 |
| 49287, 49288 | 1 | 1 |
| 49305, 49306 | 1 | 1 |
| 49373, 49374 | 1 | 1 |
| 49413, 49414 | 26 | 1 |
| 49415, 49416 | 1 | 1 |
| 49527, 49528 | 1 | 1 |
| 4959, 4960 | 7 | 3 |
| 49647, 49648 | 1 | 1 |
| 49671, 49672 | 2 | 2 |
| 4973, 4974 | 24 | 4 |
| 49743, 49744 | 1 | 1 |
| 49793, 49794 | 1 | 1 |
| 49887, 49888 | 1 | 1 |
| 49945, 49946 | 2 | 1 |
| 49947, 49948 | 2 | 1 |
| 49989, 49990 | 2 | 1 |
| 5003, 5004 | 1 | 1 |
| 50101, 50102 | 1 | 1 |
| 50103, 50104 | 1 | 1 |
| 50167, 50168 | 1 | 1 |
| 50181, 50182 | 1 | 1 |
| 50251, 50252 | 1 | 1 |
| 50253, 50254 | 2 | 1 |
| 50329, 50330 | 20 | 2 |
| 50331, 50332 | 3 | 2 |
| 50429, 50430 | 1 | 1 |
| 5045, 5046 | 7 | 2 |
| 50609, 50610 | 1 | 1 |
| 50639, 50640 | 1 | 1 |
| 50645, 50646 | 7 | 1 |
| 50659, 50660 | 1 | 1 |
| 50687, 50688 | 3 | 1 |
| 507, 508 | 1 | 1 |
| 50711, 50712 | 40 | 2 |
| 50747, 50748 | 1 | 1 |
| 50753, 50754 | 1 | 1 |
| 50791, 50792 | 1 | 1 |
| 50923, 50924 | 3 | 2 |
| 50931, 50932 | 1 | 1 |
| 50967, 50968 | 1 | 1 |
| 50977, 50978 | 1 | 1 |
| 5099, 5100 | 5 | 3 |
| 50995, 50996 | 1 | 1 |
| 50997, 50998 | 1 | 1 |
| 51013, 51014 | 1 | 1 |
| 5103, 5104 | 1 | 1 |
| 51043, 51044 | 1 | 1 |
| 51049, 51050 | 1 | 1 |
| 5105, 5106 | 1 | 1 |
| 51065, 51066 | 1 | 1 |
| 51087, 51088 | 36 | 2 |
| 51105, 51106 | 175 | 8 |
| 51175, 51176 | 1 | 1 |
| 51183, 51184 | 1 | 1 |
| 51265, 51266 | 2 | 1 |
| 51309, 51310 | 15 | 2 |
| 51341, 51342 | 2 | 2 |
| 51343, 51344 | 1 | 1 |
| 51351, 51352 | 3 | 1 |
| 51379, 51380 | 1 | 1 |
| 51387, 51388 | 1 | 1 |
| 51409, 51410 | 1 | 1 |
| 51427, 51428 | 1 | 1 |
| 51447, 51448 | 1 | 1 |
| 51485, 51486 | 37 | 6 |
| 51495, 51496 | 1 | 1 |
| 515, 516 | 2 | 1 |
| 51523, 51524 | 1 | 1 |
| 51575, 51576 | 1 | 1 |
| 51693, 51694 | 1 | 1 |
| 5171, 5172 | 2 | 2 |
| 51723, 51724 | 1 | 1 |
| 51751, 51752 | 8 | 2 |
| 51815, 51816 | 1 | 1 |
| 51821, 51822 | 1 | 1 |
| 51903, 51904 | 6 | 3 |
| 51905, 51906 | 7 | 1 |
| 51919, 51920 | 3 | 2 |
| 51935, 51936 | 1 | 1 |
| 52011, 52012 | 1 | 1 |
| 52027, 52028 | 5 | 1 |
| 52185, 52186 | 2 | 1 |
| 52203, 52204 | 2 | 1 |
| 52205, 52206 | 52 | 6 |
| 52227, 52228 | 1 | 1 |
| 52235, 52236 | 1 | 1 |
| 52237, 52238 | 2 | 1 |
| 52315, 52316 | 12 | 3 |
| 52331, 52332 | 1 | 1 |
| 52365, 52366 | 5 | 1 |
| 52373, 52374 | 1 | 1 |
| 52421, 52422 | 2 | 2 |
| 52461, 52462 | 1 | 1 |
| 5249, 5250 | 113 | 7 |
| 52513, 52514 | 3 | 2 |
| 52569, 52570 | 2 | 1 |
| 5259, 5260 | 2 | 1 |
| 52617, 52618 | 4 | 1 |
| 52631, 52632 | 1 | 1 |
| 52683, 52684 | 4 | 1 |
| 52729, 52730 | 1 | 1 |
| 52743, 52744 | 6 | 2 |
| 52747, 52748 | 1 | 1 |
| 52893, 52894 | 1 | 1 |
| 52955, 52956 | 1 | 1 |
| 52961, 52962 | 1 | 1 |
| 53041, 53042 | 1 | 1 |
| 53053, 53054 | 1 | 1 |
| 53081, 53082 | 1 | 1 |
| 53239, 53240 | 1 | 1 |
| 5331, 5332 | 2 | 2 |
| 53423, 53424 | 1 | 1 |
| 53449, 53450 | 1 | 1 |
| 5347, 5348 | 1 | 1 |
| 53475, 53476 | 3 | 1 |
| 53477, 53478 | 12 | 2 |
| 53479, 53480 | 1 | 1 |
| 5351, 5352 | 6 | 2 |
| 53523, 53524 | 1 | 1 |
| 53559, 53560 | 4 | 1 |
| 53561, 53562 | 1 | 1 |
| 53613, 53614 | 1 | 1 |
| 5373, 5374 | 9 | 3 |
| 5375, 5376 | 12 | 4 |
| 53769, 53770 | 17 | 3 |
| 53773, 53774 | 1 | 1 |
| 53963, 53964 | 3 | 1 |
| 53967, 53968 | 1 | 1 |
| 53977, 53978 | 36 | 3 |
| 54013, 54014 | 1 | 1 |
| 54019, 54020 | 1 | 1 |
| 54093, 54094 | 1 | 1 |
| 54161, 54162 | 1 | 1 |
| 54239, 54240 | 1 | 1 |
| 5429, 5430 | 1 | 1 |
| 5435, 5436 | 1 | 1 |
| 54393, 54394 | 1 | 1 |
| 54399, 54400 | 2 | 1 |
| 54467, 54468 | 1 | 1 |
| 54537, 54538 | 5 | 2 |
| 54645, 54646 | 1 | 1 |
| 54679, 54680 | 1 | 1 |
| 54687, 54688 | 4 | 1 |
| 54719, 54720 | 8 | 1 |
| 54721, 54722 | 2 | 2 |
| 54725, 54726 | 4 | 1 |
| 54751, 54752 | 1 | 1 |
| 54789, 54790 | 1 | 1 |
| 5479, 5480 | 2 | 2 |
| 54837, 54838 | 34 | 4 |
| 54905, 54906 | 1 | 1 |
| 54987, 54988 | 1 | 1 |
| 55003, 55004 | 1 | 1 |
| 55149, 55150 | 3 | 1 |
| 55151, 55152 | 1 | 1 |
| 55227, 55228 | 1 | 1 |
| 55259, 55260 | 1 | 1 |
| 55281, 55282 | 2 | 1 |
| 55349, 55350 | 1 | 1 |
| 5545, 5546 | 2 | 1 |
| 55507, 55508 | 1 | 1 |
| 55549, 55550 | 1 | 1 |
| 55561, 55562 | 21 | 2 |
| 5557, 5558 | 1 | 1 |
| 55585, 55586 | 5 | 2 |
| 55601, 55602 | 9 | 4 |
| 5563, 5564 | 1 | 1 |
| 55633, 55634 | 1 | 1 |
| 55673, 55674 | 2 | 1 |
| 5573, 5574 | 1 | 1 |
| 5577, 5578 | 1 | 1 |
| 55803, 55804 | 1 | 1 |
| 55823, 55824 | 1 | 1 |
| 55885, 55886 | 1 | 1 |
| 55889, 55890 | 1 | 1 |
| 55915, 55916 | 1 | 1 |
| 55971, 55972 | 1 | 1 |
| 55973, 55974 | 2 | 2 |
| 5625, 5626 | 1 | 1 |
| 56267, 56268 | 5 | 2 |
| 5627, 5628 | 1 | 1 |
| 56299, 56300 | 1 | 1 |
| 5637, 5638 | 1 | 1 |
| 56387, 56388 | 1 | 1 |
| 56435, 56436 | 1 | 1 |
| 5645, 5646 | 1 | 1 |
| 56545, 56546 | 3 | 1 |
| 56603, 56604 | 2 | 1 |
| 56617, 56618 | 1 | 1 |
| 56693, 56694 | 1 | 1 |
| 56781, 56782 | 2 | 1 |
| 569, 570 | 1 | 1 |
| 56925, 56926 | 4 | 2 |
| 56979, 56980 | 1 | 1 |
| 56997, 56998 | 6 | 1 |
| 57015, 57016 | 1 | 1 |
| 57031, 57032 | 1 | 1 |
| 57057, 57058 | 1 | 1 |
| 57077, 57078 | 1 | 1 |
| 57115, 57116 | 6 | 3 |
| 57261, 57262 | 1 | 1 |
| 57279, 57280 | 1 | 1 |
| 57309, 57310 | 1 | 1 |
| 57343, 57344 | 1 | 1 |
| 57449, 57450 | 1 | 1 |
| 57481, 57482 | 1 | 1 |
| 57483, 57484 | 22 | 5 |
| 57485, 57486 | 3 | 1 |
| 57587, 57588 | 37 | 5 |
| 5763, 5764 | 17 | 3 |
| 57643, 57644 | 1 | 1 |
| 57703, 57704 | 13 | 3 |
| 57783, 57784 | 9 | 1 |
| 57809, 57810 | 1 | 1 |
| 57829, 57830 | 6 | 1 |
| 57905, 57906 | 2 | 1 |
| 57913, 57914 | 1 | 1 |
| 57949, 57950 | 2 | 1 |
| 5801, 5802 | 428 | 9 |
| 58013, 58014 | 1 | 1 |
| 58021, 58022 | 1 | 1 |
| 58023, 58024 | 1 | 1 |
| 581, 582 | 1 | 1 |
| 58111, 58112 | 1 | 1 |
| 58129, 58130 | 1 | 1 |
| 58193, 58194 | 1 | 1 |
| 58315, 58316 | 1 | 1 |
| 58331, 58332 | 1 | 1 |
| 58437, 58438 | 1 | 1 |
| 58469, 58470 | 1 | 1 |
| 5847, 5848 | 1 | 1 |
| 58515, 58516 | 1 | 1 |
| 58545, 58546 | 1 | 1 |
| 58559, 58560 | 1 | 1 |
| 58577, 58578 | 2 | 2 |
| 58637, 58638 | 1 | 1 |
| 58643, 58644 | 11 | 2 |
| 58649, 58650 | 14 | 6 |
| 58687, 58688 | 1 | 1 |
| 58689, 58690 | 14 | 1 |
| 58715, 58716 | 1 | 1 |
| 58723, 58724 | 1 | 1 |
| 58735, 58736 | 3 | 1 |
| 58753, 58754 | 1 | 1 |
| 58771, 58772 | 1 | 1 |
| 58775, 58776 | 5 | 3 |
| 58847, 58848 | 1 | 1 |
| 58855, 58856 | 1 | 1 |
| 58875, 58876 | 1 | 1 |
| 58917, 58918 | 1 | 1 |
| 59119, 59120 | 1 | 1 |
| 59253, 59254 | 2 | 1 |
| 59255, 59256 | 1 | 1 |
| 59305, 59306 | 1 | 1 |
| 59359, 59360 | 1 | 1 |
| 59373, 59374 | 1 | 1 |
| 59417, 59418 | 1 | 1 |
| 59427, 59428 | 1 | 1 |
| 59433, 59434 | 1 | 1 |
| 59473, 59474 | 1 | 1 |
| 59481, 59482 | 2 | 2 |
| 5949, 5950 | 3 | 1 |
| 59491, 59492 | 1 | 1 |
| 5953, 5954 | 1 | 1 |
| 59531, 59532 | 16 | 3 |
| 59533, 59534 | 1 | 1 |
| 59599, 59600 | 4 | 4 |
| 59607, 59608 | 3 | 1 |
| 59721, 59722 | 11 | 3 |
| 59783, 59784 | 86 | 10 |
| 59789, 59790 | 5 | 2 |
| 59793, 59794 | 4 | 2 |
| 59795, 59796 | 1 | 1 |
| 59873, 59874 | 2 | 2 |
| 59895, 59896 | 7 | 4 |
| 59921, 59922 | 1 | 1 |
| 5993, 5994 | 1 | 1 |
| 5999, 6000 | 326 | 11 |
| 60023, 60024 | 1 | 1 |
| 60029, 60030 | 1 | 1 |
| 60141, 60142 | 1 | 1 |
| 60267, 60268 | 3 | 1 |
| 6029, 6030 | 7 | 2 |
| 60295, 60296 | 1 | 1 |
| 60309, 60310 | 16 | 4 |
| 60373, 60374 | 1 | 1 |
| 60407, 60408 | 1 | 1 |
| 60411, 60412 | 1 | 1 |
| 60429, 60430 | 1 | 1 |
| 60443, 60444 | 1 | 1 |
| 60479, 60480 | 1 | 1 |
| 60543, 60544 | 4 | 1 |
| 60545, 60546 | 8 | 1 |
| 60555, 60556 | 3 | 3 |
| 60597, 60598 | 1 | 1 |
| 60795, 60796 | 1 | 1 |
| 60851, 60852 | 8 | 5 |
| 60853, 60854 | 4 | 1 |
| 60885, 60886 | 4 | 1 |
| 609, 610 | 2 | 1 |
| 60917, 60918 | 1 | 1 |
| 6093, 6094 | 3 | 2 |
| 60943, 60944 | 1 | 1 |
| 60955, 60956 | 1 | 1 |
| 60973, 60974 | 2 | 2 |
| 61003, 61004 | 4 | 1 |
| 61015, 61016 | 1 | 1 |
| 61089, 61090 | 2 | 1 |
| 61147, 61148 | 1 | 1 |
| 61285, 61286 | 1 | 1 |
| 61293, 61294 | 1 | 1 |
| 613, 614 | 1 | 1 |
| 6133, 6134 | 1 | 1 |
| 61359, 61360 | 1 | 1 |
| 61375, 61376 | 1 | 1 |
| 61377, 61378 | 1 | 1 |
| 61397, 61398 | 1 | 1 |
| 6143, 6144 | 1 | 1 |
| 61601, 61602 | 1 | 1 |
| 61765, 61766 | 1 | 1 |
| 61769, 61770 | 1 | 1 |
| 6177, 6178 | 1 | 1 |
| 6179, 6180 | 11 | 3 |
| 61873, 61874 | 2 | 1 |
| 61881, 61882 | 1 | 1 |
| 62009, 62010 | 1 | 1 |
| 62013, 62014 | 1 | 1 |
| 6213, 6214 | 1 | 1 |
| 62231, 62232 | 1 | 1 |
| 62249, 62250 | 1 | 1 |
| 62273, 62274 | 1 | 1 |
| 62303, 62304 | 1 | 1 |
| 62333, 62334 | 1 | 1 |
| 62363, 62364 | 1 | 1 |
| 6241, 6242 | 1 | 1 |
| 6249, 6250 | 1 | 1 |
| 62507, 62508 | 2 | 1 |
| 62561, 62562 | 1 | 1 |
| 62629, 62630 | 4 | 2 |
| 62641, 62642 | 2 | 2 |
| 62745, 62746 | 1 | 1 |
| 62813, 62814 | 1 | 1 |
| 62829, 62830 | 12 | 5 |
| 62845, 62846 | 1 | 1 |
| 62905, 62906 | 2 | 2 |
| 62927, 62928 | 1 | 1 |
| 63, 64 | 389 | 2 |
| 63023, 63024 | 1 | 1 |
| 63043, 63044 | 1 | 1 |
| 63055, 63056 | 1 | 1 |
| 63125, 63126 | 1 | 1 |
| 63145, 63146 | 1 | 1 |
| 6315, 6316 | 6 | 1 |
| 63221, 63222 | 1 | 1 |
| 63257, 63258 | 1 | 1 |
| 63307, 63308 | 6 | 2 |
| 63309, 63310 | 1 | 1 |
| 63365, 63366 | 1 | 1 |
| 63375, 63376 | 1 | 1 |
| 63389, 63390 | 1 | 1 |
| 63471, 63472 | 1 | 1 |
| 63503, 63504 | 1 | 1 |
| 63545, 63546 | 49 | 3 |
| 63645, 63646 | 1 | 1 |
| 6367, 6368 | 8 | 2 |
| 63677, 63678 | 1 | 1 |
| 63699, 63700 | 1 | 1 |
| 63831, 63832 | 1 | 1 |
| 63867, 63868 | 1 | 1 |
| 63909, 63910 | 10 | 5 |
| 63927, 63928 | 3 | 1 |
| 64055, 64056 | 2 | 1 |
| 64213, 64214 | 1 | 1 |
| 64451, 64452 | 1 | 1 |
| 64459, 64460 | 7 | 4 |
| 64465, 64466 | 1 | 1 |
| 64505, 64506 | 1 | 1 |
| 64509, 64510 | 2 | 1 |
| 64527, 64528 | 1 | 1 |
| 64629, 64630 | 1 | 1 |
| 6465, 6466 | 7 | 3 |
| 64651, 64652 | 3 | 1 |
| 64673, 64674 | 1 | 1 |
| 64745, 64746 | 1 | 1 |
| 6475, 6476 | 4 | 1 |
| 64809, 64810 | 27 | 8 |
| 65113, 65114 | 3 | 1 |
| 65121, 65122 | 18 | 3 |
| 65139, 65140 | 1 | 1 |
| 65185, 65186 | 1 | 1 |
| 65189, 65190 | 1 | 1 |
| 65285, 65286 | 1 | 1 |
| 65329, 65330 | 1 | 1 |
| 6533, 6534 | 11 | 3 |
| 65345, 65346 | 4 | 1 |
| 6535, 6536 | 2 | 2 |
| 65381, 65382 | 1 | 1 |
| 65401, 65402 | 1 | 1 |
| 65501, 65502 | 1 | 1 |
| 65509, 65510 | 3 | 2 |
| 65573, 65574 | 1 | 1 |
| 65591, 65592 | 5 | 1 |
| 65643, 65644 | 1 | 1 |
| 65689, 65690 | 4 | 1 |
| 6579, 6580 | 4 | 1 |
| 65853, 65854 | 2 | 1 |
| 6595, 6596 | 2 | 1 |
| 66131, 66132 | 10 | 1 |
| 66165, 66166 | 1 | 1 |
| 66191, 66192 | 4 | 2 |
| 66199, 66200 | 10 | 2 |
| 66205, 66206 | 7 | 2 |
| 66307, 66308 | 1 | 1 |
| 6635, 6636 | 1 | 1 |
| 66359, 66360 | 4 | 3 |
| 66361, 66362 | 8 | 5 |
| 66385, 66386 | 1 | 1 |
| 66401, 66402 | 2 | 1 |
| 66433, 66434 | 1 | 1 |
| 66453, 66454 | 20 | 7 |
| 665, 666 | 5 | 1 |
| 66529, 66530 | 7 | 2 |
| 66543, 66544 | 1 | 1 |
| 66573, 66574 | 43 | 2 |
| 66579, 66580 | 1 | 1 |
| 66591, 66592 | 2 | 2 |
| 66603, 66604 | 1 | 1 |
| 66627, 66628 | 1 | 1 |
| 66635, 66636 | 1 | 1 |
| 66637, 66638 | 1 | 1 |
| 66801, 66802 | 8 | 1 |
| 66883, 66884 | 176 | 12 |
| 66899, 66900 | 1 | 1 |
| 66907, 66908 | 2 | 1 |
| 66939, 66940 | 1 | 1 |
| 66945, 66946 | 3 | 1 |
| 6695, 6696 | 1 | 1 |
| 66999, 67000 | 1 | 1 |
| 67041, 67042 | 9 | 2 |
| 67111, 67112 | 1 | 1 |
| 67147, 67148 | 6 | 1 |
| 67155, 67156 | 1 | 1 |
| 67187, 67188 | 1 | 1 |
| 67199, 67200 | 1 | 1 |
| 67271, 67272 | 21 | 2 |
| 67307, 67308 | 1 | 1 |
| 67331, 67332 | 1 | 1 |
| 67339, 67340 | 1 | 1 |
| 67353, 67354 | 24 | 3 |
| 67373, 67374 | 3 | 1 |
| 67471, 67472 | 6 | 2 |
| 67541, 67542 | 2 | 2 |
| 67561, 67562 | 37 | 2 |
| 67597, 67598 | 1 | 1 |
| 67671, 67672 | 6 | 1 |
| 67707, 67708 | 13 | 3 |
| 67745, 67746 | 1 | 1 |
| 67747, 67748 | 71 | 31 |
| 67755, 67756 | 1 | 1 |
| 67761, 67762 | 2 | 2 |
| 67815, 67816 | 2 | 1 |
| 67819, 67820 | 1 | 1 |
| 67963, 67964 | 4 | 3 |
| 68019, 68020 | 9 | 3 |
| 68021, 68022 | 30 | 2 |
| 68043, 68044 | 1 | 1 |
| 68199, 68200 | 1 | 1 |
| 6827, 6828 | 1 | 1 |
| 68343, 68344 | 1 | 1 |
| 68359, 68360 | 12 | 4 |
| 68391, 68392 | 1 | 1 |
| 68411, 68412 | 14 | 5 |
| 68475, 68476 | 1 | 1 |
| 685, 686 | 3 | 1 |
| 68555, 68556 | 1 | 1 |
| 68605, 68606 | 2 | 1 |
| 68717, 68718 | 1 | 1 |
| 68839, 68840 | 1 | 1 |
| 68861, 68862 | 1 | 1 |
| 689, 690 | 2 | 1 |
| 69009, 69010 | 16 | 1 |
| 6901, 6902 | 1 | 1 |
| 69075, 69076 | 1 | 1 |
| 6909, 6910 | 1 | 1 |
| 69137, 69138 | 1 | 1 |
| 69139, 69140 | 2 | 2 |
| 69167, 69168 | 1 | 1 |
| 69175, 69176 | 1 | 1 |
| 6919, 6920 | 1 | 1 |
| 6923, 6924 | 2 | 1 |
| 69255, 69256 | 4 | 2 |
| 69275, 69276 | 27 | 2 |
| 69277, 69278 | 68 | 2 |
| 69349, 69350 | 1 | 1 |
| 69367, 69368 | 2 | 1 |
| 69369, 69370 | 1 | 1 |
| 69423, 69424 | 1 | 1 |
| 69429, 69430 | 1 | 1 |
| 69437, 69438 | 1 | 1 |
| 69439, 69440 | 2 | 1 |
| 69449, 69450 | 1 | 1 |
| 69479, 69480 | 27 | 4 |
| 69489, 69490 | 1 | 1 |
| 69547, 69548 | 1 | 1 |
| 69559, 69560 | 1 | 1 |
| 69593, 69594 | 5 | 3 |
| 69667, 69668 | 1 | 1 |
| 69703, 69704 | 1 | 1 |
| 69715, 69716 | 1 | 1 |
| 69753, 69754 | 1 | 1 |
| 69755, 69756 | 2 | 1 |
| 69773, 69774 | 5 | 3 |
| 69835, 69836 | 1 | 1 |
| 69869, 69870 | 12 | 3 |
| 69905, 69906 | 1 | 1 |
| 69919, 69920 | 1 | 1 |
| 6993, 6994 | 4 | 2 |
| 70001, 70002 | 1 | 1 |
| 7003, 7004 | 1 | 1 |
| 70031, 70032 | 1 | 1 |
| 70049, 70050 | 1 | 1 |
| 7007, 7008 | 6 | 3 |
| 70073, 70074 | 1 | 1 |
| 7013, 7014 | 1 | 1 |
| 70147, 70148 | 1 | 1 |
| 70153, 70154 | 1 | 1 |
| 7017, 7018 | 5 | 1 |
| 7021, 7022 | 10 | 1 |
| 7027, 7028 | 1 | 1 |
| 70275, 70276 | 1 | 1 |
| 70301, 70302 | 1 | 1 |
| 70347, 70348 | 1 | 1 |
| 70351, 70352 | 1 | 1 |
| 70429, 70430 | 45 | 2 |
| 70493, 70494 | 1 | 1 |
| 70505, 70506 | 1 | 1 |
| 70611, 70612 | 6 | 1 |
| 70623, 70624 | 1 | 1 |
| 70649, 70650 | 1 | 1 |
| 70651, 70652 | 1 | 1 |
| 70657, 70658 | 1 | 1 |
| 70713, 70714 | 1 | 1 |
| 70861, 70862 | 8 | 1 |
| 70873, 70874 | 9 | 4 |
| 70875, 70876 | 26 | 7 |
| 70909, 70910 | 4 | 1 |
| 70997, 70998 | 1 | 1 |
| 71, 72 | 4 | 1 |
| 71003, 71004 | 3 | 3 |
| 71017, 71018 | 1 | 1 |
| 71023, 71024 | 3 | 1 |
| 71049, 71050 | 1 | 1 |
| 71051, 71052 | 1 | 1 |
| 71077, 71078 | 1 | 1 |
| 71117, 71118 | 1 | 1 |
| 71179, 71180 | 107 | 7 |
| 71187, 71188 | 3 | 1 |
| 71215, 71216 | 14 | 1 |
| 71289, 71290 | 4 | 1 |
| 71297, 71298 | 1 | 1 |
| 71309, 71310 | 1 | 1 |
| 71343, 71344 | 2 | 2 |
| 71371, 71372 | 1 | 1 |
| 71387, 71388 | 4 | 1 |
| 71403, 71404 | 2 | 1 |
| 7141, 7142 | 1 | 1 |
| 71417, 71418 | 1 | 1 |
| 7153, 7154 | 1 | 1 |
| 71581, 71582 | 1 | 1 |
| 71609, 71610 | 1 | 1 |
| 71615, 71616 | 2 | 2 |
| 71651, 71652 | 2 | 2 |
| 71729, 71730 | 1 | 1 |
| 71787, 71788 | 1 | 1 |
| 71875, 71876 | 1 | 1 |
| 71887, 71888 | 1 | 1 |
| 7193, 7194 | 3 | 1 |
| 71971, 71972 | 1 | 1 |
| 71975, 71976 | 1 | 1 |
| 71983, 71984 | 5 | 2 |
| 72007, 72008 | 1 | 1 |
| 72045, 72046 | 11 | 1 |
| 72051, 72052 | 2 | 1 |
| 72077, 72078 | 107 | 2 |
| 72105, 72106 | 1 | 1 |
| 72121, 72122 | 1 | 1 |
| 72125, 72126 | 1 | 1 |
| 72185, 72186 | 1 | 1 |
| 72237, 72238 | 2 | 2 |
| 72253, 72254 | 4 | 1 |
| 72275, 72276 | 1 | 1 |
| 72303, 72304 | 1 | 1 |
| 72309, 72310 | 10 | 2 |
| 72385, 72386 | 1 | 1 |
| 72393, 72394 | 1 | 1 |
| 72451, 72452 | 1 | 1 |
| 72465, 72466 | 1 | 1 |
| 72519, 72520 | 1552 | 62 |
| 72523, 72524 | 1 | 1 |
| 72535, 72536 | 1 | 1 |
| 7255, 7256 | 2 | 1 |
| 72571, 72572 | 1 | 1 |
| 72589, 72590 | 1 | 1 |
| 72697, 72698 | 1 | 1 |
| 72741, 72742 | 1 | 1 |
| 72789, 72790 | 1 | 1 |
| 72893, 72894 | 1 | 1 |
| 72927, 72928 | 2 | 1 |
| 72981, 72982 | 1 | 1 |
| 72993, 72994 | 1 | 1 |
| 73057, 73058 | 1 | 1 |
| 73059, 73060 | 3 | 2 |
| 73077, 73078 | 1 | 1 |
| 7313, 7314 | 1 | 1 |
| 73211, 73212 | 1 | 1 |
| 73221, 73222 | 3 | 1 |
| 73267, 73268 | 1 | 1 |
| 73315, 73316 | 1 | 1 |
| 7335, 7336 | 1 | 1 |
| 73357, 73358 | 1 | 1 |
| 73361, 73362 | 2 | 2 |
| 7337, 7338 | 2 | 1 |
| 73445, 73446 | 1 | 1 |
| 7345, 7346 | 1 | 1 |
| 73491, 73492 | 1 | 1 |
| 73495, 73496 | 1 | 1 |
| 73585, 73586 | 1 | 1 |
| 7359, 7360 | 23 | 3 |
| 73685, 73686 | 4 | 1 |
| 73689, 73690 | 1 | 1 |
| 73729, 73730 | 1 | 1 |
| 7377, 7378 | 10 | 2 |
| 73841, 73842 | 1 | 1 |
| 73895, 73896 | 17 | 6 |
| 73927, 73928 | 1 | 1 |
| 74037, 74038 | 1 | 1 |
| 74125, 74126 | 1 | 1 |
| 7413, 7414 | 2 | 2 |
| 74143, 74144 | 1 | 1 |
| 74409, 74410 | 1 | 1 |
| 7443, 7444 | 1 | 1 |
| 74471, 74472 | 1 | 1 |
| 74477, 74478 | 1 | 1 |
| 74597, 74598 | 1 | 1 |
| 74663, 74664 | 1 | 1 |
| 74733, 74734 | 1 | 1 |
| 74791, 74792 | 13 | 6 |
| 74809, 74810 | 1 | 1 |
| 74863, 74864 | 1 | 1 |
| 75095, 75096 | 1 | 1 |
| 7515, 7516 | 2 | 1 |
| 7517, 7518 | 1 | 1 |
| 75173, 75174 | 1 | 1 |
| 7523, 7524 | 1 | 1 |
| 75337, 75338 | 1 | 1 |
| 7543, 7544 | 29 | 2 |
| 75491, 75492 | 1 | 1 |
| 75537, 75538 | 1 | 1 |
| 75641, 75642 | 1 | 1 |
| 7569, 7570 | 1 | 1 |
| 75699, 75700 | 1 | 1 |
| 76007, 76008 | 1 | 1 |
| 7603, 7604 | 162 | 14 |
| 76061, 76062 | 1 | 1 |
| 76149, 76150 | 1 | 1 |
| 7631, 7632 | 1 | 1 |
| 76363, 76364 | 1 | 1 |
| 76377, 76378 | 1 | 1 |
| 76441, 76442 | 1 | 1 |
| 76525, 76526 | 1 | 1 |
| 7657, 7658 | 1 | 1 |
| 76595, 76596 | 2 | 1 |
| 76637, 76638 | 1 | 1 |
| 76683, 76684 | 1 | 1 |
| 76719, 76720 | 1 | 1 |
| 76727, 76728 | 2 | 2 |
| 76763, 76764 | 1 | 1 |
| 76931, 76932 | 1 | 1 |
| 76933, 76934 | 1 | 1 |
| 76973, 76974 | 1 | 1 |
| 7703, 7704 | 1 | 1 |
| 77071, 77072 | 1 | 1 |
| 7715, 7716 | 5 | 3 |
| 77221, 77222 | 6 | 1 |
| 7723, 7724 | 1 | 1 |
| 77247, 77248 | 6 | 3 |
| 77283, 77284 | 1 | 1 |
| 77349, 77350 | 1 | 1 |
| 7735, 7736 | 5 | 2 |
| 77435, 77436 | 1 | 1 |
| 77437, 77438 | 1 | 1 |
| 77467, 77468 | 1 | 1 |
| 7751, 7752 | 1 | 1 |
| 7773, 7774 | 154 | 8 |
| 77791, 77792 | 5 | 3 |
| 77829, 77830 | 2 | 1 |
| 77833, 77834 | 7 | 3 |
| 77845, 77846 | 1 | 1 |
| 78025, 78026 | 1 | 1 |
| 78053, 78054 | 1 | 1 |
| 78095, 78096 | 1 | 1 |
| 7813, 7814 | 1 | 1 |
| 78147, 78148 | 2 | 2 |
| 78239, 78240 | 1 | 1 |
| 78311, 78312 | 1 | 1 |
| 78339, 78340 | 5 | 1 |
| 78499, 78500 | 1 | 1 |
| 78511, 78512 | 1 | 1 |
| 78597, 78598 | 1 | 1 |
| 78637, 78638 | 1 | 1 |
| 78647, 78648 | 1 | 1 |
| 7883, 7884 | 5 | 1 |
| 7905, 7906 | 1 | 1 |
| 7909, 7910 | 7 | 1 |
| 7927, 7928 | 6 | 1 |
| 7929, 7930 | 1 | 1 |
| 7939, 7940 | 1 | 1 |
| 795, 796 | 7 | 3 |
| 7983, 7984 | 1 | 1 |
| 7999, 8000 | 1 | 1 |
| 8039, 8040 | 152 | 4 |
| 8109, 8110 | 2 | 1 |
| 8167, 8168 | 1 | 1 |
| 8197, 8198 | 2 | 1 |
| 8203, 8204 | 1 | 1 |
| 8253, 8254 | 1 | 1 |
| 8259, 8260 | 2 | 2 |
| 8311, 8312 | 1 | 1 |
| 8451, 8452 | 24 | 1 |
| 8481, 8482 | 29 | 4 |
| 8507, 8508 | 3 | 2 |
| 8523, 8524 | 1 | 1 |
| 8585, 8586 | 1 | 1 |
| 8611, 8612 | 1 | 1 |
| 8631, 8632 | 1 | 1 |
| 8661, 8662 | 70 | 7 |
| 8669, 8670 | 49 | 5 |
| 8683, 8684 | 1 | 1 |
| 87, 88 | 1 | 1 |
| 873, 874 | 7 | 4 |
| 8777, 8778 | 91 | 10 |
| 8801, 8802 | 4 | 1 |
| 8809, 8810 | 3 | 1 |
| 8813, 8814 | 1 | 1 |
| 8831, 8832 | 8 | 3 |
| 8841, 8842 | 7 | 2 |
| 8847, 8848 | 4 | 1 |
| 8877, 8878 | 1 | 1 |
| 89, 90 | 79 | 2 |
| 8943, 8944 | 1 | 1 |
| 895, 896 | 1 | 1 |
| 8951, 8952 | 5 | 1 |
| 8995, 8996 | 1 | 1 |
| 9007, 9008 | 1 | 1 |
| 9009, 9010 | 1 | 1 |
| 9019, 9020 | 2 | 1 |
| 9097, 9098 | 10 | 2 |
| 9107, 9108 | 3 | 2 |
| 911, 912 | 2 | 1 |
| 9161, 9162 | 1 | 1 |
| 917, 918 | 8 | 4 |
| 9251, 9252 | 25 | 7 |
| 9259, 9260 | 1 | 1 |
| 9275, 9276 | 6 | 1 |
| 9339, 9340 | 5 | 1 |
| 9341, 9342 | 1 | 1 |
| 9433, 9434 | 1 | 1 |
| 9445, 9446 | 2 | 2 |
| 9479, 9480 | 1 | 1 |
| 9507, 9508 | 1 | 1 |
| 9511, 9512 | 2 | 2 |
| 9535, 9536 | 4 | 1 |
| 9579, 9580 | 1 | 1 |
| 9585, 9586 | 2 | 1 |
| 963, 964 | 1 | 1 |
| 9645, 9646 | 1 | 1 |
| 9697, 9698 | 1 | 1 |
| 97, 98 | 5 | 1 |
| 9779, 9780 | 1 | 1 |
| 9827, 9828 | 2 | 1 |
| 9843, 9844 | 3 | 1 |
| 9851, 9852 | 1 | 1 |
| 9897, 9898 | 1 | 1 |
| 9935, 9936 | 1 | 1 |
| 9969, 9970 | 20 | 2 |
| 9975, 9976 | 1 | 1 |

### Example 2

### PASC Assay for CBH Subclone Activity Screening

[0885] The following example demonstrates an exemplary protocol for confirming activity of an enzyme of the invention, or for determining if a polypeptide or peptide is within the scope of the invention. In particular, this example describes a (Phosphoric Acid Swollen Cellulose) enzyme activity assay for cellobiohydrolase (CBH) subclone activity screening, and an assay for glucose oxidase screening, noting that the invention provides polypeptides and peptides having glucose oxidase and/or cellobiohydrolase (CBH) activity, as described in Tables 1 and 3, herein. These assays can be adapted to high through-put (HTP) screening apparatus/assays, e.g., robotic assays.

[0886] The PASC activity assay was used to confirm the enzymatic activity of exemplary enzymes of the invention, as set forth in Table 5, below; for example, the first row shows that the exemplary polypeptide of the invention SEQ ID NO:54010 (encoded, e.g., by SEQ ID NO:54009), has a glycosyl hydrolase activity.

[0887] Assay Conditions:
[0888] 100 ul reaction volume
[0889] 50 mM pH5 buffer (sodium acetate) or 50 mM pH7 buffer (sodium phosphate)
[0890] 0.75% PASC (neutral pH)
[0891] 20 ul enzyme prep soluble fraction (1:5 dilution in reaction)
[0892] (+) control and (−) control included
[0893] Reaction in 96 well PCR plate with foil seal
[0894] Overnight reaction at 37 C using thermocycler (or heat block)

[0895] Analysis:
[0896] Glucose Oxidase analysis; fluorescence measured at 545/590 using a SPECTRAMAX™ (Global Medical Instrumentation, Inc., Ramsey, Minn.) reader

[0897] Materials:
[0898] 96 well PCR plate (used for the reaction)
[0899] Black 384 well plate with black bottom (used for glucose oxidase detection)
[0900] Foil seal
[0901] 1.5% PASC stock solution
[0902] CBH subclones samples (lysed and spun down)
[0903] CBHI (Megazyme International Ireland Ltd.) sample (positive control)
[0904] Vector with no insert sample (negative control)
[0905] 500 mM pH5 sodium acetate stock solution
[0906] 500 mM pH7 sodium phosphate stock solution
[0907] Thermocycler or heat block (at 37 C for reaction)
[0908] SPECTRAMAX™ fluorescence reader (for glucose oxidase detection)

[0909] Glucose Oxidase Kit:
[0910] 1) 800 mM pH7.4 phosphate buffer stock
[0911] 2) Purified B-Glucosidase
[0912] 3) 2500/250 U/ml Glucose Oxidase/Horse Radish Peroxidase cocktail
[0913] 4) 50 mM Amplex red stock (light sensitive)

[0914] Protocol for PASC Reaction:
[0915] 1) Add 20 ul (−) control (vector no insert) to well A1 and C1. A1 will be the negative control for reactions at pH5. C1 will be the negative control for reactions at pH7.
[0916] 2) Dilute 1:20 CBHI (Megazyme International Ireland Ltd.) stock (20 ul stock +380 ul water)
[0917] 3) Add 20 ul diluted CBHI to wells A2 and C2. A2 will be the (+) control for reactions at pH5. C2 will be the (+) control for reactions at pH7.
[0918] 4) Add 20 ul CBH subclone samples to rows A and C (if more than 10 samples, continue adding to rowB and D). RowA will be reactions at pH5. Row C will be reactions at pH7.
[0919] 5) Add 20 ul autoclaved water to wells in row A and C containing samples.
[0920] 6) Add 10 ul 500 mM pH5 buffer stock to rowA (50 mM in reaction)
[0921] 7) Add 10 ul 500 mM pH7 buffer stock to RowC (50 mM in reaction)
[0922] 8) Using scissors, clip the tips of 200 ul pipet tips (Rainin Instrument, Oakland Calif.). Pipet tips must be modified to draw up PASC stock solution.
[0923] 9) Add 50 ul 1.5% PASC stock to all wells containing samples. Mix well using pipet.
[0924] 10) Seal PCR plate well with foil seal and place plate in thermocycler (or heat block).
[0925] 11) Let PCR plate incubate at 37 C overnight.

[0926] Protocol for Glucose Oxidase Analysis:
[0927] 1) Remove PCR plate from 37 C incubator and spin down plate for 5 minutes at 4,000 RPM, using an Eppendorf centrifuge (Eppendorf AG, Germany).
[0928] 2) Using a multi-channel pipet, transfer 25 ul reaction supernatant to a black 384 well detection plate. Make sure not to transfer any of the pellet to detection plate (supernatant only).
[0929] 3) Make 2× glucose oxidase cocktail (volume depends on number of samples):

| Component | [Stock] | | 2× Cocktail | |
|---|---|---|---|---|
| Sterile dl water | n/a | | qs | |
| Sodium phosphate pH7.4 | 800 | mM | 100 | mM |
| B-Glucosidase | variable | | 0.01 | U/ml |
| GO/HRP mix | 2500/250 | U/ml | 10/1 | U/ml |
| Amplex red | 50 | mM | 0.1 | mM |

[0930] Purified β-glucosidase is produced in-house.
[0931] Glucose Oxidase (GO) is from Sigma (#G7141-50KU) (Sigma-Aldrich, St. Louis, Mo.). Dissolve all 50,000 units in 5 ml 50 mM phosphate pH7.4 buffer.
[0932] Horse Radish Peroxidase (HRP) is from Sigma (#P2088-5KU). Dissolve all 5,000 units in 5 ml 50 mM phosphate pH7.4 buffer.
[0933] GO and HRP are then combined in equal volumes (2,500/250 GO/HRP).
[0934] Amplex Red is from Molecular Probe (#A22177) (Invitrogen Corporation, Carlsbad Calif.). Dissolve 10 mg vial in 0.777 ml DMSO to obtain 50 mM stock. Store at −20 C protected from light.
[0935] 4) Add 25 ul of 2× glucose oxidase cocktail to wells in 384 well detection plate containing reaction supernatant. Mix well and avoid formation of bubbles.
[0936] 5) Let detection plate incubate at room temperature for 30 minutes. Protect plate from light during incubation.
[0937] 6) Read plate on SPECTRAMAX™ fluorescence plate reader at 545/590 nm.
[0938] 7) Save data as a text file and store data. Open up data in excel sheet and analyze results.
[0939] 8) Data analysis:
   [0940] CBH subclones deemed “active” must have much higher 545/590 values than those of the negative control. For example, a sample with a value of 1200 would not be considered active if the negative control is 1000. Conversely, a sample with a value of 2500 would be considered active if the negative control is 1000.
   [0941] Samples performing with similar or higher values than the positive control are deemed “highly active.”
   [0942] All active CBH subclones will further characterization on other relevant substrates, e.g. AVICEL™ (GFS Chemicals, Inc., Powell, Ohio) microcrystalline cellulose.
   [0943] Interpretation of glucose oxidase data is relatively subjective, thus it is very important to have a reliable positive and negative control each time an experiment is performed.

TABLE 6

| | Glycosyl | Activity | |
|---|---|---|---|
| SEQ ID NO: | Hydrolase families | on PASC | Notes |
| 54009, 54010 | Glycosyl hydrolase | Yes | Detected by activity |
| | family 45 | | |
| 42389, 42390 | Glycosyl hydrolase | Not | Detected by proteomic |
| | family 9 | detected | analysis |
| 78693, 78694 | Cellulase, Glycosyl | Yes | Detected by proteomic |
| | hydrolase family 5 | | analysis |
| 71289, 71290 | Cellulase | Not | Detected by proteomic |
| | | tested | analysis |
| 71287, 71288 | Cellulase | In | Detected by proteomic |
| | | process | analysis |
| 78691, 78692 | Cellulase | Yes | Detected by activity |
| 3985, 3986 | Cellulase | Yes | Detected by activity |
| 66171, 66172 | Cellulase, Glycosyl | Not | Detected by proteomic |
| | hydrolase family 5 | tested | analysis |
| 78687, 78688 | Cellulase | Yes | Detected by activity |
| 78689, 78690 | Cellulase | Yes | Detected by activity |
| 78695, 78696 | Cellulase | Yes | Detected by activity |
| 78683, 78684 | Cellulase | Yes | Detected by activity |
| 78685, 78686 | Cellulase, Glycosyl | Yes | Detected by proteomic |
| | hydrolase family 5 | | analysis |
| 71289, 71290 | Glycosyl hydrolase | | Detected by proteomic |
| | family 5 | | analysis |
| 4423, 4424 | Glycosyl hydrolase | | Detected by proteomic |
| | family 5 | | analysis |

[0944] A number of aspects of the invention have been described. Nevertheless, it will be understood that various modifications may be made without departing from the spirit and scope of the invention. Accordingly, other aspects are within the scope of the following claims.

LENGTHY TABLES
The patent application contains a lengthy table section. A copy of the table is available in electronic form from the USPTO web site (http://seqdata.uspto.gov/?pageRequest=docDetail&DocID=US20110296543A1). An electronic copy of the table will also be available from the USPTO upon request and payment of the fee set forth in 37 CFR 1.19(b)(3).

1. An isolated, synthetic or recombinant nucleic acid comprising
(A) (a) a nucleic acid sequence having at least about 50%, 51%, 52%, 53%, 54%, 55%, 56%, 57%, 58%, 59%, 60%, 61%, 62%, 63% 64%, 65%, 66%, 67%, 68%, 69%, 70%, 71%, 72%, 73%, 74%, 75%, 76%, 77%, 78%, 79%, 80%, 81%, 82%, 83%, 84%, 85%, 86%, 87%, 88%, 89%, 90%, 91%, 92%, 93%, 94%, 95%, 96%, 97%, 98%, 99%, or more, or complete (100%), sequence identity to SEQ ID NO:1, SEQ ID NO:3, SEQ ID NO:5, SEQ ID NO:7, SEQ ID NO:9, SEQ ID NO:11, SEQ ID NO:13, SEQ ID NO:15, SEQ ID NO:17, SEQ ID NO:19, SEQ ID NO:21, SEQ ID NO:23, SEQ ID NO:25, and all nucleic acids (polynucleotide sequences) disclosed in the SEQ ID listing, which include all odd numbered SEQ ID NO:s from SEQ ID NO:1 through SEQ ID NO:108,699, over a region of at least about 50, 75, 100, 150, 200, 250, 300, 350, 400, 450, 500, 550, 600, 650, 700, 750, 800, 850, 900, 950, 1000, 1050, 1100, 1150 or more residues, or over the full length of a protein coding sequence (transcript) or gene;
wherein the nucleic acid encodes at least one polypeptide having an enzymatic activity, or encodes a polypeptide or peptide capable of generating an antibody that binds specifically to a polypeptide having a sequence comprising any of the even numbered (amino acid) SEQ ID NO:s in the sequence listing, including from SEQ ID NO:2 through SEQ ID NO:108,699;
(b) a nucleic acid sequence that hybridizes under stringent conditions to a nucleic acid (a polynucleotide sequence) comprising SEQ ID NO:1, SEQ ID NO:3, SEQ ID NO:5, SEQ ID NO:7, SEQ ID NO:9, SEQ ID NO:11, SEQ ID NO:13, SEQ ID NO:15, SEQ ID NO:17, SEQ ID NO:19, SEQ ID NO:21, SEQ ID NO:23, SEQ ID NO:25, and all nucleic acids (polynucleotide sequences) disclosed in the SEQ ID listing, which include all odd numbered SEQ ID NO:s from SEQ ID NO:1 through SEQ ID NO:108,699,
wherein the nucleic acid encodes a polypeptide having an activity as set forth in Table 3, or encodes a polypeptide or peptide capable of generating an antibody that binds specifically to a polypeptide having a sequence comprising any of the even numbered SEQ ID NO:s in the sequence listing, including from SEQ ID NO:2 through SEQ ID NO:108,699,
and the stringent conditions include a wash step comprising a wash in 0.2×SSC at a temperature of about 65° C. for about 15 minutes,
and optionally the nucleic acid is at least about 20, 30, 40, 50, 60, 75, 100, 150, 200, 300, 400, 500, 600, 700, 800, 900, 1000 or more residues in length or the full length of the gene or transcript;
(c) a nucleic acid (polynucleotide) encoding at least one polypeptide having enzyme activity, binding activity and/or structural activity, wherein the polypeptide comprises the sequence of SEQ ID NO:2, SEQ ID NO:4, SEQ ID NO:6, SEQ ID NO:8, SEQ ID NO:10, SEQ ID NO:12, SEQ ID NO:14, SEQ ID NO:16, SEQ ID NO:18, SEQ ID NO:20, SEQ ID NO:22, SEQ ID NO:24, etc. and all polypeptides (amino acid sequences) disclosed in the SEQ ID listing, which include all even numbered (amino acid) SEQ ID NO:s from SEQ ID NO:2 through SEQ ID NO:108,699, or enzymatically active fragments thereof;
(d) (i) the nucleic acid (polynucleotide) of (a), (b) or (c) and encoding a polypeptide having at least one conservative amino acid substitution and retaining its enzyme activity, binding activity and/or structural activity; or, (ii) the nucleic acid of (d)(i), wherein the at least one conservative amino acid substitution comprises substituting an amino acid with another amino acid of like characteristics; or, a conservative substitution comprises: replacement of an aliphatic amino acid with another aliphatic amino acid; replacement of a Serine with a Threonine or vice versa; replacement of an acidic residue with another acidic residue; replacement of a residue bearing an amide group with another residue bearing an amide group; exchange of a basic residue with another basic residue; or replacement of an aromatic residue with another aromatic residue;
(e) the nucleic acid (polynucleotide) of (a), (b), (c) or (d) encoding a polypeptide having an enzyme activity, binding activity and/or structural activity but lacking a signal sequence, a prepro domain, a dockerin domain, and/or a carbohydrate binding module (CBM),
wherein optionally the carbohydrate binding module (CBM) comprises, or consists of, a xylan binding module, a cellulose binding module, a lignin binding module, a xylose binding module, a mannanse binding module, a xyloglucan-specific module and/or a arabinofuranosidase binding module;
(f) the nucleic acid (polynucleotide) of (a), (b), (c), (d) or (e) encoding a polypeptide having an enzyme activity, binding activity and/or structural activity further comprising a heterologous sequence;
(g) the nucleic acid (polynucleotide) of (f), wherein the heterologous sequence comprises, or consists of a sequence encoding: (i) a heterologous signal sequence, a heterologous carbohydrate binding module, a heterologous dockerin domain, a heterologous catalytic domain (CD), or a combination thereof; (ii) the sequence of (ii), wherein the heterologous signal sequence, carbohydrate binding module or catalytic domain (CD) is derived from a heterologous enzyme; or, (iii) a tag, an epitope, a targeting peptide, a cleavable sequence, a detectable moiety or an enzyme;
(h) the nucleic acid (polynucleotide) of (g), wherein the heterologous carbohydrate binding module (CBM) comprises, or consists of, a xylan binding module, a cellulose binding module, a lignin binding module, a xylose binding module, a mannanse binding module, a xyloglucan-specific module and/or a arabinofuranosidase binding module;
(i) the nucleic acid (polynucleotide) of (g), wherein the heterologous signal sequence targets the encoded protein to a vacuole, the endoplasmic reticulum, a chloroplast or a starch granule; or
(j) a nucleic acid sequence (polynucleotide) fully (completely) complementary to (a), (b), (c), (d), (e), (f), (g), (h) or (i);
(B) the isolated, synthetic or recombinant nucleic acid of (A), wherein the sequence identity is at least about 51%, 52%, 53%, 54%, 55%, 56%, 57%, 58%, 59%, 60%, 61%, 62%, 63% 64%, 65%, 66%, 67%, 68%, 69%, 70%, 71%, 72%, 73%, 74%, 75%, 76%, 77%, 78%, 79%, 80%, 81%, 82%, 83%, 84%, 85%, 86%, 87%, 88%, 89%, 90%, 91%, 92%, 93%, 94%, 95%, 96%, 97%, 98%, 99%, or more sequence identity to SEQ ID NO:1, SEQ ID NO:3, SEQ ID NO:5, SEQ ID NO:7, SEQ ID NO:9, SEQ ID NO:11, SEQ ID NO:13, SEQ ID NO:15, SEQ ID NO:17, SEQ ID NO:19, SEQ ID NO:21, SEQ ID NO:23, SEQ ID NO:25, and all nucleic acids disclosed in the SEQ ID listing, which include all odd numbered SEQ ID NO:s from SEQ ID NO:1 through SEQ ID NO:108,699;
(C) the isolated, synthetic or recombinant nucleic acid of (A) or (B), wherein the sequence identity is over a region of at least about 50, 75, 100, 150, 200, 250, 300, 350, 400, 450, 500, 550, 600, 650, 700, 750, 800, 850, 900, 950, 1000, 1050, 1100, 1150 or more residues, or the full length of a gene or a transcript;
(D) the isolated, synthetic or recombinant nucleic acid of any of (A) to (C), wherein the nucleic acid sequence comprises the sequence of SEQ ID NO:1, SEQ ID NO:3, SEQ ID NO:5, SEQ ID NO:7, SEQ ID NO:9, SEQ ID NO:11, SEQ ID NO:13, SEQ ID NO:15, SEQ ID NO:17, SEQ ID NO:19, SEQ ID NO:21, SEQ ID NO:23, SEQ ID NO:25, and all nucleic acids disclosed in the SEQ ID listing, which include all odd numbered SEQ ID NO:s from SEQ ID NO:1 through SEQ ID NO:108,699;
(E) the isolated, synthetic or recombinant nucleic acid of any of (A) to (D), wherein the nucleic acid sequence encodes a polypeptide having the sequence of SEQ ID NO:1, SEQ ID NO:3, SEQ ID NO:5, SEQ ID NO:7, SEQ ID NO:9, SEQ ID NO:11, SEQ ID NO:13, SEQ ID NO:15, SEQ ID NO:17, SEQ ID NO:19, SEQ ID NO:21, SEQ ID NO:23, SEQ ID NO:25, and all nucleic acids disclosed in the SEQ ID listing, which include all odd numbered SEQ ID NO:s from SEQ ID NO:1 through SEQ ID NO:108,699;
(F) the isolated, synthetic or recombinant nucleic acid of any of (A) to (E), wherein the sequence identities are determined by analysis with a sequence comparison algorithm or by a visual inspection;
(G) the isolated, synthetic or recombinant nucleic acid of (F), wherein the sequence comparison algorithm is a BLAST version 2.2.2 algorithm where a filtering setting is set to blastall -p blastp -d “nr pataa”-F F, and all other options are set to default;
(H) the isolated, synthetic or recombinant nucleic acid of any of (A) to (G), wherein at least one enzymatic activity is one of the enzymatic activities described in Table 1, Table 3 and/or Table 4;
(I) the isolated, synthetic or recombinant nucleic acid of any of (A) to (H), wherein the protein is a structural or binding protein;
(J) the isolated, synthetic or recombinant nucleic acid of any of (A) to (I), wherein the at least one enzymatic activity has aldolase, alpha-galactosidase, amidase, secondary amidase, amylase, catalase, dehalogenase, endoglucanase, epoxide hydrolase, or esterase activity, or has hydrolase, protease, peptidase, glucosidase, glucosidase, intein, isomerase, laccase, lipase, or monooxygenase activity; or has nitroreductase, nitrilase, P450 enzyme, pectate lyase, phosphatase, phospholipase, phytase, polymerase or xylanase activity; or has at least one enzymatic activity in the carotenoid pathway;
(K) the isolated, synthetic or recombinant nucleic acid of any of (A) to (J), wherein the enzyme or protein is thermostable or thermotolerant, or the polypeptide retains enzyme activity, binding activity and/or structural activity under conditions comprising a temperature range from about −100° C. to about −80° C., about −80° C. to about −40° C., about −40° C. to about −20° C., about −20° C. to about 0° C., about 0° C. to about 37° C., about 0° C. to about 5° C., about 5° C. to about 15° C., about 15° C. to about 25° C., about 25° C. to about 37° C., about 37° C. to about 45° C., about 45° C. to about 55° C., about 55° C. to about 70° C., about 70° C. to about 75° C., about 75° C. to about 85° C., about 85° C. to about 90° C., about 90° C. to about 95° C., about 95° C. to about 100° C., about 100° C. to about 105° C., about 105° C. to about 110° C., about 110° C. to about 120° C., or 95° C., 96° C., 97° C., 98° C., 99° C., 100° C., 101° C., 102° C., 103° C., 104° C., 105° C., 106° C., 107° C., 108° C., 109° C., 110° C., 111° C., 112° C., 113° C., 114° C., 115° C. or more; or
(L) the isolated, synthetic or recombinant nucleic acid of any of (A) to (K), where the isolated, synthetic or recombinant nucleic acid encodes a polypeptide having an enzyme activity, binding activity and/or structural activity, wherein the nucleic acid comprises a sequence that hybridizes under stringent conditions to a nucleic acid comprising SEQ ID NO:1, SEQ ID NO:3, SEQ ID NO:5, SEQ ID NO:7, SEQ ID NO:9, SEQ ID NO:11, SEQ ID NO:13, SEQ ID NO:15, SEQ ID NO:17, SEQ ID NO:19, SEQ ID NO:21, SEQ ID NO:23, SEQ ID NO:25, and all nucleic acids disclosed in the SEQ ID listing, which include all odd numbered SEQ ID NO:s from SEQ ID NO:1 through SEQ ID NO:108,699, and the nucleic acid encodes a polypeptide having enzyme activity, binding activity and/or structural activity.

2-18. (canceled)

19. A nucleic acid probe for identifying a nucleic acid encoding a polypeptide with an enzyme activity, binding activity and/or structural activity, wherein the probe comprises:
(a) at least about 10, 15, 20, 25, 30, 35, 40, 45, 50, 55, 60, 65, 70, 75, 80, 85, 90, 95, 100, 150, 200, 250, 300, 350, 400, 450, 500 or more consecutive bases of a sequence comprising SEQ ID NO:1, SEQ ID NO:3, SEQ ID NO:5, SEQ ID NO:7, SEQ ID NO:9, SEQ ID NO:11, SEQ ID NO:13, SEQ ID NO:15, SEQ ID NO:17, SEQ ID NO:19, SEQ ID NO:21, SEQ ID NO:23, SEQ ID NO:25, and all nucleic acids disclosed in the SEQ ID listing, which include all odd numbered SEQ ID NO:s from SEQ ID NO:1 through SEQ ID NO:108,699, wherein the probe identifies the nucleic acid by binding or hybridization; or
(b) a nucleic acid comprising at least about 10 consecutive residues of a nucleic acid sequence having at least 50% sequence identity to SEQ ID NO:1, SEQ ID NO:3, SEQ ID NO:5, SEQ ID NO:7, SEQ ID NO:9, SEQ ID NO:11, SEQ ID NO:13, SEQ ID NO:15, SEQ ID NO:17, SEQ ID NO:19, SEQ ID NO:21, SEQ ID NO:23, SEQ ID NO:25, and all nucleic acids disclosed in the SEQ ID listing, which include all odd numbered SEQ ID NO:s from SEQ ID NO:1 through SEQ ID NO:108,699, wherein the sequence identities are determined by analysis with a sequence comparison algorithm or by visual inspection.

20-22. (canceled)

23. An amplification primer pair for amplifying a nucleic acid encoding a polypeptide having an enzymatic activity or encoding a protein, wherein the primer pair is capable of amplifying a nucleic acid comprising the sequence of claim 1.

24-31. (canceled)

32. An expression cassette, vector, cloning vehicle, bacterial artificial chromosome (BAC), a bacteriophage P1-derived vector (PAC), a yeast artificial chromosome (YAC) or a mammalian artificial chromosome (MAC) comprising a nucleic acid comprising the sequence of claim 1.

33-36. (canceled)

37. A transformed cell comprising a nucleic acid comprising (a) the sequence of claim 1; or (b) the expression cassette, vector, cloning vehicle, bacterial artificial chromosome (BAC), a bacteriophage P1-derived vector (PAC), a yeast artificial chromosome (YAC) or a mammalian artificial chromosome (MAC) of claim 32; or (c) the transformed cell of (a) or (b), wherein the cell is a bacterial cell, a mammalian cell, a fungal cell, a yeast cell, an insect cell or a plant cell.

38-39. (canceled)

40. A transgenic non-human animal or plant or seed., comprising (a) the sequence of claim 1; (b) the transgenic non-human animal of (a), wherein the animal is a mouse, a goat, a rabbit, a sheep, a pig, a cow or a rat; (c) the transgenic plant of (a), wherein the plant is a corn plant, a sorghum plant, a potato plant, a tomato plant, a wheat plant, an oilseed plant, a rapeseed plant, a soybean plant, a rice plant, a barley plant, a grass, or a tobacco plant; or (d) the transgenic seed of (a), wherein the seed is a corn seed, a wheat kernel, an oilseed, a rapeseed, a soybean seed, a palm kernel, a sunflower seed, a sesame seed, a rice, a barley, a peanut or a tobacco plant seed.

41-45. (canceled)

46. An antisense oligonucleotide or double-stranded inhibitory RNA (RNAi) molecule comprising (a) a nucleic acid sequence complementary to or capable of hybridizing under stringent conditions to the sequence of claim 1; or (b) the double-stranded inhibitory RNA (RNAi) molecule of (a), wherein the RNAi is an siRNA or an miRNA molecule, or the RNAi is about 15, 16, 17, 18, 19, 20, 21, 22, 23, 24, 25 or more duplex nucleotides in length, wherein optionally the RNAi is an siRNA or an miRNA molecule.

47-51. (canceled)

52. An isolated, synthetic or recombinant polypeptide:
a) (a) comprising an amino acid sequence having at least about 50%, 51%, 52%, 53%, 54%, 55%, 56%, 57%, 58%, 59%, 60%, 61%, 62%, 63%, 64%, 65%, 66%, 67%, 68%, 69%, 70%, 71%, 72%, 73%, 74%, 75%, 76%, 77%, 78%, 79%, 80%, 81%, 82%, 83%, 84%, 85%, 86%, 87%, 88%, 89%, 90%, 91%, 92%, 93%, 94%, 95%, 96%, 97%, 98%, 99%, or more or complete (amino acid) sequence identity to SEQ ID NO:2, SEQ ID NO:4, SEQ ID NO:6, SEQ ID NO:8, SEQ ID NO:10, SEQ ID NO:12, SEQ ID NO:14, SEQ ID NO:16, SEQ ID NO:18, SEQ ID NO:20, SEQ ID NO:22, SEQ ID NO:24, and all polypeptides disclosed in the SEQ ID listing, which include all even numbered SEQ ID NO:s from SEQ ID NO:2 through SEQ ID NO:108,699, over a region of at least about 20, 30, 40, 50, 75, 100, 150, 200, 250, 300, 350, 400, 450, 500, 550, 600, 650, 700 or more residues, or over the full length of the polypeptide, wherein optionally the sequence identities are determined by analysis with a sequence comparison algorithm or by a visual inspection;
(b) encoded by a nucleic acid having at least about 50%, 51%, 52%, 53%, 54%, 55%, 56%, 57%, 58%, 59%, 60%, 61%, 62%, 63%, 64%, 65%, 66%, 67%, 68%, 69%, 70%, 71%, 72%, 73%, 74%, 75%, 76%, 77%, 78%, 79%, 80%, 81%, 82%, 83%, 84%, 85%, 86%, 87%, 88%, 89%, 90%, 91%, 92%, 93%, 94%, 95%, 96%, 97%, 98%, 99%, or more sequence identity to the sequence of SEQ ID NO:1, SEQ ID NO:3, SEQ ID NO:5, SEQ ID NO:7, SEQ ID NO:9, SEQ ID NO:11, SEQ ID NO:13, SEQ ID NO:15, SEQ ID NO:17, SEQ ID NO:19, SEQ ID NO:21, SEQ ID NO:23, SEQ ID NO:25, and all nucleic acids disclosed in the SEQ ID listing, which include all odd numbered SEQ ID NO:s from SEQ ID NO:1 through SEQ ID NO:108,699, over a region of at least about 20, 30, 40, 50, 75, 100, 150, 200, 250, 300, 350, 400, 450, 500, 550, 600, 650, 700 or more residues, or encoded by a nucleic acid capable of hybridizing under stringent conditions to the sequence of SEQ ID NO:1, SEQ ID NO:3, SEQ ID NO:5, SEQ ID NO:7, SEQ ID NO:9, SEQ ID NO:11, SEQ ID NO:13, SEQ ID NO:15, SEQ ID NO:17, SEQ ID NO:19, SEQ ID NO:21, SEQ ID NO:23, SEQ ID NO:25, and all nucleic acids disclosed in the SEQ ID listing, which include all odd numbered SEQ ID NO:s from SEQ ID NO:1 through SEQ ID NO:108,699, or encoded by the nucleic acid (polynucleotide) of claim 1;
(c) the amino acid sequence of (a) or (b), and comprising at least one amino acid residue conservative substitution, and the polypeptide retains an enzyme activity, binding activity and/or structural activity;
(d) the amino acid sequence of (c), wherein the conservative substitution comprises replacement of an aliphatic amino acid with another aliphatic amino acid; replacement of a serine with a threonine or vice versa; replacement of an acidic residue with another acidic residue; replacement of a residue bearing an amide group with another residue bearing an amide group; exchange of a basic residue with another basic residue; or, replacement of an aromatic residue with another aromatic residue, or a combination thereof, and optionally the aliphatic residue comprises Alanine, Valine, Leucine, Isoleucine or a synthetic equivalent thereof; the acidic residue comprises Aspartic acid, Glutamic acid or a synthetic equivalent thereof; the residue comprising an amide group comprises Aspartic acid, Glutamic acid or a synthetic equivalent thereof; the basic residue comprises Lysine, Arginine or a synthetic equivalent thereof; or, the aromatic residue comprises Phenylalanine, Tyrosine or a synthetic equivalent thereof;
(e) the polypeptide of (a), (b), (c) or (d) having an enzyme activity, binding activity and/or structural activity but lacking a signal sequence, a prepro domain, a dockerin domain, and/or a carbohydrate binding module (CBM), wherein optionally the carbohydrate binding module (CBM) comprises, or consists of, a xylan binding module, a cellulose binding module, a lignin binding module, a xylose binding module, a mannanse binding module, a xyloglucan-specific module and/or a arabinofuranosidase binding module;
(f) the polypeptide of (a), (b), (c), (d) or (e) having an enzyme activity, binding activity and/or structural activity further comprising a heterologous sequence;
(g) the polypeptide of (f), wherein the heterologous sequence comprises, or consists of: (i) a heterologous signal sequence, a heterologous carbohydrate binding module, a heterologous dockerin domain, a heterologous catalytic domain (CD), or a combination thereof; (ii) the sequence of (ii), wherein the heterologous signal sequence, carbohydrate binding module or catalytic domain (CD) is derived from a heterologous lignocellulosic enzyme; and/or, (iii) a tag, an epitope, a targeting peptide, a cleavable sequence, a detectable moiety or an enzyme;
(h) the polypeptide of (g), wherein the heterologous carbohydrate binding module (CBM) comprises, or consists of, a xylan binding module, a cellulose binding module, a lignin binding module, a xylose binding module, a mannan binding module, a xyloglucan-specific module and/or a arabinofuranosidase binding module; or
(i) polypeptide of (g), wherein the heterologous signal sequence targets the encoded protein to a vacuole, the endoplasmic reticulum, a chloroplast or a starch granule;
(B) the isolated, synthetic or recombinant polypeptide of (A), wherein the sequence identity is over a region of at least about at least about 51%, 52%, 53%, 54%, 55%, 56%, 57%, 58%, 59%, 60%, 61%, 62%, 63%, 64%, 65%, 66%, 67%, 68%, 69%, 70%, 71%, 72%, 73%, 74%, 75%, 76%, 77%, 78%, 79%, 80%, 81%, 82%, 83%, 84%, 85%, 86%, 87%, 88%, 89%, 90%, 91%, 92%, 93%, 94%, 95%, 96%, 97%, 98%, 99%, or more, or is 100% sequence identity;
(C) the isolated, synthetic or recombinant polypeptide of (A) or (B), wherein the sequence identity is over a region of at least about 10, 15, 20, 25, 30, 35, 40, 45, 50, 75, 100, 150, 200, 250, 300, 350, 400, 450, 500, 550, 600, 650, 700, 750, 800, 850, 900, 950, 1000, 1050 or more residues, or the full length of an enzyme;
(D) the isolated, synthetic or recombinant polypeptide of any of (A) to (C), wherein the polypeptide has the sequence of SEQ ID NO:2, SEQ ID NO:4, SEQ ID NO:6, SEQ ID NO:8, SEQ ID NO:10, SEQ ID NO:12, SEQ ID NO:14, SEQ ID NO:16, SEQ ID NO:18, SEQ ID NO:20, SEQ ID NO:22, SEQ ID NO:24, and all polypeptides disclosed in the SEQ ID listing, which include all even numbered SEQ ID NO:s from SEQ ID NO:2 through SEQ ID NO:108,699;
(E) the isolated, synthetic or recombinant polypeptide of any of (A) to (D), wherein the polypeptide has an enzymatic activity or encodes a protein, or the polypeptide has an enzymatic activity comprising aldolase, alpha-galactosidase, amidase, secondary amidase, amylase, catalase, dehalogenase, endoglucanase, epoxide hydrolase, or esterase activity; or, the polypeptide has an enzymatic activity in a carotenoid pathway; or the polypeptide has an enzymatic activity comprising hydrolase, glucosidase, glycosidase, intein, isomerase, laccase, lipase, monooxygenase activity, nitroreductase, nitrilase, P450 enzyme, pectate lyase, phosphatase, phospholipase, phytase, polymerase or xylanase activity;
(F) the isolated, synthetic or recombinant polypeptide of any of (A) to (E), wherein the enzyme or the protein is thermostable or thermotolerant, or the polypeptide retains enzymatic activity under conditions comprising a temperature range of between about 1° C. to about 5° C., between about 5° C. to about 15° C., between about 15° C. to about 25° C., between about 25° C. to about 37° C., between about 37° C. to about 95° C., between about 55° C. to about 85° C., between about 70° C. to about 95° C., between about 70° C. to about 75° C., or between about 90° C. to about 95° C., or, the polypeptide retains enzymatic activity after exposure to a temperature in the range from between about 1° C. to about 5° C., between about 5° C. to about 15° C., between about 15° C. to about 25° C., between about 25° C. to about 37° C., between about 37° C. to about 95° C., between about 55° C. to about 85° C., between about 70° C. to about 0.75° C., or between about 90° C. to about 95° C., or more;
(G) the isolated, synthetic or recombinant polypeptide of any of (A) to (F), lacking a signal sequence or a prepro sequence; or having a heterologous signal sequence or a heterologous prepro sequence;
(H) the isolated, synthetic or recombinant polypeptide of any of (A) to (G), wherein the enzymatic activity comprises a specific activity at about 37° C. in the range from about 100 to about 1000 units per milligram of protein, from about 500 to about 750 units per milligram of protein, from about 500 to about 1200 units per milligram of protein, or from about 750 to about 1000 units per milligram of protein, or the thermotolerance comprises retention of at least half of the specific activity of the enzyme at 37° C. after being heated to an elevated temperature, or the thermotolerance comprises retention of specific activity at 37° C. in the range from about 500 to about 1200 units per milligram of protein after being heated to an elevated temperature;
(I) the isolated, synthetic or recombinant polypeptide of any of (A) to (H), the polypeptide comprises at least one glycosylation site, the polypeptide comprises at least one N-linked glycosylation site; or
(J) the isolated, synthetic or recombinant polypeptide of any of (A) to (I), wherein the polypeptide retains an enzymatic activity under conditions comprising about pH 6.5, pH 6, pH 5.5, pH 5, pH 4.5, pH 4.0, pH 3.5, pH 3.0 or less; or the polypeptide retains an enzymatic activity under conditions comprising about pH 7.5, pH 8.0, pH 8.5, pH 9, pH 9.5, pH 10, pH 10.5, pH 11.0, pH 11.5, pH 12.0, pH 12.5 or more.

53-72. (canceled)

73. A protein preparation comprising a polypeptide as set forth in claim 52, wherein the protein preparation comprises a liquid, a solid or a gel.

74. A heterodimer or homodimer comprising (a) a polypeptide as set forth in claim 52 and a second domain; (b) the heterodimer of (a), wherein the second domain is a polypeptide and the heterodimer is a fusion protein, or the second domain is an epitope or a tag.

75-77. (canceled)

78. An immobilized polypeptide or nucleic acid or an array comprising a polypeptide or nucleic acid, wherein the polypeptide comprises the sequence of claim 52, or the polypeptide is immobilized on a cell, a metal, a resin, a polymer, a ceramic, a glass, a microelectrode, a graphitic particle, a bead, a gel, a plate, an array or a capillary tube, or the array comprises an immobilized nucleic acid as set forth in claim 1.

79-81. (canceled)

82. An isolated, synthetic or recombinant antibody that specifically binds to a polypeptide as set forth in claim 52.

83-143. (canceled)

144. An isolated, synthetic or recombinant signal sequence (signal peptide) comprising, or consisting of, the sequence of residues 1 to 14, 1 to 15, 1 to 16, 1 to 17, 1 to 18, 1 to 19, 1 to 20, 1 to 21, 1 to 22, 1 to 23, 1 to 24, 1 to 25, 1 to 26, 1 to 27, 1 to 28, 1 to 28, 1 to 30, 1 to 31, 1 to 32, 1 to 33, 1 to 34, 1 to 35, 1 to 36, 1 to 37, 1 to 38, 1 to 40, 1 to 41, 1 to 42, 1 to 43, 1 to 44, 1 to 45, 1 to 46, or 1 to 47, of SEQ ID NO:2, SEQ ID NO:4, SEQ ID NO:6, SEQ ID NO:8, SEQ ID NO:10, SEQ ID NO:12, SEQ ID NO:14, SEQ ID NO:16, SEQ ID NO:18, SEQ ID NO:20, SEQ ID NO:22, SEQ ID NO:24, and all polypeptides disclosed in the SEQ ID listing, which include all even numbered SEQ ID NO:s from SEQ ID NO:2 through SEQ ID NO:108,699; or comprising, or consisting of the signal sequence (signal peptide) sequences set forth in Table 2.

145. A chimeric polypeptide comprising (a) at least a first domain comprising signal peptide (SP) having the sequence of claim 144, and at least a second domain comprising a heterologous polypeptide or peptide, wherein the heterologous polypeptide or peptide is not naturally associated with the signal peptide (SP); or (b) the chimeric polypeptide of (a), wherein the heterologous polypeptide or peptide is not an enzyme; or (c) the chimeric polypeptide of (a), wherein the heterologous polypeptide or peptide is amino terminal to, carboxy terminal to or on both ends of the signal peptide (SP) or an enzyme catalytic domain (CD).

146-156. (canceled)

157. A drink or beverage, or food, or food or feed supplement, or nutritional supplement, comprising at least one polypeptide as set forth in claim 52.

158-164. (canceled)

165. An edible enzyme delivery matrix comprising a thermostable recombinant enzyme or protein having the sequence of claim 56.

166-188. (canceled)

189. A method for making bioethanol, biomethanol, biopropanol and/or, bio-butanol, or a biodiesel, comprising
(A) contacting a composition comprising a cellooligsaccharide, an arabinoxylan oligomer, a lignin, a lignocellulose, a xylan, a glucan, a cellulose or a fermentable sugar with the polypeptide as set forth in claim 52;
(B) the method of (A), wherein the composition of comprises a plant, plant product or plant derivative, and optionally the plant or plant product comprises cane sugar plants or plant products, beets or sugarbeets, wheat, corn, soybeans, potato, rice or barley,
(C) the method of (A) or (B), wherein the polypeptide has activity comprising lignocellulosic enzyme and/or cellulase, endoglucanase, cellobiohydrolase, beta-glucosidase, xylanase, mannanse, β-xylosidase and/or arabinofuranosidase activity;
(D) the method of (A), (B) or (C), wherein the plant is a monocot or dicot, or the plant is a monocot corn, sugarcane, rice, wheat, barley, switchgrass or Miscanthus; or the plant is a dicot oilseed crop, soy, canola, rapeseed, flax, cotton, palm oil, sugar beet, peanut, tree, poplar or lupine; or
(E) the method of (A), (B), (C) or (D), further comprising processing and/or formulating the bioethanol, biomethanol, biopropanol and/or, bio-butanol, or biodiesel, as a liquid fuel, diesel and/or a gas fuel, wherein optionally the fuel comprises a biofuel, a biodiesel, and/or a synthetic fuel, or the fuel comprises bioethanol, biomethanol, biopropanol and/or, bio-butanol; and/or a gasoline-ethanol, -methanol, -butanol and/or -propanol mix.

190. A method for processing a biomass material comprising a cellooligsaccharide, an arabinoxylan oligomer, a lignin, a lignocellulose, a xylan, a glucan, a cellulose or a fermentable sugar comprising contacting the composition with the polypeptide as set forth in claim 52, wherein optionally the biomass material comprising lignocellulose is derived from an agricultural crop, is a byproduct of a food or a feed production, is a lignocellulosic waste product, or is a plant residue or a waste paper or waste paper product, and optionally the polypeptide has activity comprising lignocellulosic enzyme and/or cellulase, endoglucanase, cellobiohydrolase, beta-glucosidase, xylanase, mannanse, β-xylosidase and/or arabinofuranosidase activity, and optionally the plant residue comprise stems, leaves, hulls, husks, corn or corn cobs, corn stover, hay, straw, wood, wood chips, wood pulp, wood waste and sawdust, and optionally the paper waste comprises discarded or used photocopy paper, computer printer paper, notebook paper, notepad paper, typewriter paper, newspapers, magazines, cardboard and paper-based packaging materials,
and optionally the processing of the biomass material generates a biodiesel, a bioalcohol, a bioethanol, biomethanol, biobutanol or biopropanol.

The application's sequence listing, which the Patent Office published only in electronic form, follows.

SEQUENCE LISTING (108699 sequences)

SEQ ID NO: 1 - DNA, 555 bp, Unknown
  Obtained from environmental sample
  misc_feature (1)..(555): n is a, c, g, or t
gtggacggcgacacctccaccaacgacatggtattggtcatggccaacggagcgagcggcgtggagatcaaaagcggcgtgacggtcgataagggcctgcaaaacgccttcgaggagggcctgttcgccgtctgcaacgacctctgcaaacagatagccgccgacggcgagggcgcaacaaagcgcgtggagatcaacgtgaccggcgcgagaaacgaagccgaagccaaagccgccgccaaagccgtggccacctccaacctgaccaagtgcgccctattcggaaacgaccccaactggggccgcatagcctgcgccgtgggctactccggagcaaagttctccgagacaaaaatgtcgataaaactctgcggcatagaggtcttcagaaacctgcaaccggtcaagttcgacgagaagaaggcgcatacgctgatgaaaaagaaggtcgttgtgatcgacatcgatttaggcgtagggagcaaagaggccaccgcgcatacctgcgacttcagttacgactatgtcaagatcaatgcggagtataggacgtaa

SEQ ID NO: 2 - protein, 184 aa, Unknown
  Obtained from environmental sample
  DOMAIN (1)...(184): ArgJ family
  misc_feature (1)..(184): Xaa is any amino acid
MDGDTSTNDMVLVMANGASGVEIKSGVTVDKGLQNAFEEGLFAVCNDLCKQIAADGEGATKRVEINVTGARNEAEAKAAAKAVATSNLTKCALFGNDPNWGRIACAVGYSGAKFSETKMSIKLCGIEVFRNLQPVKFDEKKAHTLMKKKVVVIDIDLGVGSKEATAHTCDFSYDYVKINAEYRT

SEQ ID NO: 3 - DNA, 741 bp, Unknown
  Obtained from environmental sample
  misc_feature (1)..(741): n is a, c, g, or t
gtgataggaaatttaaaagacacccttaagtgcctgttgtcaaaacttccggcccgtcttgaaaccgaatgggacggcgaaattgacaaatggaaaacccatctgcctcaaacttatacgcatgaggttacgtttgccaagaacgcccttcacccccgttttatcattgaagaaaccgcaaaggcgctggggcctgaaacaatcgccgttaccgacgtgggccagcatcagatgtgggccgcgcagtttttccccgcggaaaagcccagatcatttataagctcgggcgggcttggaactatgggcttcggactcggcgcggcctgcggcgcgaaaaccgccaacccaaaaaagcccgtcgtgctttttacaggggacggcagtttcagaatgaactgcgcggagatggcgaccttaaccaacaataaaatcccgcttttgataattgtctttaacaacggggttctcggcatggtaaggcagtggcagagttttttttacgaaaaaagatactcgcaaacaacccttggagcggccccggactttatcaaactctgcgaggcatacggcattacgggcttccgcgccggcaatagggaatctttcaggaaggcgctccacgccgccctggaagaactgtcagccggaaaagcggcgctgattgaggccgacatagaccgcgacgaanacgtcctgccaatggtcccgtcgggtaagcccatagacgagcagattttgtag

SEQ ID NO: 4 - protein, 246 aa, Unknown
  Obtained from environmental sample
  DOMAIN (72)...(223): Thiamine pyrophosphate enzyme, C-terminal TPP binding domain
  misc_feature (1)..(246): Xaa is any amino acid
MIGNLKDTLKCLLSKLPARLETEWDGEIDKWKTHLPQTYTHEVTFAKNALHPRFIIEETAKALGPETIAVTDVGQHQMWAAQFFPAEKPRSFISSGGLGTMGFGLGAACGAKTANPKKPVVLFTGDGSFRMNCAEMATLTNNKIPLLIIVFNNGVLGMVRQWQSFFYEKRYSQTTLGAAPDFIKLCEAYGITGFRAGNRESFRKALHAALEELSAGKAALIEADIDRDEXVLPMVPSGKPIDEQIL

SEQ ID NO: 5 - DNA, 372 bp, Unknown
  Obtained from environmental sample
  misc_feature (1)..(372): n is a, c, g, or t
gtgatgatccgcgccctgactctggaatgtatttccggccacatgggctcccgcgccattcattcccttgaagcgggcgtgttgcagatcgctgacggctgcgacatgaccaagggccgggctcgcatccccctcgcgatcggacaggcgaaagtcggtcacattcaccagtattcggcgagttccattgaggaagtccgcattgacgcgggaaaggaaaaacccatacgcattgacgtccacatgtccaacgacgctggtttctttcaggttgaggaagtgttgttaaaaaagatcgccggcagcacggcaaagccctttattgaattatatgcccaggtgcgggaagaagcgccgcatcaatatttatga

SEQ ID NO: 6 - protein, 123 aa, Unknown
  Obtained from environmental sample
  misc_feature (1)..(123): Xaa is any amino acid
MMIRALTLECISGHMGSRAIHSLEAGVLQIADGCDMTKGRARIPLAIGQAKVGHIHQYSASSIEEVRIDAGKEKPIRIDVHMSNDAGFFQVEEVLLKKIAGSTAKPFIELYAQVREEAPHQYL

SEQ ID NO: 7 - DNA, 879 bp, Unknown
  Obtained from environmental sample
  misc_feature (1)..(879): n is a, c, g, or t
gtgtatctgaacggtgaatactggggaccatataactttcaggaaaggcacagtgataatcatactgaatataaatacggcgttaaaaaagaaaatgttatctctgttgataacggagaattggacgacggcaatccgggggaagattcgttcttctggaaaatggttggtatggcggacaatgatatgtccgttccggcaaactataacgctttttgcgctcttgttgatattgataactttattgattattgggcttcgcaaatttacatttacaatgaagattggccgcaaaataatttcaggatatggaggacgcgcagcgcggagtccggcagcccctatggcgacacaaaatggcgctggcagatgtttgatactgaattcgcgatgggaatttacagcggcggcggattaacagacaacgaggaaaataaagacgcgttcgcgaaaatcctctccggaaagaataaagatcattataacaacaaactattcaaatctttattggcaagtcctgaattcaacaaaaaatttgtcaataccatgatggatctttataacgcgaattttcatcccgataattatttacccaaattgaatagttatgagactgtgtacagaccgttaatgaaaggatattacgacagatggggttatcccggcgacaatgggaactggacctcggtttatcagaacaaggcagatgacgctaaaaggtatctgaaagacataagagacgcgatggtttatcattatttgccaacttatttcagcggtatcggcatttccgcggataatttgcgcgatgtcaccgtctccgtgacaggcgtatccggcgcggcaataaaagtaactcaaaactctcggccaatctga

SEQ ID NO: 8 - protein, 292 aa, Unknown
  Obtained from environmental sample
  misc_feature (1)..(292): Xaa is any amino acid
MYLNGEYWGPYNFQERHSDNHTEYKYGVKKENVISVDNGELDDGNPGEDSFFWKMVGMADNDMSVPANYNAFCALVDIDNFIDYWASQIYIYNEDWPQNNFRIWRTRSAESGSPYGDTKWRWQMFDTEFAMGIYSGGGLTDNEENKDAFAKILSGKNKDHYNNKLFKSLLASPEFNKKFVNTMMDLYNANFHPDNYLPKLNSYETVYRPLMKGYYDRWGYPGDNGNWTSVYQNKADDAKRYLKDIRDAMVYHYLPTYFSGIGISADNLRDVTVSVTGVSGAAIKVTQNSRPI

SEQ ID NO: 9 - DNA, 654 bp, Unknown
  Obtained from environmental sample
  misc_feature (1)..(654): n is a, c, g, or t
gtggctatcttcggcgcccccaaaacgctggaaaattcagccgcgagcggcgtcagggcggcgatacggatggttaaggcccttccccaggtggacacctcaagcattaccctgccggaggggggctttggcgccggtatcggtcttaattgcggcgaatgtgtcgtcggcaacatcggctttcagaataaaatggactacacggtgataggcgacaccgtcaatcttgcctcgcggcttgaggggatcaccaaatattatcatcagacgatcatcgtatcggaatatatttataacgcggcaaaagacgattttattttccgcaaggcggacagcgtgcgcgtaaagggcaaagatcagccggtggggctttacacggtgtacgccgcttttcgcggtgaagaagccgaaggagtaccaccggttctggttatagaccgggaagctctggatcaatacaacaaggggcttaaactatacggcatgcgtgaatttgaaactgcgaaacaatattttaccatggccctgtccatcgaagaaaaagccggcaagtcagattatctggcgtctttgtacctttcccgaattgaggaatttctggtaacccctcccccgccgaattgngacgcgacgattacgatgacggagaagtaa

SEQ ID NO: 10 - protein, 217 aa, Unknown
  Obtained from environmental sample
  DOMAIN (1)...(129): Adenylate and Guanylate cyclase catalytic domain
  misc_feature (1)..(217): Xaa is any amino acid
MAIFGAPKTLENSAASGVRAAIRMVKALPQVDTSSITLPEGGFGAGIGLNCGECVVGNIGFQNKMDYTVIGDTVNLASRLEGITKYYHQTIIVSEYIYNAAKDDFIFRKADSVRVKGKDQPVGLYTVYAAFRGEEAEGVPPVLVIDREALDQYNKGLKLYGMREFETAKQYFTMALSIEEKAGKSDYLASLYLSRIEEFLVTPPPPNXDATITMTEK

SEQ ID NO: 11 - DNA, 552 bp, Unknown
  Obtained from environmental sample
  misc_feature (1)..(552): n is a, c, g, or t
atgagccatgagcccccggcttacaacgaacaactgattgttgagcagattgtagcgggacagaaggacctgttccggcttttagtgcggcgttaccagcagcctgtgcatagcatgggcatggggtttttccgcaatgccgaggacgcttccgattttacgcaggaagttttcctgaaggtttaccggaacctgtcccgttttgaaggcaggtcgcgtttttcaacatggctgtacaagatcgcctataacacggcgataaatgatataaaccggaagaaagaataccggagcctggcggaagaaaatcccgccgtggaagcgggcgatcatgaaacgccggagcgtatcctgattcgcagcgcggcgcgtgaggcggttctggattcattgcgggaattgccgcagaggtacaggatctgcgttgatttgtttttcttctacggctgttcgtatcaggagattgaggcgattaccggttttccggtaaatacgatcaaatcccatgtgttcagggcgaagaaactgctgagggaaaaacttggttcttag

SEQ ID NO: 12 - protein, 183 aa, Unknown
  Obtained from environmental sample
  DOMAIN (130)...(179): Sigma-70, region 4
  misc_feature (1)..(183): Xaa is any amino acid
MSHEPPAYNEQLIVEQIVAGQKDLFRLLVRRYQQPVHSMGMGFFRNAEDASDFTQEVFLKVYRNLSRFEGRSRFSTWLYKIAYNTAINDINRKKEYRSLAEENPAVEAGDHETPERILIRSAAREAVLDSLRELPQRYRICVDLFFFYGCSYQEIEAITGFPVNTIKSHVFRAKKLLREKLGS

SEQ ID NO: 13 - DNA, 753 bp, Unknown
  Obtained from environmental sample
  misc_feature (1)..(753): n is a, c, g, or t
ttgcgcccgctgtttctttcgctctgcgaacaggacggtctttccgtgcaatgggtggagagtaaaagtcaaatccgtttttgttacacgttgctttccgatgaggatggttctgttactgaattaatcgaagaatcggaaactgtcggtgacggaactgaggagcggttgttggaaaagtttgatgatattcttgctcacaccgcagacttgagctgggttataatttccggcacaaaagcggcggggttttccggcgcggtgattcccactatgacaaaaagagcgaaagaaaagggattgaaagttattcttgatataaaggggaaagatttaacggaaagtctgaaatatcagccggatattgtgaagccgaatcttattgaatttgccgcggactttgcgcctgagttaataaagaataatgaattgataacgatagatgattccgcaaaggaacggataaaatccgctgtgttggaaatggcgcagaaaaacaaatgcggcgttatccttaccaatggcagccggaaaattttcgcggctgaaacggacaagttctttgaaattgaagttcaatctgtgaaagcggtaaattccaccggctgcggagacgcgtttaccgctgggcttgccgccgcgctggaacctttggttccgggagaaggagcgagttttcgcgaagcgattagcgagggctctagatgcggcgcgctgaatgccgcccttgtaagaccgggcgttgtgcggtga

SEQ ID NO: 14 - protein, 250 aa, Unknown
  Obtained from environmental sample
  misc_feature (1)..(250): Xaa is any amino acid
MRPLFLSLCEQDGLSVQWVESKSQIRFCYTLLSDEDGSVTELIEESETVGDGTEERLLEKFDDILAHTADLSWVIISGTKAAGFSGAVIPTMTKRAKEKGLKVILDIKGKDLTESLKYQPDIVKPNLIEFAADFAPELIKNNELITIDDSAKERIKSAVLEMAQKNKCGVILTNGSRKIFAAETDKFFEIEVQSVKAVNSTGCGDAFTAGLAAALEPLVPGEGASFREAISEGSRCGALNAALVRPGVVR

SEQ ID NO: 15 - DNA, 336 bp, Unknown
  Obtained from environmental sample
  misc_feature (1)..(336): n is a, c, g, or t
atgggtagattaaccaaagctatgcaggaagaaggagcagattataggaatgatactcctgatagatggtggacattggggaaaaatgggcggacaaaaggatctatccattctgatatttggcatggaacagctatagaacttgcagagtgtggtattattgctatatacccagtaagtggatggtggaaaaacaacaaaaaagacaaaacctctattgataatattgcatattatagtttacttgtatctataaagacttctgttgatattgacttaatgactcctatagaagatataattgcgaatgcaataaagacagatattgaagtataa

SEQ ID NO: 16 - protein, 111 aa, Unknown
  Obtained from environmental sample
  misc_feature (1)..(111): Xaa is any amino acid
MGRLTKAMQEEGADYRNDTPDRWWTLGKNGRTKGSIHSDIWHGTAIELAECGIIAIYPVSGWWKNNKKDKTSIDNIAYYSLLVSIKTSVDIDLMTPIEDIIANAIKTDIEV

SEQ ID NO: 17 - DNA, 603 bp, Unknown
  Obtained from environmental sample
  misc_feature (1)..(603): n is a, c, g, or t
ttgggactttcggtttctgatggaaaaactatttttaaaggagtgccgattccttttgtaatggaactgcccaattaccgttttccttccgttaaaaccgtattacagctttgttgggataaagcgaaagattttcttcaaagggcatttacgataatttttatggcgactgtagtgatatggtttttgcaatcctttgatatgcgattgaactatgttgaaggcagcgaaggctcgttgctttctacaatcgggcgtttattcagcgggatatttattccattgggtttttcagactggcgaatttccacggcgctgataacaggctttaccgcaaaggaagccgtcataagcacattggcggtattaatgggagcgaatgtcgcggaacttgaaaatactctgcatacgttgttttcttctttaagcgcgttcagttttctggtgtttacgttgttatacactccatgtgtggcggcggtagcgacagtgaaacgcgaatttggcagtataaaaggtttgatttttatcattgtgtaccagaccgctatagcttggcttgccgctttttgtgtgtatcaggttgggtgtttgtttgtatag

SEQ ID NO: 18 - protein, 200 aa, Unknown
  Obtained from environmental sample
  DOMAIN (46)...(172): Nucleoside recognition
  misc_feature (1)..(200): Xaa is any amino acid
MGLSVSDGKTIFKGVPIPFVMELPNYRFPSVKTVLQLCWDKAKDFLQRAFTIIFMATVVIWFLQSFDMRLNYVEGSEGSLLSTIGRLFSGIFIPLGFSDWRISTALITGFTAKEAVISTLAVLMGANVAELENTLHTLFSSLSAFSFLVFTLLYTPCVAAVATVKREFGSIKGLIFIIVYQTAIAWLAAFCVYQVGCLFV

SEQ ID NO: 19 - DNA, 582 bp, Unknown
  Obtained from environmental sample
  misc_feature (1)..(582): n is a, c, g, or t
atgcaagcaaagaagaaagccgcgaaaaagacctataagtcgtcggccaagaaaaagagcgttccgaccctcaacaagattacggttgaggatttagccaccgccctcgtccacgagttgactagaaatatgggcggccttaacaatagtttcggcactcttgtcgaggtcgtcctcatacccaaaatacgcgccgacataaacgctatcggtaagcacacttttaatagggtattggtagacaaaaaggtcagcgctctcgtcgccggtgaaaagaacaccataggcgagatagatatgtttttattcagcgacgcagacgccgaggcaatggctgtcgaaataaaggcgcaccttaatacaaaccatgtggaagaacgtttaaagcggttacagaaattccgcgactacgaagaagaggccgagatcaaaggcaaaaaacttttcggagcggtggccgccatatatatcgatccgagggtcaaagctttcgccttaaaaaatggcctatacgtcatagagatccacgaggaagagaacaaactcgacatagaaaaacccgacacctgccggacgtggtaa

SEQ ID NO: 20 - protein, 193 aa, Unknown
  Obtained from environmental sample
  misc_feature (1)..(193): Xaa is any amino acid
MQAKKKAAKKTYKSSAKKKSVPTLNKITVEDLATALVHELTRNMGGLNNSFGTLVEVVLIPKIRADINAIGKHTFNRVLVDKKVSALVAGEKNTIGEIDMFLFSDADAEAMAVEIKAHLNTNHVEERLKRLQKFRDYEEEAEIKGKKLFGAVAAIYIDPRVKAFALKNGLYVIEIHEEENKLDIEKPDTCRTW

SEQ ID NO: 21 - DNA, 525 bp, Unknown
  Obtained from environmental sample
  misc_feature (1)..(525): n is a, c, g, or t
ttgagaaacagagggaatacaaaacggaagaaaaactccccgtctcctccgctctgccccttcattgcggaatatacaattgaagcgtcgctggttttatactataccggcgtttcaagggatagcgcgaatattattaacgaacaaattaagcatacgcagaaaggcgacgctaaaaatattgaaagcatgcacgaaatgaaaaaacagtcactcattatgaaagaagccctgttaaaaggggattttaacagcttctccggctgccttttgaacggctggcttgcgaagagaaacgcggccgcttcgattaccaattcatttttagatgaattgtatcaatacgcgctcgaaaatggcgcggaatccgcaaaaatttcaggcgcgggcggcggaggcttcatgatgatatactgtaacccctgcaagagaatcgcgctcattcgggcattaaaagaaagacagggaatggtattagcgcccagctttacagaaataggaacacaggcgtggcgtctgatttaa

SEQ ID NO: 22 - protein, 174 aa, Unknown
  Obtained from environmental sample
  DOMAIN (74)...(158): GHMP kinases C terminal
  misc_feature (1)..(174): Xaa is any amino acid
MRNRGNTKRKKNSPSPPLCPFIAEYTIEASLVLYYTGVSRDSANIINEQIKHTQKGDAKNIESMHEMKKQSLIMKEALLKGDFNSFSGCLLNGWLAKRNAAASITNSFLDELYQYALENGAESAKISGAGGGGFMMIYCNPCKRIALIRALKERQGMVLAPSFTEIGTQAWRLI

SEQ ID NO: 23 - DNA, 783 bp, Unknown
  Obtained from environmental sample
  misc_feature (1)..(783): n is a, c, g, or t
gtggaagcgccgatctccaaagcgtcggcaaaccagcgcaagggacgcgccgggcgcacctgcgaggggaactgttaccggctgtacgcgcggggggattttgaagaacgcccgcaatttaccaccgaggagatattccgcacggatctttccgaggtaatattgaggatgtccgaccttggaatcaccgattttgaaaattttgactttatctcgacgcccgggagggacgggcttgtcgccggaatagaaacattgaatctgcttcacgcccttgagagcgaccgcagtctttccaacatcggtaaaatgatgacggaattcccccttgcgccccgccagtcaaggatcattgtggaggcgatcctcaattatcccaaagtgctccgcgagacgctgattgcggcggcgtttctttccacgcaaagcccccatatcctgccgcccggagaagagatcgaagcgcgcaaggcccacagccgtttccgtgatgatcatggggattttgtttcatatctcaaaatcttcaaagcctactgtgattcttcaaacaaggcgaaattctgcgagagaaattatcttgacgagaaggcgatggcggagattgtgaacgtggtcgcccagcttgaagaaattctggcgaacctgaaaatccccgtgttagaagggggtcatgttgaagattacctctactgtataagcatggggatgatccagttcgtctgcgtccgcgagggaagcaagcacggccatgtcaaaaaagcgtcacctaccgcagcctga

SEQ ID NO: 24 - protein, 260 aa, Unknown
  Obtained from environmental sample
  DOMAIN (81)...(173): Helicase associated domain (HA2)
  misc_feature (1)..(260): Xaa is any amino acid
MEAPISKASANQRKGRAGRTCEGNCYRLYARGDFEERPQFTTEEIFRTDLSEVILRMSDLGITDFENFDFISTPGRDGLVAGIETLNLLHALESDRSLSNIGKMMTEFPLAPRQSRIIVEAILNYPKVLRETLIAAAFLSTQSPHILPPGEEIEARKAHSRFRDDHGDFVSYLKIFKAYCDSSNKAKFCERNYLDEKAMAEIVNVVAQLEEILANLKIPVLEGGHVEDYLYCISMGMIQFVCVREGSKHGHVKKASPTAA

SEQ ID NO: 25 - DNA, 462 bp, Unknown
  Obtained from environmental sample
  misc_feature (1)..(462): n is a, c, g, or t
atgaatgatattgaacttggacctatacgtcctccgtcagaatcacaaagtttgttgatacgggtaacaagaggctgccattggaacaaatgctttttttgcggcttgtacaaaggtatgagatatagcgtcagaccaacggacgatattttagaagacataaaaaaaagcgcggaactttataacggtatggcatttacatcctgttttctccaagacggcgacgccttgaatattcctacggaagatttattgttgatactgaaaaaaataaaatcttgttttccctcgcttcaaaccattacaacgtatgcccgttgcgacactattttaaagaaaagccaaagtgaattaatagccctaagagaattagggctgaatcacttttatcgtggcattgagacaggctcagatacgatactaaaaaacatatacaagggtattactcaaaagatattatga

SEQ ID NO: 26 - protein, 153 aa, Unknown
  Obtained from environmental sample
  misc_feature (1)..(153): Xaa is any amino acid
MNDIELGPIRPPSESQSLLIRVTRGCHWNKCFFCGLYKGMRYSVRPTDDILEDIKKSAELYNGMAFTSCFLQDGDALNIPTEDLLLILKKIKSCFPSLQTITTYARCDTILKKSQSELIALRELGLNHFYRGIETGSDTILKNIYKGITQKIL

SEQ ID NO: 27 - DNA, 444 bp, Unknown
  Obtained from environmental sample
  misc_feature (1)..(444): n is a, c, g, or t
gtggccgagggaatgacggtcgccacaggcggtacagaaaaccacctattgctnatagacgttacgcctttcggcttgacaggccgccaagccgaaagcgcgttgcgcgactgcggcataacgctaaaccgtaactccctgccctatgacaaaaacggcccgtggtatacaagcggtctgagaatcggaacgtcagcggcagtaacgctcggcatgggcgacgccgaaatgaaagagatcgccgctgtgataaaactagtgctgtcaaacacaaagccggagatggttgcggcgggagaagacgccggaaacgcaagcaagtcaaagtacctaaccaacggcaaagcggccaaagaagcaaaggcgcgtatcaaaacgtttttagacgaatttcccgtatacccgaacttagatttggcggttttgcggaaggcgttttgctga

SEQ ID NO: 28 - protein, 147 aa, Unknown
  Obtained from environmental sample
  misc_feature (1)..(147): Xaa is any amino acid
MAEGMTVATGGTENHLLLIDVTPFGLTGRQAESALRDCGITLNRNSLPYDKNGPWYTSGLRIGTSAAVTLGMGDAEMKEIAAVIKLVLSNTKPEMVAAGEDAGNASKSKYLTNGKAAKEAKARIKTFLDEFPVYPNLDLAVLRKAFC

SEQ ID NO: 29 - DNA, 471 bp, Unknown
  Obtained from environmental sample
  misc_feature (1)..(471): n is a, c, g, or t
gtggaaaagacatacctcacccgcgaagggtacgaaaagatggccgccgacctaaaacagatgcagaccgtcaaaaggcgcgaaatcttggagcaattggagatggcccgcgcccacggcgacctgcgcgaaaacgccgagtacgaggcggcgaaacacgccctgcagatgctcgacatccgcataaacgagatgcacgaaaagatcgcatcggcggagatattcagcaccgacaacatatccaccgacaaggtggtcatcggaacaaaggtaacgctgtgggacttctcctacgaggaggagatagagtacctgatcaccggaacggacgaggccgacccggcggcgggaaagatatccatcaactcccccgtagccaccgcgctgctcggccacaccgtcggcgaccagatcgaggtcaaagcgcccagaggggttatgaagtacgagcttaggaagatcgacaggtga

SEQ ID NO: 30 - protein, 156 aa, Unknown
  Obtained from environmental sample
  DOMAIN (80)...(156): Prokaryotic transcription elongation factor, GreA/GreB, C-terminal domain
  misc_feature (1)..(156): Xaa is any amino acid
MEKTYLTREGYEKMAADLKQMQTVKRREILEQLEMARAHGDLRENAEYEAAKHALQMLDIRINEMHEKIASAEIFSTDNISTDKVVIGTKVTLWDFSYEEEIEYLITGTDEADPAAGKISINSPVATALLGHTVGDQIEVKAPRGVMKYELRKIDR

SEQ ID NO: 31 - DNA, 687 bp, Unknown
  Obtained from environmental sample
  misc_feature (1)..(687): n is a, c, g, or t
gtgattttcgcgcttgatcgctgtgggttgattggcgacgacggcgaaacccatcagggtgtgtttgacatcagccttttccgttccgcgcctaacatgaccattcttgcaccggcaggagaagaagagctagtccaaatgctgctatgggctttctcaaaccccgggccggtgatgatccgctatcccaaggcgccctgtccgtccggagaaccggctttttttcttcccgttgaagagggaaggggagtttggatcaggcatacagaagcgcggatctgcattgtgtttacgggcagtctttacgcccatgtactagaggcggaagaaattttagagagcgaagaaattttcgcggacttgtacaacctccggtttttaaagccggtggatgaggcctatcttgcaggaattctgggtcgctatgaatttgtgatagttgccgaggaaggcagggccgccggaggttttggggagtatttgtctgaaattgtccttcgctttaactgctcctgcaaattgtccgttctggcagtcagggaaaaattcgacgctcttggaacgaggggcgaattgctcaggcgaaacgagcttgacggcgcgggtatttcagaagccgtttgcagagtggccggaataacgatgggaaaagcgtttggcaaagaaggcgggagaaatttcgcttga

SEQ ID NO: 32 - protein, 228 aa, Unknown
  Obtained from environmental sample
  DOMAIN (83)...(203): Transketolase, C-terminal domain
  misc_feature (1)..(228): Xaa is any amino acid
MIFALDRCGLIGDDGETHQGVFDISLFRSAPNMTILAPAGEEELVQMLLWAFSNPGPVMIRYPKAPCPSGEPAFFLPVEEGRGVWIRHTEARICIVFTGSLYAHVLEAEEILESEEIFADLYNLRFLKPVDEAYLAGILGRYEFVIVAEEGRAAGGFGEYLSEIVLRFNCSCKLSVLAVREKFDALGTRGELLRRNELDGAGISEAVCRVAGITMGKAFGKEGGRNFA

SEQ ID NO: 33 - DNA, 327 bp, Unknown
  Obtained from environmental sample
  misc_feature (1)..(327): n is a, c, g, or t
gtgggaacatccggcggcaacaccgatgacatgaaggaatccctgaccatgatggctcagggaaagctcaacccggtttttatgatcacccacatcggcggcctggacgccgctgtaaaagccacgatcgatctggataaaattccaggcggcaaaaagctgatttacacgcataaaaaacttccgctcaccgccattgacgattttgaaacggccggcaaggcagatccccttttcgcgaaactcgctgaaatctgcggccgttacggtaagctctggaatgtggaagccgaaaactaccttttgcaaaacgccccggagatataa

SEQ ID NO: 34 - protein, 108 aa, Unknown
  Obtained from environmental sample
  misc_feature (1)..(108): Xaa is any amino acid
MGTSGGNTDDMKESLTMMAQGKLNPVFMITHIGGLDAAVKATIDLDKIPGGKKLIYTHKKLPLTAIDDFETAGKADPLFAKLAEICGRYGKLWNVEAENYLLQNAPEI

SEQ ID NO: 35 - DNA, 981 bp, Unknown
  Obtained from environmental sample
  misc_feature (1)..(981): n is a, c, g, or t
gtgagaaaccgcgccggttcggggcggttatgtganatattaacgaacgggaataaagatacggaaaattttaaccctctgccaatgtggagggaaaatgccgcggggctggttttggcttcctgtgacgatggggttttggaaactctgtccgggagggtaaagcggttgtacgcggctattactcctatcgatattcgggcggttaatatcggcaggaaactcaatattccgcttgcttttcttgacaattccgtttttctggagcgggaagattntgcggttcacagggtgttacgcgccatcgaccttttaaaaactgtcggtaatttgggagcggatgacacggcgcacagggagcgcattctttgcgattcaggggaaattcgacgcaggttggttacatggccgcaggcggtcagggggactgaagaaatagcggcgttgtgcagttttaacgacttatttgacggctggatttttccaggttatgaaaccggagcggtttccgccgcctgtgaattacgcaggcgcgtatatgaggggaatactttacgctatggggagttggctgacagggagattggcaggattgattatgaacttaaaattatcgaggaaaaggggttttcttcctattttttaattattgacgatattgtgcgtatggcttcgcgaacctgcgggcgcggttcgggggcggcttccatcgtgtcttacggtttaggcattaccaatgtagacccgctaaggcataatctttattttgaaagatttttaaatccggcgcggcctgacccgcctgatattgatattgatttcgcgtgggatgagcgagatgagttaattaaagccgtaatagaaaagttcggctccggttactgcgcccgagtcgccaatcacaatatgttccgttacagatcggctttgcgggagacggcgaaggcttacgggttacggacgctgctcggccgaatctga

SEQ ID NO: 36 - protein, 326 aa, Unknown
  Obtained from environmental sample
  DOMAIN (121)...(326): Bacterial DNA polymerase III alpha subunit
  misc_feature (1)..(326): Xaa is any amino acid
MRNRAGSGRLCXILTNGNKDTENFNPLPMWRENAAGLVLASCDDGVLETLSGRVKRLYAAITPIDIRAVNIGRKLNIPLAFLDNSVFLEREDXAVHRVLRAIDLLKTVGNLGADDTAHRERILCDSGEIRRRLVTWPQAVRGTEEIAALCSFNDLFDGWIFPGYETGAVSAACELRRRVYEGNTLRYGELADREIGRIDYELKIIEEKGFSSYFLIIDDIVRMASRTCGRGSGAASIVSYGLGITNVDPLRHNLYFERFLNPARPDPPDIDIDFAWDERDELIKAVIEKFGSGYCARVANHNMFRYRSALRETAKAYGLRTLLGRI

SEQ ID NO: 37 - DNA, 450 bp, Unknown
  Obtained from environmental sample
  misc_feature (1)..(450): n is a, c, g, or t
atggagttccaaatgaagaaaattaatatgttaatttttcttgtttttattttttctcttgatacttttgcgcaaactacattaaaagaacggcttgaacaacacgtttacacgcttgcttccgacgaaatgcggggacgagaacccggcactatttattcgcgaatggcttccgaatatatcataaaccaatggaaggaaatcggaatagagccgtttttcgataattcatacatacagccttttaaaaaagacaaatatcaaaatatagtcggtattattcacggaaatgatcctgttttaaaaaatgaatatatagtaatcggcgcgcattatgaccatcttggcgcatttttgggattaatattcaacggagccgatgacaacgcttcgggaaccgcaacggtgattgaactcggacgagaattgaaacgaattgaatcaaattga

SEQ ID NO: 38 - protein, 149 aa, Unknown
  Obtained from environmental sample
  SIGNAL (1)...(24)
  misc_feature (1)..(149): Xaa is any amino acid
MEFQMKKINMLIFLVFIFSLDTFAQTTLKERLEQHVYTLASDEMRGREPGTIYSRMASEYIINQWKEIGIEPFFDNSYIQPFKKDKYQNIVGIIHGNDPVLKNEYIVIGAHYDHLGAFLGLIFNGADDNASGTATVIELGRELKRIESN

SEQ ID NO: 39 - DNA, 885 bp, Unknown
  Obtained from environmental sample
  misc_feature (1)..(885): n is a, c, g, or t
atgatgccggatatggacggcattgaaacgacggccgtcatccgcctctgggagaaaaaattaggacgcggagagggcacggcgttaagccgtgtttctgagataggcgacagtgcgggagccccaataaatgctccagtttgccgaaatcggcgcgagggctttagcccgagtggcgggcgtggacaaattccgattattgcgctgacagctaacgccgtcgtgggaatgagggaaatgtttatcgaaaacggattcaatgattttctctccaaacccatagacgtttccaaactggatgaaattattgacagatggatacccaaagaaaaaagggaattaggaatgaggaatgaggaattaggaataaaggacaaggacaattattcctcactcctaactcctaattcctcattagcccagcccccagtccccggtccccagtccctgatccctatcccaggcattgacatacaaaagggcatttacatgaccggcgggactgtgaacgtttatacgcaggtgttgtcgctgttttgcatagacgcgcgggacaggctgccgcttctgcagaaaacgccggagataaccggcctgagcgcgttcattacccaggttcacgccctgaaaagcgcgttggcttctattggagcggccgaaatatcgactatagcggcggggcttgaagccgcgggcaaagccgcggacatggcctttatccaggaacacctccccgccttcgcggaacagctaaaagaacttacagataatattcgtaccgccctgcaacttaatgaacccgccgccccccagtccccagtccctattcccagtccctattccggaactttcgacgccttacggtcccaaaaatatccgaaataa

SEQ ID NO: 40 - protein, 294 aa, Unknown
  Obtained from environmental sample
  DOMAIN (174)...(261): Hpt domain
  misc_feature (1)..(294): Xaa is any amino acid
MMPDMDGIETTAVIRLWEKKLGRGEGTALSRVSEIGDSAGAPINAPVCRNRREGFSPSGGRGQIPIIALTANAVVGMREMFIENGFNDFLSKPIDVSKLDEIIDRWIPKEKRELGMRNEELGIKDKDNYSSLLTPNSSLAQPPVPGPQSLIPIPGIDIQKGIYMTGGTVNVYTQVLSLFCIDARDRLPLLQKTPEITGLSAFITQVHALKSALASIGAAEISTIAAGLEAAGKAADMAFIQEHLPAFAEQLKELTDNIRTALQLNEPAAPQSPVPIPSPYSGTFDALRSQKYPK

SEQ ID NO: 41 - DNA, 750 bp, Unknown
  Obtained from environmental sample
  misc_feature (1)..(750): n is a, c, g, or t
gtggttcagcccaaagaaggcggctatgatgtcatctgcggcggcgtgaatatgggcgcattgaataacgggaatgacggcgagaagtgttccattaaaacggcaacaagcaattctgcgtatttgcagataaactgcggcatcaattctgaactgcttgcaaaagctttgtgcggaacagaggcttacgatcctgaaataaaggtatgcaaagacggagagctgaaagagaaagacatagcaaatacattcacagatgcacgtgacggcaaaaaatacaaatacgtacaaatcggagagcaagtttggatggcagagaatttgaattatgccgtcaaaggcagcaagtgtgtcggaagtaaaggcggtggcaacaatactctaattgatgcaaatactgagtattgcgatacttacggcaggctttacaaatgggaagcagctatgggtgctcttgcaagctctgacaaaaatccgagcaatgttcaaggtgtttgccccgcaggctggcatttgccaagcaatgctgaatgggcaaagttgatagattttgctggcggtgctgctgctgccggtgccaagctgaaggatacgagcgtttatggcggcacagacgactaccgcttttctgccttgctaggcggtgctggcactaacaaatgggaccaaattactagtttgcgcggagaaggctactggtggagtgcactcanngacataccgataccaccaaagcctatgctcagatga

SEQ ID NO: 42 - protein, 249 aa, Unknown
  Obtained from environmental sample
  misc_feature (1)..(249): Xaa is any amino acid
MVQPKEGGYDVICGGVNMGALNNGNDGEKCSIKTATSNSAYLQINCGINSELLAKALCGTEAYDPEIKVCKDGELKEKDIANTFTDARDGKKYKYVQIGEQVWMAENLNYAVKGSKCVGSKGGGNNTLIDANTEYCDTYGRLYKWEAAMGALASSDKNPSNVQGVCPAGWHLPSNAEWAKLIDFAGGAAAAGAKLKDTSVYGGTDDYRFSALLGGAGTNKWDQITSLRGEGYWWSALXDIPIPPKPMLR

SEQ ID NO: 43 - DNA, 372 bp, Unknown
  Obtained from environmental sample
  misc_feature (1)..(372): n is a, c, g, or t
atggttgctcttgataaaattctgatcccttgtcaagctgatcctttttcgattgatagtcttaattctactaatgaattgtatcttgcagtaaaacgttacttaaatccttcattaggacttgccggacttctaattacacgctataaaaaatcattactttctgaggaaattgtcaaatcaatcgaagaaattgccatttcgaaaatgggtacttttgtttacaaatcaaagataagagacagtgttctaatacgagaggctcagttagcaaaaaacagcattaataaatatgcgggccacagcccggtttcttcagatatatttgatttcatagacgagttcggagaaagatatgggcaagagatctaa

SEQ ID NO: 44 - protein, 123 aa, Unknown
  Obtained from environmental sample
  misc_feature (1)..(123): Xaa is any amino acid
MVALDKILIPCQADPFSIDSLNSTNELYLAVKRYLNPSLGLAGLLITRYKKSLLSEEIVKSIEEIAISKMGTFVYKSKIRDSVLIREAQLAKNSINKYAGHSPVSSDIFDFIDEFGERYGQEI

SEQ ID NO: 45 - DNA, 402 bp, Unknown
  Obtained from environmental sample
  misc_feature (1)..(402): n is a, c, g, or t
atgggcaagagatctaattttgaggaacttattaaaggttatataaaagaaccaactgaacttaataatcatgatgtgcaaactgaatcaaatatacagcccttacatgatcaacagcatgtatatgatgaacaaaaaacacaggatgtacaacatgaattaaacagtcagccgatacaacaagtacaaccggtacaagatgtacagaatgaattagatagtcaacaagtacagggtatacaatctatacaggaacaacagcttgtatataaagagcaaaaaatacatattgtaccatccgaaaaaaatgatcaacatatacaaaatgaaaaagacgtacaaactgtacatgatgtacaacatatcaatttagtcatatcaaaagagcaattaatttcctaa

SEQ ID NO: 46 - protein, 133 aa, Unknown
  Obtained from environmental sample
  misc_feature (1)..(133): Xaa is any amino acid
MGKRSNFEELIKGYIKEPTELNNHDVQTESNIQPLHDQQHVYDEQKTQDVQHELNSQPIQQVQPVQDVQNELDSQQVQGIQSIQEQQLVYKEQKIHIVPSEKNDQHIQNEKDVQTVHDVQHINLVISKEQLIS

SEQ ID NO: 47 - DNA, 447 bp, Unknown
  Obtained from environmental sample
  misc_feature (1)..(447): n is a, c, g, or t
atgcgccctgaatactggatggctctgcaatcggcctttgatattgccaggaccgcgaaggataaaaaattagctaaagcccttaaaggtattacaaccgtggacaaggtgaagaaaccggcaaagaagggacgtaaaacaaaagccaaaaaaaccgcgaaaaaaaccagaaccgcgaaaggcgcgaagaaaacgccgggcagacggggcaggcccgcgggcgcgagaaaagcaaaatcaattaaagccgcaaagaaaacaacaggcaaacgcggaaggcccgcggcgaagaaaccggcaggcaagcgcggaaggcccgcggcaaagaaagcggcaggcaaacggggcaggccagcggcaaagaaaccggcgcgtaaagttcgctctgctgccgtaccctcgcctgttactcagtcggccggaacagttaacgaaccgaacatttaa

SEQ ID NO: 48 - protein, 148 aa, Unknown
  Obtained from environmental sample
  misc_feature (1)..(148): Xaa is any amino acid
MRPEYWMALQSAFDIARTAKDKKLAKALKGITTVDKVKKPAKKGRKTKAKKTAKKTRTAKGAKKTPGRRGRPAGARKAKSIKAAKKTTGKRGRPAAKKPAGKRGRPAAKKAAGKRGRPAAKKPARKVRSAAVPSPVTQSAGTVNEPNI

SEQ ID NO: 49 - DNA, 363 bp, Unknown
  Obtained from environmental sample
  misc_feature (1)..(363): n is a, c, g, or t
atgcttaaacggcggagcatggtggtgcttatgtccgacttcttaagcgcggactgggaaaaagagttatgcgatctgagccgcaggcacgacgttatcgcggtcagagtctacgatccaaaaaacaccggcctttcaaaactgggcctcctcgacgcgcgggatccggaaaccggcctgcaaattgcgttcccctcaaattccgccgcgttccgcagcgcgtgggccgggtggcacagggagcgctcggatcactggttaaaattatgccgcagggcgggagcctcccatcttgagatccctgtcgacggagaccccgcaaaaatactgtcccgtttcttcacaggcaggagcggacaatga

SEQ ID NO: 50 - protein, 120 aa, Unknown
  Obtained from environmental sample
  misc_feature (1)..(120): Xaa is any amino acid
MLKRRSMVVLMSDFLSADWEKELCDLSRRHDVIAVRVYDPKNTGLSKLGLLDARDPETGLQIAFPSNSAAFRSAWAGWHRERSDHWLKLCRRAGASHLEIPVDGDPAKILSRFFTGRSGQ

SEQ ID NO: 51 - DNA, 456 bp, Unknown
  Obtained from environmental sample
  misc_feature (1)..(456): n is a, c, g, or t
atgggccttgcgatccgcgccgcagggcgcggcaaaaaagttgtgattgtccagtttctaaagggaaatgacaccggggagcttcattccntgggtcttattcccaatattacagtaatccgaaacagcgaagccaaaggtttctttcacacagtctcaccggaaattcgcttaaagataatagaagagaataacgaaaacctaaaggcagctttagcactcccctacgatctaattgtgcttgatgaactctgcgcggcctacgatcttgaagctattgaccggaagaccgtggacgatctgctacatgatttcagttcagagaaagaacttgtgttgaccggaagaaaccctccgcagcatttctgcgacgcggcggattatatttcagagatacacaaagtaaagcatccttttgaccggggcattcaggccagagaaggaatcgaatattga

SEQ ID NO: 52 - protein, 151 aa, Unknown
  Obtained from environmental sample
  DOMAIN (1)...(151): ATP:corrinoid adenosyltransferase BtuR/CobO/CobP
  misc_feature (1)..(151): Xaa is any amino acid
MGLAIRAAGRGKKVVIVQFLKGNDTGELHSXGLIPNITVIRNSEAKGFFHTVSPEIRLKIIEENNENLKAALALPYDLIVLDELCAAYDLEAIDRKTVDDLLHDFSSEKELVLTGRNPPQHFCDAADYISEIHKVKHPFDRGIQAREGIEY

SEQ ID NO: 53 - DNA, 660 bp, Unknown
  Obtained from environmental sample
  misc_feature (1)..(660): n is a, c, g, or t
atgctccttaacctgatggcctgcgccgatgattccgggcgcaggctggatcgtgttttaagaaaagccctgcgccaaatgcccctttcggccattcaccgcctgctgaggcagggcctggttcttgtcgatggcaagaaggctggccctggtcggcgtgtactggcaggggaaaccattacagtaccgattatagaatgcgaaggtgtatcggataaacagttagcgccaaatacagagaagaacccactttttatgccggaaattctttttgagggctcagggcttttgattctcaataaacccgctgggctttccgtccacggcagggaaagcattgatagcatggttcagtcttaccttgtctcgaaactgcgcccttccctctcgttcaagcccggccccctgcacaggcttgacaggcccagctccggcgtcctggtcttttcaaccagccttgagggggccaggcgtttcagcgcgatgatgagggagggaaaaataaaaaagcagtacctagccgtagtggaaggttatatagaaggcgcggaggtctggaaggacgaactgttccgtgatgaanagataaaaaaaacatttaccgaanattccgaaggaaaaaccgccctgaccaaagtaagtgccttgcttggaaantaa

SEQ ID NO: 54 - protein, 219 aa, Unknown
  Obtained from environmental sample
  DOMAIN (14)...(60): S4 domain
  misc_feature (1)..(219): Xaa is any amino acid
MLLNLMACADDSGRRLDRVLRKALRQMPLSAIHRLLRQGLVLVDGKKAGPGRRVLAGETITVPIIECEGVSDKQLAPNTEKNPLFMPEILFEGSGLLILNKPAGLSVHGRESIDSMVQSYLVSKLRPSLSFKPGPLHRLDRPSSGVLVFSTSLEGARRFSAMMREGKIKKQYLAVVEGYIEGAEVWKDELFRDEXIKKTFTEXSEGKTALTKVSALLGX

SEQ ID NO: 55 - DNA, 951 bp, Unknown
  Obtained from environmental sample
  misc_feature (1)..(951): n is a, c, g, or t
atgcgacggacgctcaaacaannnccaccctcttnaagggcattgggcgcgtcgggaattaccgaagcgacnatcaacagggcctcttcgcggatgctgtatagcttaccaaagagagactacaatcccctaaaaattgccaacgccatttttgtgggaaaagatgtaacccttaaaaaagattttgctcaaacgttcatggattattacaggggaagcagtataaacgttgacttttcttcncgcgacgcggtggacgctgtaaaccgctgggcaagcgaaaacacaaacggtttgattaaaaacgtgatacaggaattcgaccccctgactgtcgccgccatagccaacgcgatttatttttccgacaggtgggaatgggaatttaattccgaccaaacgaaagagggagtattccacgcgccggggaaggatacgacggcgtcttttatgctgcgttctggcgacgcgcaactttactatgaagaccaaaaggtgcaggccatgccgctccgctttatgaccggcggcggtttgtacatcatcctgcctaaaaccggtagcgcggcgcaattgctttcatccatgacaaatgattattttaacgaaatacaaagggatgccgttagggctacaggcaagctgctattgccgcgcttttccatagaaagcactattgacgatttagctgaagcgcttgtggcattgggtgttcccctttttgacgaagtgtccgcgccgcttacaggcgggttaatcgagggaggtttgcgcgtatggctgtccgacgcggtgcaaaaagccgctattaaagttgacgaaaagggcacgaccgctgccgccgtaacggtacttggagtgaatgccacagcaatgcccgtacctaccaaacccttcgagatgatctgcgataagccgtttgtgttcattttatacgctcggccgatctga

SEQ ID NO: 56 - protein, 316 aa, Unknown
  Obtained from environmental sample
  DOMAIN (1)...(315): Serpin (serine protease inhibitor)
  misc_feature (1)..(316): Xaa is any amino acid
MRRTLKQXPPSXRALGASGITEATINRASSRMLYSLPKRDYNPLKIANAIFVGKDVTLKKDFAQTFMDYYRGSSINVDFSSRDAVDAVNRWASENTNGLIKNVIQEFDPLTVAAIANAIYFSDRWEWEFNSDQTKEGVFHAPGKDTTASFMLRSGDAQLYYEDQKVQAMPLRFMTGGGLYIILPKTGSAAQLLSSMTNDYFNEIQRDAVRATGKLLLPRFSIESTIDDLAEALVALGVPLFDEVSAPLTGGLIEGGLRVWLSDAVQKAAIKVDEKGTTAAAVTVLGVNATAMPVPTKPFEMICDKPFVFILYARPI

SEQ ID NO: 57 - DNA, 495 bp, Unknown
  Obtained from environmental sample
  misc_feature (1)..(495): n is a, c, g, or t
atggatttaatcgttgactgctcccgcaaaggcgttaatttagggctttactcaaatgatgccaattacgaactctgcgacccgaacgcaaaaggcgatgagttaaaacctttgctagataaattgcttgcagaaaacaattttgaaattgaacaagtaaagcgtgttttagtaacacttggtcctggtagcttcacgggtattcgtgcgggtattgctttttgcgagggactttgttttagcggcaggagaaccttgcacggaatttccacattgaaagcattggctatgtcgcacggcaaagagataattttgcacgcgagggcaaatttttattatgttggaaatgaggatagcgaaaccctaaagcaatttgaaaacaaacccgaaaccgatgaatacctgcccataaccccatttgcaaagctaatagaccatattcccccctcccgcattcaaaaagcaaactatttggcaaatccatatccctcttaa

SEQ ID NO: 58 - protein, 164 aa, Unknown
  Obtained from environmental sample
  DOMAIN (24)...(162): Glycoprotease family
  misc_feature (1)..(164): Xaa is any amino acid
MDLIVDCSRKGVNLGLYSNDANYELCDPNAKGDELKPLLDKLLAENNFEIEQVKRVLVTLGPGSFTGIRAGIAFCEGLCFSGRRTLHGISTLKALAMSHGKEIILHARANFYYVGNEDSETLKQFENKPETDEYLPITPFAKLIDHIPPSRIQKANYLANPYPS

SEQ ID NO: 59 - DNA, 585 bp, Unknown
  Obtained from environmental sample
  misc_feature (1)..(585): n is a, c, g, or t
atgcctacaaagacacatactctggtacctgttattaacgttcccatcagggacttagatgaccttgatcgcattgagctgcgtattaatcagcaaggagtaaaaacaactattagtcccgaggggctggtgctggtagccgatgaaacaaccgcccggcgcataagggcaatactgatctgcgaagaccttattcccaaatatacagacccctgggccatattcaacaagaaacgctggaccattaccgactttgaacgaaatgtcaatttccgccgcacccaaacccagatgatcaccgatcacatcaaggccattgacgatgttgacgatgccagtgtcacttttcataatctggtgacggcaagcgtgattattaccccaaggccgggcagccatattacgactaaccgctggaaaatccatggtattgagaagatacttaaatttgctattgagggactgcaggtcgacaatatcgttattaccgatcagaacggccttttactgaacaactttttttattacgataatttttttggcggctttttttatgatgatgggtgtttcaaaatcgaacgataa

SEQ ID NO: 60 - protein, 194 aa, Unknown
  Obtained from environmental sample
  DOMAIN (1)...(178): Secretory protein of YscJ/FliF family
  misc_feature (1)..(194): Xaa is any amino acid
MPTKTHTLVPVINVPIRDLDDLDRIELRINQQGVKTTISPEGLVLVADETTARRIRAILICEDLIPKYTDPWAIFNKKRWTITDFERNVNFRRTQTQMITDHIKAIDDVDDASVTFHNLVTASVIITPRPGSHITTNRWKIHGIEKILKFAIEGLQVDNIVITDQNGLLLNNFFYYDNFFGGFFYDDGCFKIER

SEQ ID NO: 61 - DNA, 438 bp, Unknown
  Obtained from environmental sample
  misc_feature (1)..(438): n is a, c, g, or t
atggatgggagatgcggcagggcaagatcctcaatttttgcttgcctcccgggatttttatatatatactataatggggggcgaagcatgaggcgtattgtccacgttgacaacagtaagtttttccgtaagctgatgaacatattcttatctgaacttggtcttatttgcgatggttttgatttgggggaggacgccttaaccgcggttatgaccggcgacgtatcctgcgtaatcaccggccttgaactgccggatatgagcggagagaaactaatcagccgaataatcgcgtttgcccccaatgctttgacaataattgtggtaaccagttccgcccatgatgatgaacgggtgaaagcgctggaagcgatgggagtaaaagcaaccatccagaaagcgggcgactggaaggaaaaactgcgcgagcatttctaa

SEQ ID NO: 62 - protein, 145 aa, Unknown
  Obtained from environmental sample
  DOMAIN (31)...(142): Response regulator receiver domain
  misc_feature (1)..(145): Xaa is any amino acid
MDGRCGRARSSIFACLPGFLYIYYNGGRSMRRIVHVDNSKFFRKLMNIFLSELGLICDGFDLGEDALTAVMTGDVSCVITGLELPDMSGEKLISRIIAFAPNALTIIVVTSSAHDDERVKALEAMGVKATIQKAGDWKEKLREHF

SEQ ID NO: 63 - DNA, 384 bp, Unknown
  Obtained from environmental sample
  misc_feature (1)..(384): n is a, c, g, or t
atggcccaaataggcgccaacagcggtcagacggcttttgtttctatgggcgacatgcgggccaaggcgctcggcatatccgacataagcgtcagcaccaagtggggcgcggcgacggccattgagacggtgaacaacgcgttgcaaaaggtttcgcatcagcgcagttctttgggcgcgattcagaaccgtttggagcacacgatcaagaatctggacacggcggcggagaacttgcaagctgccgagagccgtattcgcgacgtggacatggcgaaagagatcatggagttcacaaagaacaccattctccagcaagcgtctcaggcgatgctggcccaggcgaattctcagccgcagagcgtgttggcgttgttgcagtaa

SEQ ID NO: 64 - protein, 127 aa, Unknown
  Obtained from environmental sample
  DOMAIN (34)...(105): Bacterial flagellin C-terminus
  misc_feature (1)..(127): Xaa is any amino acid
MAQIGANSGQTAFVSMGDMRAKALGISDISVSTKWGAATAIETVNNALQKVSHQRSSLGAIQNRLEHTIKNLDTAAENLQAAESRIRDVDMAKEIMEFTKNTILQQASQAMLAQANSQPQSVLALLQ

SEQ ID NO: 65 - DNA, 690 bp, Unknown
  Obtained from environmental sample
  misc_feature (1)..(690): n is a, c, g, or t
atggaagacatcaaggccctgctgtctttcccggttgctcatgtttccctgtacagccttatacttgagccgcaaacgcccctgggcaaagcggcaaaacaaggcgctgtatccctgcccccgcctgacgaggccgacgaattttggatcgcgggacgggacttgcttgaaagatcaggttaccgccaatacgaagtgtccaatttctgtctgcccggaaaaacctgcgctcacaacatacgctactggagaatggaaaactggcttggggccggccccgccgcttcgggaaccgtcatcaacgatgaaacaggcgccggaaaacggttcacctatccggctgacattgaaaactatattagaatgccccgtccgaggatcaatcacgccataacagaagaattaggcagggaagacctgattaaagaaacgatgctcatgggattcaggtattgcgaggggcctgataaagtgcttttcaaacaacgctttggccgcgaaattgaggacatgattccaaaaacaatcgccctctggagcaaacgtgattttttccaaacaggacaagcgttaaagccgtcaaaacagggattattgtttgttaacggctttctgagagacgcttttgaagagttagaacattcttattatcaacccgcgtatattccacattgtccatcagctttttaa

SEQ ID NO: 66 - protein, 229 aa, Unknown
  Obtained from environmental sample
  DOMAIN (80)...(199): HemN C-terminal region
  misc_feature (1)..(229): Xaa is any amino acid
MEDIKALLSFPVAHVSLYSLILEPQTPLGKAAKQGAVSLPPPDEADEFWIAGRDLLERSGYRQYEVSNFCLPGKTCAHNIRYWRMENWLGAGPAASGTVINDETGAGKRFTYPADIENYIRMPRPRINHAITEELGREDLIKETMLMGFRYCEGPDKVLFKQRFGREIEDMIPKTIALWSKRDFFQTGQALKPSKQGLLFVNGFLRDAFEELEHSYYQPAYIPHCPSAF

SEQ ID NO: 67 - DNA, 366 bp, Unknown
  Obtained from environmental sample
  misc_feature (1)..(366): n is a, c, g, or t
ttgacaatcgcggcgaatatattcggcgtgctggcagtccatgataccagggttgtcaccagcggggtgtacgagcgtttttttgaagacgaaggaacccgttaccaccacattctttcaacaagggacgggtacccggcggaaaacggcctgttatctgtaactattgtaacggagcgttcaatagaagccgacgccctttccacgtctgtttttgcgatgggcttcgagcggggcaaagccctgatagactctatccccggcgcacaggctgtctttgtgtttgcggacaggagcgtgaaaatcaccgaaggcctctccggtattttcacgctcactaacgatgaatttagaattaggaattag

SEQ ID NO: 68 - protein, 121 aa, Unknown
  Obtained from environmental sample
  misc_feature (1)..(121): Xaa is any amino acid
MTIAANIFGVLAVHDTRVVTSGVYERFFEDEGTRYHHILSTRDGYPAENGLLSVTIVTERSIEADALSTSVFAMGFERGKALIDSIPGAQAVFVFADRSVKITEGLSGIFTLTNDEFRIRN

SEQ ID NO: 69 - DNA, 372 bp, Unknown
  Obtained from environmental sample
  misc_feature (1)..(372): n is a, c, g, or t
atggcgaaaaaaaaggctcaaaatgaaataaccattcgttccagcgcggcggaatatttaacatatatcgccgctaccggagacaatccgcaaagcatagaaatacgttatgaggacgagaacatctggctgacgcagaaaatgatggcggtgctgtatgatgtaggagtcaatacaatcaattatcatttgaaacaaatatttgaggacgcagaactcttggaaggggcaactattcgaaattttcgaatagttcaaaatgagggaaaaagacaagttgaaagggaacaagatcactacaatttgcaaatgattatcgtcgtaggtttcaaagacaatggtaaaaagaaaaggaaatcgagtggaagatag

SEQ ID NO: 70 - protein, 123 aa, Unknown
  Obtained from environmental sample
  misc_feature (1)..(123): Xaa is any amino acid
MAKKKAQNEITIRSSAAEYLTYIAATGDNPQSIEIRYEDENIWLTQKMMAVLYDVGVNTINYHLKQIFEDAELLEGATIRNFRIVQNEGKRQVEREQDHYNLQMIIVVGFKDNGKKKRKSSGR

SEQ ID NO: 71 - DNA, 405 bp, Unknown
  Obtained from environmental sample
  misc_feature (1)..(405): n is a, c, g, or t
atgtcagaattaacagaatatacaggaaaggcaacgatggagaaaatcacgtcgctggcgaagcgacgggggtttgtttatcagtcatcggaaatttacggagggcagaacggggcgtgggattacggtccgctcggcgttgaattaaagaaccgtatcgcgggcgcgtggtggaaggaaatgacccgtctccacgacaatatcgtggggctggatgcggctatcttgatgcacccccgaacatgggaagcgtccggtcacgttgagaattttaccgatccgttggttgattgcaaaaagtgcaaatctcgctttagggcggatcaaataccgcaggaaaatcttgcggcgaaaaaatgccccgactgcggcggcgaactgaccgatacccgcaagttcacttga

SEQ ID NO: 72 - protein, 134 aa, Unknown
  Obtained from environmental sample
  misc_feature (1)..(134): Xaa is any amino acid
MSELTEYTGKATMEKITSLAKRRGFVYQSSEIYGGQNGAWDYGPLGVELKNRIAGAWWKEMTRLHDNIVGLDAAILMHPRTWEASGHVENFTDPLVDCKKCKSRFRADQIPQENLAAKKCPDCGGELTDTRKFT

SEQ ID NO: 73 - DNA, 669 bp, Unknown
  Obtained from environmental sample
  misc_feature (1)..(669): n is a, c, g, or t
atgctgtttccagtggacatgagggactggctgcccgaggatcatttggtgtatttcatcatagaggcgatagagcaaataggggtaaccgggtttaaagtaaaccggcgcggcaccgggagcgagcagtatccgcctgagatgatgcttgcgttactggtatacagttatgtaacaggacgattcggctccaggacgatagaagcggcgacatatacggatgtggcactcagatatatatgcggaggggaagcgcacccggatcatacggtaatctgcgcgttccgcaaggaaaataaggaagtatttgaagaaacattcaccaggatattagttttagcccggcaactgaagaaactgaaaggagtggggggagtcagcggcgacgggacaaagattcatgcgaacgcgagcaagcacaaggcggtaagctacaagcgggccggggaaataatagaagagttgaaggaagaagtgaaaaagctgacgcggctggcggaagaggcggacgggaaggcggagaagccggtgataaacatacccgaagaaataaagctgaggaaggaacggaagaaagcgctggaagaagcaagggccgagatggaaaaactgtatgaagcggcgcaggaagaaggggccaggtatacaagaaacggaaagagacggtag

SEQ ID NO: 74 - protein, 222 aa, Unknown
  Obtained from environmental sample
  misc_feature (1)..(222): Xaa is any amino acid
MLFPVDMRDWLPEDHLVYFIIEAIEQIGVTGFKVNRRGTGSEQYPPEMMLALLVYSYVTGRFGSRTIEAATYTDVALRYICGGEAHPDHTVICAFRKENKEVFEETFTRILVLARQLKKLKGVGGVSGDGTKIHANASKHKAVSYKRAGEIIEELKEEVKKLTRLAEEADGKAEKPVINIPEEIKLRKERKKALEEARAEMEKLYEAAQEEGARYTRNGKRR

SEQ ID NO: 75 - DNA, 768 bp, Unknown
  Obtained from environmental sample
  misc_feature (1)..(768): n is a, c, g, or t
ttgcgcggtcccggcggctgtccgtgggatagggaacagactccgtcctctctgcgaggtgcgttagtgaaagaaacttacgagtgccttgaggccatcgacgaaaataatcccgatcatgtcgccgaagaattgggggatctgtttttactcgctaccatgattggctatatgcacgaacaggaaggcaaatttacggtttcagactcgctaaaaaaaataaccgacaaattaatccgccgccacccccatgtgttcgcggacgtaaaagtaagggacagcgctcatgtgcttgaaaactgggcggcgataaaagtgaatcaggaaggacgcaagccgaaggattccgttcttgacgaggtaagcggcggtcttcctcccatggatcgcgctttcaaacttcagaaaaaagcggcaaaagtcggcttcgactggccggacgcgcaaggggtagttacaaaaataaaagaagaattgcaggaagtaaccgaagccgaaagcaatatagcgcgtaacgaacaggagaataagacagaactggaaaaagaactcggcgatcttttattttccgtcattaatctttgccgctttcataaaatcgacccatcagcggcgcttcaccgtaccaacgtgaagttcacggagcgttttaaatacgtcgaatcaaagatgaaagaaacgggcaatgagatgaagaaagaaaatttggaaataatggacaaattctggaacgaagcaaaaaacctgaccgcaaaaaataatacttga

SEQ ID NO: 76 - protein, 255 aa, Unknown
  Obtained from environmental sample
  DOMAIN (149)...(217): MazG nucleotide pyrophosphohydrolase domain
  misc_feature (1)..(255): Xaa is any amino acid
MRGPGGCPWDREQTPSSLRGALVKETYECLEAIDENNPDHVAEELGDLFLLATMIGYMHEQEGKFTVSDSLKKITDKLIRRHPHVFADVKVRDSAHVLENWAAIKVNQEGRKPKDSVLDEVSGGLPPMDRAFKLQKKAAKVGFDWPDAQGVVTKIKEELQEVTEAESNIARNEQENKTELEKELGDLLFSVINLCRFHKIDPSAALHRTNVKFTERFKYVESKMKETGNEMKKENLEIMDKFWNEAKNLTAKNNT

SEQ ID NO: 77 - DNA, 471 bp, Unknown
  Obtained from environmental sample
  misc_feature (1)..(471): n is a, c, g, or t
gtgctttccggctttaacgtacgcgctgaatttgccgttcatattacggaagatcattcaggcgacgacggctcagttcaaaatccttttatcggctggtctgttggtttcgaccgtgatcttatttggggcataaacttcaatatacaatgtaatgagaccgtccgcctttttaacgataaaataggaaacaatcctattcttgacgcagaagccgataccaacgccgtttcaacccgattaaccatgcgtctaacaaaaagttttttcagggataatcttgaaagcagcgcaacggttatttgggatgtcgaaaattccgattgctacatcattccggcgtttactttgaccgaaggcagcatgagttgtaaattatccgcgggtattttcgcgggaaaagaaaccggagaactgggacagtactggggaaacaactacattaaattcggcgtaacgtattcgttctag

SEQ ID NO: 78 - protein, 156 aa, Unknown
  Obtained from environmental sample
  misc_feature (1)..(156): Xaa is any amino acid
MLSGFNVRAEFAVHITEDHSGDDGSVQNPFIGWSVGFDRDLIWGINFNIQCNETVRLFNDKIGNNPILDAEADTNAVSTRLTMRLTKSFFRDNLESSATVIWDVENSDCYIIPAFTLTEGSMSCKLSAGIFAGKETGELGQYWGNNYIKFGVTYSF

SEQ ID NO: 79 - DNA, 336 bp, Unknown
  Obtained from environmental sample
  misc_feature (1)..(336): n is a, c, g, or t
gtgcaaaaggtcgtcgccgcttcccgtgtgcgtgaaggattctgcgttgtcttcgttccgcacaccacggcggcggtaacgataaatgaaaacgccgacccggatgtaccccacgacgtaaacctctcgttaaacattatttcccccgaccgccgagaattccagcacagcgaaggcaactccgccgcgcacaccaaatcaagcctcgtgggtccttcgcttaccgtgattgtcacaaacgggagactgcttcttggcacatggcaggggatatggttcaacgaatacgacggtcctcgcacacggaaagttcaagtaagggtgatgggagagtga

SEQ ID NO: 80 - protein, 111 aa, Unknown
  Obtained from environmental sample
  DOMAIN (2)...(109): Uncharacterised protein family UPF0047
  misc_feature (1)..(111): Xaa is any amino acid
MQKVVAASRVREGFCVVFVPHTTAAVTINENADPDVPHDVNLSLNIISPDRREFQHSEGNSAAHTKSSLVGPSLTVIVTNGRLLLGTWQGIWFNEYDGPRTRKVQVRVMGE

SEQ ID NO: 81 - DNA, 465 bp, Unknown
  Obtained from environmental sample
  misc_feature (1)..(465): n is a, c, g, or t
atgacagaagcgtctttaaaaatttataccgacggcggatgctcaggaaacccgggaccgggagggtgggcttatgtcatggttcagcagacttttcagggcgttcaggtaatcgccaaagagaaaggctcagagaaaaacactaccaacaacaggatggaattaaccgccgtgattatggcgttacgcgctcttaaaacaatgagcggcgtaccgcgtcaggcggcggtattaacagactctcagtatgtgcaaaaaggcattacggaatggatacgcaactggaaacgcaacgcgtggagaaccgccgataaaaaaccggtaaaaaatcaggatttgtggatggaacttgattctctttncagcgagtttcaccttncatgggagtgggtcaaaggacacgcgggaaacgaatataatgaaatgtgcgacgcgatgactcaggaagcaatcgcgcttgtttag

SEQ ID NO: 82 - protein, 154 aa, Unknown
  Obtained from environmental sample
  DOMAIN (3)...(152): RNase H
  misc_feature (1)..(154): Xaa is any amino acid
MTEASLKIYTDGGCSGNPGPGGWAYVMVQQTFQGVQVIAKEKGSEKNTTNNRMELTAVIMALRALKTMSGVPRQAAVLTDSQYVQKGITEWIRNWKRNAWRTADKKPVKNQDLWMELDSLXSEFHLXWEWVKGHAGNEYNEMCDAMTQEAIALV

SEQ ID NO: 83 - DNA, 312 bp, Unknown
  Obtained from environmental sample
  misc_feature (1)..(312): n is a, c, g, or t
atggccgagatggaccgagtaagcgcttattggatcttatggaatcaaccnggctttgcagagaaggtaaggcagaaagtcaggcaagaagctagacaggaaggaatgcaggaaggtaggcaggcaggcaggcaggaaggcaggcaggaaggcagacaggaaggcaggcaggaaggcatcgaaatcggctttgagcgtggaattcaggaagaaaaagaaaaaaacgcactcgccatgaaaaaagaagggttcgataccaaaacaatatcccgaataacagggctgaccgaagacgaaatcaaccggctctga

SEQ ID NO: 84 - protein, 103 aa, Unknown
  Obtained from environmental sample
  misc_feature (1)..(103): Xaa is any amino acid
MAEMDRVSAYWILWNQPGFAEKVRQKVRQEARQEGMQEGRQAGRQEGRQEGRQEGRQEGIEIGFERGIQEEKEKNALAMKKEGFDTKTISRITGLTEDEINRL

SEQ ID NO: 85 - DNA, 480 bp, Unknown
  Obtained from environmental sample
  misc_feature (1)..(480): n is a, c, g, or t
ttggctgccgactacgacaaagccgcggtaggcgacagcgtaacgttcatcttctcggactatcaggccccgtcctcaaagttgaacgactccgtgatggcccaaatcggcgcgaacagcggtcagacggctttcgtttcgatcggcgacatgcgggccaaagcgctcggtgtggccgatattgacgtcagcaccaagtggggcgccgcgaccgccatcgagacggtgaacaacgcgttgcagaaggtttcgcatcagcgcagttctctcggcgccatccagaaccgtttggagcacacgatcaagaacctcgatacagccgccgagaacctccaggctgccgagagtcgtattcgtgatgtggacatggcgaaggagatcatggagtttacgaagaacaacatcttgcagcaggcttcccaggcgatgttggcccaggcgaattctcagccgcagagcgtgttgtcgttgttgaagtag

SEQ ID NO: 86 - protein, 159 aa, Unknown
  Obtained from environmental sample
  DOMAIN (66)...(137): Bacterial flagellin C-terminus
  misc_feature (1)..(159): Xaa is any amino acid
MAADYDKAAVGDSVTFIFSDYQAPSSKLNDSVMAQIGANSGQTAFVSIGDMRAKALGVADIDVSTKWGAATAIETVNNALQKVSHQRSSLGAIQNRLEHTIKNLDTAAENLQAAESRIRDVDMAKEIMEFTKNNILQQASQAMLAQANSQPQSVLSLLK

SEQ ID NO: 87 - DNA, 774 bp, Unknown
  Obtained from environmental sample
  misc_feature (1)..(774): n is a, c, g, or t
atggatcagatcggccgagaggttcttgaatgtttcggacagaggcctgtaatcctgcgcactcttgacataggcggggacaagcagctttcaagcctgaatataaagcgcgaggaaaacccttttctgggaaaccggggagtgcgtttttgtttaagttaccccgatatttttaagacgcagcttagagcggctttgcgcgccgccgtttacgggaatatgtggatcatgtttccaatgataaattccatagacgacatacgaaaagcaaagaaaattaccgcgtccgttcaggaagaacttgaaaaagagggaaaacccttcgggcgtattaaaaccggcattatgatagaaactccttccatcgcgcttatggcagaccttgccgcgcgggaagttgatttcgcgagcataggcaccaatgacctgtgccagtacctgtgcgcggcggacaggatgaacagcgaagtggagccctattaccagtcttttcatcccgcgatattcaaaataattaaagaggtgacaacggcttttgaaaaaaacggaaagcccatatcaatctgcggagaacttgccgccgacccgcttgcggcccctgtatttgtagggttaggcttaagaaaattgagcatgggcgcagcctctgtagccgccgtaaaacgcgcgatatgttccgtaaccgaaaaaaaagcgcgggagattgcggataaagttctggaatgcgcgacggcggaagaagttaagagcgaattggaaaaaattaaaaattaa

SEQ ID NO: 88 - protein, 257 aa, Unknown
  Obtained from environmental sample
  DOMAIN (1)...(229): PEP-utilising enzyme, TIM barrel domain
  misc_feature (1)..(257): Xaa is any amino acid
MDQIGREVLECFGQRPVILRTLDIGGDKQLSSLNIKREENPFLGNRGVRFCLSYPDIFKTQLRAALRAAVYGNMWIMFPMINSIDDIRKAKKITASVQEELEKEGKPFGRIKTGIMIETPSIALMADLAAREVDFASIGTNDLCQYLCAADRMNSEVEPYYQSFHPAIFKIIKEVTTAFEKNGKPISICGELAADPLAAPVFVGLGLRKLSMGAASVAAVKRAICSVTEKKAREIADKVLECATAEEVKSELEKIKN

SEQ ID NO: 89 - DNA, 327 bp, Unknown
  Obtained from environmental sample
  misc_feature (1)..(327): n is a, c, g, or t
atgcaccagaattcggcacnagaaatccgcagaaactcaatagacccggcggatctctttatcgcccacatcggcggcatggacgctttcgcggtaggtctgcaggtagcgcaaaaaataattgacgacggagttattccgaactttgtgaaggagcgttatgcgtcattcggttcgggggacggggcgaagttcagcaagggagagctgacgctggaacagcttgcgaagattggaacggacgcgggctacgggaagacgggcattacgagcgggaagcaggaatatctggagaatgttttgaacgggtatttgctggggttgtaa

SEQ ID NO: 90 - protein, 108 aa, Unknown
  Obtained from environmental sample
  misc_feature (1)..(108): Xaa is any amino acid
MHQNSAXEIRRNSIDPADLFIAHIGGMDAFAVGLQVAQKIIDDGVIPNFVKERYASFGSGDGAKFSKGELTLEQLAKIGTDAGYGKTGITSGKQEYLENVLNGYLLGL

SEQ ID NO: 91 - DNA, 354 bp, Unknown
  Obtained from environmental sample
  misc_feature (1)..(354): n is a, c, g, or t
atgaccggatcgcgggcgagcaccctcatggaaaaccccaaagcccgcttcgccaccgccttgcctaccgcgccaaggcccaggatgccgatgggcttgccgtataattcaatgccggtggagcgcggccattggccttcttttgttttcttgtcaagtacaggtatattgcgggcaagacaaataagcaggccaatggtgaggtcggctactgcctgggtattcgcgcgcggcgtattgcagacaacgaccttctttgcctttgctgcggccaggtctatacgatccaccccgactccgtacctggaaattaccttgaggcttcctgcgctttcaattaccccggctgtgtag

SEQ ID NO: 92 - protein, 117 aa, Unknown
  Obtained from environmental sample
  misc_feature (1)..(117): Xaa is any amino acid
MTGSRASTLMENPKARFATALPTAPRPRMPMGLPYNSMPVERGHWPSFVFLSSTGILRARQISRPMVRSATAWVFARGVLQTTTFFAFAAARSIRSTPTPYLEITLRLPALSITPAV

SEQ ID NO: 93 - DNA, 642 bp, Unknown
  Obtained from environmental sample
  misc_feature (1)..(642): n is a, c, g, or t
atgaaaaacaaaatcaacgtgctttcagtacgagtgttcgggattattgctattgttgcggtaatcgggttttcaatgatcgcttgcaataaaagcggaggtagcggtggaaacagcagtaaaagcagcggcggaggcggtaaaacgcttaacagcccagaggcgttaaaggaatatcttgacagccaaccagccaacagccccgataaaccaataaaggtttcaatgggagctaatgcgcttatgcttccaaaaatcagagaagttttagattcagcgggaaaatatgtaagccttaatcttacaggtaacgctttaaccagtattcctgattatgcttttattgctttgaaagcagataaaggttgcgaaacgcttgtcggtataacaatacccgatagcgttacaagctttgggaagtacgcttttgctggttctggccttatcaatgtaactataggaaacggcattaccagcattggtcataccgcttttttccgttgtactaaccttgtcagcgtaaccattccaaaaagcgttaccagcattgaacaagcagctttttctggttgcgaanaccttgcaagcgtaacgctgtacctgacagtgttaccagtgttcacaccccattactctctatag

SEQ ID NO: 94 - protein, 213 aa, Unknown
  Obtained from environmental sample
  SIGNAL (1)...(30)
  misc_feature (1)..(213): Xaa is any amino acid
MKNKINVLSVRVFGIIAIVAVIGFSMIACNKSGGSGGNSSKSSGGGGKTLNSPEALKEYLDSQPANSPDKPIKVSMGANALMLPKIREVLDSAGKYVSLNLTGNALTSIPDYAFIALKADKGCETLVGITIPDSVTSFGKYAFAGSGLINVTIGNGITSIGHTAFFRCTNLVSVTIPKSVTSIEQAAFSGCEXLASVTLYLTVLPVFTPHYSL

SEQ ID NO: 95 - DNA, 714 bp, Unknown
  Obtained from environmental sample
  misc_feature (1)..(714): n is a, c, g, or t
atggatgacgtcggtaatgacggcgtcgctatgtccccgcaggctatcgcggacgccgcgttgcggcatggatgcccgagcgtgtcgttcacatacacggagccgacggtcttcttcgagtacgcgttggatacggccaaagcggcgaaagcggccgggttacggacggttttcgtgtcgaacggtttcatgaccgccgagtgtttgcgtatggccgccccgtaccttgacgcgtgcaacatcgacctgaagtcgtttcgcgacgggttttacaggaagtattgcggcgcggcgcttacgccggttttggagtctctcagggcgattcgcgaggcgggtatatggcttgaggttacgacgctcattatcggcggattgaatgattcggatgaggaattgtcggacgtcgcccgttttattttaaatgatttgggccccgacacgccgtggcacgtctccggtttttacccgaggtaccgtatgtcaaacttaccgcccgcaagcgccgcgtcgatagagcgggcgtgcaagatcggcgttgacgtgggattgcgttacgtctacggcggaaacgtaaacctatttcaagacacgcgctgcccgaagtgcggcagggtattgattaacaggttaggatataaaacaaaaattaccggattgaccgctgacggcgtatgcggcgggtgcggggaaaagatcggcggaattttttga

SEQ ID NO: 96 - protein, 237 aa, Unknown
  Obtained from environmental sample
  misc_feature (1)..(237): Xaa is any amino acid
MDDVGNDGVAMSPQAIADAALRHGCPSVSFTYTEPTVFFEYALDTAKAAKAAGLRTVFVSNGFMTAECLRMAAPYLDACNIDLKSFRDGFYRKYCGAALTPVLESLRAIREAGIWLEVTTLIIGGLNDSDEELSDVARFILNDLGPDTPWHVSGFYPRYRMSNLPPASAASIERACKIGVDVGLRYVYGGNVNLFQDTRCPKCGRVLINRLGYKTKITGLTADGVCGGCGEKIGGIF

SEQ ID NO: 97 - DNA, 312 bp, Unknown
  Obtained from environmental sample
  misc_feature (1)..(312): n is a, c, g, or t
atggaatatgctttaacaggcttaaaagaagcaattgaaaaaacagtattcagcgattccaaagttcctgtgattgctaatgtgacttctcaaccggttagcaaaggcgcggagttcaaagaccttttggcaaagcagcttatttcgccagttcgttggcagcaaagcatggaaactgcggtttctcttggcgttgaaaagggaattgaggttggagcgggcaaggttttggctgggttaatgggcgttataaacggcaatgtcaaggtttattctgttgagacagaggagcagtttggctcaatagcttaa

SEQ ID NO: 98 - protein, 103 aa, Unknown
  Obtained from environmental sample
  misc_feature (1)..(103): Xaa is any amino acid
MEYALTGLKEAIEKTVFSDSKVPVIANVTSQPVSKGAEFKDLLAKQLISPVRWQQSMETAVSLGVEKGIEVGAGKVLAGLMGVINGNVKVYSVETEEQFGSIA

SEQ ID NO: 99 - DNA, 324 bp, Unknown
  Obtained from environmental sample
  misc_feature (1)..(324): n is a, c, g, or t
gtgactgcggaagaagtgcagtcgaacgtgacggacaacgagagcgcgttaataaaaagcccgcatggacatatccaggggtataacggcatagcgatagcggattccggcagccagataatagtttccgcggaagtaacgggctcgggccccgagagcggcagcttcccgaagatgctggacagccttgaagaaaacatgaaaatggtgagcaggaaaaaggaaccgttaaagaaggcgttactggaaggggacacgggatttttttcagaagccaatctgcaggaagcggcggccagggggataaaagtattaattgtatag

SEQ ID NO: 100 - protein, 107 aa, Unknown
  Obtained from environmental sample
  misc_feature (1)..(107): Xaa is any amino acid
MTAEEVQSNVTDNESALIKSPHGHIQGYNGIAIADSGSQIIVSAEVTGSGPESGSFPKMLDSLEENMKMVSRKKEPLKKALLEGDTGFFSEANLQEAAARGIKVLIV

SEQ ID NO: 101 - DNA, 381 bp, Unknown
  Obtained from environmental sample
  misc_feature (1)..(381): n is a, c, g, or t
gtgaaattaactcagaaatgcagttttttgcttggcacgaaaattgtctttattatagaaacttttaatgaggagtttcttatgaaaaaagagtctaaatctttctttgatgtacttacgtgtactaacgtgcaagtttatcccttcaaagaatctggtggaaaaacaaaagcttttgctagggtaacgctgaacgagcagcttcagctcacggggcttagagttgtggatggcgtgaatggattttttgtttcttatccgattgacccacgaaacaaagatgagaattaccactcaatttactatccgttgaacaaggaattgcgcgagcatattgagcagtgtgtattggagaaatatcaagagattgccgctgcctga

SEQ ID NO: 102 - protein, 126 aa, Unknown
  Obtained from environmental sample
  DOMAIN (39)...(124): SpoVG
  misc_feature (1)..(126): Xaa is any amino acid
MKLTQKCSFLLGTKIVFIIETFNEEFLMKKESKSFFDVLTCTNVQVYPFKESGGKTKAFARVTLNEQLQLTGLRVVDGVNGFFVSYPIDPRNKDENYHSIYYPLNKELREHIEQCVLEKYQEIAAA

SEQ ID NO: 103 - DNA, 681 bp, Unknown
  Obtained from environmental sample
  misc_feature (1)..(681): n is a, c, g, or t
atgtatattgataccgcaagacaaataatagaaaaaattccccggaaagaacaaaaatactttttagcgccattactgtcagaagcttcaatacatgcaaatacttcgggagttttcaaaggtttctataaaaataaggaaaccggtattgggcagtttggaggactgaataaagacgccctattcagaattaaaggcgaaataaagctgccttttccgatattcagtaattttaattgtgagactattgtttacagcggtgattcaaataaaataattaaggatttacccgaagttgatatagcgtatttggatcctccctataatcaacatccttacggttcaaattattttatgttgaatttgatattggattataagtatcctgaaagcacgagtaaaatatcgggaattcccggaaattggaatcgttctgattataataaaagtcaaaaagcattacagtcattaacagaacttgttgaaggaataaaagcgaaatttgtgttaatttcatttaattcggaaggtttcattacaattgaacagatgaaaaaaatgttaaaaaaaataggcaaatttcgggtgctggaaacgaaatataatactttcaggggaagcagaaatctgaataatcgtgaaattcatgtaaaggaatatttatatctattggagaaataa

SEQ ID NO: 104 - protein, 226 aa, Unknown
  Obtained from environmental sample
  misc_feature (1)..(226): Xaa is any amino acid
MYIDTARQIIEKIPRKEQKYFLAPLLSEASIHANTSGVFKGFYKNKETGIGQFGGLNKDALFRIKGEIKLPFPIFSNFNCETIVYSGDSNKIIKDLPEVDIAYLDPPYNQHPYGSNYFMLNLILDYKYPESTSKISGIPGNWNRSDYNKSQKALQSLTELVEGIKAKFVLISFNSEGFITIEQMKKMLKKIGKFRVLETKYNTFRGSRNLNNREIHVKEYLYLLEK

SEQ ID NO: 105 - DNA, 801 bp, Unknown
  Obtained from environmental sample
  misc_feature (1)..(801): n is a, c, g, or t
atgcgctgtttctacaacggctaccggttttccaagaacccgatcacagtctacaaccccttcgggatacttaaccatttcgagaacaacggtgatttcaggtcatattggtacagaagcggtacgccaaccctcctgacagatctgattaacagccaaaatattgacctcacaaacttaaacaatatgcaggtagggtacgacgactttgatgccttcgacatagaggagatggaaccggcgccgcttttatatcaaaccggctacctcacgataaccgattacgatgaaaaagaagagtgtttcacgcttgattatccgaatatcgaggtgcgtagcgcctttgcaaaatcgcttgcgacgcggtgtctgaagaccccttcaaactggtcatactcgtcatgcaaaaaactaatggcggcgctaaacggcggcgacgtagacgccgcgatggaggcggtgaagctgtttatgaccaaaatcccgtatgacttgtttcaaaaaagggagaacttcttccaatcggtgatatacgtgatgttcgctatgcttggcctcgactgccgtaccgaggaaagaatcgccacggggcggctcgacatggtcgttgagacacggggcttcgtttactgcttcgagttcaaattagacggtaccgcgtatgcggcgctagttcagatcgacaccaatgagtatgccattccttggacggggcgcgggaagaaggtcttcaaggtcggggtgagctttgatttcgagaaaaagaacatcggggagtgggtgtctgaggtagcggagtag

SEQ ID NO: 106 - protein, 266 aa, Unknown
  Obtained from environmental sample
  DOMAIN (1)...(260): Protein of unknown function (DUF1703)
  misc_feature (1)..(266): Xaa is any amino acid
MRCFYNGYRFSKNPITVYNPFGILNHFENNGDFRSYWYRSGTPTLLTDLINSQNIDLTNLNNMQVGYDDFDAFDIEEMEPAPLLYQTGYLTITDYDEKEECFTLDYPNIEVRSAFAKSLATRCLKTPSNWSYSSCKKLMAALNGGDVDAAMEAVKLFMTKIPYDLFQKRENFFQSVIYVMFAMLGLDCRTEERIATGRLDMVVETRGFVYCFEFKLDGTAYAALVQIDTNEYAIPWTGRGKKVFKVGVSFDFEKKNIGEWVSEVAE

SEQ ID NO: 107 - DNA, 699 bp, Unknown
  Obtained from environmental sample
  misc_feature (1)..(699): n is a, c, g, or t
atgcctgtagaaaagttagatccggaacaagatgtgaaaagtactggcggaggattattgagcgttgcaaaattagtagcaaaaggcggggaagatggaatttttaaaaatgccgtaaatgtgtatgttccagatggcattgatatttggccacgggtatttagagattgtaaccgcttaaaagaagtcagactgcctgatgatcttgaatatataggggagggcttgtttgatggatgtgggcagcttgagactgttcatttaccatctgcgttaaaatcaatcggcgcatgggcttttaaaaagtgtaaaaaactcaccagaattgacctgcctgataatattggtataggctcatatgcttttgaagaatctggtattaaacaaataagatggccggtcggtagtaagaatattaggatgggtacattcaaaaagtcagcgcttgaatctattgttatccccgaaggggtagaaagaatagatggaggtgcttttgaagaatgtacaaaattgaccagtgtctcattaccttcaacaataaaatacatagggtggaccgctaacgccgatgatcttgcaggtgcaattttgaaagcaatggatggttcagcttttaggaaatgcaaaaacctgacaacattaaatataccggatagcgtttctgaaattaattgtatggttatacaattttactga

SEQ ID NO: 108 - protein, 232 aa, Unknown
  Obtained from environmental sample
  misc_feature (1)..(232): Xaa is any amino acid
MPVEKLDPEQDVKSTGGGLLSVAKLVAKGGEDGIFKNAVNVYVPDGIDIWPRVFRDCNRLKEVRLPDDLEYIGEGLFDGCGQLETVHLPSALKSIGAWAFKKCKKLTRIDLPDNIGIGSYAFEESGIKQIRWPVGSKNIRMGTFKKSALESIVIPEGVERIDGGAFEECTKLTSVSLPSTIKYIGWTANADDLAGAILKAMDGSAFRKCKNLTTLNIPDSVSEINCMVIQFY

SEQ ID NO: 109 - DNA, 621 bp, Unknown
  Obtained from environmental sample
  misc_feature (1)..(621): n is a, c, g, or t
atgcccttgcgtttcctaatatacatatcaaaagtatatgaaaagataatagaccccaaaagcatttataagcattatttgatgaaaatcccccgaccagagttcatagttctctacaacggcacggacaaatacccaaaagaaaaaacattgaaactatccgatgcttttgaggaactaggcataaaaaaagccccagagttggaattatccgtaagggtgctaaacattaacaagggtcacaacccaaagctggaacgtagaagcaagaacttagctggttattcgttttttgtggcaaaggttagggaatttcagtccattggcaatccattaaaacaagcaatagaaaaggcagtccgtcattgcatagataaaggtatattgcgagattatttgagaaaaaattcatcggaggtcgttaatatgtttagcgtagagttcaatttgaaagatgccatcgccgtagccagagaggaaggcgaagagagaggcatagagaaaggcgaagccaggggcgaaaaaaaaggcattaaaaagttgcttgcccttttggaaaagggtattcctttggcggaagccaaacgaaggcttggggttaatagaaaatttgccacctaa

SEQ ID NO: 110 - protein, 206 aa, Unknown
  Obtained from environmental sample
  misc_feature (1)..(206): Xaa is any amino acid
MPLRFLIYISKVYEKIIDPKSIYKHYLMKIPRPEFIVLYNGTDKYPKEKTLKLSDAFEELGIKKAPELELSVRVLNINKGHNPKLERRSKNLAGYSFFVAKVREFQSIGNPLKQAIEKAVRHCIDKGILRDYLRKNSSEVVNMFSVEFNLKDAIAVAREEGEERGIEKGEARGEKKGIKKLLALLEKGIPLAEAKRRLGVNRKFAT

SEQ ID NO: 111 - DNA, 435 bp, Unknown
  Obtained from environmental sample
  misc_feature (1)..(435): n is a, c, g, or t
atgaagagagctttttttctaacagcattaatcatctgtataatgctggcggtgtcctgcaaatccggttcgaagaacttggatgagcagtacagagatctgtatgacgctaacaccgggcttgattttaccggggctggcacatacacagtgaaatcgggcgacacattgtcaaagatttcaagtcacgcctataatgacggttttttttaccccgtcattatgctcgcctcacggggcgtgataataaaccctgacaaaattcggcccggtatggagttgacaattccaaatcttgaaagaaacaaaaccagcgctgccggcagaaagagcatgaaaaattgcctttacggatttgccaacattgaaaaaataaaggcaaacccgaatcagagtttgatcgacggatttaggaaacgcgcggacgaactgtaa

SEQ ID NO: 112 - protein, 144 aa, Unknown
  Obtained from environmental sample
  SIGNAL (1)...(24)
  DOMAIN (49)...(97): LysM domain
  misc_feature (1)..(144): Xaa is any amino acid
MKRAFFLTALIICIMLAVSCKSGSKNLDEQYRDLYDANTGLDFTGAGTYTVKSGDTLSKISSHAYNDGFFYPVIMLASRGVIINPDKIRPGMELTIPNLERNKTSAAGRKSMKNCLYGFANIEKIKANPNQSLIDGFRKRADEL

SEQ ID NO: 113 - DNA, 672 bp, Unknown
  Obtained from environmental sample
  misc_feature (1)..(672): n is a, c, g, or t
atgcgtaatttaacatcacgattcggtcccatgtctttttaccgggaggcgcttgcgattgccgttccggtcatgctccagcagtttattatgagcatggtctcccttatcgacaattttatggtcgcgggtctcggcgacataagcatggcttctgttaatgtgacaaaccagcttaactttattttttttgttatcatcaataccatctgccaggcggggggcatatacgtcgcccagttcaagggcgcgaatgatccggaaggcatgcggcaggcttttcgttttaaaataatttttgccattgccgccgccgccctgtatttcacgctctgctggaccataccccacagaatgttgggcatgatggttttgggcaacgcccagcgaaatgaaattataagcaagggaagcgaatatataaagctgatctcatggacgcttgtccctatggcgatttcattttccatcggaaccagtttccgcgagattgcccgtccaaaggcgcctctgtttatttccgccgcggcaaccattgtaaacaccgtggggaactggatactgatatacggcaatcttggcgccccgcgcctgggagttaaaggcgcggcttacgctactattatagcccgtttttttgaacttaccgttttttatggtttacaccagtag

SEQ ID NO: 114 - protein, 223 aa, Unknown
  Obtained from environmental sample
  DOMAIN (23)...(187): MatE
  misc_feature (1)..(223): Xaa is any amino acid
MRNLTSRFGPMSFYREALAIAVPVMLQQFIMSMVSLIDNFMVAGLGDISMASVNVTNQLNFIFFVIINTICQAGGIYVAQFKGANDPEGMRQAFRFKIIFAIAAAALYFTLCWTIPHRMLGMMVLGNAQRNEIISKGSEYIKLISWTLVPMAISFSIGTSFREIARPKAPLFISAAATIVNTVGNWILIYGNLGAPRLGVKGAAYATIIARFFELTVFYGLHQ

SEQ ID NO: 115 - DNA, 636 bp, Unknown
  Obtained from environmental sample
  misc_feature (1)..(636): n is a, c, g, or t
atggccaggcgcggcggtatgatgaaacgcggtcctgaacactggcatcccgatcctgaatttttctacaaggacggcggcgggccaatgttcgatatggggccgtactacataaccgcgatggtcagtctcttagggcctgtttccagggtttccggcagcgccaagattaccaacccggttcgtactatcacaaacaaacaacagtacggcactgttataaatgtggaagttcccacgcacattgcaggcgtccttgattttacaagcggcgcggtcggcacgattgtaacaagttttgacgtgtattcgcataccttgcctttcattgaaatttacggaaccgaaggcacgcttaaagttccagatcccaatacttttggcggccctgttattgtcaggcgtttcagcgacgaagaatggtataaaataccgcttctcaagtcgtattcagacaattcgagggggcttggaattattgacatggcggaagcaattgaagagaaccgcccacatcgcgcctgtgccgaaatggcttaccatgtgctggacataatgcacggcatacacgacgcatcatcagcgggaaggcacgtcaagctcaaaagcaaatgcaagcgtccagcggcgtgttaa

SEQ ID NO: 116 - protein, 211 aa, Unknown
  Obtained from environmental sample
  misc_feature (1)..(211): Xaa is any amino acid
MARRGGMMKRGPEHWHPDPEFFYKDGGGPMFDMGPYYITAMVSLLGPVSRVSGSAKITNPVRTITNKQQYGTVINVEVPTHIAGVLDFTSGAVGTIVTSFDVYSHTLPFIEIYGTEGTLKVPDPNTFGGPVIVRRFSDEEWYKIPLLKSYSDNSRGLGIIDMAEAIEENRPHRACAEMAYHVLDIMHGIHDASSAGRHVKLKSKCKRPAAC

SEQ ID NO: 117 - DNA, 444 bp, Unknown
  Obtained from environmental sample
  misc_feature (1)..(444): n is a, c, g, or t
ttgcgcccgtggactgcaaagcatacggcaggaaggtcaaaagagcattggcccgttgtatttttcaagctgatgcttgtcgggtaccttgaaaacatctgctcagaccgtaaaatcatagagcaatgctctctgcgtctggatatactttattttttgggttacgacatagacgacctctttccttggcatagcaccttgagccgtacacgcaaactgctgggcgaggaagtgtttttaagtttttttcgcgacatattgaaaaggtgcgtagaaaaaggcatggttgatggcaggattcaggcggctgacagcgcgttcatcaaggcaaacgcctcaatgagcagattagaggagaatgaacttgcgaagaagagcaagagttattttgacgttttttttacgatagcgaggaggattgctacatatgcgacattggtgtga

SEQ ID NO: 118 - protein, 147 aa, Unknown
  Obtained from environmental sample
  misc_feature (1)..(147): Xaa is any amino acid
MRPWTAKHTAGRSKEHWPVVFFKLMLVGYLENICSDRKIIEQCSLRLDILYFLGYDIDDLFPWHSTLSRTRKLLGEEVFLSFFRDILKRCVEKGMVDGRIQAADSAFIKANASMSRLEENELAKKSKSYFDVFFTIARRIATYATLV

SEQ ID NO: 119 - DNA, 927 bp, Unknown
  Obtained from environmental sample
  misc_feature (1)..(927): n is a, c, g, or t
ttgctatatgttattgtaggtgttatggaatttcttccggtttcgcaggaatcgcttttgcgggctgccgaagtcctgcgccggggcgggcttgccgcctttcctacggaaaccgtatacggcttgggagcggacgcctataatgcggcggctgtcgcgaaagtcttcgaggtaaaagggcgtccccgcttcgatcctctcattatccatatcgccgccgcggaaactcttgaacaagcagccaacctttccatgttaacggaagaaacaaaacagagactcaacctgctggcaaaagaattttggcccggccctctttccatcattctccccaaaagcgataaaatacccggcatcgcgacagcgggtctttgtacggcggcgtttcgtatccccggccacgatgccgcgcttaaattaatttccttaagcggcggagcggtagcggctcccagcgccaatcctttcggcgcgttaagccccacaagggcggaatatgtgcgggataaactcggcgaaaaagtcgatattattcttgacggcggagctacgagggtcggcgttgaatccactgtgctggatataacaggcgattccgtaaagatactgaggcccggcggcacgccgaaagaggcaattgaaaagctgataggcgctgtagaagacggttctctttccgctgaaggcgtttttgtttcccccggccagcttaaaagccattatgccccgaagactcctctgaaggttttttcaagggaagaaatagtaagtctgccttacgaaaaaggaagggcgtttcttttttttgacggccgcgcaagggacgaatggcttgaggcgcaaaccgcggatacacccgcaaaagaagcgataagggtgctttcagaatcgggcagtacagccgaagccgcggccctgtttttttga

SEQ ID NO: 120 - protein, 308 aa, Unknown
  Obtained from environmental sample
  DOMAIN (24)...(206): yrdC domain
  misc_feature (1)..(308): Xaa is any amino acid
MLYVIVGVMEFLPVSQESLLRAAEVLRRGGLAAFPTETVYGLGADAYNAAAVAKVFEVKGRPRFDPLIIHIAAAETLEQAANLSMLTEETKQRLNLLAKEFWPGPLSIILPKSDKIPGIATAGLCTAAFRIPGHDAALKLISLSGGAVAAPSANPFGALSPTRAEYVRDKLGEKVDIILDGGATRVGVESTVLDITGDSVKILRPGGTPKEAIEKLIGAVEDGSLSAEGVFVSPGQLKSHYAPKTPLKVFSREEIVSLPYEKGRAFLFFDGRARDEWLEAQTADTPAKEAIRVLSESGSTAEAAALFF

SEQ ID NO: 121 - DNA, 486 bp, Unknown
  Obtained from environmental sample
  misc_feature (1)..(486): n is a, c, g, or t
gtgccgccgggcctcagtatctttacggaatcgcctgttatatccagcacagtggattcaacgccgaccctcgtagctccgccgtcaagaataatatcgactttttcgccgagtttatcccgcacatattccgcccttgtggggcttaacgcgccgaaaggattggcgctgggagccgctaccgctccgccgcttaaggaaattaatttaagcgcggcatcgtggccggggatacgaaacgccgccgtacaaagacccgctgtcgcgatgccgggtattttatcgcttttggggagaatgatggaaagagggccgggccaaaattcttttgccagcaggttgagtctctgttttgtttcttccgttaacatggaaaggttggctgcttgttcaagagtttccgcggcggcgatatggataatgagaggatcgaagcggggacgcccttttacctcgaagactttcgcgacagccgccgcattatag

SEQ ID NO: 122 - protein, 161 aa, Unknown
  Obtained from environmental sample
  misc_feature (1)..(161): Xaa is any amino acid
MPPGLSIFTESPVISSTVDSTPTLVAPPSRIISTFSPSLSRTYSALVGLNAPKGLALGAATAPPLKEINLSAASWPGIRNAAVQRPAVAMPGILSLLGRMMERGPGQNSFASRLSLCFVSSVNMERLAACSRVSAAAIWIMRGSKRGRPFTSKTFATAAAL

SEQ ID NO: 123 - DNA, 783 bp, Unknown
  Obtained from environmental sample
  misc_feature (1)..(783): n is a, c, g, or t
ttgccgatgggctatttgatcgccggtcccgtaggtacgggtaaaagttttatggttaacgccttcgcgggtgagattggaattcccatggtgaagtttcgcaacttccgcacaaagtggcagggcgagacagaatcaaaccttgaaagagtattaaatattcttacggcgatgtctcccgtaggagtgatgatagacgaagccgacgctttcctcggagaccgctctcaggatggggattcaggcacaagcaaccgcgtgttcgcgcagatagcctcattcatgggcaatacggaataccgcggtaaaattatctggttcttaattacatgccgccccgacttaatacctattgaccttaaacgtcagggacgcgccgaagagcaccttgctcttttttatcctgaatcaaaaaaagacagagaagacctttttgacacattggtgcgcaaacttgatttagacattcgcaatttttcggtttccgatctttttaaaaaattcgattacgaatattcaggcgcggatttggaagcggttcttgtgcgcgcgaaacttatcgcggcaatggcggatcgtatctatgtaaaaaaggaagacatggaagaggcgatgaacgactttgttcccgccgcctatccgcacgaagtagaattgcaaaatctggttgcggttctggaatgtacctcanaggaaatgcttccttcgcgtttccaaaaattaccgcgcagcaagataatcaacgatattcaggaacttaaaatgcttttgggcgagcgctag

SEQ ID NO: 124 - protein, 260 aa, Unknown
  Obtained from environmental sample
  SIGNAL (1)...(23)
  DOMAIN (4)...(191): ATPase family associated with various cellular activities (AAA)
  misc_feature (1)..(260): Xaa is any amino acid
MPMGYLIAGPVGTGKSFMVNAFAGEIGIPMVKFRNFRTKWQGETESNLERVLNILTAMSPVGVMIDEADAFLGDRSQDGDSGTSNRVFAQIASFMGNTEYRGKIIWFLITCRPDLIPIDLKRQGRAEEHLALFYPESKKDREDLFDTLVRKLDLDIRNFSVSDLFKKFDYEYSGADLEAVLVRAKLIAAMADRIYVKKEDMEEAMNDFVPAAYPHEVELQNLVAVLECTSXEMLPSRFQKLPRSKIINDIQELKMLLGER

SEQ ID NO: 125 - DNA, 651 bp, Unknown
  Obtained from environmental sample
  misc_feature (1)..(651): n is a, c, g, or t
atgcaacttgacattgtttatgaagacaattcatgtatagtgatcaacaagccggcaggccttgcggcacagggagggaaaggtataaacgtgtctctggacagtatcctggcccaaagccggcagcagcggcctttactggtacacaggctggacagggatacttcaggtttgatccttgtcgcgaagaacaaaacggcggccgcagtttactcccgcctgcttggacatcgcgccgtcgttaagcgatatcttgcaacatgcaaaggcaggccggctcagagcaaagggataatcagcctggatttggatattcgcggcattaaaaaaaaatccgaaaccagttaccgtataattgatgagtttgaaaacggcttctctcttctggaacttgagttgggaacaggcaggatgcatcagattcgccgccatcttgccctgacggggaaccctgtgcttggcgatgacaaatacggcgatttcaccctgaaccatctgctgcgcaggacaatgaagctgaacaagcttctcctgcacgcgtcgcagctaattattccggaaaccccagacaccccacgcctggacttgagcgcgccattgccggagcattttgcacaatttgtttcttaccgtatgttacgtgtcatttga

SEQ ID NO: 126 - protein, 216 aa, Unknown
  Obtained from environmental sample
  DOMAIN (11)...(147): RNA pseudouridylate synthase
  misc_feature (1)..(216): Xaa is any amino acid
MQLDIVYEDNSCIVINKPAGLAAQGGKGINVSLDSILAQSRQQRPLLVHRLDRDTSGLILVAKNKTAAAVYSRLLGHRAVVKRYLATCKGRPAQSKGIISLDLDIRGIKKKSETSYRIIDEFENGFSLLELELGTGRMHQIRRHLALTGNPVLGDDKYGDFTLNHLLRRTMKLNKLLLHASQLIIPETPDTPRLDLSAPLPEHFAQFVSYRMLRVI

SEQ ID NO: 127 - DNA, 375 bp, Unknown
  Obtained from environmental sample
  misc_feature (1)..(375): n is a, c, g, or t
gtgcctgataatgaaattgcctggcattgcgggagtgaatctcctgaccctgtttccggcaggatttatacgaattgggcacggcaaaaatatggttattatgcttgtgaccctgtgaaaacaagccccaatttttgcactttggggattgaattgtgcattgacgctgcggggaattttacgcctgaaacaatacaagcagcagttgatttatctgttcaactgttagagaaaaacctcttgtttgttgatgatattggacaccataacaaagttgtaggttttaaggattgccccctgccgtgggttaaaaatccctcattgtttcatgaattcaaagaaatggtaaaggcaaaaatggggtgtttgttatga

SEQ ID NO: 128 - protein, 124 aa, Unknown
  Obtained from environmental sample
  misc_feature (1)..(124): Xaa is any amino acid
MPDNEIAWHCGSESPDPVSGRIYTNWARQKYGYYACDPVKTSPNFCTLGIELCIDAAGNFTPETIQAAVDLSVQLLEKNLLFVDDIGHHNKVVGFKDCPLPWVKNPSLFHEFKEMVKAKMGCLL

SEQ ID NO: 129 - DNA, 726 bp, Unknown
  Obtained from environmental sample
  misc_feature (1)..(726): n is a, c, g, or t
gtggcaagcgggcgggaactcagaacctnttcggggcatacggaaggcgttcaatccgtggcgttcagccccgaccaacggaaagcgctgtcctgttccctggacggcactgtccgcctctgggacctgggcgccggaaaagaaaccgcccaattcatttcctttggcaatgacgagtggatcgcgtttacccccgaaggcttctacaacgcttcgcctgaaggggacaaatacctcaatgtcagggtaggtctcaacgtctacggcatggaccagtaccggcgggcatttaaaaattccgccctaatcgcccaggctctttccggcaacacaagcgcgtacattgccggggcgcgggagattggcaagactgtgccggacgcgtctatcgccccgccgcaggtcgccgtctcggcttcgccggtctcaagatcagccactgtgaacatatccgcctctgtggacggcggaagccagagcatccagtatttagcgataaatgtaaacggcaaaataacagcccgcgatctgggcgtaaccgagatgctcataattgattttatgcctgtaattcagtttaacgcgctggccgagggacagacaaacaaaaagaaaacaaatttcaatcttgacatccctcttgatccgggtgataacaccgtcgaagttgttgcgtttaacggctattccgaaggccgcgccgttataacggttacaaggcagtaa

SEQ ID NO: 130 - protein, 241 aa, Unknown
  Obtained from environmental sample
  DOMAIN (5)...(42): WD domain, G-beta repeat
  misc_feature (1)..(241): Xaa is any amino acid
MASGRELRTXSGHTEGVQSVAFSPDQRKALSCSLDGTVRLWDLGAGKETAQFISFGNDEWIAFTPEGFYNASPEGDKYLNVRVGLNVYGMDQYRRAFKNSALIAQALSGNTSAYIAGAREIGKTVPDASIAPPQVAVSASPVSRSATVNISASVDGGSQSIQYLAINVNGKITARDLGVTEMLIIDFMPVIQFNALAEGQTNKKKTNFNLDIPLDPGDNTVEVVAFNGYSEGRAVITVTRQ

SEQ ID NO: 131 - DNA, 693 bp, Unknown
  Obtained from environmental sample
  misc_feature (1)..(693): n is a, c, g, or t
ttgcaacaattagaaaacgggataaaagccataaaggataaaaaaaatggaactgggattttagcttattttcagagctacacaaacacccacgcccctattcaaaaacttcgcgaaatttttacgccagttattctgcacagcgacgttgctggaattgccgttggaacgcgaccggattgcctgcccccgcaagttgtggaattgttagcggagttgaacggcataaaaccagtaatcgtggagataggtgtacaaaccgcaaacgaccaaacccttaaaaacataaacagaaaccacaccgcagagtgtgcccgcaaagcggctctgctctgcaaaaattcaaaactcctcacaactgctcatatcataatcgggttgccgcacgaaagtgcagatgactttgcgaacacggcaaaatttgtaaaggaatgtggattctccgcagtgaaaattcatcctttgcacatagttaaaggaactcgctttgagcaagaatacaaagaaggcaaaatagaattgatatccttagcggattattgcaaagccgcagcggaattcatccgcattgttcaacctgatatagccatagaaagagtgagcggcgagtccccagccgacatattaattgccccagcctggagcggggacagaaaccgtatttggaaagaaatagaacaggtgtgcctgtag

SEQ ID NO: 132 - protein, 230 aa, Unknown
  Obtained from environmental sample
  misc_feature (1)..(230): Xaa is any amino acid
MQQLENGIKAIKDKKNGTGILAYFQSYTNTHAPIQKLREIFTPVILHSDVAGIAVGTRPDCLPPQVVELLAELNGIKPVIVEIGVQTANDQTLKNINRNHTAECARKAALLCKNSKLLTTAHIIIGLPHESADDFANTAKFVKECGFSAVKIHPLHIVKGTRFEQEYKEGKIELISLADYCKAAAEFIRIVQPDIAIERVSGESPADILIAPAWSGDRNRIWKEIEQVCL

SEQ ID NO: 133 - DNA, 630 bp, Unknown
  Obtained from environmental sample
  misc_feature (1)..(630): n is a, c, g, or t
ttgttttgtctggttggaaaattcataacggtgcctgtggcgctcgcttatgtgcttttcaccgtaagccgcaagaatgtgagtgccgtccgcgtttacagtttccatcgcgccaagacgcatggttcctccgtaattggtaacattaacctgctcttccaaaaggcttacaaccggatacttcgagtcctggttgaactcggtcgaatccgcgtcgctccacttaagcacgttcctgccccagtcaatcaccatgatgtgcatacccaggcagatgcccaggtacgggactttgttttcccttgcccaggccgaagccctgaccatgccgttgatcccgcgctggccgaagccgccgggaaccagaacgccgtccaccttgatgccgtcaagggcgttttcgtttttttcaagctcggcggaatcgactttaaccaattccacttccacatcgcactcaaggccggcgtgaaacagcgcttcgtacagcgacttgtaggcgtcgtgcagttccatatacttgcctacaatgccgatccgcactttgcccgccctttcttcaaagtgcttcatgacggaaagccacggtttcatgtccgcatggcggctttccactcccaatttccgtaa

SEQ ID NO: 134 - protein, 209 aa, Unknown
  Obtained from environmental sample
  misc_feature (1)..(209): Xaa is any amino acid
MFCLVGKFITVPVALAYVLFTVSRKNVSAVRVYSFHRAKTHGSSVIGNINLLFQKAYNRILRVLVELGRIRVAPLKHVPAPVNHHDVHTQADAQVRDFVFPCPGRSPDHAVDPALAEAAGNQNAVHLDAVKGVFVFFKLGGIDFNQFHFHIALKAGVKQRFVQRLVGVVQFHILAYNADPHFARPFFKVLHDGKPRFHVRMAAFHSQFP

SEQ ID NO: 135 - DNA, 414 bp, Unknown
  Obtained from environmental sample
  misc_feature (1)..(414): n is a, c, g, or t
gtggacgcatttgtacgtaaaagcaacctcactacgataaaacctgacctgcggcattatgggtttaactcgccgaatcccgtagacgaaacaggccgccacggctatgaggtttgggttactattcccgatggtttttctgtaccggaacctcttgtgaaaaaacactatgagggtggattatatgctgctcacatgattccattcggggcgtttgatgaatggggcctgcttaaccagtggatggggaataacggcaaatatgaattcagaagctcaggtgatcatcaaaatatgtttggacttatggaagaacatttaaactacgtcaatcgtgtacatttggatgatcccgaagaagaaggctgtcaattagaccttttgatgccgatcaaggagaagggaaaagaataa

SEQ ID NO: 136 - protein, 137 aa, Unknown
  Obtained from environmental sample
  misc_feature (1)..(137): Xaa is any amino acid
MDAFVRKSNLTTIKPDLRHYGFNSPNPVDETGRHGYEVWVTIPDGFSVPEPLVKKHYEGGLYAAHMIPFGAFDEWGLLNQWMGNNGKYEFRSSGDHQNMFGLMEEHLNYVNRVHLDDPEEEGCQLDLLMPIKEKGKE

SEQ ID NO: 137 - DNA, 324 bp, Unknown
  Obtained from environmental sample
  misc_feature (1)..(324): n is a, c, g, or t
ttgagatgttatcttttatggacaaatttataccaaagaataatgtcaaatgaaagagacggagtaattcgcatgaaaagtgaaaaaaagatatggttgattgagcaatatgcccataaaacatggacagtttctctgagtttggcgcaggaagcggcacgcgcggggcagcatgggaaaggctacgcagtagtcgcccaggaagcgcgcatgattgccgacaaactattcgaatacacggctgaaataaattttgaaggcgccgatgatgccatgctcaaaggtattgtagactttgtagttgaatttaaatttttatcgtaa

SEQ ID NO: 138 - protein, 107 aa, Unknown
  Obtained from environmental sample
  misc_feature (1)..(107): Xaa is any amino acid
MRCYLLWTNLYQRIMSNERDGVIRMKSEKKIWLIEQYAHKTWTVSLSLAQEAARAGQHGKGYAVVAQEARMIADKLFEYTAEINFEGADDAMLKGIVDFVVEFKFLS

SEQ ID NO: 139 - DNA, 636 bp, Unknown
  Obtained from environmental sample
  misc_feature (1)..(636): n is a, c, g, or t
atgcattcagttaaaactcttaataaaatctcagctagaggcactagcttatttggggaaaattactcaataggcgattccatagagaatccagaagctattttggttagaagctcgcaggttgataccgattcattctctggcgatttgctcgcagttgttcgtgcaggcgcaggcgttaataacataacaatagacaaagccagcgcaaaaggcgtgtgcgttttcaatactcctggcgcaaatgcaaatgctgtttcggagcttgttttcacggctctgggcattgctttgaggaatatccataaatctttagcttggataggtagccttaggggtaaggaaaacaaggaaatcagcgaggctgttgaaaagaataaatctgcatttgtgggtgccgagctggcaggaaaaaccataggcgttataggtcttggcaaaattggcgttttggttgcaaatggagccatcggccgtggcatgaaggttgtagcttacgagccttatcctagcgttggcaatatgcttatgctaaacaacacggttaaagtagtgcagagccttgatgaggttatagccgccgcagatgttttaaccgtgcacgttccgtttatgtcggctacaaaggatttgtaa

SEQ ID NO: 140 - protein, 211 aa, Unknown
  Obtained from environmental sample
  DOMAIN (4)...(202): D-isomer specific 2-hydroxyacid dehydrogenase, catalytic domain
  misc_feature (1)..(211): Xaa is any amino acid
MHSVKTLNKISARGTSLFGENYSIGDSIENPEAILVRSSQVDTDSFSGDLLAVVRAGAGVNNITIDKASAKGVCVFNTPGANANAVSELVFTALGIALRNIHKSLAWIGSLRGKENKEISEAVEKNKSAFVGAELAGKTIGVIGLGKIGVLVANGAIGRGMKVVAYEPYPSVGNMLMLNNTVKVVQSLDEVIAAADVLTVHVPFMSATKDL

SEQ ID NO: 141 - DNA, 621 bp, Unknown
  Obtained from environmental sample
  misc_feature (1)..(621): n is a, c, g, or t
atgctttatttacgcgctggcggagaaactgccgcatactggtttgctacaaaggatacaatttcaaaaatctacgacgggcggttcaaagcgatttttaacgaagtatacgaaaccgagtttaaggaaaaatgcgccgcctgcggcattgagtatttttacacgttgatagacgacgccgttgcgcgcgttgtaaagggcgaaggcggttttttgtgggcgtgcaaaaattacgacggcgacgttcaaagcgacatgatcgcaagcgcggcaggaagcctggctatgatgacaagcgtccttgtctccccttccggcgtttttgagtatgaagctgcccacggtacagtgcagcagcactactaccgctggcaaaaaggcgaaaaaacaagcactaaccccgcggcgttaattttcgcgtggtcaggcgctctggcaaaacgggcggaattagacggcctgaacgatttggcggattttgcaaaacggcttgaggccgcggtgcttggcgtcatagaagacggaataatgactggggacttggcaaaactttccgatccgcctcccgacaaggttcttaattcatgggactttattgacgcgatagcgcagaggctgtaa

SEQ ID NO: 142 - protein, 206 aa, Unknown
  Obtained from environmental sample
  DOMAIN (2)...(202): Isocitrate/isopropylmalate dehydrogenase
  misc_feature (1)..(206): Xaa is any amino acid
MLYLRAGGETAAYWFATKDTISKIYDGRFKAIFNEVYETEFKEKCAACGIEYFYTLIDDAVARVVKGEGGFLWACKNYDGDVQSDMIASAAGSLAMMTSVLVSPSGVFEYEAAHGTVQQHYYRWQKGEKTSTNPAALIFAWSGALAKRAELDGLNDLADFAKRLEAAVLGVIEDGIMTGDLAKLSDPPPDKVLNSWDFIDAIAQRL

SEQ ID NO: 143 - DNA, 363 bp, Unknown
  Obtained from environmental sample
  misc_feature (1)..(363): n is a, c, g, or t
ttgccatttaaaagttcgggggcggacatagggggcgttacaagtattntctnttcggcagtttctacnggggttaacgggcgctgtgcnaggcatcttgttgggctgttaatcggggttaatatcaattcgttggttcgcggtctggaaaaaattttaagttttttctcaagtctttttcacggagaggaaataaaaatactcgatcccggtttttaccttgaaacaatccccattatcatagactggaacgccgtcctattaattggaatttttgcggttctctgctcaattttggcctcatggataccggcccgccgcgccgggaaattaaagccgatggaacttttaagaaagacttga

SEQ ID NO: 144 - protein, 120 aa, Unknown
  Obtained from environmental sample
  misc_feature (1)..(120): Xaa is any amino acid
MPFKSSGADIGGVTSIXXSAVSTGVNGRCARHLVGLLIGVNINSLVRGLEKILSFFSSLFHGEEIKILDPGFYLETIPIIIDWNAVLLIGIFAVLCSILASWIPARRAGKLKPMELLRKT

SEQ ID NO: 145 - DNA, 309 bp, Unknown
  Obtained from environmental sample
  misc_feature (1)..(309): n is a, c, g, or t
atgccggtaatacctaaaattcgtcctgtttccgaccttagaaacaaattcagcgatatttcccggtcagtgcatgaaactaatacgcctgtttttttaactaagaatggccggggcgatatggttgtgatgagtctggaagcatacgaacaaaatctttttgagtctgaaatttacctaaaactaaaagaagcggaatatcaggctgcatcggtaaaaaagcggtatacccatgatgaagtaattgccgaactgcgaaaaacaatatcagaaaaaaaatcacgcgggaaaaaactccaaaatgtataa

SEQ ID NO: 146 - protein, 102 aa, Unknown
  Obtained from environmental sample
  DOMAIN (5)...(73): Phd_YefM
  misc_feature (1)..(102): Xaa is any amino acid
MPVIPKIRPVSDLRNKFSDISRSVHETNTPVFLTKNGRGDMVVMSLEAYEQNLFESEIYLKLKEAEYQAASVKKRYTHDEVIAELRKTISEKKSRGKKLQNV

SEQ ID NO: 147 - DNA, 354 bp, Unknown
  Obtained from environmental sample
  misc_feature (1)..(354): n is a, c, g, or t
ttgctctacagggggaagtcgctggaagcggcggaagcccttgccaaagaggggatctatgctgaggtaatcgatcccaggaccctgattcctcttgacatcgataccatagccgcttcggtcaaaaagaccggccgcctggtaactgttcacgaagcccacagggaaatgggctggggcacggaagtcgtcgctcaggttacggaaaaggccttcgcttggcttgacgctcccccggaacgggtaggttccaaaatgtgttctctacccttcaaccttggtcttgaaaacgccgtagtgccccaggtatcggacattgtagcggcggcaaagaaaacacttcaccttatgtaa

SEQ ID NO: 148 - protein, 117 aa, Unknown
  Obtained from environmental sample
  DOMAIN (2)...(106): Transketolase, C-terminal domain
  misc_feature (1)..(117): Xaa is any amino acid
MLYRGKSLEAAEALAKEGIYAEVIDPRTLIPLDIDTIAASVKKTGRLVTVHEAHREMGWGTEVVAQVTEKAFAWLDAPPERVGSKMCSLPFNLGLENAVVPQVSDIVAAAKKTLHLM

SEQ ID NO: 149 - DNA, 633 bp, Unknown
  Obtained from environmental sample
  misc_feature (1)..(633): n is a, c, g, or t
atgagcttccgcataccccgcatgggacaagctttcttttcaccggctttacgtgcgcgcgggacacgctcaccatcagagcggactatcttacccctgtcgcctgaaccccggacatccgcgaggtctactcccgcaatagaagcgactttggcggccaacggcgtggcttttacgcctgacctacactcttgggcggctaaaacgtcccgctccacgatcatcccgtcgggaccggaaccgcgcagactccgccagtccaggccacgctcctctacaagagtctttgctctgggcgagatgaaaacccgctcgcctggggcgggagatgccgcaggggcttccgcaaggatcgcggaaatgtcttcgccgggttttcccaccacagcgataagggcagtaatgggaaccgtatcgcctggcccggcaacaattttcagcagggttcccgataccagggcgtcgatggttatcgtcaacttatccgtttctatggtaaacaggggctggccctcgaccacttcccctccttcctggacaagccattcgacaacggttccctcggtcatctggagaccttgtttaggcattatgatccgttcagccataagactagctccttacataaggtga

SEQ ID NO: 150 - protein, 210 aa, Unknown
  Obtained from environmental sample
  misc_feature (1)..(210): Xaa is any amino acid
MSFRIPRMGQAFFSPALRARGTRSPSERTILPLSPEPRTSARSTPAIEATLAANGVAFTPDLHSWAAKTSRSTIIPSGPEPRRLRQSRPRSSTRVFALGEMKTRSPGAGDAAGASARIAEMSSPGFPTTAIRAVMGTVSPGPATIFSRVPDTRASMVIVNLSVSMVNRGWPSTTSPPSWTSHSTTVPSVIWRPCLGIMIRSAIRLAPYIR

SEQ ID NO: 151 - DNA, 450 bp, Unknown
  Obtained from environmental sample
  misc_feature (1)..(450): n is a, c, g, or t
atgggggagcagccgcaaataaaagtggttaaagctcacgctcgcattgagcttccggcttatgaaagcaaaggcagcgccggcatggatctacgcgcttttcttgaggcggatgttacgcttccgcctcttggcagggtgaaaatccccaccgggttaaggcttgaaattcccgaaggctatgaagctcaggtgcgtccgcgttccggtttggcgataaattccgggcttacagtccttaattcaccgggtactatagattcggattaccgcggggaactggaaataatactgattaatcttggcgccgataatgtggttataaaagacggacaacggattgcgcagcttgtaaccgctcctgtttccaaagcgattcttacagaggcgcatactcttgccgaaaccgaaagggcgggcggcggattcggttctacaggcgttaattga

SEQ ID NO: 152 - protein, 149 aa, Unknown
  Obtained from environmental sample
  DOMAIN (14)...(147): dUTPase
  misc_feature (1)..(149): Xaa is any amino acid
MGEQPQIKVVKAHARIELPAYESKGSAGMDLRAFLEADVTLPPLGRVKIPTGLRLEIPEGYEAQVRPRSGLAINSGLTVLNSPGTIDSDYRGELEIILINLGADNVVIKDGQRIAQLVTAPVSKAILTEAHTLAETERAGGGFGSTGVN

SEQ ID NO: 153 - DNA, 450 bp, Unknown
  Obtained from environmental sample
  misc_feature (1)..(450): n is a, c, g, or t
atggaggccatgctgaggacaaacgtagaaggcgtggtgaaaaccatccgcgccgccctgccgcacgtccgcaagtcgggatggggacacatctttttcatcggcagcactgcggggcaccaagcctacgagggcggcggcgtgtactccgccagcaagcatggcgtcaaggccttggcccacgcccttaggctagagttgtgcggcgagccaatccgcgtgacctccatagacccagggatggctgagaccgagtttgcgctggtgcgcctaaaagaccccggccgcgccaaagcgctgtaccaaggcattgacccgctgacaggcgcggacatagccgagtgcatcaggtggtgccttgaactccccacccacgtgaacattgacgaaatgatagtcaaatgccgcgaccaagccagccacaccatggcgaaggtgaataggaagtga

SEQ ID NO: 154 - protein, 149 aa, Unknown
  Obtained from environmental sample
  misc_feature (1)..(149): Xaa is any amino acid
MEAMLRTNVEGVVKTIRAALPHVRKSGWGHIFFIGSTAGHQAYEGGGVYSASKHGVKALAHALRLELCGEPIRVTSIDPGMAETEFALVRLKDPGRAKALYQGIDPLTGADIAECIRWCLELPTHVNIDEMIVKCRDQASHTMAKVNRK

SEQ ID NO: 155 - DNA, 417 bp, Unknown
  Obtained from environmental sample
  misc_feature (1)..(417): n is a, c, g, or t
atgagtattttcattttggatgcttgtgcgttaatagcgtattttgccaaagaaaacggttctgaaaatgtaaaggaaatattaaaacaggcaattgatgataaaaatacaaaagtaattatgaataaagtaaacctgcttgaagtatactataatgtaattaatacttatgatgaacaagaagcggataaaatgttggaaactgtcagagaaatgcctattgaaatcatacaagaattggatgatatgacattaaaaagagcggggctcttaaaatcaaaatataagatatctttagcggattctattgcccttgctgaaagcataacaagaagagggtcattagtgacttcagaccatcacgaatttgaatcgatagaaaaatacgaaaatattaagatcaaatggtatcgttaa

SEQ ID NO: 156 - protein, 138 aa, Unknown
  Obtained from environmental sample
  DOMAIN (4)...(134): PIN domain
  misc_feature (1)..(138): Xaa is any amino acid
MSIFILDACALIAYFAKENGSENVKEILKQAIDDKNTKVIMNKVNLLEVYYNVINTYDEQEADKMLETVREMPIEIIQELDDMTLKRAGLLKSKYKISLADSIALAESITRRGSLVTSDHHEFESIEKYENIKIKWYR

SEQ ID NO: 157 - DNA, 423 bp, Unknown
  Obtained from environmental sample
  misc_feature (1)..(423): n is a, c, g, or t
atggcgttaagtaaagagcaaaagaaatggctgggaaaggtatcaaaagattgtgaaaactttaagaaagccccgaaagaacttcttacagaagaattctgcctggccgccgtgcaacaagattaccgggcgtttgattacgcccccgaggcgatgagaacagaagctctctgccatgccgccgaagccctctgccttgccgctgtgcaacaagtcggcagagcgcttgaattcgtccccgaagcgctgaagaccgaggctgtctgccttgccgccttgcaaaaagattaccgagcgtttgattacgcccccgaggcgatgagaacagaagctttctgccttaccgccgtgcaacaagatggccgggcgctgcaatacgtccccgaggcgcgaagaccgatgccctcgcctcggccgatctga

SEQ ID NO: 158 - protein, 140 aa, Unknown
  Obtained from environmental sample
  misc_feature (1)..(140): Xaa is any amino acid
MALSKEQKKWLGKVSKDCENFKKAPKELLTEEFCLAAVQQDYRAFDYAPEAMRTEALCHAAEALCLAAVQQVGRALEFVPEALKTEAVCLAALQKDYRAFDYAPEAMRTEAFCLTAVQQDGRALQYVPEARRPMPSPRPI

SEQ ID NO: 159 - DNA, 585 bp, Unknown
  Obtained from environmental sample
  misc_feature (1)..(585): n is a, c, g, or t
ttgaaccctaagggttccgccggatttgtacttgctaaaggttctctttcatcaaaaacgaatggtgaggataaaatccgcaaggctctaattgacgaggggcttgtggattgtattgttaattngccgacgaagttgtttctcaatactcagatacccgcttgtctttggtttctttgccgcgccaaagagagtgataaaaaacactcaagacgcgataagattctgtttatcgacgcgcggaatatgggctcgcttatcagccgaaaaacacgcgaattaaccaaaaaagatattcgtacaatagcggacacttaccatacatggaaatccggcaaaggttataaggatataccggggttttgcaagtccgcgcttgtcgccgaggtcgctgcccttgattatgtcctcacgccgggtcggtatatcggcttacccgatgacgaagacgatttcgacttctcggaacgggtgaaaactttgaccgccgaactggaagcgcaaatgaaagaaagcgttttgcttgacaagcgcatccgcgacaatctggcaaaagtggatggagtaaaaaaggatgctgattaa

SEQ ID NO: 160 - protein, 194 aa, Unknown
  Obtained from environmental sample
  DOMAIN (1)...(151): N-6 DNA Methylase
  misc_feature (1)..(194): Xaa is any amino acid
MNPKGSAGFVLAKGSLSSKTNGEDKIRKALIDEGLVDCIVNXPTKLFLNTQIPACLWFLCRAKESDKKHSRRDKILFIDARNMGSLISRKTRELTKKDIRTIADTYHTWKSGKGYKDIPGFCKSALVAEVAALDYVLTPGRYIGLPDDEDDFDFSERVKTLTAELEAQMKESVLLDKRIRDNLAKVDGVKKDAD

SEQ ID NO: 161 - DNA, 507 bp, Unknown
  Obtained from environmental sample
  misc_feature (1)..(507): n is a, c, g, or t
atgcaggaactctcaaaagagcaagttttaaaaataatggaaaaatatgacaatgatcctcaacagctcattgccgttttacttgatattcaagccgcctccgggaaaaactttgtggaaaaacagtgggcgcagttggcggctgatgttttaaaagtccctctttctaaaattttcgacgttcttactttttacgccatgttcagcacgagtccgcgcggcgagtatgtcgtggaaatttgccgcagtacgccttgctttttttcgcgctcggaagaaatcgcgcagtggtttgaaacagcggcgggcgtcaaaatgggcgaaactacggcggacggcaagctttcgcttttttacacaagctgtgtcggcgcgtgcgacattggtcctgtggcgaaaatcggcgacgatgtgttcggcggcttgaacgaggaaaaagttaaatcgctggtaaaattctgccttgaagggaaagcacaggagttaaaagcgctatgtcaaaattag

SEQ ID NO: 162 - protein, 168 aa, Unknown
  Obtained from environmental sample
  DOMAIN (3)...(155): Respiratory-chain NADH dehydrogenase 24 Kd subunit
  misc_feature (1)..(168): Xaa is any amino acid
MQELSKEQVLKIMEKYDNDPQQLIAVLLDIQAASGKNFVEKQWAQLAADVLKVPLSKIFDVLTFYAMFSTSPRGEYVVEICRSTPCFFSRSEEIAQWFETAAGVKMGETTADGKLSLFYTSCVGACDIGPVAKIGDDVFGGLNEEKVKSLVKFCLEGKAQELKALCQN

SEQ ID NO: 163 - DNA, 450 bp, Unknown
  Obtained from environmental sample
  misc_feature (1)..(450): n is a, c, g, or t
gtgcgtcttggctggtcgatagttccaaaggcaatcaagtatgcgggcggcgaaagtgtcaactcggactggagccgcatagcgggaacaatttttaacggcgcgtccaacatagctcaggcgggaggacttgccgcgttagatgacaatgggctgaaagaaatccgcaagctgactgatttttatcttggaaacgcaaagttgataagagccgctattcaaaagctgagaataaattgcataggcggcgataattctccgtacatctgggcgcatttccccggcagagacagttgggaagtattttcccaaatactggaaatgtgccacgttgtaaccactcccggcgccggcttcggtcccgccggacagagcttcatacgcttttcggctttcggtcatcgcgcggacattgaagaagcgtgcagacggcttggctctttgatttaa

SEQ ID NO: 164 - protein, 149 aa, Unknown
  Obtained from environmental sample
  misc_feature (1)..(149): Xaa is any amino acid
MRLGWSIVPKAIKYAGGESVNSDWSRIAGTIFNGASNIAQAGGLAALDDNGLKEIRKLTDFYLGNAKLIRAAIQKLRINCIGGDNSPYIWAHFPGRDSWEVFSQILEMCHVVTTPGAGFGPAGQSFIRFSAFGHRADIEEACRRLGSLI

SEQ ID NO: 165 - DNA, 309 bp, Unknown
  Obtained from environmental sample
  misc_feature (1)..(309): n is a, c, g, or t
atgaaaaaattaaacgatgaagtactgccggacgacagggtatattatcaaagtatttattccacaatgaaaaacgcctttgatgatttactgttttttcacacctacaggtacataaaaaaagtaaacggcgataacgacggctttgtaagcgagtcctccgcaaaatggggcgataacatttcaaagatagaaggcggcatttcccacgcggagatacttgattacaatatgagaaaaatatcgggaataaatattctcgatatatacaaaaatgttgtacaggggttacgcgaaaaagggttttaa

SEQ ID NO: 166 - protein, 102 aa, Unknown
  Obtained from environmental sample
  misc_feature (1)..(102): Xaa is any amino acid
MKKLNDEVLPDDRVYYQSIYSTMKNAFDDLLFFHTYRYIKKVNGDNDGFVSESSAKWGDNISKIEGGISHAEILDYNMRKISGINILDIYKNVVQGLREKGF

SEQ ID NO: 167 - DNA, 408 bp, Unknown
  Obtained from environmental sample
  misc_feature (1)..(408): n is a, c, g, or t
atggggctttattcctatctgcaaccgcaggcggctgaactgatgcgcaagaacgcgaattttagaaaaagttatctgcaaacaatggcggatttaaaaggcgcggaaaatcaacgcggacaggcgctttcatctcttttccacgactatcttgaaagtacgcaagactggaaacccggtcatattgaaaattttaaagagatttgcaaaaccgtccgcacctttgtcatgcccatgaatccgccgcgctttgaacttgaatacgccgttaaaaaatttctttccaccaaaggaataacgattaaaagaacgccgccaaaacccgcggcggaagaaggcaagcccgctcccaaacggaaacgccgccaaagaaaacccaagtcagggacgacggctcctgcgaattaa

SEQ ID NO: 168 - protein, 135 aa, Unknown
  Obtained from environmental sample
  misc_feature (1)..(135): Xaa is any amino acid
MGLYSYLQPQAAELMRKNANFRKSYLQTMADLKGAENQRGQALSSLFHDYLESTQDWKPGHIENFKEICKTVRTFVMPMNPPRFELEYAVKKFLSTKGITIKRTPPKPAAEEGKPAPKRKRRQRKPKSGTTAPAN

SEQ ID NO: 169 - DNA, 753 bp, Unknown
  Obtained from environmental sample
  misc_feature (1)..(753): n is a, c, g, or t
atgcntgcggtagacgtacttaacataacaaaaaaatttcccgtctatgatgacttgcctgataacgaacagataaaagacggcttcttccgcgccctttgtgatgtttcattttccattgaggacggcgagtgcgcgataatagcgggggctaacggttccgggaaaagtgtgttaatgtccattatcgcgggtcttgaagagccgtcgtcaggctctgttaagacaagctctaaagccgggcttgtgtttcaggagcccgactcgcagatactcggggaaactccggcggaagatgtcgccttcggcccgcgcaacatgaagctttctaaaaatgaaataaaagagcgggtaaacgccgccctcctgcttacaggccttgaacagcgcgctgactttccttcccgctccctttcaggcggcgaaaaacgccgtcttgcggccgccggagttttggcaatggacgcgcaaataatcatatttgacgaaccttacgccaacatggactatcccggcgttgtgcagataaacaagcttttcctaaaattaatcgcggacggaaaaacggtcattattcttacacacgaactggaaaaatgtttggctctttcaaaacgtttcattgtattgtctaaggggaagaaggtttttgacggcgcgtctttcgacgcgctttcccttgatcttgaggcgtggggaatacatcatccgttgaaaaataccgctgtcaaaccggagaaccttttatggtga

SEQ ID NO: 170 - protein, 250 aa, Unknown
  Obtained from environmental sample
  DOMAIN (43)...(213): ABC transporter
  misc_feature (1)..(250): Xaa is any amino acid
MXAVDVLNITKKFPVYDDLPDNEQIKDGFFRALCDVSFSIEDGECAIIAGANGSGKSVLMSIIAGLEEPSSGSVKTSSKAGLVFQEPDSQILGETPAEDVAFGPRNMKLSKNEIKERVNAALLLTGLEQRADFPSRSLSGGEKRRLAAAGVLAMDAQIIIFDEPYANMDYPGVVQINKLFLKLIADGKTVIILTHELEKCLALSKRFIVLSKGKKVFDGASFDALSLDLEAWGIHHPLKNTAVKPENLLW

SEQ ID NO: 171 - DNA, 336 bp, Unknown
  Obtained from environmental sample
  misc_feature (1)..(336): n is a, c, g, or t
atggcaaggcgccaggaaatcgccaaggcttatacgcaggcaagcctccgtaccaaacacaagcgttttgttcccctggacggcgaatactgcaactatgtttttcccctggtgctggagactggcatgaaggatgtcgcggcttatgcccgaaaaaaagaaattatcgtggaaagcgcctttgagcaaagtcttgccggggccggggttatcgattcggttttatgccctgtgagctattccctgtcgctgagaaccgtattgtttcccctgtatccccggctgcgttcgcaggaagcggagcgtgtatcaaaactgatcatgacgcttccataa

SEQ ID NO: 172 - protein, 111 aa, Unknown
  Obtained from environmental sample
  misc_feature (1)..(111): Xaa is any amino acid
MARRQEIAKAYTQASLRTKHKRFVPLDGEYCNYVFPLVLETGMKDVAAYARKKEIIVESAFEQSLAGAGVIDSVLCPVSYSLSLRTVLFPLYPRLRSQEAERVSKLIMTLP

SEQ ID NO: 173 - DNA, 756 bp, Unknown
  Obtained from environmental sample
  misc_feature (1)..(756): n is a, c, g, or t
atgccgacgccgagagatggagcgccgttcgcctgccttgattcggttggcgtgcgcgacatccgcagttacaacaagcgcattaaagagaaaaacatcgcgcaggaacacatgccctacattgtcgtggtaattgacgaatttgccgatctcatggcgaccaccggaaaagaacttgaatccaccgtcgcccgtctcgccgcgatgagccgcgccgtcggcattcatcttgtgcttgccacccagcgtccttcgattgacgttatcaccggccttatcaaagcgaacattccaagccgcattgccttcatggtagcgggaaaaatggacagccgcattattattgacgctgtcggcgcggaaaaacttttaggcaagggcgacatgctctatgccggcgtagttgatcctttcccgatccgtatgcaaggcgcgttcgtttccgaagaagaggtcgaggctgtcgttgaacacgtaaaaagtttcggaaagcccaattacattgacgatgaaattttctttgaagaggaagaagaagactcaaatctttctcttttctcggacggcgacgatccgttatacgaaaaggcgcttgaaattgtttatcaacaaggcagggcaagcgcgagttacatccagcgccgcctgaaaataggttttaaccgcgccgcgcgccttgtggacgagatggaacatcacggcgtcgtggggccggctcagggaagcaagccgcgggaattgctgcgcggggcttga

SEQ ID NO: 174 - protein, 251 aa, Unknown
  Obtained from environmental sample
  misc_feature (1)..(251): Xaa is any amino acid
MPTPRDGAPFACLDSVGVRDIRSYNKRIKEKNIAQEHMPYIVVVIDEFADLMATTGKELESTVARLAAMSRAVGIHLVLATQRPSIDVITGLIKANIPSRIAFMVAGKMDSRIIIDAVGAEKLLGKGDMLYAGVVDPFPIRMQGAFVSEEEVEAVVEHVKSFGKPNYIDDEIFFEEEEEDSNLSLFSDGDDPLYEKALEIVYQQGRASASYIQRRLKIGFNRAARLVDEMEHHGVVGPAQGSKPRELLRGA

SEQ ID NO: 175 - DNA, 708 bp, Unknown
  Obtained from environmental sample
  misc_feature (1)..(708): n is a, c, g, or t
ttgccggtccccggctgccttttgttatccgctgactacagccagatagagcttgtggttttggcccacctttcacaggatgaaaacctccttgcggctttcagggacggcacggatgttcacgcccgcaccgccgcgttgatattcggagtcggcgaagacgaggtaaaacccgaacagcggcgtatggcaaagacgatcaattttggcgtgatgtacggtatgagcgcgttcaggctttcaaacgaattggggatcagcagaaccgacgcggcgaattttataacggcgtattttaacacatattccggcgttaggcgttttatcgaggaacttatcaaaaaaacagaaggctgcggttacgtctcgacgatacttggccgccgtcggtatatcccaaccattaactcacggaacaagacagagaaagccgccgcagagcgcattgcggttaacacccccatccagggttcggcggcggatattgtcaaaaccgccatgctcaatctggacagccgccttgccgccgtgaaaagcaaagcgcgcatgctgctgcaggttcatgatgaactcatccttgaatgtccgaaagatactgcggaaaaaacagcggaactggttaaaacagaaatggaacaagcggtaaaattaagcgttccgctgagggtaagcgtggagacaggaacacgctggggcagttttcactga

SEQ ID NO: 176 - protein, 235 aa, Unknown
  Obtained from environmental sample
  DOMAIN (1)...(234): DNA polymerase family A
  misc_feature (1)..(235): Xaa is any amino acid
MPVPGCLLLSADYSQIELVVLAHLSQDENLLAAFRDGTDVHARTAALIFGVGEDEVKPEQRRMAKTINFGVMYGMSAFRLSNELGISRTDAANFITAYFNTYSGVRRFIEELIKKTEGCGYVSTILGRRRYIPTINSRNKTEKAAAERIAVNTPIQGSAADIVKTAMLNLDSRLAAVKSKARMLLQVHDELILECPKDTAEKTAELVKTEMEQAVKLSVPLRVSVETGTRWGSFH

SEQ ID NO: 177 - DNA, 528 bp, Unknown
  Obtained from environmental sample
  misc_feature (1)..(528): n is a, c, g, or t
atgctggggcaggcagagcatgaccctgacgcgcgcgcgcgggcattgttcccaaataaagagcttgccgaagaaattattgcggctattgaacggcgtataaaatcattaccgacagaaaaaaccgcccgcgcttctttgaacgcaggcggcttaattatcatctataaaacacaggaagaggcgctctgtatcgctaacacaatagcgccagaacaccttgaacttcaaaccgtaaaagcggatacttggatacccaagttaaaaaattacggctcgctatttatcggcagtctttgcgccgaagtcttaggcgattattcggcgggaataaatcacacactgcctacgtcgacaagcgcccgttttacaggcggcttatctgtccgccacttcctaaaaacagttaccactctgcgctgcgcccaaggcgaaggctttgaaaaagcgcgtaacgccgcggagatacttgcgagagccgaaggattggaagggcatgcgcagagtgcagcggcgagaaagaattaa

SEQ ID NO: 178 - protein, 175 aa, Unknown
  Obtained from environmental sample
  DOMAIN (1)...(175): Histidinol dehydrogenase
  misc_feature (1)..(175): Xaa is any amino acid
MLGQAEHDPDARARALFPNKELAEEIIAAIERRIKSLPTEKTARASLNAGGLIIIYKTQEEALCIANTIAPEHLELQTVKADTWIPKLKNYGSLFIGSLCAEVLGDYSAGINHTLPTSTSARFTGGLSVRHFLKTVTTLRCAQGEGFEKARNAAEILARAEGLEGHAQSAAARKN

SEQ ID NO: 179 - DNA, 447 bp, Unknown
  Obtained from environmental sample
  misc_feature (1)..(447): n is a, c, g, or t
atgcgtcattatacttcttatatggaattattgaaactgaacaatcccttcggcgcgcctgtttaccatgaggaaacgatttccagcacttctgaccttgcccgtatcctcgcagaaaaaggcgagccgcacggtacggttatcacggcggattttcaggaagccggaaggggcaggcttaaccgtccctgggttaccgagcgcggaaaaagccttatgttcacggtcattcttcattacgcggacgcttcgtccataccggctgcgcttacgctgaggaccggccttgcggtttcccttgcggtggaagaccttgcgcctgctttaaccggcggctctgtgcagatcaaatggcccaacgatgtgatgataaacgcccgcaaggcgngcgggcatcctgaccgaatccgacggcaaaaacgtgtacatcggcgggctcggccataa

SEQ ID NO: 180 - protein, 148 aa, Unknown
  Obtained from environmental sample
  DOMAIN (22)...(125): Biotin/lipoate A/B protein ligase family
  misc_feature (1)..(148): Xaa is any amino acid
MRHYTSYMELLKLNNPFGAPVYHEETISSTSDLARILAEKGEPHGTVITADFQEAGRGRLNRPWVTERGKSLMFTVILHYADASSIPAALTLRTGLAVSLAVEDLAPALTGGSVQIKWPNDVMINARKAXGHPDRIRRQKRVHRRARP

SEQ ID NO: 181 - DNA, 738 bp, Unknown
  Obtained from environmental sample
  misc_feature (1)..(738): n is a, c, g, or t
gtgcgctacagtgacgaggcgattgagggggcggtgcgcctctccgtccagtttatcagcgagcgccgcctgccggacaaggctatcgacattatcgacgaggccggcgcctttgcccgcatcagggcgggtaaggcagaaaaagccgcgagcgaagagacgacaacggataatgttattgaaatagtcgatatcggcctgccgctcattgagaccgtcgtgtcaaaagtagcccgcataccggaacgctctgtcggcgaaagcgaaaaagacaggctgcggctgatggaaaccaaacttaaggaaaagatcttcggacaggacagcgcgattgaagcggtagtaaaagccgtaaagcggtcgcgggcgggattccgatccgggggcaaacccgtggcgaatttcctcttcgccgggcccacgggcgtcggcaagacggagcttgcccggcagttagccgacattatgggagtcgccatgttccgttttgacatgagcgagtaccaggaaaaatacaccgtatcccggcttataggctcgtcgcccggctacatcggctacgacgacggcggccagcttaccgactcggtgcgcaagcagccccacgccgtggtgctngtggacgaaattgaaaaagcccacccggatatttttaatatccttttgcagataatggactacgccacccttacggacaaaccgggacgcaaggcggattccccaacgtcctccttataa

SEQ ID NO: 182 - protein, 245 aa, Unknown
  Obtained from environmental sample
  DOMAIN (130)...(245): ATPase family associated with various cellular activities (AAA)
  misc_feature (1)..(245): Xaa is any amino acid
MRYSDEAIEGAVRLSVQFISERRLPDKAIDIIDEAGAFARIRAGKAEKAASEETTTDNVIEIVDIGLPLIETVVSKVARIPERSVGESEKDRLRLMETKLKEKIFGQDSAIEAVVKAVKRSRAGFRSGGKPVANFLFAGPTGVGKTELARQLADIMGVAMFRFDMSEYQEKYTVSRLIGSSPGYIGYDDGGQLTDSVRKQPHAVVLVDEIEKAHPDIFNILLQIMDYATLTDKPGRKADSPTSSL

SEQ ID NO: 183 - DNA, 321 bp, Unknown
  Obtained from environmental sample
  misc_feature (1)..(321): n is a, c, g, or t
atggcacagtccaccggcataaaattgttccaggataggaacattcgtaccatttgggacgaagaacaggaaaagtggtatttctcaataattgacgtaatcgctgttttaactgacagtgataatccacgcaaatattggagtgttcttaaaacaagactgaaaagtgaaggcagtcaactggctacaaattgtagccagttgaaaatgcccggagctgacggtaaaatgcgtgaaactgacgcagcggatgcggaacaaattctacgtctcgttcaatccgtccccagtaaaaaagccgaaccatttgggctggcttaa

SEQ ID NO: 184 - protein, 106 aa, Unknown
  Obtained from environmental sample
  misc_feature (1)..(106): Xaa is any amino acid
MAQSTGIKLFQDRNIRTIWDEEQEKWYFSIIDVIAVLTDSDNPRKYWSVLKTRLKSEGSQLATNCSQLKMPGADGKMRETDAADAEQILRLVQSVPSKKAEPFGLA

SEQ ID NO: 185 - DNA, 390 bp, Unknown
  Obtained from environmental sample
  misc_feature (1)..(390): n is a, c, g, or t
ttgcggaattatacggggattgttaccgcgggacaaattggaagcgagcttcgcatggagtacacggtaataggcgaccctgtaaacctcgcttcccgcgtcgaagcgctgaccaagccgcttgcgactgatattcttataaccgaggatacctggaacctaatcggggacagccttattacggaagaaatgccgccggtaacggtaaaaggaaaggcaaagcccgtacgtttgtttgccgttgttaattttgttgaaataaaagggggaccgcgcactcttgcggaagtccgtaaaatactgggcgttgaggctcctgaactttccaatgttgatcttgacgctgaagaaaaaaagtacaaaataggaagtgaaaaaaatgaaacgtaa

SEQ ID NO: 186 - protein, 129 aa, Unknown
  Obtained from environmental sample
  misc_feature (1)..(129): Xaa is any amino acid
MRNYTGIVTAGQIGSELRMEYTVIGDPVNLASRVEALTKPLATDILITEDTWNLIGDSLITEEMPPVTVKGKAKPVRLFAVVNFVEIKGGPRTLAEVRKILGVEAPELSNVDLDAEEKKYKIGSEKNET

SEQ ID NO: 187 - DNA, 651 bp, Unknown
  Obtained from environmental sample
  misc_feature (1)..(651): n is a, c, g, or t
gtgaaaaaaatgaaacgtaaatggattgccgatgtactggtagttgttttttgcgtttcaggcgcggtgttcagcctgaatctgttcaggcttgatctgtttcaatcaatcgcgtctcaaaataaaaaaccaatgggaaccgttaccgttaaatacaacaatgtacagcgccgcttctcggatcgcgtgttgtggggccgcctgaacattgaatcgcccatctacctcggtgaccttatccgcgtagcggaatattccgccgcaaccctgaatataaacaacgatattattgatattaacgaaaattccatgatacacatacgcgcttcatcagacggcgaataccgcattataatcgacctgaattcgggaagtttgagcatcacgggttccgatgacgctgacagcggcgtagcgcttaacgttatgggccgtgtaatcacgccggcagccaaagcgacattgagcgcgtccgccggagaaagncgcatgacgctccaggtgaacccatggagcgtgatcattatagatgaagacggtcagaggcgttctttggggcgcggtgaagctttgattttaataatgagggcgttgagcagggcgcgcagggcgtggttgttacgctgccccgtccaaacgcgcgattnataa

SEQ ID NO: 188 - protein, 216 aa, Unknown
  Obtained from environmental sample
  SIGNAL (1)...(25)
  misc_feature (1)..(216): Xaa is any amino acid
MKKMKRKWIADVLVVVFCVSGAVFSLNLFRLDLFQSIASQNKKPMGTVTVKYNNVQRRFSDRVLWGRLNIESPIYLGDLIRVAEYSAATLNINNDIIDINENSMIHIRASSDGEYRIIIDLNSGSLSITGSDDADSGVALNVMGRVITPAAKATLSASAGEXRMTLQVNPWSVIIIDEDGQRRSLGRGEALILIMRALSRARRAWLLRCPVQTRDX

SEQ ID NO: 189 - DNA, 675 bp, Unknown
  Obtained from environmental sample
  misc_feature (1)..(675): n is a, c, g, or t
atgacagattggccgagaggctacagaattactgtttatctgttctggggcctgctcttgaatatttctcttaccttgtttacaggtttctttttgtcttccaagaatgtctattttaagaagccagttttgttcatcatcctctttaccatgttctttaacgccgggatgatccccaattttttgaacatccggagcctagggctttataataacatctggtctttgatattgcccggcgctatcagcgtttataacagtattatatgccgtaccgcaatatcagcggtgccggagagcctttcggaatccgctaaaattgacggggctaatgacctaactatactttttaggatcatcaccccgcttatacagccgactatggttgtgctcgtgctgtactacggcatcggacactggaatgcctggttcaatgcttccatttatatcagggactttaccaaactccccatccagaatattttgagggccatattggtagccaactccgatattctgaatgcggcagccacggaaaaagaccagatcaaccagtttgctgaatccatcaagtatgcggctattgtcataactacggttccgatacttttcatttaccctttcctgcaacgttactttgtcaaaggtgtgatgatcggggctattaagggctaa

SEQ ID NO: 190 - protein, 224 aa, Unknown
  Obtained from environmental sample
  DOMAIN (4)...(219): Binding-protein-dependent transport system inner membrane component
  misc_feature (1)..(224): Xaa is any amino acid
MTDWPRGYRITVYLFWGLLLNISLTLFTGFFLSSKNVYFKKPVLFIILFTMFFNAGMIPNFLNIRSLGLYNNIWSLILPGAISVYNSIICRTAISAVPESLSESAKIDGANDLTILFRIITPLIQPTMVVLVLYYGIGHWNAWFNASIYIRDFTKLPIQNILRAILVANSDILNAAATEKDQINQFAESIKYAAIVITTVPILFIYPFLQRYFVKGVMIGAIKG

SEQ ID NO: 191 - DNA, 804 bp, Unknown
  Obtained from environmental sample
  misc_feature (1)..(804): n is a, c, g, or t
gtgggtatgattgaaccgccttcgagaccgccgccaaagccgacaggcatttcccgngttctgcccatgtcggtctgcgtggccctgagccagggttatatcggctacgatttgcagaacaccatccgcatggaacttgaccacaggaacatgaaaaatcaggtcgccacaattattacgcaggttgaagttgatccctctgacaaagcctttgaaaatccgaccaagcccattggcggctttcacagcagggaagaggcggagattctcaaatccaagggcgttccggtgatggaagacgcgggcaggggctggcggcaggtggtggcttccccgaaaccgcttaacattattgaggctgacaccatcaaggcgctgctggcggcggggcagatccccattgccgcgggcggaggggggattcccgtcgccatgaaggacggccagtaccggggcatgagcgccgtcatagacaaggatttttccgcggccaaactcgccgagcttatcggcgctgacatgctgatcattttaaccgcagttgaaaaagtcgcggttaattttggcaagccggatcaaaagtggctggacagcatgaccgtcgcccaggcggaacagtacatcgccgagaaccagttcgccaaaggctcgatgcttccaaaggtgcaggcttcaatcgcttttgtaaaatccaacaacttcggcgccccacagcgcgggacgcacagcgctctgattaccctgcttacaaaggcgcgggacgggattgccggcagaaccggtacaaggataacgccgttttaa

SEQ ID NO: 192 - protein, 267 aa, Unknown
  Obtained from environmental sample
  DOMAIN (1)...(248): Amino acid kinase family
  misc_feature (1)..(267): Xaa is any amino acid
MGMIEPPSRPPPKPTGISRVLPMSVCVALSQGYIGYDLQNTIRMELDHRNMKNQVATIITQVEVDPSDKAFENPTKPIGGFHSREEAEILKSKGVPVMEDAGRGWRQVVASPKPLNIIEADTIKALLAAGQIPIAAGGGGIPVAMKDGQYRGMSAVIDKDFSAAKLAELIGADMLIILTAVEKVAVNFGKPDQKWLDSMTVAQAEQYIAENQFAKGSMLPKVQASIAFVKSNNFGAPQRGTHSALITLLTKARDGIAGRTGTRITPF

SEQ ID NO: 193 - DNA, 852 bp, Unknown
  Obtained from environmental sample
  misc_feature (1)..(852): n is a, c, g, or t
ttgaaaaacgaattgctgaacgaaactctgcaatttttgggaattgagggtggaaatgctgtacgcgaggcatatccgagcatagcaacgcctgtgtatggcaatttttctgtggctggtatttctgagacaaatgaaactgaactcacgctgctttttggttttggaaataagattgaaaaaaaaataaaagtgaaattagaagcaaaaaatgcgagcaatcagggaaatgtgtatagaatttgggcgcaaaagaaaattgcagagcttgacttgaactacgaaaagaaccgtgccgaactcacggaacttgggaagcagttcagcattgtaacgcgaaacacatcgctgattgtgcttgaaaccgttgaggactatatacgctataacattgaaccgcctgccgaattgcaagacgaatatctgcgcaggcttaaagaacgcgaaggactggtacgtaatgataatgacaagagcaatatgctgggcacggcactctccgttgccgaaaatttaaaaaaatggtggaatatagattttaaacctataaaaccaaaatatcccacaccggataatatggagaaacgtttgagtgttgtttcatcaagtagtagtgctatcagtgctgcaaaaagaggtatgaatatagaagcaacggacgttgtggggtggatggataatccaagtgcggtatttgttttggatcaagatgctggtgcttttgaaggcattaacctanatccaggctacccatcttatccgcatgaacggtcaatcggaaaagcctctcanacaaccaaagttctcaaccaccatcacaataaacccattaaaaagataatgagtatctga

SEQ ID NO: 194 - protein, 283 aa, Unknown
  Obtained from environmental sample
  misc_feature (1)..(283): Xaa is any amino acid
MKNELLNETLQFLGIEGGNAVREAYPSIATPVYGNFSVAGISETNETELTLLFGFGNKIEKKIKVKLEAKNASNQGNVYRIWAQKKIAELDLNYEKNRAELTELGKQFSIVTRNTSLIVLETVEDYIRYNIEPPAELQDEYLRRLKEREGLVRNDNDKSNMLGTALSVAENLKKWWNIDFKPIKPKYPTPDNMEKRLSVVSSSSSAISAAKRGMNIEATDVVGWMDNPSAVFVLDQDAGAFEGINLXPGYPSYPHERSIGKASXTTKVLNHHHNKPIKKIMSI

SEQ ID NO: 195 - DNA, 657 bp, Unknown
  Obtained from environmental sample
  misc_feature (1)..(657): n is a, c, g, or t
gtgatcacagcggattttcaggaagcgggaaggggcaggcttaaccgcctgtgggttaccgagcgagggaaaagcctgatgtttacaataatcctccgttacgcgagcgcttcgtccatgccgtctgccatcacgcttaagactggtcttgcggtctcccttgcgatagaagaccttgcgccagctttagccggcggttctgtgcggatcaagtggcctaacgatgtgatgataaacgcccgcaaggcggcgggcatcctgaccgaagccgacggcaaaaacgtatttataggcgttggcgtaaatgtcgcccagaaggaattccctgagcagtaccgttccaaggcgggaagcattatccactcttttccggctctggccgaaaacgcccgttttgatctgcttgaaaaaatcctctcgcggctttacgcggaaattgagaaccttactaccgagagcgagacgtggcgtgagcgtcttatcgcgcggctttacaaaaagggcgagaccgtaacgtttgccgaaggcgccgcagattcggaggatttggtagaagggatactttcgggtcttagcccggacggcgcactccttatcattccaaatggagaaaaaaaagagcgctcttttattaccggtgaactgcgggtgtattag

SEQ ID NO: 196 - protein, 218 aa, Unknown
  Obtained from environmental sample
  misc_feature (1)..(218): Xaa is any amino acid
MITADFQEAGRGRLNRLWVTERGKSLMFTIILRYASASSMPSAITLKTGLAVSLAIEDLAPALAGGSVRIKWPNDVMINARKAAGILTEADGKNVFIGVGVNVAQKEFPEQYRSKAGSIIHSFPALAENARFDLLEKILSRLYAEIENLTTESETWRERLIARLYKKGETVTFAEGAADSEDLVEGILSGLSPDGALLIIPNGEKKERSFITGELRVY

SEQ ID NO: 197 - DNA, 654 bp, Unknown
  Obtained from environmental sample
  misc_feature (1)..(654): n is a, c, g, or t
gtgggagcagccgctcccgccggagcatttaacacaagcgacggacagtattctttgcttggacattttaatgtgctggttgcggaaaatgatatgaaacctgaatctgtaatgccaagcggatggcagaattcggcgtcatctcccgcttacaatgcatcccaatcataccgttggacagaagctgataaattggttaattacgctcaggcgaataacacaaaagtacgcggtcatgttcttttctggcatgaacagactcccgcagtcttttttaagacaggtaatttaacaagcgcttatgtttcaaaggaagtgttttatacccgaatggaacagcatgtaaaaaccgtttttcaaaaatacggcaacaaagttctttggtgggacgtagccaacgaaactgtaggagatgacggcaatcccagagttacaggcggagccaatgtcgcgggcagtgatggcaaatcgggttttacagcggtcatggaagcgtcgggtcttactggcgataaccgctatgagtggatagtaaacgcttttaaatatgcccgaaaatatgccgatgaaaacggagggcagaatgtaaaactcttccttaccgaatacgatattgaaaaaagtatgcctcaactaaaaaggacggatttctaa

SEQ ID NO: 198 - protein, 217 aa, Unknown
  Obtained from environmental sample
  DOMAIN (1)...(217): Glycosyl hydrolase family 10
  misc_feature (1)..(217): Xaa is any amino acid
MGAAAPAGAFNTSDGQYSLLGHFNVLVAENDMKPESVMPSGWQNSASSPAYNASQSYRWTEADKLVNYAQANNTKVRGHVLFWHEQTPAVFFKTGNLTSAYVSKEVFYTRMEQHVKTVFQKYGNKVLWWDVANETVGDDGNPRVTGGANVAGSDGKSGFTAVMEASGLTGDNRYEWIVNAFKYARKYADENGGQNVKLFLTEYDIEKSMPQLKRTDF

SEQ ID NO: 199 - DNA, 477 bp, Unknown
  Obtained from environmental sample
  misc_feature (1)..(477): n is a, c, g, or t
atgatctttctggccgctgtccgcggccccagacgcgggtcgtcgatatcgcgcgcgctggccgacgggccttataaccggcctttccgccccaaccgtacgccttttgactggatttcacgtaatgaagccgaagtagatgcctatgtcaatgatcctctatgcgggtttctctgctcatcgggtttctaccgcgatctgacaaagggcctgcgtcagattcaccgtaaaaaagctatgacccggatccgccgggatctgcctgtttatatcttttgcggcagcaatgatcccgtcgggaatatgggagccagcccggcggcgctggtcaacgcatatcgctcactgggattacagaactttgaatttgtacagtacaccggagccaggcacgagacgttaaacgaaactaaccgtgaagaagtaatggggaatttgtcatcgtggataagcagaataatagcaaataataactaa

SEQ ID NO: 200 - protein, 158 aa, Unknown
  Obtained from environmental sample
  misc_feature (1)..(158): Xaa is any amino acid
MIFLAAVRGPRRGSSISRALADGPYNRPFRPNRTPFDWISRNEAEVDAYVNDPLCGFLCSSGFYRDLTKGLRQIHRKKAMTRIRRDLPVYIFCGSNDPVGNMGASPAALVNAYRSLGLQNFEFVQYTGARHETLNETNREEVMGNLSSWISRIIANNN

SEQ ID NO: 201 - DNA, 696 bp, Unknown
  Obtained from environmental sample
  misc_feature (1)..(696): n is a, c, g, or t
ttgaatgttacaggtctttgttttggtaatactgtatacacaacaagtaccgcatataacacaagcgattacccgttcgcatgggaaaggggatcaaccgaagtatcaggcagttatgaagcagtacgtctgacaatgcaaaccggtagaaccggcgaaacactggaaggagcagcgccccaatactatgcgcgcaccctgcctaccagcactacagccggcaacactgattatcaatttacactgttcgcggcgaaacatattaaaatagataccacgcttcccagagtatcagcaatttcgacaactactccggcgggttattacagcgccggcgatatttattttacaatagaattcagcgaaccggtaaaattaggagctgtaacgccgcaattcccgttaaatttcaacggcaccactgtttggtcatcaaataaagccgcagacgtaagagtaaacgggaagaatattacctttaaatacacaattgtaagccctgatacgtcaggaggaagacaaatttatgtatcagccggcaccaatatgataggagacatttatgatattgcgggaaataagctggcggcttcggcatcaaatacaaccggaaacggtctgaacggattatcagagaccctaagaacgcttaccggaatatatgttgaaacgcaaataccgctccgtcccacgtaa

SEQ ID NO: 202 - protein, 231 aa, Unknown
  Obtained from environmental sample
  misc_feature (1)..(231): Xaa is any amino acid
MNVTGLCFGNTVYTTSTAYNTSDYPFAWERGSTEVSGSYEAVRLTMQTGRTGETLEGAAPQYYARTLPTSTTAGNTDYQFTLFAAKHIKIDTTLPRVSAISTTTPAGYYSAGDIYFTIEFSEPVKLGAVTPQFPLNFNGTTVWSSNKAADVRVNGKNITFKYTIVSPDTSGGRQIYVSAGTNMIGDIYDIAGNKLAASASNTTGNGLNGLSETLRTLTGIYVETQIPLRPT

SEQ ID NO: 203 - DNA, 315 bp, Unknown
  Obtained from environmental sample
  misc_feature (1)..(315): n is a, c, g, or t
gtgatcagggcaagctttctattaccgacccgcgttgaagcgaacaaagccataggcacggtggacaatgcgttaaaaatggtttcaaaacaacgcgcggaccttggcgcttatcagaaccgttttgaaatggcggcgcagggcgtagccattgcggcggagaacttacaagcggctgaatcccgcattagggatacaaatatggcgaataagatggttgactatacaaaggactccatcttgaaccaaagtggaaccgcaatgctagcgcaggcaaaccttcgcagccaatcggttttatcgctgctttcgtaa

SEQ ID NO: 204 - protein, 104 aa, Unknown
  Obtained from environmental sample
  DOMAIN (11)...(82): Bacterial flagellin C-terminus
  misc_feature (1)..(104): Xaa is any amino acid
MIRASFLLPTRVEANKAIGTVDNALKMVSKQRADLGAYQNRFEMAAQGVAIAAENLQAAESRIRDTNMANKMVDYTKDSILNQSGTAMLAQANLRSQSVLSLLS

SEQ ID NO: 205 - DNA, 327 bp, Unknown
  Obtained from environmental sample
  misc_feature (1)..(327): n is a, c, g, or t
atgtccgtagcaagtgtgggatttaatcttgtcacgtcaatgccggtacacgaacaggaacaaccggctaagcagacgcttacgcagccggaaaaaaaagcaaaacctcaagtcagtaactctacaacggcggatttggagaaaataggtcttgtttttaacagaaaactgcaatttgtagtcgatcacagttctaatcaggtgattatcaaggttattgataaagaaaccgataaggtgattaaggaaattccgcctgaggaattgcagcggttgcacagtaacctaaaagaggccataggtcttttatttgatgaaatggtctag

SEQ ID NO: 206 - protein, 108 aa, Unknown
  Obtained from environmental sample
  SIGNAL (1)...(18)
  DOMAIN (9)...(107): FlaG protein
  misc_feature (1)..(108): Xaa is any amino acid
MSVASVGFNLVTSMPVHEQEQPAKQTLTQPEKKAKPQVSNSTTADLEKIGLVFNRKLQFVVDHSSNQVIIKVIDKETDKVIKEIPPEELQRLHSNLKEAIGLLFDEMV

SEQ ID NO: 207 - DNA, 438 bp, Unknown
  Obtained from environmental sample
  misc_feature (1)..(438): n is a, c, g, or t
gtgagggctatgagatacaaatttgatacgcccggaggccacattagcgtggagcgtagcgataaaacgctgaccccgttcggaggtcttgtggcgtttgcctcgtttttgtcgaagaccgggataatcgagcgtttagtcgagacctgtccagtaacgcgcacaagcaacaacgcgacgccggtgcgagatatattgataggtttcatcctgatgtgcgtccaagacggtacgcgcttcgcccatatacgctcgatccaaaatgaccctgcgatagcgaagatatttaatttagagaggcgtatccccggagaagacactatccgccgattttttgagtcagtggagagcgttgccggtcgtgactggatgtacgctgcgaacagccttatatatgaatcgttaaggacgccctacattttagatgcggttggatag

SEQ ID NO: 208 - protein, 145 aa, Unknown
  Obtained from environmental sample
  misc_feature (1)..(145): Xaa is any amino acid
MRAMRYKFDTPGGHISVERSDKTLTPFGGLVAFASFLSKTGIIERLVETCPVTRTSNNATPVRDILIGFILMCVQDGTRFAHIRSIQNDPAIAKIFNLERRIPGEDTIRRFFESVESVAGRDWMYAANSLIYESLRTPYILDAVG

SEQ ID NO: 209 - DNA, 525 bp, Unknown
  Obtained from environmental sample
  misc_feature (1)..(525): n is a, c, g, or t
atggatcagatcggccgagnaccgccgcttttggattgcgccgaagaagcgtcaaaatcaaagattccggtaatcgcggacggcggcattaagttttcaggagacataacaaaagcgataggcgcgggagcgagcgttgtaatgataggcaacttgttcgcgggattaaaagaagcgccgggaaacgagattatctttgacggaaggatttacaaagaataccgaggaatgggcagtatgggcgcgatagcggacggcgcgggagaccgttaccaaatcggcaaagatgaagaacctgtaccggaggggattgaggggcgggttccattcaagggggaacttcgcacttacatgaaccagcttgtcgcgggattgcgaaaaggcatgggttactgcggctgtaagagcattgcggaacttaataaatataagaagtttattaagataacggcggcgggtttaagggaaagccacccgcacgacattacaataacgcaggaagcgccaaattactcgcgatcttga

SEQ ID NO: 210 - protein, 174 aa, Unknown
  Obtained from environmental sample
  DOMAIN (2)...(160): IMP dehydrogenase / GMP reductase domain
  misc_feature (1)..(174): Xaa is any amino acid
MDQIGRXPPLLDCAEEASKSKIPVIADGGIKFSGDITKAIGAGASVVMIGNLFAGLKEAPGNEIIFDGRIYKEYRGMGSMGAIADGAGDRYQIGKDEEPVPEGIEGRVPFKGELRTYMNQLVAGLRKGMGYCGCKSIAELNKYKKFIKITAAGLRESHPHDITITQEAPNYSRS

SEQ ID NO: 211 - DNA, 501 bp, Unknown
  Obtained from environmental sample
  misc_feature (1)..(501): n is a, c, g, or t
atggcaaccgtgaaaggcgatgtgcacgatattgggaaaaatatagtgtcccttgttcttgcctgcaacaactacgaaattatagaccttggagttatgtgcccggcagagaaaattttggaagcggtaaaggaacacctgccgaatttggttggtctttcggggcttataacgccaagcctcgcagaaatgagttttgttgtggaaactctttcaaaagaaaatcttggaattccagtgatgataggcggagccacaacttctgctttgcacaccgcggcaaaaatagccacagttggaaagcagcctgttgtttatgtgccagatgctggcaaagcggtttttgtggcggaatccattttgaataagtccaagcagaatgtgtttttccaagagaattttgaaaagcagcaaaagctgagggaggctttgagccgcaaagaggaaaaggtgctaacgcctattgaggaagcgaggggcaaggggttggagttgttttag

SEQ ID NO: 212 - protein, 166 aa, Unknown
  Obtained from environmental sample
  DOMAIN (1)...(117): B12 binding domain
  misc_feature (1)..(166): Xaa is any amino acid
MATVKGDVHDIGKNIVSLVLACNNYEIIDLGVMCPAEKILEAVKEHLPNLVGLSGLITPSLAEMSFVVETLSKENLGIPVMIGGATTSALHTAAKIATVGKQPVVYVPDAGKAVFVAESILNKSKQNVFFQENFEKQQKLREALSRKEEKVLTPIEEARGKGLELF

SEQ ID NO: 213 - DNA, 849 bp, Unknown
  Obtained from environmental sample
  misc_feature (1)..(849): n is a, c, g, or t
atgaaatccttatcctttcctgagcttttgaagaaaataggcaggtcaaaaccggtttgcgcctgtgtttccgcttatcttgaagggaaattccccctggaaatagagggccctgagggggcttttgacgccctgcttctggcgcggctttttcaggcaaagccgggcctgtattttgttgtggttccccaggaaactgatgcggtggattttgccctggatgtggccgcgtccggattgccctgtctgcaattcccctggtggggcacggcgccttaccgtgagctggccccccattcggcggtgttcgggcagcgggtcaaggttttaagcgatctcgccttagggaagccgggcattgtcattattcccctgcgggccttccttactcccctgccgccgcctgagtatgtcaaaagcctccttgtttccctcaaggccgggggaacaatacacaccaccagcctcgcgcaaaccctagtttcctatggctatattcgcgtgccccgtgtacaggttcacggcgagtttgccctgcgcggcgaggtgcttgacatttttatgggcggcgacgaagaggcgtaccgggtcctgtttgattatgaccggattgagtcgatcaagcgtttcgatcccattaatcagggctcagggccgggaagcgaaaaaacggcggaactgctgatccgccccatgcgggaagtggtctggacagatgatcgaattgaggcgctggggaacaaccttactcgctttaaggattcacaggcggcggaaaagccgttattgaagaattattgcgcggcgcaccatagctggcgaggaaatgttttacccgctggcgtttaa

SEQ ID NO: 214 - protein, 282 aa, Unknown
  Obtained from environmental sample
  misc_feature (1)..(282): Xaa is any amino acid
MKSLSFPELLKKIGRSKPVCACVSAYLEGKFPLEIEGPEGAFDALLLARLFQAKPGLYFVVVPQETDAVDFALDVAASGLPCLQFPWWGTAPYRELAPHSAVFGQRVKVLSDLALGKPGIVIIPLRAFLTPLPPPEYVKSLLVSLKAGGTIHTTSLAQTLVSYGYIRVPRVQVHGEFALRGEVLDIFMGGDEEAYRVLFDYDRIESIKRFDPINQGSGPGSEKTAELLIRPMREVVWTDDRIEALGNNLTRFKDSQAAEKPLLKNYCAAHHSWRGNVLPAGV

SEQ ID NO: 215 - DNA, 342 bp, Unknown
  Obtained from environmental sample
  misc_feature (1)..(342): n is a, c, g, or t
atggttcgcggtgaaatatggtgggcgcagctgccgcctcccagaggatcaagcccggcaaaacgccgtcctatgttaatcattcaaggtgacagttttaaccgaagcaaaataaacacggtaatctgcgctgtcataacttcaaatacagagttggcttctctgccgggtaatttactgcttgaaaaatcaatttcagggttggaaaaaacatctacgattaattttacgcaaatttattctctggacaaacccgatttaatagaatatgtgacgatgcttccaaagttcatgcttgataaagtggataactgtcttaagatggtgttggaaataaagtaa

SEQ ID NO: 216 - protein, 113 aa, Unknown
  Obtained from environmental sample
  DOMAIN (2)...(111): PemK-like protein
  misc_feature (1)..(113): Xaa is any amino acid
MVRGEIWWAQLPPPRGSSPAKRRPMLIIQGDSFNRSKINTVICAVITSNTELASLPGNLLLEKSISGLEKTSTINFTQIYSLDKPDLIEYVTMLPKFMLDKVDNCLKMVLEIK

SEQ ID NO: 217 - DNA, 666 bp, Unknown
  Obtained from environmental sample
  misc_feature (1)..(666): n is a, c, g, or t
ttgctgaaaaaaaaactaacaaaggaaaaaaacgtgatcaagatagagtctaccacagaaaccatagaaagtaaaggcgggttgatccttgccggaaaaattgcagtgaaggctgggcttgcgcggataaagagcgcgtttgtaaacaatgccgcagccgtcatcaccagcctgttcgggttaatgatggaagggaagagcgattttgaaagcatgggggaaaaacgcgggagcctgtttttcaaggaagcgctggggctgccggttgtatacgcgaaagaaacggtaaggctgtaccttgaacagatgtcgacggacgctgattgtgttattggacaattaagggaaagctcggcaaagataatatcgcaagcgccgttacacgggctgtggatagaagggaagcattatcttcccgtggacatcgacacggcggcaatggacaactcgaaaacaaagaaagaaggggtaagccggacataccggaagttcgacgggtttcatccgatattcgcgtatatagggaaagaagggtacatgcttgactgcgaactgaggcccggcagccagcactgccagaaggggacggtggcgtttatagaagggtttatgggacggctgcgggcgtttgctgttccgcatggacggcggcaacgacgcgtttga

SEQ ID NO: 218 - protein, 221 aa, Unknown
  Obtained from environmental sample
  misc_feature (1)..(221): Xaa is any amino acid
MLKKKLTKEKNVIKIESTTETIESKGGLILAGKIAVKAGLARIKSAFVNNAAAVITSLFGLMMEGKSDFESMGEKRGSLFFKEALGLPVVYAKETVRLYLEQMSTDADCVIGQLRESSAKIISQAPLHGLWIEGKHYLPVDIDTAAMDNSKTKKEGVSRTYRKFDGFHPIFAYIGKEGYMLDCELRPGSQHCQKGTVAFIEGFMGRLRAFAVPHGRRQRRV

SEQ ID NO: 219 - DNA, 768 bp, Unknown
  Obtained from environmental sample
  misc_feature (1)..(768): n is a, c, g, or t
ttggtcaccgccctgttgccgttggtgtctaacaaagttgaatatgtggtaaattttaaatacattaccgtaccgctattactgttaatggctttgctccttgtctgcatgtgtatatatttcttcattaattatcggcttttttcgcttcttgaacgagaggattggcccgctctggcatattatttggagcataaaatatatataaaaaaccaatattcagaacgaaatgtacggcttttagcgagttcttatctggtaatttctgattttcaatcggttttaaaactggaaggcaaggctatgcttgccaaaccgtccgtggttaataaaaacgtcttgatttttggaacggccaggattttaagcggcagccatgccgacgcggccgcgttttttagctcgcacatggaaaaatgcgagaagaaggataaagagtggatacgctggttctacggtttttcgcaacttttgaacggaggctttaatcaggttgaaccggatttttcaacattagccctttcttctaaaaatgttttgattactgggctttcagcttattttctgcataattcaatgaaaaaacgttcaataaaccccgataaatgccatgaaacagcggaaaatggccggcaacgcgtaataaacgcccttaaaaccgccagaaaatgggggaaagaagcggataaagtgggagcggaaattcacattgccataataagaaagtacattgacgaagcanggaaatggctttttaacaaggattaa

SEQ ID NO: 220 - protein, 255 aa, Unknown
  Obtained from environmental sample
  misc_feature (1)..(255): Xaa is any amino acid
MVTALLPLVSNKVEYVVNFKYITVPLLLLMALLLVCMCIYFFINYRLFSLLEREDWPALAYYLEHKIYIKNQYSERNVRLLASSYLVISDFQSVLKLEGKAMLAKPSVVNKNVLIFGTARILSGSHADAAAFFSSHMEKCEKKDKEWIRWFYGFSQLLNGGFNQVEPDFSTLALSSKNVLITGLSAYFLHNSMKKRSINPDKCHETAENGRQRVINALKTARKWGKEADKVGAEIHIAIIRKYIDEAXKWLFNKD

SEQ ID NO: 221 - DNA, 621 bp, Unknown
  Obtained from environmental sample
  misc_feature (1)..(621): n is a, c, g, or t
gtgaggatgagctttactgcatccccacngcnngaggtgcctatcaccaatctgcaccgcgacgaggtgatccccgcggcgcaactgcccatccgctactgcgcctacagcgcctgtttccggcgggaggcgggctcttatggcaaggacaccaaggggtatttgcgcgttcaccaattcaacaaggttgagctggtcaaattcgtggaaccggagagttcatacaacgaactcgaggcgctgcgcgccgacgcggagacgattttgcgggcgcttaaactgaagtacagggtgctactactatgcgacggcgatatgtcgttctcggcggcgaagtgctacgatttagaggcttgggcgggcgcggagggcaagtacctggaggtctcgtcgtgcagtaatttcgaggactttcaggcgcgccgcgccaatatccggtatcgtcccaagggcggggacaacaagccgcgttttgtacacacgctaaacggcagcggcctcgccacggcgcggattatcgtggccattcttgagaactaccagaccgctaatgggacggtcacggtaccggaggcgctgaggccctatatgggcggtatggaggaaattactgcgggatga

SEQ ID NO: 222 - protein, 206 aa, Unknown
  Obtained from environmental sample
  DOMAIN (1)...(123): tRNA synthetase class II core domain (G, H, P, S and T)
  misc_feature (1)..(206): Xaa is any amino acid
MRMSFTASPXXEVPITNLHRDEVIPAAQLPIRYCAYSACFRREAGSYGKDTKGYLRVHQFNKVELVKFVEPESSYNELEALRADAETILRALKLKYRVLLLCDGDMSFSAAKCYDLEAWAGAEGKYLEVSSCSNFEDFQARRANIRYRPKGGDNKPRFVHTLNGSGLATARIIVAILENYQTANGTVTVPEALRPYMGGMEEITAG

SEQ ID NO: 223 - DNA, 357 bp, Unknown
  Obtained from environmental sample
  misc_feature (1)..(357): n is a, c, g, or t
gtgtgtgccaaaggcatggagtttgagactagcggtcgttgttcgtctttctgcggcgtgttttccaagaatagccagagcggtgacactgtcanttccaagggcaagatagtcaaggttggcaacgcttacttgcgtggcttgctgtatatgtgcgctgagtctgccatctgctggaatcttgcttgttctgatctttattccaggttgagggcaaagggcaaggaaggcaatgttccgatggttgccgtcatgcacaggttgcttaaaattgcttggggtgttgtccggagtggcgagccttacaggggtgccagggttaagaaaagtttgagggcttccgaggctgtcagttag

SEQ ID NO: 224 - protein, 118 aa, Unknown
  Obtained from environmental sample
  misc_feature (1)..(118): Xaa is any amino acid
MCAKGMEFETSGRCSSFCGVFSKNSQSGDTVXSKGKIVKVGNAYLRGLLYMCAESAICWNLACSDLYSRLRAKGKEGNVPMVAVMHRLLKIAWGVVRSGEPYRGARVKKSLRASEAVS

SEQ ID NO: 225 - DNA, 654 bp, Unknown
  Obtained from environmental sample
  misc_feature (1)..(654): n is a, c, g, or t
atgtggtatgataatttatttactgaaatggaaagaaataaaaatgcggaacaggctaaaaaaatgtccgcttatatgaaaaataaatttgtctttttaggcataccgaaaccaaaattgaatgaaataatgaagccttacataaaagaaggtaagaaacatgatcttaattggaaatttgtcaatatttgctggaagaaagattatcgtgaagcccaatatgtcgcggtagaatatttagaaagtttagcaaaattattaaccgatgacgatttacccaatcttaaaaaacttattgttactaagtcatggtgggatactaccgattcgatagacgcaataattggaaagattgtttttaattacaaaaagctggaaaaggaaatgcttaaatggtcaaaagatgaaaatatttgggtaagaagggtagcgatagattttcaactgcaatacaaagataaaaccaatcaaaaattatttgaacaaattatagtgaataattttggaacagatgaattttttataaataaagccattggctggagtttaagagaatattcaaaaacagataaaaaatgggttaaagattttattaataaatataaagatcggcttcacaaattaagtataaaagaagcgtcaaaatatttatag

SEQ ID NO: 226 - protein, 217 aa, Unknown
  Obtained from environmental sample
  misc_feature (1)..(217): Xaa is any amino acid
MWYDNLFTEMERNKNAEQAKKMSAYMKNKFVFLGIPKPKLNEIMKPYIKEGKKHDLNWKFVNICWKKDYREAQYVAVEYLESLAKLLTDDDLPNLKKLIVTKSWWDTTDSIDAIIGKIVFNYKKLEKEMLKWSKDENIWVRRVAIDFQLQYKDKTNQKLFEQIIVNNFGTDEFFINKAIGWSLREYSKTDKKWVKDFINKYKDRLHKLSIKEASKYL

SEQ ID NO: 227 - DNA, 423 bp, Unknown
  Obtained from environmental sample
  misc_feature (1)..(423): n is a, c, g, or t
atgaatgatttagaattattaaaacaaataccgcttggtgtacctcaaccgagcccgaagggcgaaggttcccctcttgaagacagtacctttgaattaaaaaatattgaatatacaaataataacataaccggacgttttgatgaacagcttgtaatggacgcgagcattgatgatctggatcaaaaactgtgggaacggtttaagactccgctctccccgcctgataatatcgaatttcttgaaaaattgcggttgatatcccgcgatgaggacggcgcgcttcatccgactgtaggcggcatattaatggcggcggaataccctgaacggcatatttcaaacgcctatatccaggtcgtatgttataacggtgaaaaccataactccccgcagttggacgcgcaggtcagaaagccttga

SEQ ID NO: 228 - protein, 140 aa, Unknown
  Obtained from environmental sample
  misc_feature (1)..(140): Xaa is any amino acid
MNDLELLKQIPLGVPQPSPKGEGSPLEDSTFELKNIEYTNNNITGRFDEQLVMDASIDDLDQKLWERFKTPLSPPDNIEFLEKLRLISRDEDGALHPTVGGILMAAEYPERHISNAYIQVVCYNGENHNSPQLDAQVRKP

SEQ ID NO: 229 - DNA, 348 bp, Unknown
  Obtained from environmental sample
  misc_feature (1)..(348): n is a, c, g, or t
atgaacttactgaaaaattatctgcaaaaagtggattattcactgagcagtaaaataaccgaatattattttgaattcgcggtttccaatattatcaacatgctgggccttgtgtgcgttaacgaagttcacacggcaaacgggcggatggacagcgtaattttcgccggagattatatttatattcttgaatttaaaaccgacaagccggtcgaagacgccctttggcagatagaagaaaaagattacgcgtcaatatattcggataaagggaaaaaaccggttaaaatcggaatcgtcttcagccgggaagccagaaacatcgttgaatggaaaagcgatttataa

SEQ ID NO: 230 - protein, 115 aa, Unknown
  Obtained from environmental sample
  misc_feature (1)..(115): Xaa is any amino acid
MNLLKNYLQKVDYSLSSKITEYYFEFAVSNIINMLGLVCVNEVHTANGRMDSVIFAGDYIYILEFKTDKPVEDALWQIEEKDYASIYSDKGKKPVKIGIVFSREARNIVEWKSDL

SEQ ID NO: 231 - DNA, 825 bp, Unknown
  Obtained from environmental sample
  misc_feature (1)..(825): n is a, c, g, or t
gtgctaaggggctatctggaatggattaacgatctcccctggagcgaatacagcgccgacacctcagacctctcggaagcagagaaaatactcaacgaagatcattacgaaatgaaaaaagccaaggaaaggatcattgaatttatcgcggtcaggcaattgaacactcaagcttctacccaggcggaacaaattccccttggcataaagggtccgatactctgctttgtggggcctccgggaacgggtaaaaccagcctaggcaaatccgttgccagggccctggggcgcaaatttgtacgcatctccctcggcggcgtccgggacgaggcggaaatacggggccacagaaaaacttatgttggcgctttgccgggaaaaattattcagtcaatgcggaaggccggaaccatgaaccccgtatttcttctggacgagattgacaagctctccagcgatttcaggggagaccccgcctcggccctccttgaagttttggatcctgagcaaaattccacgtttacagatcactacatggaagtcccttacgacctttccaaggtgctgtttattaccacggccaattcgttacattcaatcccgtacccccttctggatcgaatggagatcatagaaatccccggctacggagaaaatgaaaagcttgctatcgcgaagaaattccttgttccgaaagaattggccgagaacggactggccagggcaaaaataactttcaaagacgaagcaattctggaaatcatccgccattggacaatggaatccggcgtacgcagcctgaaagggaaatcgcccggtgcgtaa

SEQ ID NO: 232 - protein, 274 aa, Unknown
  Obtained from environmental sample
  DOMAIN (74)...(210): ATPase family associated with various cellular activities (AAA)
  misc_feature (1)..(274): Xaa is any amino acid
MLRGYLEWINDLPWSEYSADTSDLSEAEKILNEDHYEMKKAKERIIEFIAVRQLNTQASTQAEQIPLGIKGPILCFVGPPGTGKTSLGKSVARALGRKFVRISLGGVRDEAEIRGHRKTYVGALPGKIIQSMRKAGTMNPVFLLDEIDKLSSDFRGDPASALLEVLDPEQNSTFTDHYMEVPYDLSKVLFITTANSLHSIPYPLLDRMEIIEIPGYGENEKLAIAKKFLVPKELAENGLARAKITFKDEAILEIIRHWTMESGVRSLKGKSPGA

SEQ ID NO: 233 - DNA, 423 bp, Unknown
  Obtained from environmental sample
  misc_feature (1)..(423): n is a, c, g, or t
ttgtatttttctacattaaacaaaatgctttctttggaaatagaccgctatttggaatcgctggagacacaaagaaaattctcgccgcatactgtaagggcatacactcgcatactgcacggctttaaggattttttggcaaatgatattgcagtggaagaattaaaagttgatatgatgagggattggcttttcaacataagagaggacaaaaaagccattgccacgcaatcgcaggcaattgcctgccttaaaagttttgggaaatatctcattcgctccacagatttaaagcataatccagccaccgcacttaaaacgccaaaaaagccaaaacgccttgtctcttttttatcgcagaaggaaattagcgagccgttcaaaatagaggatttgttcaaaaccgaatttgngagaaaatga

SEQ ID NO: 234 - protein, 140 aa, Unknown
  Obtained from environmental sample
  DOMAIN (14)...(95): Phage integrase, N-terminal SAM-like domain
  misc_feature (1)..(140): Xaa is any amino acid
MYFSTLNKMLSLEIDRYLESLETQRKFSPHTVRAYTRILHGFKDFLANDIAVEELKVDMMRDWLFNIREDKKAIATQSQAIACLKSFGKYLIRSTDLKHNPATALKTPKKPKRLVSFLSQKEISEPFKIEDLFKTEFXRK

SEQ ID NO: 235 - DNA, 531 bp, Unknown
  Obtained from environmental sample
  misc_feature (1)..(531): n is a, c, g, or t
gtgggcctggcatggacgagcatgggcggggacacgcttgttattgaagcgacttcagtgccgggtaaagagggcctcaccctcaccggtaaaatgggcgacaccatgaaggaaagcgccgcaatcgccatgaccatggcgcagaaactgggaaccgagcgttatgggattgaatcttcctggtttgagaaaaaccatatccaccttcacatccccgagggcgctactcccaaggacgggccatccgcagggatcaccatggcgacggcgctgctttccctggtacggaacaggactattgccgatcgcgtggtgatgacaggggaactcagccttaccgggcaggtgctgccaatcggggggcttaaagaaaaaaccatcgcggcccagcggaacaaggccagacacataatcatcccaaaacaaaatctccgcgatctggatgaaattcctgaaaatgtaaaaaagggaattgagttccacccggttgagcgttttgatgaagtcctggctctggttttgccggactaa

SEQ ID NO: 236 - protein, 176 aa, Unknown
  Obtained from environmental sample
  DOMAIN (1)...(176): Lon protease (S16) C-terminal proteolytic domain
  misc_feature (1)..(176): Xaa is any amino acid
MGLAWTSMGGDTLVIEATSVPGKEGLTLTGKMGDTMKESAAIAMTMAQKLGTERYGIESSWFEKNHIHLHIPEGATPKDGPSAGITMATALLSLVRNRTIADRVVMTGELSLTGQVLPIGGLKEKTIAAQRNKARHIIIPKQNLRDLDEIPENVKKGIEFHPVERFDEVLALVLPD

SEQ ID NO: 237 - DNA, 429 bp, Unknown
  Obtained from environmental sample
  misc_feature (1)..(429): n is a, c, g, or t
gtggaactcaattcccttttttacattttcaggaatttcatccagatcgcggagattttgttttgggatgattatgtgtctggccttgttccgctgggccgcgatggttttttctttaagccccccgattggcagcacctgcccggtaaggctgagttcccctgtcatcaccacgcgatcggcaatagtcctgttccgtaccagggaaagcagcgccgtcgccatggtgatccctgcggatggcccgtccttgggagtagcgccctcggggatgtgaaggtggatatggtttttctcaaaccaggaagattcaatcccataacgctcggttcccagtttctgcgccatggtcatggcgattgcggcgctttccttcatggtgtcgcccattttaccggtgagggtgaggccctctttacccggcactga

SEQ ID NO: 238 - protein, 142 aa, Unknown
  Obtained from environmental sample
  misc_feature (1)..(142): Xaa is any amino acid
MELNSLFYIFRNFIQIAEILFWDDYVSGLVPLGRDGFFFKPPDWQHLPGKAEFPCHHHAIGNSPVPYQGKQRRRHGDPCGWPVLGSSALGDVKVDMVFLKPGRFNPITLGSQFLRHGHGDCGAFLHGVAHFTGEGEALFTRH

SEQ ID NO: 239 - DNA, 339 bp, Unknown
  Obtained from environmental sample
  misc_feature (1)..(339): n is a, c, g, or t
atggaaagctacaagcccaggacagaagcggaactggcggcgcttaaggaaagcgtccacacttccctcgaagggatctgcactggctgtgcttactgcgtaggcggcaaagccgcctcaaattgtccccagaatattcccattcccaagttaatggacgcctacaaccaaaagatcctgagcgcggatgataaaaaagacacgattggcgatcggctgcgctggcactggagcctcgatcgctcagtcgcgggcaaatgcaccgcctgcgggcaatgcgagaaagcatgcactcagcacatcgacatcatccagcggcttaaggaaatagcgggataa

SEQ ID NO: 240 - protein, 112 aa, Unknown
  Obtained from environmental sample
  misc_feature (1)..(112): Xaa is any amino acid
MESYKPRTEAELAALKESVHTSLEGICTGCAYCVGGKAASNCPQNIPIPKLMDAYNQKILSADDKKDTIGDRLRWHWSLDRSVAGKCTACGQCEKACTQHIDIIQRLKEIAG

SEQ ID NO: 241 - DNA, 486 bp, Unknown
  Obtained from environmental sample
  misc_feature (1)..(486): n is a, c, g, or t
ttgatgaacgcggatgaatttgaagtgccggccgcgcttgcctttgccctaagctgggaagagagcaggtttaacccgcgcgctgtttcaaggcctaaccgcgacggcagcatagaccgcggcctgtttcagcttaacaacaagtctttccctgatttggatccgcttgcttattttaacattcgatataatacgcgtgtcggtataggccatctgcgctactgcctggatacaggcggcagcgagatttcggctcttgccatgtacaacgcgggggcgggacggatttcgtctatgggcgcgcctaaggttacgcttaattacataagccgtattctggaaaacaagagcaagatagaaagccgttttcacgccatgctgatgaaagaagaagaaaaaaggtattccgaaaaagaacagagttcaaatccgcttcagtttaacccgactttaagtattacttctttgttaaatccgtcgttgtaa

SEQ ID NO: 242 - protein, 161 aa, Unknown
  Obtained from environmental sample
  DOMAIN (2)...(112): Transglycosylase SLT domain
  misc_feature (1)..(161): Xaa is any amino acid
MMNADEFEVPAALAFALSWEESRFNPRAVSRPNRDGSIDRGLFQLNNKSFPDLDPLAYFNIRYNTRVGIGHLRYCLDTGGSEISALAMYNAGAGRISSMGAPKVTLNYISRILENKSKIESRFHAMLMKEEEKRYSEKEQSSNPLQFNPTLSITSLLNPSL

SEQ ID NO: 243 - DNA, 411 bp, Unknown
  Obtained from environmental sample
  misc_feature (1)..(411): n is a, c, g, or t
ttgacacgaccaaataatcataggcaagaaaaaagtcgccgcgtatttaaggattgtctcgcgaagggaataaaaattacaagggagaagatgggaaatgtgccgtgcttcctgggagaattcggcctcgcttttgatctaaacaaccgcggcggttttgagaagggcgattattcattgcacgaggaagcgctgtccatgtactacgacgcggcagacgcaaaccttctgcactgtacaatctggaattactccgcgagcaatacaaatgaatacggcgacagttggaacgaagaagacctctcgatcttttccgaaggaaaagaaagggcggcgcttggctggaaacggccctacccaatggctaccgccggagaaacaatgccttcttgtttacaacgacggatttaa

SEQ ID NO: 244 - protein, 136 aa, Unknown
  Obtained from environmental sample
  misc_feature (1)..(136): Xaa is any amino acid
MTRPNNHRQEKSRRVFKDCLAKGIKITREKMGNVPCFLGEFGLAFDLNNRGGFEKGDYSLHEEALSMYYDAADANLLHCTIWNYSASNTNEYGDSWNEEDLSIFSEGKERAALGWKRPYPMATAGETMPSCLQRRI

SEQ ID NO: 245 - DNA, 783 bp, Unknown
  Obtained from environmental sample
  misc_feature (1)..(783): n is a, c, g, or t
atgtataaaacagttgatgcaaaagtaaattttcccaaacttgaagaagaagtcctcaaattttgggagcaaaataaaatatttgaaaagtcagttttgcagagggaaaaagagaacgagtttgttttttacgatggtccgccctttgccacaggtctgcctcattttgggcattttgtaccaagtacaatcaaagatattattccccgctaccagtgcatgaagggcaaaaaagtcgagcgccgtttcggctgggactgccacggtcttcctgtagaaaacctgatcgaaaaagaactgggtctcaattccaagacagaaatcgaaaactacggtatcgctaaattcaacgaagcctgccgcgcttcagtcctccgttatgtgaaagaatggcgtcagacaatcacgcggcttggccgctgggtagactttgatcacgactacaaaacaatggaagcggactatatggaaacaatctggtggatcatgaagtccctttgggataagggtctgctttatgaaggccactatatccttccgtactgtccccgctgtgctacagtactctccaaccacgaattaaacctcggaggttatcaggacgtacatgatcctgcgatcactgtaaggtttaaagttactgggggtggggaagtgaagccctcaatacctctcaatacctacctgctcgcatggacaacaaccccttggactctgccttcaaatcttgccctaactcttggtcctgacattgactatgttttaataggaggacctttctga

SEQ ID NO: 246 - protein, 260 aa, Unknown
  Obtained from environmental sample
  DOMAIN (17)...(260): tRNA synthetases class I (I, L, M and V)
  misc_feature (1)..(260): Xaa is any amino acid
MYKTVDAKVNFPKLEEEVLKFWEQNKIFEKSVLQREKENEFVFYDGPPFATGLPHFGHFVPSTIKDIIPRYQCMKGKKVERRFGWDCHGLPVENLIEKELGLNSKTEIENYGIAKFNEACRASVLRYVKEWRQTITRLGRWVDFDHDYKTMEADYMETIWWIMKSLWDKGLLYEGHYILPYCPRCATVLSNHELNLGGYQDVHDPAITVRFKVTGGGEVKPSIPLNTYLLAWTTTPWTLPSNLALTLGPDIDYVLIGGPF

SEQ ID NO: 247 - DNA, 633 bp, Unknown
  Obtained from environmental sample
  misc_feature (1)..(633): n is a, c, g, or t
ttgcagcttatgcgccttcttgaaaggcataatcaggcggggaataccgaaccggtaacttcggcgcaggttgagaatctgaccggctggtcaagggataccatacgcaaggatatttcgtacctcggctcggccgccgggatgaccgtaggcggcagcgcgggttatgcaccgggaatgctggttccgcttataaagaaagccctgggattggactgccgcaggaaattctgcgtggtgggactggggcggctcggttcggcatatatcaattttgcgccttccgaactggcggaattcgagtttgccgccgggtttgacaccaacgtgaacagggtggagatattgcagtccccggcgccgctgtacccggcttacaaacttcaggaagtggtaagccgtttcaatatcgggatcgccctgctttgcgttccgtccggcgcggcgcaggaagtcgcggaaaaatgcgtagccgccgggattacgggcatattgaattttgccccggtggcgttgagattaccgccggaaattgccgtacggaatatgtatgtggcggatgaattgaggagtttggctataaaaatgaaaataaacatagaaggagatgttcattatgaaacgagtgtttaa

SEQ ID NO: 248 - protein, 210 aa, Unknown
  Obtained from environmental sample
  DOMAIN (70)...(174): CoA binding domain
  misc_feature (1)..(210): Xaa is any amino acid
MQLMRLLERHNQAGNTEPVTSAQVENLTGWSRDTIRKDISYLGSAAGMTVGGSAGYAPGMLVPLIKKALGLDCRRKFCVVGLGRLGSAYINFAPSELAEFEFAAGFDTNVNRVEILQSPAPLYPAYKLQEVVSRFNIGIALLCVPSGAAQEVAEKCVAAGITGILNFAPVALRLPPEIAVRNMYVADELRSLAIKMKINIEGDVHYETSV

SEQ ID NO: 249 - DNA, 579 bp, Unknown
  Obtained from environmental sample
  misc_feature (1)..(579): n is a, c, g, or t
gtgttaatgcagtacgatacgataattattggcggggggccggcaggttatttggccgcggaaagactggggcatcataagaagaaagtcctcctgatagaagaacagcatcttggtggaacctgccttaatgtgggttgcatccctaccaagaccttactcaattcagcgaaactatatgtccacgcgaaagaggcggagaagttcggcgttaaagccgaggggctttcgtatgactggagtgccattcaaaactggaagatcgatgtggtaacgaaactccggggcggaatcgaaagccagctgaagagatatggcattgaagtgattaatggcaggggggaaattctcagtacgccgtccggagaaaaagccgcanaggtcagagtaatttcgcctgacggtaatatcgagcatgagggaaagacaatactgctctgcgccgggtccgttcccgttctgccgccaataccaggcgcaaagggtaatccccctgctgtggattccaccgggcttctggctgtcgaaaacgtaccaaaacgcctgggcggtataggccggcggggttatcggcgttga

SEQ ID NO: 250 - protein, 192 aa, Unknown
  Obtained from environmental sample
  DOMAIN (6)...(192): Pyridine nucleotide-disulphide oxidoreductase
  misc_feature (1)..(192): Xaa is any amino acid
MLMQYDTIIIGGGPAGYLAAERLGHHKKKVLLIEEQHLGGTCLNVGCIPTKTLLNSAKLYVHAKEAEKFGVKAEGLSYDWSAIQNWKIDVVTKLRGGIESQLKRYGIEVINGRGEILSTPSGEKAAXVRVISPDGNIEHEGKTILLCAGSVPVLPPIPGAKGNPPAVDSTGLLAVENVPKRLGGIGRRGYRR

SEQ ID NO: 251 - DNA, 612 bp, Unknown
  Obtained from environmental sample
  misc_feature (1)..(612): n is a, c, g, or t
gtgaagaatctttttaagacagcttttattttaatttttgccgcggctggttccctgcctgtaaacagctactatgtcacctacaaagaacagtactacaagctttatcacattcaccacattcaataccccgacgattccatggaaaacatctactggctggaacaggctatgaaggctgatttcgcaaatcctctttatgcgctcgcccttatcgagaacgaggttcaatgggaaaaataccgctatctttttaacatgcacataaatattaaacttattgagcagtatttgtatttaggcaacaaatggaacaaacgcaaggcatatttttacaacgccccgtggagggatcaaaacctcgaaagcctggaaacggcggaaacctgctaccgaaccgccctttattactgggacgaagcgcttaagtggtatgaaaaagcaaatgataaacgtttcacgtggattaatttacagaaggttcaattctgggaagacgaggttttcaggatagaagaaggcactcttaattacggtaaaaccatcaagcgcgaacttaccctgctgcagaacgtgcgcgagaaatttcaggctatggaaaagcggtactaa

SEQ ID NO: 252 - protein, 203 aa, Unknown
  Obtained from environmental sample
  SIGNAL (1)...(23)
  misc_feature (1)..(203): Xaa is any amino acid
MKNLFKTAFILIFAAAGSLPVNSYYVTYKEQYYKLYHIHHIQYPDDSMENIYWLEQAMKADFANPLYALALIENEVQWEKYRYLFNMHINIKLIEQYLYLGNKWNKRKAYFYNAPWRDQNLESLETAETCYRTALYYWDEALKWYEKANDKRFTWINLQKVQFWEDEVFRIEEGTLNYGKTIKRELTLLQNVREKFQAMEKRY

SEQ ID NO: 253 - DNA, 351 bp, Unknown
  Obtained from environmental sample
  misc_feature (1)..(351): n is a, c, g, or t
atgacgcaactagtagagaagaactggcacttggtggaagagatgaccgagcgtctcaaggcgctgaacccgtacaaggtcattctgttcggctcatacgccgccggcaacccgacggaagacagcgaccttgacgtcgccgttattttggacagcgacgagatcgcgaaaacgttcaccgaaaggatggatcggtggcatcctgtggcaaaggccgtgagagaagtccattaccaaatcgctatggacatcattgtgtattcaagagccgagatgaaatatctaaaggaaaacggtaacaatttcgtagaagaaatagagagtacgggaaaagttctatatgaaaaatga

SEQ ID NO: 254 - protein, 116 aa, Unknown
  Obtained from environmental sample
  DOMAIN (9)...(98): Nucleotidyltransferase domain
  misc_feature (1)..(116): Xaa is any amino acid
MTQLVEKNWHLVEEMTERLKALNPYKVILFGSYAAGNPTEDSDLDVAVILDSDEIAKTFTERMDRWHPVAKAVREVHYQIAMDIIVYSRAEMKYLKENGNNFVEEIESTGKVLYEK

SEQ ID NO: 255 - DNA, 615 bp, Unknown
  Obtained from environmental sample
  misc_feature (1)..(615): n is a, c, g, or t
atgaccacccttacgggctatcctgaagtccttgagccgaatgttccgccctccggggaaataatccaggcaatgaaagctatgtcggaaaaatggggacgcaaacgggtgatctggcgttatgatccgatctttttttccagccttaccgatacggcttttcattgccgtaattttacgcaactggcggcgggactaagcggttccgtggaaagggtaataatcagcgtttacgatgaatacgccggagcaaagcggcggctttccgcccttggaaaaacaggtgtcaaagtttttccccactgcgccccggacgggcggctcacgtctgaattgaaggaacttatcgcggaaatttcccgcatagccgcagaagcgggaatggaaatatgctcatgcgccgaagctgaggatctatcgggcattggagtaaagccgggagcctgcatagacggcaaccttatcaatgagcttctgggagccaaagatccaatttcacaaattaaaaacaaagataaaaaccagcggcgtgattgccgctgcgtttccagcgtggacataggcagttacggttcctgcagggctggctgcgtttactgttacgcgcaacgataa

SEQ ID NO: 256 - protein, 204 aa, Unknown
  Obtained from environmental sample
  misc_feature (1)..(204): Xaa is any amino acid
MTTLTGYPEVLEPNVPPSGEIIQAMKAMSEKWGRKRVIWRYDPIFFSSLTDTAFHCRNFTQLAAGLSGSVERVIISVYDEYAGAKRRLSALGKTGVKVFPHCAPDGRLTSELKELIAEISRIAAEAGMEICSCAEAEDLSGIGVKPGACIDGNLINELLGAKDPISQIKNKDKNQRRDCRCVSSVDIGSYGSCRAGCVYCYAQR

SEQ ID NO: 257 - DNA, 429 bp, Unknown
  Obtained from environmental sample
  misc_feature (1)..(429): n is a, c, g, or t
atggccgagcggccgagtctccggtttcgcggtgacgttggcgatcaccggacagttcggggccgaaatttcacggattcaagcgcggcggagagcttctcggccgcgggttgcataagcggggagtggaacgcgccgctgacgggcagcggcatggcccgcttggccccggcggctttcaacgactcgcaggcctcgctcacggcggcggtctcgccggagatcaccgtctgctcgggggcgttctcgttcgcggcgacgactatgccgcttttcacccgggaaatgacttcgactatcttatcccgatccatccccaaaaccgccgccatcgcgcccggattagctttaccggcctccgccatagcctcgccccgcgccgccaccaagcgcacgccgtcttcaaaggatataacgcccgccgcgtag

SEQ ID NO: 258 - protein, 142 aa, Unknown
  Obtained from environmental sample
  misc_feature (1)..(142): Xaa is any amino acid
MAERPSLRFRGDVGDHRTVRGRNFTDSSAAESFSAAGCISGEWNAPLTGSGMARLAPAAFNDSQASLTAAVSPEITVCSGAFSFAATTMPLFTREMTSTILSRSIPKTAAIAPGLALPASAIASPRAATKRTPSSKDITPAA

SEQ ID NO: 259 - DNA, 672 bp, Unknown
  Obtained from environmental sample
  misc_feature (1)..(672): n is a, c, g, or t
atgcctaaaattgtaatgctgtttcccggccaaggctctcagtccgtaggcatgggcaaggatttttacgacaataatgaccgttcccgttttgacgaggcggacgaaatcctcgggcgggacctgagccgtatcatcttttccggcccgatggaggagttgacggaaacgcggaacacgcagcccgcgctttttgtcgtagaggcggttatggttgacgctctggctaaatccggggtaaccccgatagtcgccgccggccacagcctaggcgagtacagcgccctctacgcggcgggcgttatatcctttgaagacggcgtgcgcttggtggcggcgcggggcgaggctatggcggaggccggtaaagctaatccgggcgcgatggcggcggttttggggatggatcgggataagatagtcgaagtcatttcccgggtgaaaagcggcatagtcgtcgccgcgaacgagaacgcccccgagcagacggtgatctccggcgagaccgccgccgtgagcgaggcctgcgagtcgttgaaagccgccggggccaagcgggccatgccgctgcccgtcagcggcgcgttccactccccgcttatgcaacccgcggccgagaagctctccgccgcgcttgaatccgtgaaatttcggccccgaactgtccggtga

SEQ ID NO: 260 - protein, 223 aa, Unknown
  Obtained from environmental sample
  DOMAIN (5)...(223): Acyl transferase domain
  misc_feature (1)..(223): Xaa is any amino acid
MPKIVMLFPGQGSQSVGMGKDFYDNNDRSRFDEADEILGRDLSRIIFSGPMEELTETRNTQPALFVVEAVMVDALAKSGVTPIVAAGHSLGEYSALYAAGVISFEDGVRLVAARGEAMAEAGKANPGAMAAVLGMDRDKIVEVISRVKSGIVVAANENAPEQTVISGETAAVSEACESLKAAGAKRAMPLPVSGAFHSPLMQPAAEKLSAALESVKFRPRTVR

SEQ ID NO: 261 - DNA, 396 bp, Unknown
  Obtained from environmental sample
  misc_feature (1)..(396): n is a, c, g, or t
atggttttgagattttttctatttgcgagcttgtttcttttcgcatcctgctacgaggcgaaattcgacaacccagacgatccggaaagccgcaactatatcgggaatgggctttccagttcctcgtctgttgccaaaagctctagttctgctgtggtgccttcgtcaagcgcgatatctggcagttcctcgtcagttgctaaaagttctagctctgtggtggtgtcttcgtcaagttcaaagatgagtagttcctcgtctcttgccaagagttctagttctgcggtggtgtcttcatcaagctcaaaaccgagcagtagctctattgtaccgcccagcagttcgtctcttgctcaaagctctagctctgcggtggttattccggtggttgcatag

SEQ ID NO: 262 - protein, 131 aa, Unknown
  Obtained from environmental sample
  SIGNAL (1)...(19)
  misc_feature (1)..(131): Xaa is any amino acid
MVLRFFLFASLFLFASCYEAKFDNPDDPESRNYIGNGLSSSSSVAKSSSSAVVPSSSAISGSSSSVAKSSSSVVVSSSSSKMSSSSSLAKSSSSAVVSSSSSKPSSSSIVPPSSSSLAQSSSSAVVIPVVA

SEQ ID NO: 263 - DNA, 618 bp, Unknown
  Obtained from environmental sample
  misc_feature (1)..(618): n is a, c, g, or t
gtgcattttaccctgacggatttgataactgatataacccagaatggggcagaatccggggcttctgtcgtggagcttcaaaccagtgaaattcgggattctgcggaaccaaaaggttcaaaggaaccgataggttcctccggcaagggggaactccggttcactgtaattgacaacggcaaggggatgaccgccgaggaacttaagcgggctcaggatccctttgttacagacggcataaaacacccccatcgcaaagtggggttggggcttccttttttaatccagaccgcagaagcgtcgggcggcggatggaaaatggaatcaaaaaaggccggggaaggtcaggcgtcgggtactgtaataagcgcctggtttgatctgggaaacgtggatacccccccggtgggggacattccgggaatgtttcggacggtgctgctttttggcggcccggaagaaatggttatcaagcgccttcgtaaatcgccggaaggtgatcttgattacgaagtgcggaaaaccgaactaatcgacgctcttggggatttggaagatacccagtccctgattttattggatcgttatttgcgttccctggaagaatcgggggaatga

SEQ ID NO: 264 - protein, 205 aa, Unknown
  Obtained from environmental sample
  DOMAIN (3)...(129): Histidine kinase-, DNA gyrase B-, and HSP90-like ATPase
  misc_feature (1)..(205): Xaa is any amino acid
MHFTLTDLITDITQNGAESGASVVELQTSEIRDSAEPKGSKEPIGSSGKGELRFTVIDNGKGMTAEELKRAQDPFVTDGIKHPHRKVGLGLPFLIQTAEASGGGWKMESKKAGEGQASGTVISAWFDLGNVDTPPVGDIPGMFRTVLLFGGPEEMVIKRLRKSPEGDLDYEVRKTELIDALGDLEDTQSLILLDRYLRSLEESGE

SEQ ID NO: 265 - DNA, 354 bp, Unknown
  Obtained from environmental sample
  misc_feature (1)..(354): n is a, c, g, or t
ttgactttaaagattttgactttcaagattatttatatcgacaatatccaccgtcccgtaggcgtatttattactgtaaaagtaaagaccatggccatgaatcgcaaagatccacaacacactaacggggaggataatgatatgcaatgcgggactgttctgttcttcaacgacattaacggtacgggtaagatcatggcggacaacggtgcccgaatcagcgtttcacacaaggcgcttaagggcgaagggtacaaggttttggacgaggggcagcgtgtctgttttaagagcgttcggcggaagtccggtcttgaggcgatgtttgtggaaataatcgatacgtttttctga

SEQ ID NO: 266 - protein, 117 aa, Unknown
  Obtained from environmental sample
  DOMAIN (48)...(113): Cold-shock' DNA-binding domain
  misc_feature (1)..(117): Xaa is any amino acid
MTLKILTFKIIYIDNIHRPVGVFITVKVKTMAMNRKDPQHTNGEDNDMQCGTVLFFNDINGTGKIMADNGARISVSHKALKGEGYKVLDEGQRVCFKSVRRKSGLEAMFVEIIDTFF

SEQ ID NO: 267 - DNA, 372 bp, Unknown
  Obtained from environmental sample
  misc_feature (1)..(372): n is a, c, g, or t
atggatgccctgaccttcggcaagcgcgccgatctgctcggattggcccgaaaacgcatcgccgcgcgtccggatgtttaccagaatcatatctatggcgaattggaagccggcggcaccaactggctgtatatctccggcgcgcccttctcccaggtcgggcttgacgaaagcatcatcaatcgtccgtatgcggaactcaccgccggcgctctcggcgcggtgccgatggttatcggcatctggccggtgctgcttggcggcgcgtacatgatttccagacgccgcgaagccgtggccagagaagaaatccatgaggccgaagcgaaagcccgcgccgaagccgggaaaagcgaaggggaggatgcctaa

SEQ ID NO: 268 - protein, 123 aa, Unknown
  Obtained from environmental sample
  misc_feature (1)..(123): Xaa is any amino acid
MDALTFGKRADLLGLARKRIAARPDVYQNHIYGELEAGGTNWLYISGAPFSQVGLDESIINRPYAELTAGALGAVPMVIGIWPVLLGGAYMISRRREAVAREEIHEAEAKARAEAGKSEGEDA

SEQ ID NO: 269 - DNA, 504 bp, Unknown
  Obtained from environmental sample
  misc_feature (1)..(504): n is a, c, g, or t
ttggagcgcgaacgcggacagttggtggacttgctgctggactcccaccagtacacctatcaaaagaaggctgcgatattcggcgatccggacgtggtaatcgcccttacatcgcttgctttggaaatgggaatgacgccgaaatacgtcatcacgggaacgccgaaagaagaatttaccggcagggttaattcgctgctcgcaaggtacggtgtaagcggctgtacggtaaaggcaaacgcggatttgttcgagatgcaccaatggattaagaatgagcctgtggatttattgattggcacgacttacggcaagcagatcgcgaaagccgaagatatcccctttatccgcgccggcttcccggtgcttgacaggtacggcggccccttacagccgattgtaggctacgccggggcaatacggctggttgaacaaataacaaacacgctgcttgacaggttcgaccgtgacgttgcggacgaggattttgagattgttcaatag

SEQ ID NO: 270 - protein, 167 aa, Unknown
  Obtained from environmental sample
  misc_feature (1)..(167): Xaa is any amino acid
MERERGQLVDLLLDSHQYTYQKKAAIFGDPDVVIALTSLALEMGMTPKYVITGTPKEEFTGRVNSLLARYGVSGCTVKANADLFEMHQWIKNEPVDLLIGTTYGKQIAKAEDIPFIRAGFPVLDRYGGPLQPIVGYAGAIRLVEQITNTLLDRFDRDVADEDFEIVQ

SEQ ID NO: 271 - DNA, 369 bp, Unknown
  Obtained from environmental sample
  misc_feature (1)..(369): n is a, c, g, or t
gtggatgtggacggcacggaggtgagggtagccgtagcncacggcatggtcaacatcgccgcagtgctcgacaaaatcaaaaccgcgctagccgaaggcaaggagactccgtatcacttcgtagaggtgatggcttgccgaggcggctgcgtaggcggcggaggccagccgtacggcgccgacgacaacgtgcgcaaactccgcgccgacggcctgtacttagatgatgagaagtcaaaattccgttgctcgcacaagaatccgcagatcgccaaggtctacgaggagttcttggaaaagccgctgtcccacaagtcgcacgatctgctgcacaccagctatgagccgagaccggagtatcggtggtag

SEQ ID NO: 272 - protein, 122 aa, Unknown
  Obtained from environmental sample
  DOMAIN (59)...(118): Iron hydrogenase small subunit
  misc_feature (1)..(122): Xaa is any amino acid
MDVDGTEVRVAVAHGMVNIAAVLDKIKTALAEGKETPYHFVEVMACRGGCVGGGGQPYGADDNVRKLRADGLYLDDEKSKFRCSHKNPQIAKVYEEFLEKPLSHKSHDLLHTSYEPRPEYRW

SEQ ID NO: 273 - DNA, 435 bp, Unknown
  Obtained from environmental sample
  misc_feature (1)..(435): n is a, c, g, or t
ttgacctcgcggccccgttccccgattagcgccaccacgttcacgtcggcgctggtattgcgggctatcatgccgagcagggtcgattttcccacgcctgaaccggcaaatatgccgagccgctggcccttgcctgccgccaggaggccgtcaatggcccgcacgcccgttgtaatacgttctgtaatacgcctgcgtttgagggggtcgggggggcttgccagcgcggggtacattacaggggattcaatatcgcctttgccgtcaatgggctgccccagggcattcagcacacgaccaagaagtttcttcgacacagggacttcaaggcggctgccctgggcaatgacggggcagccaacttcaagcccgtcggtttcctcgaaaaccattaactgtacgatttcgtttcgtaacccgacaacctccgcgtaa

SEQ ID NO: 274 - protein, 144 aa, Unknown
  Obtained from environmental sample
  SIGNAL (1)...(21)
  misc_feature (1)..(144): Xaa is any amino acid
MTSRPRSPISATTFTSALVLRAIMPSRVDFPTPEPANMPSRWPLPAARRPSMARTPVVIRSVIRLRLRGSGGLASAGYITGDSISPLPSMGCPRAFSTRPRSFFDTGTSRRLPWAMTGQPTSSPSVSSKTINCTISFRNPTTSA

SEQ ID NO: 275 - DNA, 372 bp, Unknown
  Obtained from environmental sample
  misc_feature (1)..(372): n is a, c, g, or t
gtggcagacataccagagaaagctttcgttgggcagggggcgtggtggataggcgtcgctgacaaagaagcccttttaagcacggtatttacagtcatttacaaggaagccaaaaccggctacccctgcatcaaacgctgcgttattgaaggctggatcatgaacaaggattattcccttgttcccgatggcgcgacggtgctgcttgtaaaaacagaagaaaaattttcctttaccgttcactacaaacctaagcccagattgaaagtccttaaagaaaatttcaaggcccatgattacaatatccgggggcttaaagcaggcggcatacggcttgcggcaaaagaagttgaaaaaattgaaatccgctag

SEQ ID NO: 276 - protein, 123 aa, Unknown
  Obtained from environmental sample
  misc_feature (1)..(123): Xaa is any amino acid
MADIPEKAFVGQGAWWIGVADKEALLSTVFTVIYKEAKTGYPCIKRCVIEGWIMNKDYSLVPDGATVLLVKTEEKFSFTVHYKPKPRLKVLKENFKAHDYNIRGLKAGGIRLAAKEVEKIEIR

SEQ ID NO: 277 - DNA, 432 bp, Unknown
  Obtained from environmental sample
  misc_feature (1)..(432): n is a, c, g, or t
atgcctatggcggatttgtactgcggtgtgggaacatttgcctattttttaaaagatatgtttttgagggttacgcttgcggaggaaaacaaggccgctgtcagtattgcaagagaaaatttaagggggactgacgcggagtttttcgccgtccgcgacacggattggccgcgcacattattgcgccgtaaagacgcgtttggctttgccattgtcgatccgccacgagcggggcttgcgcataaattggcggctgtactggcgcaagagggaccgcctttcctcgcctatgtttcctgcgatgtcgcttcccttgcgcgtgattgtaaaatattgacaagcggcggatatgctcttgaaaaactgtcattttttgatttttatccgcagacggcgcatattgagagtttggctgtattccgacaaagttga

SEQ ID NO: 278 - protein, 143 aa, Unknown
  Obtained from environmental sample
  misc_feature (1)..(143): Xaa is any amino acid
MPMADLYCGVGTFAYFLKDMFLRVTLAEENKAAVSIARENLRGTDAEFFAVRDTDWPRTLLRRKDAFGFAIVDPPRAGLAHKLAAVLAQEGPPFLAYVSCDVASLARDCKILTSGGYALEKLSFFDFYPQTAHIESLAVFRQS

SEQ ID NO: 279 - DNA, 612 bp, Unknown
  Obtained from environmental sample
  misc_feature (1)..(612): n is a, c, g, or t
atggctcctgtcggagtaatgatagacgaagcggacgcatttctgggcgaccgcgatcaggaaggggattccggcacaagcaaccgcgtctttgcgcagattgccagttttatggggaacaccgaataccgaggaaaaatcatctggtttttaattacctgccgtcccgatcttatacctatcgacctaaaacggcagggacgcgccgaggagcatcttgcgttattctacccggaatctgacgaggacagggaagacctttttaagacgcttgtacgtaaacttgatttggacattcgtaatttttcagtttccgatctttttaaaaaatacaagcacgaatattccggcgccgatcttgaagccgtccttgtgcgcgcgaaactgcttgcggcaatggatgatcgcgtttttgtaaagcgcgaagacatggaagacgcaatgagcgactttgttccggcggcataccctcacgaggtggaactgcaaaatcttgttgctgttttggaatgtacttcccgggagatgataccaaagcaattccaaaaactgccccgcagcaaaattatcagcgacattcaggaactaaaagcgttacttggcgaaagataa

SEQ ID NO: 280 - protein, 203 aa, Unknown
  Obtained from environmental sample
  DOMAIN (1)...(134): ATPase family associated with various cellular activities (AAA)
  misc_feature (1)..(203): Xaa is any amino acid
MAPVGVMIDEADAFLGDRDQEGDSGTSNRVFAQIASFMGNTEYRGKIIWFLITCRPDLIPIDLKRQGRAEEHLALFYPESDEDREDLFKTLVRKLDLDIRNFSVSDLFKKYKHEYSGADLEAVLVRAKLLAAMDDRVFVKREDMEDAMSDFVPAAYPHEVELQNLVAVLECTSREMIPKQFQKLPRSKIISDIQELKALLGER

SEQ ID NO: 281 - DNA, 471 bp, Unknown
  Obtained from environmental sample
  misc_feature (1)..(471): n is a, c, g, or t
atgagaaaacagcttgtgcgttgtaccattaacggcaaggccgttgaaacggtggtggacatacgcgcgtcgctgaccgacatgctgcgtaatgaataccgcctgaccagcgtaaaaaagggctgcgaggtgggtgaatgcggcgcgtgtaacgtgatcatcaacggggaatgttttaattcatgcatttacctggcaatctgggccgatggcaaagagattaccaccaccgaggggcttttaagcgccgacggtgaactctccgcgatacagcaggcgttcatcgacgagggcgcggtgcagtgcggcttttgcacgcccggctttttaatgagcgcagttgaaatcatacgctcgggaaacaactacagcgacgccgaactgcgcaagttgctgtccgggcatctttgcagatgtactggctatgagaacatcttccgggcggtaagaaaacttgcctgtcaaaaataa

SEQ ID NO: 282 - protein, 156 aa, Unknown
  Obtained from environmental sample
  DOMAIN (76)...(151): [2Fe-2S] binding domain
  misc_feature (1)..(156): Xaa is any amino acid
MRKQLVRCTINGKAVETVVDIRASLTDMLRNEYRLTSVKKGCEVGECGACNVIINGECFNSCIYLAIWADGKEITTTEGLLSADGELSAIQQAFIDEGAVQCGFCTPGFLMSAVEIIRSGNNYSDAELRKLLSGHLCRCTGYENIFRAVRKLACQK

SEQ ID NO: 283 - DNA, 759 bp, Unknown
  Obtained from environmental sample
  misc_feature (1)..(759): n is a, c, g, or t
atggtaggacagggttcatttttgccggttctgttcggggccaaggtttttcggggcgagtatgatcctgtgccttggtcgcatattgtaccaagcactacgcataaaactctgcccggtccgcgctccggagttgtgctttccacaagggaattcgcggaagctttggacaagggctgtccgttgacaatgggcggtccgcttccgcacgtcattgcggcgaaggcggttgctttccgcgaagccgccgccccggaatttaaacagtacgcgcagaaaattgtcgataactgcaaagcgcttgcggcgagttgcatgaaaaacggtcttgatgttttaacgggcggtacggataaccaccttttactggtaaatgtaaataacgcgggtattaccggcagacaggcggaaagcgctctgcatgaatgtcttataacgcttaaccgcaacagtcttccccgcgaccctaacggtccgtggtatacgtcgggcattaggattggaacagcagccactacgtctctcggtatgggagaggcggaaatgacggagcttggagaattaatagcgaaggttgtcaaaggaacaacgcaggcgcaggacgcaaaagatacgtcgaaaaagagcaaggcgaagtatattgtcagcgagagtgtaaagagcgaagttcatacgcgggtaaaatcgttattggagcggtttcctgtgtatcctcagcttaatcttgatctgttaaagaaatattttgtacaaaattaa

SEQ ID NO: 284 - protein, 252 aa, Unknown
  Obtained from environmental sample
  DOMAIN (1)...(189): Serine hydroxymethyltransferase
  misc_feature (1)..(252): Xaa is any amino acid
MVGQGSFLPVLFGAKVFRGEYDPVPWSHIVPSTTHKTLPGPRSGVVLSTREFAEALDKGCPLTMGGPLPHVIAAKAVAFREAAAPEFKQYAQKIVDNCKALAASCMKNGLDVLTGGTDNHLLLVNVNNAGITGRQAESALHECLITLNRNSLPRDPNGPWYTSGIRIGTAATTSLGMGEAEMTELGELIAKVVKGTTQAQDAKDTSKKSKAKYIVSESVKSEVHTRVKSLLERFPVYPQLNLDLLKKYFVQN

SEQ ID NO: 285 - DNA, 747 bp, Unknown
  Obtained from environmental sample
  misc_feature (1)..(747): n is a, c, g, or t
ttgtggtgtatcgacagaccggacgatgttttggatgtggcaaaaaattatatcgacgcgggcgcggatatggttgagacggatagtttcggcggaagcagttttaaattagctcactttaaacttgacggcagagcggcggaaataaatgaagccgcggcaaaaatttcccgccgggcggctggggataatcattgggtaatagcgtccattggtcccacggggaaaatgcttgttacggaagaagtaacggaagaggaactttacgaagcgtttaaaacgcaagcggtcgcttttgaaaaaggcggagcggacgccgcttgtatcgaaactatgagcgatatacaggaagcttgtcaggctgttaaggctgttaaggaaaatacaaaattggaaattatctgtacgttcacttttgaaaaaacagtacagggcgattacaaaacgatgatgggagctgatcctgtttcggcgatgaacgcggttattgcggcgggcgcggatattgtcggcgcaaactgcggcaacggtattgagagaatgaccgaaatcgtgactcagatgagatcggtaaataagactattccaattcttgttcacgcaaacgcggggcttccaaaaaatgtaaacgggcagactgtatttcccgaatctcccgaagatatggcggctattgcgcccaaacttgccgccgcccggagcgaacataatccgcggttgctggcggactccgccggctcacattaa

SEQ ID NO: 286 - protein, 248 aa, Unknown
  Obtained from environmental sample
  DOMAIN (2)...(247): Homocysteine S-methyltransferase
  misc_feature (1)..(248): Xaa is any amino acid
MWCIDRPDDVLDVAKNYIDAGADMVETDSFGGSSFKLAHFKLDGRAAEINEAAAKISRRAAGDNHWVIASIGPTGKMLVTEEVTEEELYEAFKTQAVAFEKGGADAACIETMSDIQEACQAVKAVKENTKLEIICTFTFEKTVQGDYKTMMGADPVSAMNAVIAAGADIVGANCGNGIERMTEIVTQMRSVNKTIPILVHANAGLPKNVNGQTVFPESPEDMAAIAPKLAAARSEHNPRLLADSAGSH

SEQ ID NO: 287 - DNA, 312 bp, Unknown
  Obtained from environmental sample
  misc_feature (1)..(312): n is a, c, g, or t
atggggaagaaaagtacagaacggcgtgtttacacgaaggaattcaaagccgaggcggtagcgttggccgagaagaaagaaaaaccggtaagccggatcgcggcagatttggggatcaacgagaatatgctgcgccgatggatgcaggcttctcgggagtcggcgggaagcggcctgcaagcgttcccaggccacgggcggccaaaggatgcggagcttgcccgcctgcggaaagagaacaaagcgctcagggaggcaaatgaaatcctaaaaaaagcggcggtcatcttcgcgcaaggggaaccccagtaa

SEQ ID NO: 288 - protein, 103 aa, Unknown
  Obtained from environmental sample
  DOMAIN (8)...(90): Transposase
  misc_feature (1)..(103): Xaa is any amino acid
MGKKSTERRVYTKEFKAEAVALAEKKEKPVSRIAADLGINENMLRRWMQASRESAGSGLQAFPGHGRPKDAELARLRKENKALREANEILKKAAVIFAQGEPQ

SEQ ID NO: 289 - DNA, 570 bp, Unknown
  Obtained from environmental sample
  misc_feature (1)..(570): n is a, c, g, or t
atgataaacaataacttctgttggatggccacctggaaggtaaccgactgctgtaacctgcgttgcacctactgcgacccgaccataatgaagtcggcgggggaggcggaggtgataaacagattcgaggcgcttgaccgcatagcggtgtacagaccgcggatactcaacatcagcggcggcgagccgtcgctgttgcgtgaactgccggggcttctggcgcgggctaaggcggtttggaatccatacataagagttgttcacaacggcaccggtccgcaaaaattggcggaggcctttccgtgcatagacagattggtgataagcgtcgacgggccgggggaggtcaacaccgcgactcggggtataagcggcgacgccgtgctgaatagaatcgcggcgcttattaactccgcaatgcccataccggagatcactatcaatacggtggttacggagaagaacattgatacgttaaaaggcttcgccgcccagatagcctccgtctctccgaacattacgctggcgctactgcctgtaatgcccgtgacagcgagctatctgtactag

SEQ ID NO: 290 - protein, 189 aa, Unknown
  Obtained from environmental sample
  DOMAIN (12)...(163): Radical SAM superfamily
  misc_feature (1)..(189): Xaa is any amino acid
MINNNFCWMATWKVTDCCNLRCTYCDPTIMKSAGEAEVINRFEALDRIAVYRPRILNISGGEPSLLRELPGLLARAKAVWNPYIRVVHNGTGPQKLAEAFPCIDRLVISVDGPGEVNTATRGISGDAVLNRIAALINSAMPIPEITINTVVTEKNIDTLKGFAAQIASVSPNITLALLPVMPVTASYLY

SEQ ID NO: 291 - DNA, 318 bp, Unknown
  Obtained from environmental sample
  misc_feature (1)..(318): n is a, c, g, or t
gtgttgatacacgcccccgattgggagaaggcgcttggcggcgtggtgctggaggccatggcgatgggcgtggcggtggtggcttacgattgcggcggcatcggcgagtgctttcataacggtataagcgggtacttggtcaatcggggcgataagacaggcgcggcaatgcgcgtaacgtcgcttctgaacaatccgaagcggttggaggatatgacggagaacgcgaaaaaagagttggatgaaaagttcacgttggagtcataccttaacggtgttttagccgtctacgataggatatggaatgataaacaataa

SEQ ID NO: 292 - protein, 105 aa, Unknown
  Obtained from environmental sample
  misc_feature (1)..(105): Xaa is any amino acid
MLIHAPDWEKALGGVVLEAMAMGVAVVAYDCGGIGECFHNGISGYLVNRGDKTGAAMRVTSLLNNPKRLEDMTENAKKELDEKFTLESYLNGVLAVYDRIWNDKQ

SEQ ID NO: 293 - DNA, 522 bp, Unknown
  Obtained from environmental sample
  misc_feature (1)..(522): n is a, c, g, or t
ttgaaacgtcgcttatcgcagcggtttacaacattccacctgcggtggaacgtcgtaaaccgccatattatgaaagaatggaatagaaggagaaatggaatagaaatgaaattttcagttgcagttattcccggagacgggatcgggcctgaagtgatagcgccgactcttgatgtccttgacgctgttggagacaagtacggccatatattcaactatgtcgaacttgaggcggggggcattgccatcgatcacagcggagagccgcttccacaggagactcttgaggcggcaaaacagtgcgacgctcttcttttgggagcggtcggcggtcccaagtgggatacgctcccggggcatctgcgtcctgaaagagcgttgctggagcttcgcgcgggacttggcgttttcgcgaatcttcgtcccgccgccctgctcccccagttaaaatcagcctgccctattaaggacgaagtgctaatcgcgggcaacagcgaaggaaaagccgcttttgattattaa

SEQ ID NO: 294 - protein, 173 aa, Unknown
  Obtained from environmental sample
  DOMAIN (39)...(173): Isocitrate/isopropylmalate dehydrogenase
  misc_feature (1)..(173): Xaa is any amino acid
MKRRLSQRFTTFHLRWNVVNRHIMKEWNRRRNGIEMKFSVAVIPGDGIGPEVIAPTLDVLDAVGDKYGHIFNYVELEAGGIAIDHSGEPLPQETLEAAKQCDALLLGAVGGPKWDTLPGHLRPERALLELRAGLGVFANLRPAALLPQLKSACPIKDEVLIAGNSEGKAAFDY

SEQ ID NO: 295 - DNA, 582 bp, Unknown
  Obtained from environmental sample
  misc_feature (1)..(582): n is a, c, g, or t
atgggggaagaaggcagggaagacgcgcaaaccagttatatgtggcttgccctcggcgggccgcccggcaaaacagtcgtatggtacgagtaccacccgacgcgggccgcgtataacgcgaaagcgtttttggaaggttattccggttatctgcaaacagacgggtatgagggttatgacagcgcggtgaaagacatggccggcattgttcaggttggttgttttgcccacgcgaggcggaagttttttgaagcggataaaatatcagggcatggaaaagcgataggttacagcctttcgcagtgggacaaactggcggcatatctggaaagcccgcatcttacgcctgacaacaacgcgtgtgaaaacgcgatacggccttttgtgattggccgaaaaaactggttgttctgccaaagtccccagggggcgaaaagctcttgcggcatgtactcgcttatagagaccgccaagcggaacggactaagaccgtttgattatttgacggctgtttttaagaaagcgcctgtggcttcttcgctccaaaactgggaaaaacttctcccctggaatattttctaa

SEQ ID NO: 296 - protein, 193 aa, Unknown
  Obtained from environmental sample
  misc_feature (1)..(193): Xaa is any amino acid
MGEEGREDAQTSYMWLALGGPPGKTVVWYEYHPTRAAYNAKAFLEGYSGYLQTDGYEGYDSAVKDMAGIVQVGCFAHARRKFFEADKISGHGKAIGYSLSQWDKLAAYLESPHLTPDNNACENAIRPFVIGRKNWLFCQSPQGAKSSCGMYSLIETAKRNGLRPFDYLTAVFKKAPVASSLQNWEKLLPWNIF

SEQ ID NO: 297 - DNA, 312 bp, Unknown
  Obtained from environmental sample
  misc_feature (1)..(312): n is a, c, g, or t
atgttcctggtttatgtcacaaaaaagtcaactatagacaatactgtaacgttggggacggacgacgctctttttagcaaatcgctttccgccaaagatatcaaccttattgcctgtgaaaacttaaaaaaacccatgcgcgtaacggtaaaaacccgctacctgcaaaatgcgcaaagtgcgacagcggagcaaacagggaaagacagtctgcacattgaatttgattcgccccagcgcgctattacgccggggcaggccgtagttatgtatgatggagatattgtagtcggcggcggaacaatagagtag

SEQ ID NO: 298 - protein, 103 aa, Unknown
  Obtained from environmental sample
  misc_feature (1)..(103): Xaa is any amino acid
MFLVYVTKKSTIDNTVTLGTDDALFSKSLSAKDINLIACENLKKPMRVTVKTRYLQNAQSATAEQTGKDSLHIEFDSPQRAITPGQAVVMYDGDIVVGGGTIE

SEQ ID NO: 299 - DNA, 450 bp, Unknown
  Obtained from environmental sample
  misc_feature (1)..(450): n is a, c, g, or t
atgcgctcgcttcgtgaccgcatcgacggcttcaacgacgcaatagcaggaaagggatttaccgtagtgtttctgagggatgcgcagggcaactcagtcgatgggcagcgctataccgaggaactgcttaagtccaatactagggtactcgcaatcatgggtggcaatgacccgacggcgcttggcgcttttgcggcttgcatagccgcgaaccgcaccaacattctaatatacggcgttgacggatctccgttggcaaaggctgcaattgccgagcgcggacagtttgtcggtacgggagcgcaaagcccaatcaacatcgctaagacatcggtcgaagttgcgtataagattttgaacaagcagccttacgagaagaatgtcccgattaatacctttatgatcaatcaggataacattgacgattacgacatcgacagttggcaatag

SEQ ID NO: 300 - protein, 149 aa, Unknown
  Obtained from environmental sample
  misc_feature (1)..(149): Xaa is any amino acid
MRSLRDRIDGFNDAIAGKGFTVVFLRDAQGNSVDGQRYTEELLKSNTRVLAIMGGNDPTALGAFAACIAANRTNILIYGVDGSPLAKAAIAERGQFVGTGAQSPINIAKTSVEVAYKILNKQPYEKNVPINTFMINQDNIDDYDIDSWQ

SEQ ID NO: 301 - DNA, 588 bp, Unknown
  Obtained from environmental sample
  misc_feature (1)..(588): n is a, c, g, or t
atgaggcagtgcaaggcggacgagtgtgccgcggaacgcaaagtccaaaaggcggggaaggaacagattcccgctttactgcccaaaccttgtaatgtatatgtggcggctacatggaatgaaggttactcattcttacatggggaggtctggacgatatgtgaggaaaaaaaacccgagcaacccatacagagatgtatgattgagcgtccagaagtcagcagaggccgtagtaccgtgaaggggaatgtcccgtgtcgagggagaacaaacggagtacgcgaggccgtaaacggagacaatgcacgcgggcgagagcccggagggaacctactcgaagcgatagtggacgtgaataatatgttcaaagcgcaagagcgggtaatagcgaacagggggtcagcgggaatagacgggatggcagtcgaggaattgaacgaatacctcatcacacactatcaggaactaagtgaaagtatacgaggcggatggtacaaggcgaaaccagtaaaacgggtagaaatctcgaaaccggatggcgggaaacggttgttgggagtacctacggtaatagaccgggcggactaa

SEQ ID NO: 302 - protein, 195 aa, Unknown
  Obtained from environmental sample
  misc_feature (1)..(195): Xaa is any amino acid
MRQCKADECAAERKVQKAGKEQIPALLPKPCNVYVAATWNEGYSFLHGEVWTICEEKKPEQPIQRCMIERPEVSRGRSTVKGNVPCRGRTNGVREAVNGDNARGREPGGNLLEAIVDVNNMFKAQERVIANRGSAGIDGMAVEELNEYLITHYQELSESIRGGWYKAKPVKRVEISKPDGGKRLLGVPTVIDRAD

SEQ ID NO: 303 - DNA, 684 bp, Unknown
  Obtained from environmental sample
  misc_feature (1)..(684): n is a, c, g, or t
gtggtggtgtccatgggcgctgtcgccgcttccggcggctactgggcaagcatgagcgccagccgcattgtcgccactcctgtgacgcttaccggttctatcggcgttatcggaagttggttctacgacaacggcctgaacagcaagatgggtttttctgtcgataccatacaaaggggaatccatgccgatatggtaaccgggatgatcctgccccgccgggatttaaggccggaggaggaggcccgttacaaggcatacattcttgatctgtacgctgattttatatcaagggtcgcggcaaaccggaatatggacattgagcgtgtagaatcacttgcccagggcagggtctattcggggctaggcgcgttaaatgccggccttatcgacaatatcggcggtattgacgacgctatccaaattgccagggagttggcaaaattacctgatgaccgcagaataaaaatcatggaatatcccaagccgaaatttttcgacaagatactggaacaactgctctcggcaaggacggccggattaacaaaaaaatctgtcatcaacacggcggcggatctgtttttccccgcgctgttaggcgcgccgtcactgttggaagacctaagctacaggatagagcataacggccaagtaatgcccatactaccattggattacaattag

SEQ ID NO: 304 - protein, 227 aa, Unknown
  Obtained from environmental sample
  SIGNAL (1)...(25)
  DOMAIN (2)...(150): Peptidase family S49
  misc_feature (1)..(227): Xaa is any amino acid
MVVSMGAVAASGGYWASMSASRIVATPVTLTGSIGVIGSWFYDNGLNSKMGFSVDTIQRGIHADMVTGMILPRRDLRPEEEARYKAYILDLYADFISRVAANRNMDIERVESLAQGRVYSGLGALNAGLIDNIGGIDDAIQIARELAKLPDDRRIKIMEYPKPKFFDKILEQLLSARTAGLTKKSVINTAADLFFPALLGAPSLLEDLSYRIEHNGQVMPILPLDYN

SEQ ID NO: 305 - DNA, 492 bp, Unknown
  Obtained from environmental sample
  misc_feature (1)..(492): n is a, c, g, or t
atgcccggcagcggctacggtatggggcttttagtcatagtggggcagtatataggcgccggcgattataacggtgcaaaacggtacacaagaaaaatattgataattgcatatattacatacttggtaataaatgtaaacgtattcctgtttatggatcaaatcaccgccttttttaaactatcgcctgaagcgcacgatctgtgcctggacttcctgaagattcactgtattacgtcaaccttgttctggtgtttctcttttgtgcttcccaacgcgcttaaagccgccggagacgcccgttatgtgatgattgtagccgcaagcaccatgtggcttgtcagggtatgttccgcctacatcatggcgttccctctcgggctcggtcctgtgggagttatcctggcaatgggcgcggatttcctgttcagaggaatcttcttcggtgcccgctggttcagcggcaaatggatggaaaaaagagtaatataa

SEQ ID NO: 306 - protein, 163 aa, Unknown
  Obtained from environmental sample
  DOMAIN (1)...(121): MatE
  misc_feature (1)..(163): Xaa is any amino acid
MPGSGYGMGLLVIVGQYIGAGDYNGAKRYTRKILIIAYITYLVINVNVFLFMDQITAFFKLSPEAHDLCLDFLKIHCITSTLFWCFSFVLPNALKAAGDARYVMIVAASTMWLVRVCSAYIMAFPLGLGPVGVILAMGADFLFRGIFFGARWFSGKWMEKRVI

SEQ ID NO: 307 - DNA, 369 bp, Unknown
  Obtained from environmental sample
  misc_feature (1)..(369): n is a, c, g, or t
gtgcggattattactcctcacagatgggacaaatggatagtggcgattacgtcccgttcatattaccgcagactcattcacgccggcgtaaaagtttacgaatatacatccggctttaaccacggaaaaacatttgtttcagacgacataatcgccactgtcggcacgacaaatcttgattttcgcagtttataccttcactttgaatgcggcgtagtaatttactcaagcaaaacgatagccgacgttaaaaatgatttcttaaaaacgcttcctatttccaaggaaatcaccttaaaagactgcgacaagaacgcttttcaaaggattatacctgacgtacttcgcatatttgcgcctttaatgtag

SEQ ID NO: 308 - protein, 122 aa, Unknown
  Obtained from environmental sample
  DOMAIN (36)...(63): Phospholipase D Active site motif
  misc_feature (1)..(122): Xaa is any amino acid
MRIITPHRWDKWIVAITSRSYYRRLIHAGVKVYEYTSGFNHGKTFVSDDIIATVGTTNLDFRSLYLHFECGVVIYSSKTIADVKNDFLKTLPISKEITLKDCDKNAFQRIIPDVLRIFAPLM

SEQ ID NO: 309 - DNA, 501 bp, Unknown
  Obtained from environmental sample
  misc_feature (1)..(501): n is a, c, g, or t
ttgcgcttagtccccatcggcagggaagcttttgtgttttttgtaaataaaaataattccatagacaatttatcaataaaaaatattcaggatattttttccggcaaaattaaatattggaaagaattaaacggagctaatcagagaataagggcttttcaaagaccggaaaattctggaagccagacgatgttggaaaaagtaatgggcaatattcccgttatggagcctcgcaaagaaaatgtatcgagcggcatgggcgacataataaaccaggttgccgtttatagaaatttcacaaacgcgataggctattcgtttttattttattcaactgaaatggtaaattatggaagctatccgttttctgacagtttttgcgctatttacaacgacactgacgataaaaatagcaatattgaattatttatagaatggatactgtcaagccagggtcagggattaatctcagagactggctatataccgatagaaatttag

SEQ ID NO: 310 - protein, 166 aa, Unknown
  Obtained from environmental sample
  misc_feature (1)..(166): Xaa is any amino acid
MRLVPIGREAFVFFVNKNNSIDNLSIKNIQDIFSGKIKYWKELNGANQRIRAFQRPENSGSQTMLEKVMGNIPVMEPRKENVSSGMGDIINQVAVYRNFTNAIGYSFLFYSTEMVNYGSYPFSDSFCAIYNDTDDKNSNIELFIEWILSSQGQGLISETGYIPIEI

SEQ ID NO: 311 - DNA, 300 bp, Unknown
  Obtained from environmental sample
  misc_feature (1)..(300): n is a, c, g, or t
ttgtggtcaaatatgataagtaagataattcttgaatgggacgaagaaaaacgcaaacataacattgcggaacgaggaattgattttgttgatgctgccgatgttctgaccgacccaaacatgagtttgtatttggatgaacgtgcagattacggagaagataggtttaatgcttacggtttgtctaagggtcgtaaaatacgtatatgttttactttacgtgatggcaaatatagagtaataacaatgttcaaggttcataaaaaagaatggagcaagtattatgagcaaaatggttaa

SEQ ID NO: 312 - protein, 99 aa, Unknown
  Obtained from environmental sample
  DOMAIN (9)...(97): Protein of unknown function (DUF497)
  misc_feature (1)..(99): Xaa is any amino acid
MWSNMISKIILEWDEEKRKHNIAERGIDFVDAADVLTDPNMSLYLDERADYGEDRFNAYGLSKGRKIRICFTLRDGKYRVITMFKVHKKEWSKYYEQNG

SEQ ID NO: 313 - DNA, 597 bp, Unknown
  Obtained from environmental sample
  misc_feature (1)..(597): n is a, c, g, or t
ttggacagtgacgattttaaccttgactcccttgatgacctgtcaattgattccgaattggacttggatagcgacctttcttcagttgaacccgcgcaagaaatccctgaagactccgcattggatacggaaagcctggataaagctgttgataatgtaattaatgaaagtaattttgaagaagaacttgaagaacctgttgtttttgatgacttccaggatttttcagaggacaattttgacagtgtaatagaaccggaaccggcccctcccccaaaagcggcgcccgttaaacagcctgccgcaaccccggcccctcctcctccagttcaacaagtgcctgtcgctccacaacctgtacagcaagcggcaccgataattatgcaggcaccgcccccacagcaacctgccgcacagccaaccggcggtaaagagccatttgcaattccttctggtttacggtctgaacttagaaacatcctcagctacatggatcaacttcttgaatcactgccggaagaaaaaatcgaagagtttgcgaaatccgaatacttcgattcatacaaaaaactctttaaggatttggggttggtataa

SEQ ID NO: 314 - protein, 198 aa, Unknown
  Obtained from environmental sample
  misc_feature (1)..(198): Xaa is any amino acid
MDSDDFNLDSLDDLSIDSELDLDSDLSSVEPAQEIPEDSALDTESLDKAVDNVINESNFEEELEEPVVFDDFQDFSEDNFDSVIEPEPAPPPKAAPVKQPAATPAPPPPVQQVPVAPQPVQQAAPIIMQAPPPQQPAAQPTGGKEPFAIPSGLRSELRNILSYMDQLLESLPEEKIEEFAKSEYFDSYKKLFKDLGLV

SEQ ID NO: 315 - DNA, 930 bp, Unknown
  Obtained from environmental sample
  misc_feature (1)..(930): n is a, c, g, or t
atggcgaggactagcgcttttgatttaatcaggaaagttttgatacaggcgcgtctgatgtttcagacacgngctgacaatcaatttgaaggtttacccacagaagaacctgatgagtttaataacgcaattgatcttggcggcgaatctcccgattccgctcccacaacggcggatgatgatttttcttctgacactttgccggatataagttttccgggaggagacgatgttgacttctcaggcggggatgattccggttcagatgcgggttttgattcttctttaccggatatagatttttcaggtacggacgctgctgcgggtgattccggcgccgtacatgattttggggatctgggcgctgattttaactccgatcaaatcgatatagacaccggcggcggcgaacctgcagatcaagaacagcatgatattggtttttcaggggatactttcagcggtgatgacgcgttttcactttccggccttgatgacattttaaataaatcaaaagccagcgaaccaaaaccgcagcctccgaaaaaaggcttattcggcaggaagaaacaaaaagaagcggaagaagagaaaaaagaaccggcggaagaaaacatagatgaaatctcgttaagtcaggaagatgtggacaatttgatacgcactctttcatcttatccgctgaacctgaaaatcatctgtgaagaattaatagccgaacaggttatcctgcccgagcaattatcaaaattaatccgtcttcttgtaaatggcgcttctgtcaaagaaaccgcagctctcgccgaacaaattaccggtaagccgattattattcccagaagttttgaaaaaagtacgggcgcggattttgaagcggaacaggcaagttttgcgtatatcttcgtacacaatttacttccggtaaaatag

SEQ ID NO: 316 - protein, 309 aa, Unknown
  Obtained from environmental sample
  misc_feature (1)..(309): Xaa is any amino acid
MARTSAFDLIRKVLIQARLMFQTRADNQFEGLPTEEPDEFNNAIDLGGESPDSAPTTADDDFSSDTLPDISFPGGDDVDFSGGDDSGSDAGFDSSLPDIDFSGTDAAAGDSGAVHDFGDLGADFNSDQIDIDTGGGEPADQEQHDIGFSGDTFSGDDAFSLSGLDDILNKSKASEPKPQPPKKGLFGRKKQKEAEEEKKEPAEENIDEISLSQEDVDNLIRTLSSYPLNLKIICEELIAEQVILPEQLSKLIRLLVNGASVKETAALAEQITGKPIIIPRSFEKSTGADFEAEQASFAYIFVHNLLPVK

SEQ ID NO: 317 - DNA, 597 bp, Unknown
  Obtained from environmental sample
  misc_feature (1)..(597): n is a, c, g, or t
atggcgctaaaatcatcttttaccagggaacaagcctggaatctatttctgaaatataacaaagacccctttcatattcagcacgcgctgaccgtagaaggggttatgaagtggtatgccaaagaattgggctttggcgatgaggcggatttttgggcaattgctggaatgcttcacgacatcgactttggcgaatacccggaagaacactgcgtaaaggcgcgtcaattgcttgctgatgcgggtgccaacgaggagcttattcacgcggtttgcagccacggctggggcatgacaggcgccaaagaaaagccggaacaccttatggaaaaggtgctctatgcctcggatgaacttacaggccttatttgggcagccgcgataatcaggccttccaaaagtgtgatggacatggaattaaaatccgtcaagaaaaaattcaaaactttaaactttgccgccggctgtaacagggaaacaatagaaagaggcgcagccgatcttaactgggatatggataagctcatcgagcaaacaatactcgcgatgagaagctgtgaggcggaaattaactcttatatggggagtagggaatag

SEQ ID NO: 318 - protein, 198 aa, Unknown
  Obtained from environmental sample
  DOMAIN (25)...(122): HD domain
  misc_feature (1)..(198): Xaa is any amino acid
MALKSSFTREQAWNLFLKYNKDPFHIQHALTVEGVMKWYAKELGFGDEADFWAIAGMLHDIDFGEYPEEHCVKARQLLADAGANEELIHAVCSHGWGMTGAKEKPEHLMEKVLYASDELTGLIWAAAIIRPSKSVMDMELKSVKKKFKTLNFAAGCNRETIERGAADLNWDMDKLIEQTILAMRSCEAEINSYMGSRE

SEQ ID NO: 319 - DNA, 603 bp, Unknown
  Obtained from environmental sample
  misc_feature (1)..(603): n is a, c, g, or t
ttgctggggtttttcccggccgcttccgaaaatgaagatattttaataggtgacagtcactttttgcgttcgaatgaaaccgtcgctttcgaaaaactttcgaaaggtgacaggcaccgtttttctttccggcgcagcctgcagaaaaagcccgccgggattttcaatccctgtcttgcggattttattttgcccgcgcaaaatgggcaggctgttgactggatgggactgtttgcccttagcgcgggcttcggccttgagggagctgctgaacagtaccggcacagcggcgatgactatagcgccctgttgctggcaagtctggcaaacgccctcgcggaggcttttaccgaagaagtacaccttcgcatccgccgggaatggtggggttatgcgccggaggaatcttcttttgccggcatacgccccgcctttggctatccttcctgccccaaccacgaggataaacgaatcgcatttgagcttcttgaagcggaaaaacgctgcggccttaagctgacggataccgcgatgataattcccgccgcgtctgtctgcgggatgtttttcgcaagtcccgcgtcttattattttagtgtgtaa

SEQ ID NO: 320 - protein, 200 aa, Unknown
  Obtained from environmental sample
  DOMAIN (72)...(200): Vitamin B12 dependent methionine synthase, activation domain
  misc_feature (1)..(200): Xaa is any amino acid
MLGFFPAASENEDILIGDSHFLRSNETVAFEKLSKGDRHRFSFRRSLQKKPAGIFNPCLADFILPAQNGQAVDWMGLFALSAGFGLEGAAEQYRHSGDDYSALLLASLANALAEAFTEEVHLRIRREWWGYAPEESSFAGIRPAFGYPSCPNHEDKRIAFELLEAEKRCGLKLTDTAMIIPAASVCGMFFASPASYYFSV

SEQ ID NO: 321 - DNA, 447 bp, Unknown
  Obtained from environmental sample
  misc_feature (1)..(447): n is a, c, g, or t
atggtcagatcggcacgagttctcangacctcggcagggatccgagtgaggaagaactgtcggaatatctgcgaatccccngtttcaaaggtcaaggacattatcaaactctcgcaggaaaccaccagcctgaacgccatagtggacgacggaaacctcacaaggctcgctgaccttataaaggacgaatcaacggcggaaccctttgaaatggttttctcaatgaccctgcaggaaaccatgagggacatactctcgcagctttcggagcgtgaaatgaagataatccagctccgttacggccttgccggcgaggggcccctcaccctggaagaaacaggaaaactcctcggtataacccgcgagcgcgtgcgccagatccaggaaaaagccaccttcaaactgagaaacataaaagcgctgagcgagttaaaagaaacctgttaa

SEQ ID NO: 322 - protein, 148 aa, Unknown
  Obtained from environmental sample
  DOMAIN (84)...(137): Sigma-70, region 4
  misc_feature (1)..(148): Xaa is any amino acid
MVRSARVLXTSAGIRVRKNCRNICESPVSKVKDIIKLSQETTSLNAIVDDGNLTRLADLIKDESTAEPFEMVFSMTLQETMRDILSQLSEREMKIIQLRYGLAGEGPLTLEETGKLLGITRERVRQIQEKATFKLRNIKALSELKETC

SEQ ID NO: 323 - DNA, 393 bp, Unknown
  Obtained from environmental sample
  misc_feature (1)..(393): n is a, c, g, or t
gtgccggatcattntgccgcatggatgcagacagccgtcagttcaaagtacgtcttcctcctgctgttgaacctctcgctgctcgtggtcggctgccttatggacatattctcggcaatcttcgtcgtgcttcccctgattgtcccgctcggattcgcctacggcattgatcctgtgcatctcggaatcatttttatcatgaatcttgaagtcggcttcctgactccgcccgtagggatgaacctctttttggcgagttaccgttttgaaaagccctttataaagatttgccgttatgtgcttccatatctcgcggtacaactggccgtagtcctgcttgtaacctatgtgccctggctctcaacagggctcatacagctaattgggcgttaa

SEQ ID NO: 324 - protein, 130 aa, Unknown
  Obtained from environmental sample
  misc_feature (1)..(130): Xaa is any amino acid
MPDHXAAWMQTAVSSKYVFLLLLNLSLLVVGCLMDIFSAIFVVLPLIVPLGFAYGIDPVHLGIIFIMNLEVGFLTPPVGMNLFLASYRFEKPFIKICRYVLPYLAVQLAVVLLVTYVPWLSTGLIQLIGR

SEQ ID NO: 325 - DNA, 390 bp, Unknown
  Obtained from environmental sample
  misc_feature (1)..(390): n is a, c, g, or t
atggccgagcatgagntattttttttatcggaagacaaagataaaaacgagcagttggggatggagatttatattgtctataatctgtctctcttacgcccgtcaataaaagccctcatgaatgaatatccggaatttttcaaactaaaccaggcgttttaccttgacgcgcttaatgagaaaaaagaagattatctgatagataaatacatcgcgatacataaaaaaatcaggcccggttttaacttttactatgacgatgatgatgatgatgatgatacggaagatgtaacgccttataagcgtgaatctcccaaaatcggacggaacgatccctgcccgtgcgggagcggaaagaagtataaaaagtgctgcggggcttcaaagtaa

SEQ ID NO: 326 - protein, 129 aa, Unknown
  Obtained from environmental sample
  DOMAIN (109)...(129): SEC-C motif
  misc_feature (1)..(129): Xaa is any amino acid
MAEHEXFFLSEDKDKNEQLGMEIYIVYNLSLLRPSIKALMNEYPEFFKLNQAFYLDALNEKKEDYLIDKYIAIHKKIRPGFNFYYDDDDDDDDTEDVTPYKRESPKIGRNDPCPCGSGKKYKKCCGASK

SEQ ID NO: 327 - DNA, 609 bp, Unknown
  Obtained from environmental sample
  misc_feature (1)..(609): n is a, c, g, or t
gtgtacggctcaaagctggcggggctgacagggattaggtgctgtgaggttttggggttaaagggggaatatgtgtttgatgaccatatttatatctgcgcccaatacgatgatgtatacggctatcgggaaacgaaaactaaaacaaaacacaatataccgctaaccaaagaagttatagcagatttgaaaaaacttatggagctaaacggaaagggttttgtgttttcggagacagacggcgatgtgcctgtaaaccgtaattctatctataacggcttgatgaaagccttgcaaaacataggcataagcgaaaaggaaatagacgagagggggcttaatgtccatgcttggcggcatttcctgaataccgaattgcaaaaagcgggtttgactactcaaatagtacaggcggttacagggcataaaacggcaaaaatgacagaacactatacccattttgacccaatggaatttagagatgtgccggaaatacaggcggcgttgctggcgggaaagccggaagaaaagaaaaatgaccgccctgctctgtctttggttaaaatcccgattgacgaaaaagctgaaaataaaaaacaggcttcatag

SEQ ID NO: 328 - protein, 202 aa, Unknown
  Obtained from environmental sample
  DOMAIN (1)...(161): Phage integrase family
  misc_feature (1)..(202): Xaa is any amino acid
MYGSKLAGLTGIRCCEVLGLKGEYVFDDHIYICAQYDDVYGYRETKTKTKHNIPLTKEVIADLKKLMELNGKGFVFSETDGDVPVNRNSIYNGLMKALQNIGISEKEIDERGLNVHAWRHFLNTELQKAGLTTQIVQAVTGHKTAKMTEHYTHFDPMEFRDVPEIQAALLAGKPEEKKNDRPALSLVKIPIDEKAENKKQAS

SEQ ID NO: 329 - DNA, 654 bp, Unknown
  Obtained from environmental sample
  misc_feature (1)..(654): n is a, c, g, or t
atgaaattttcagttgcggtagtacccggagatggaattggaccggaagtaattgcgccgactctcgaagttcttgacgctgttggagacaagtacggtcatatttttaattatgttgagcttgaagcgggcggtcttgccattgatcacacgggagagccgctcccaaaagaaacgcttgaagcggcgaagcagtgcgatgcccttcttttgggcgcggtcggcggtcccaagtgggatacgctacccggacatctgcgtcctgaaagagcgctgcttgggcttcgctcggggcttggcgttttcgccaaccttcgacctgccgccctgctccctcaattaaaatcggcttgtcccgttaaagacgaagtgcttatcgcaagcaacagcgagggtaaagccgctttcgatttattaatcgtaagagaattgacaggcggtctttactttggtaaacgaggacgaattgacgaaccttccaacggacacactcccggagcggcttttgatactgaaacatattcatggatggaaattgaaagagtactccgagcaggctacgaagcggcggcggtacggcggaaaaaactctgcgtagtggacaaaccaatgtacttgaatcgtcccgtttttggcgtgaagtggcggcggtag

SEQ ID NO: 330 - protein, 217 aa, Unknown
  Obtained from environmental sample
  DOMAIN (4)...(217): Isocitrate/isopropylmalate dehydrogenase
  misc_feature (1)..(217): Xaa is any amino acid
MKFSVAVVPGDGIGPEVIAPTLEVLDAVGDKYGHIFNYVELEAGGLAIDHTGEPLPKETLEAAKQCDALLLGAVGGPKWDTLPGHLRPERALLGLRSGLGVFANLRPAALLPQLKSACPVKDEVLIASNSEGKAAFDLLIVRELTGGLYFGKRGRIDEPSNGHTPGAAFDTETYSWMEIERVLRAGYEAAAVRRKKLCVVDKPMYLNRPVFGVKWRR

SEQ ID NO: 331 - DNA, 753 bp, Unknown
  Obtained from environmental sample
  misc_feature (1)..(753): n is a, c, g, or t
ttggccgaggagcagatacatgagaaaatcgcctattctgcgtccgctactgatgacattgaacttgtaagcctaacataccatcttcgcaaaggagataaagccgcttacgaagtgcctggcttcctgcagggactttatattgaaggcgtaatacctccgttcttaaggcaactttccgtttcaaacggttttgacgaatgggtgcctacgatgccattcgccggaggcgcgacatacactgatttcggccttgggttgagcttctttgacgacaacgtaaaaattcaaggacaatacggcttcctgactcaggaactatacgaagctcttggcggtgaaggggcggttcgttatggcggagacgttattggcctgaagatacttgcaaatatatacacattgcctcttggctcggtatggggacctgactttgactggctttacgcatcattctctgtaggcgcaaatttctcgcagtttaacttcttaaacaaagaaaataaaaagttctcaacgccggaaaaacccgtatattatacccagagcggtgcggccacatggctgagcgcgttgttattgcaaatagaattccccaaagtgaccattccaaagaaaaaggctttaagaacgttcagcttatttacggaaggacagctatggtttgtacctacggacgtagatgccgagcaaatgggcataccggtaatgattccgcatgtgatgatggggttaagaatttacatattctaa

SEQ ID NO: 332 - protein, 250 aa, Unknown
  Obtained from environmental sample
  misc_feature (1)..(250): Xaa is any amino acid
MAEEQIHEKIAYSASATDDIELVSLTYHLRKGDKAAYEVPGFLQGLYIEGVIPPFLRQLSVSNGFDEWVPTMPFAGGATYTDFGLGLSFFDDNVKIQGQYGFLTQELYEALGGEGAVRYGGDVIGLKILANIYTLPLGSVWGPDFDWLYASFSVGANFSQFNFLNKENKKFSTPEKPVYYTQSGAATWLSALLLQIEFPKVTIPKKKALRTFSLFTEGQLWFVPTDVDAEQMGIPVMIPHVMMGLRIYIF

SEQ ID NO: 333 - DNA, 906 bp, Unknown
  Obtained from environmental sample
  misc_feature (1)..(906): n is a, c, g, or t
atggccgagttgagaggcgaaatttttttaggagaagaaatgatggcccgtaaaaaatccctgttcgatctgtacgacatgaagcggaaaggcgaaaagatcgcctggctcacttcttacgactaccccaccgcctctttcgccgaagccgccggcctggacatgatcctggtgggcgattccctgggcatgtgcgtctatggatataacggcaccctgccggtgaccatggaccagtgcctcggccattgcgacgccgtgcgccggggggctcccaacaccttcgtggtgggcgacatgccttttttgagctatcagcaatccgacgccgtggccgtggaaaacgccggccgcttcctcaaggaagccgaggttgacgccgtcaagctggaaggcggggtgcgggtcgcggagcgtatccgggccatcagcgtggccggcattgtggccgtcggccacatcggcctgacccctcaatcctccggcctcctgggcggccataaggcccaggggcgcaccgccgaagcggccaagctggtggttgaagacgctgtcgccgtggaacaggccggggccaagctcatcctggtggaagccgtgcccccggaagtgacggcctatatttccaaaaccctggccattccggtcctgtccataggggcgggcctcccctgcgacggccaactcttgatcgtatccgacctgatcggccagtttcaggcctttacgccgaaattcgtgaaaaaatacgccgatgtggctgaagtcatcaccagggccatgagtgagttcgtcggggaggtcaaggcggccaagttccccggtgaagagcatacctacaggatgctggaaggcgaggaagccaaattcctgaagcttatgggccggcccgggccggggaattga

SEQ ID NO: 334 - protein, 301 aa, Unknown
  Obtained from environmental sample
  DOMAIN (17)...(277): Ketopantoate hydroxymethyltransferase
  misc_feature (1)..(301): Xaa is any amino acid
MAELRGEIFLGEEMMARKKSLFDLYDMKRKGEKIAWLTSYDYPTASFAEAAGLDMILVGDSLGMCVYGYNGTLPVTMDQCLGHCDAVRRGAPNTFVVGDMPFLSYQQSDAVAVENAGRFLKEAEVDAVKLEGGVRVAERIRAISVAGIVAVGHIGLTPQSSGLLGGHKAQGRTAEAAKLVVEDAVAVEQAGAKLILVEAVPPEVTAYISKTLAIPVLSIGAGLPCDGQLLIVSDLIGQFQAFTPKFVKKYADVAEVITRAMSEFVGEVKAAKFPGEEHTYRMLEGEEAKFLKLMGRPGPGN

SEQ ID NO: 335 - DNA, 852 bp, Unknown
  Obtained from environmental sample
  misc_feature (1)..(852): n is a, c, g, or t
gtggcgggaagtatagggccgacagcgaaaggcgcgagcatttatcccgatgtaaatgatcccgcaaaacgcgacatttgctgggacgagcttgaagccgcctattacgacaacgcgagaggactcctggacggcggcgcggacattcttcttttagaaacaatttttgacaccgtcaacgcaaaggcggcgctttttgccgtaagccgcctgcttaaagaacgcaatatcgacataccgataatgatttccgccgccgcttcaggcgaatcgggacggctcctctgcggccaaaatcttaaagctttttgcagttccgtcctccatgttaacccctggtctatcggcctgaattgttccttaaatccgcaaaaactcatgccctttgtccgcgagttatctgaagcagccccctgccttgtcagcgcctatcccaacgccggattgcccaacagccatggtcaatacgaagaaacgccggaaatgttttcaaataacattgaaggttatctgaaagaaggacttgtaaatatcatcggaggctgctgcggttccactcctcctcacatcgcggaacttgcgaaaaaagcggctctttataaaccccgcgccattcccgccggtaattccgacgtttcaatgcggacagtttttttcggattagagacggtcaatattgcagataacgcaattcagcttaaacagccggcggatgatgccgcaaataaagaattcctgcgtttgttaggtgaagaaagttacgaaaacccgtttaaagaagcgcgcgaatatggcccgataagggcgcggtattttatcaacggtgaaaacaaacgacgaaaaaaacattaa

SEQ ID NO: 336 - protein, 283 aa, Unknown
  Obtained from environmental sample
  DOMAIN (1)...(199): Homocysteine S-methyltransferase
  misc_feature (1)..(283): Xaa is any amino acid
MAGSIGPTAKGASIYPDVNDPAKRDICWDELEAAYYDNARGLLDGGADILLLETIFDTVNAKAALFAVSRLLKERNIDIPIMISAAASGESGRLLCGQNLKAFCSSVLHVNPWSIGLNCSLNPQKLMPFVRELSEAAPCLVSAYPNAGLPNSHGQYEETPEMFSNNIEGYLKEGLVNIIGGCCGSTPPHIAELAKKAALYKPRAIPAGNSDVSMRTVFFGLETVNIADNAIQLKQPADDAANKEFLRLLGEESYENPFKEAREYGPIRARYFINGENKRRKKH

SEQ ID NO: 337 - DNA, 663 bp, Unknown
  Obtained from environmental sample
  misc_feature (1)..(663): n is a, c, g, or t
atggaaaacgcgcattcatcaggaagggttgtgtcgttagaggacatggacgcagttaaggcggcagccaaagaatatgcgttaccggttcatctggatggggcgcgtatttttaacgcggcagccgcgctaggctgcaacgcaagcgatattgccgcaagggtggattctgtaatgttctgcctttccaaaggtctgtgcgccccgataggttcgctgcttgccgggacaaaagaatttatatcggcggcgcggtttaagcgcaagataatgggcggcggaatgaggcaggccgggattctggctgcggccggcattatcgcgcttaaagaacacagcttgctgctggaacaggatcacatgagagcaaaaaaactggcgcagggacttgctaaaattaaaggtgttaatgttattgacagtgttgatatcaatatggttttttttaaatatcagcgggaaacgccggctatgccgcatgaggcggaatttgccgggaaaattgtcggtcattttgcaagccggggcataacgataaatccgccagaacaaggaatattccgttttgtaacccattattggattcagcagaaggaaattgacgcgattcttgcggcagcggaagaagtcttttgcgggtctttggggaaaggagggcagtaa

SEQ ID NO: 338 - protein, 220 aa, Unknown
  Obtained from environmental sample
  DOMAIN (1)...(152): Beta-eliminating lyase
  misc_feature (1)..(220): Xaa is any amino acid
MENAHSSGRVVSLEDMDAVKAAAKEYALPVHLDGARIFNAAAALGCNASDIAARVDSVMFCLSKGLCAPIGSLLAGTKEFISAARFKRKIMGGGMRQAGILAAAGIIALKEHSLLLEQDHMRAKKLAQGLAKIKGVNVIDSVDINMVFFKYQRETPAMPHEAEFAGKIVGHFASRGITINPPEQGIFRFVTHYWIQQKEIDAILAAAEEVFCGSLGKGGQ

SEQ ID NO: 339 - DNA, 387 bp, Unknown
  Obtained from environmental sample
  misc_feature (1)..(387): n is a, c, g, or t
atggaatttaaggatttaatgcctaatttaatggtaaaagatgttggtaaaaccattgatttttacaaagatgttctcggttttaatgtagtacaaaccgttccagaaagcgccccttttatttttgccattgtaaatgcaaataatgtaattatttcgtttcaggaggagcaaagcataaaagaagaatatccacaattaaacgcatttccacagggtggctgtttaacattgtacattcatgtaaccgatgttaaaaaatattttggaaaaataaatggcaaggcaaaaatcgctaaagaaatgcacaacacaccccatagctcaaaagattttgcgatagaagattgtaatggttatattttaactttttcacagcaagggtaa

SEQ ID NO: 340 - protein, 128 aa, Unknown
  Obtained from environmental sample
  DOMAIN (2)...(124): Glyoxalase/Bleomycin resistance protein/Dioxygenase superfamily
  misc_feature (1)..(128): Xaa is any amino acid
MEFKDLMPNLMVKDVGKTIDFYKDVLGFNVVQTVPESAPFIFAIVNANNVIISFQEEQSIKEEYPQLNAFPQGGCLTLYIHVTDVKKYFGKINGKAKIAKEMHNTPHSSKDFAIEDCNGYILTFSQQG

SEQ ID NO: 341 - DNA, 336 bp, Unknown
  Obtained from environmental sample
  misc_feature (1)..(336): n is a, c, g, or t
gtgagcacttattccaatagcccaagcaagggtacggggggcgacctcggctgggtagagaaagggcttttgctaaaggccatcgaagacgccgctattgcattaaagccagatgaaatcggtggccccattgagaccgacaaagacttcattcttatccagcttatcgccgccgatttggatggagtaaagccatttgaatccgtgaagggcgacattatcaggaaattgcaggagccaaaggccgaaaacgccaaaatgcactacctgcagtcgcagcggctacgcgccaacatccgctatatcgtccccaaggagcagattatcaaagggtag

SEQ ID NO: 342 - protein, 111 aa, Unknown
  Obtained from environmental sample
  misc_feature (1)..(111): Xaa is any amino acid
MSTYSNSPSKGTGGDLGWVEKGLLLKAIEDAAIALKPDEIGGPIETDKDFILIQLIAADLDGVKPFESVKGDIIRKLQEPKAENAKMHYLQSQRLRANIRYIVPKEQIIKG

SEQ ID NO: 343 - DNA, 321 bp, Unknown
  Obtained from environmental sample
  misc_feature (1)..(321): n is a, c, g, or t
atgaggctcgatctatttctcaaaaccacgcacctagtcaagcgcagggaattggcaaaagagctgtgcgatgagggtatggttagggtcaacggcgcaccaaaaaaggcatctgccgaagtggccccaggggacgaacttgttttccccatctacaatagaatgttaaaggtaaaaatattggacgtgccaaaaggcaacctgccaaagggcagccagtggtcgtttatcgaaatattggaagaaaagcgctttgccgtggacgatggctttggcgaagacacattcaggccagcgatcaagccgactacgtttcattga

SEQ ID NO: 344 - protein, 106 aa, Unknown
  Obtained from environmental sample
  DOMAIN (1)...(47): S4 domain
  misc_feature (1)..(106): Xaa is any amino acid
MRLDLFLKTTHLVKRRELAKELCDEGMVRVNGAPKKASAEVAPGDELVFPIYNRMLKVKILDVPKGNLPKGSQWSFIEILEEKRFAVDDGFGEDTFRPAIKPTTFH

SEQ ID NO: 345 - DNA, 342 bp, Unknown
  Obtained from environmental sample
  misc_feature (1)..(342): n is a, c, g, or t
atggtaaagaaaaagtattctcctgaacgcggggatattgtatggttaaattttaatccccaatccggacatgaacagaaagggaaaagaccagcggtagttatttcgcccaaagaatataatgaaaaagttggattgggacttttttgtcctataaccagcaagataaagaattatccttttgaggtaaaagttgagaatgaaaaaattgatggtgttattctgtcagaccaaattaagagccttgattggaagacacgagaaatagaatttattacaaagattacccctgaaaaaatcgacgaagttattaataaaattagtgtgttattatttgaatga

SEQ ID NO: 346 - protein, 113 aa, Unknown
  Obtained from environmental sample
  DOMAIN (9)...(112): PemK-like protein
  misc_feature (1)..(113): Xaa is any amino acid
MVKKKYSPERGDIVWLNFNPQSGHEQKGKRPAVVISPKEYNEKVGLGLFCPITSKIKNYPFEVKVENEKIDGVILSDQIKSLDWKTREIEFITKITPEKIDEVINKISVLLFE

SEQ ID NO: 347 - DNA, 489 bp, Unknown
  Obtained from environmental sample
  misc_feature (1)..(489): n is a, c, g, or t
atgatccgccagatgggcccgctgctgacggcgatcatcctcgccggacgcaccggcagcgccacgaccgccgagatcgccaccatggtcgtcggagaggaggtggacgccctgcgcgccatgggcgtaaaccccatgcagtacataatggcccccaaattctgggccatctccctcacaatgccgctcctctccataatagccacggccaccggaatcctcggcgggtacgttatagcgtacctatatttagacatgacctcctccatgtttatgcgggagctcgccaaggtgataaaacttgagcacatcctatccggctgcttcaaatccatggtcttcgcgtggcttatcatctggataggctgctacttcggtttcagggtgcggggcggcgcggaatccgtgggcagggagacgacgtcgagcgtggtggcggggatttttataataattgtggcgaacgcgctgttttcgtttgttatgtga

SEQ ID NO: 348 - protein, 162 aa, Unknown
  Obtained from environmental sample
  SIGNAL (1)...(23)
  DOMAIN (1)...(162): Domain of unknown function DUF140
  misc_feature (1)..(162): Xaa is any amino acid
MIRQMGPLLTAIILAGRTGSATTAEIATMVVGEEVDALRAMGVNPMQYIMAPKFWAISLTMPLLSIIATATGILGGYVIAYLYLDMTSSMFMRELAKVIKLEHILSGCFKSMVFAWLIIWIGCYFGFRVRGGAESVGRETTSSVVAGIFIIIVANALFSFVM

SEQ ID NO: 349 - DNA, 693 bp, Unknown
  Obtained from environmental sample
  misc_feature (1)..(693): n is a, c, g, or t
ttgatggccgagtgctgttcaccgccgcaggcccctggttttgaaggagcggaaatttcctgcggcatgacagcgcaagccggcgcgattaacaggataagtttgaaaaaagactcttccgcaaattggtttgcttacgatttgccagttatcccaaacggcgggcaggaaactctttattacacaaccgcaggaaatgaaaaagcgcgcggtatctgcggctccggtcttattgacgcaatagcgataatgaaaaaactcggcgtaatcgaagaatccggcgcttttgccgactgttacgcgcaaacagtttttcctgtagcggacggtatcggtatcaatcaggcggatatacgccgttttcaaacggcaaagtccgcgattttctccggtattacgattctttgtaaaacggcgggcgtaagttttgccgctcttgacaagtcgtacattgccggagggcttgggttttacatcgatcttgaaagcgccgcttatacagggcttttgccgcgcgaaactatttcaaaagccgtcgtttgcggcaacaccagtttgaaaggagcggtccttagcctgacagacgaatcttttttgccgcgctgccgtgaaattatcgcccgcagtaccgttgtagacttagctgtggacagagagtttgccgaggcttttgcggataacatggtgatttaa

SEQ ID NO: 350 - protein, 230 aa, Unknown
  Obtained from environmental sample
  misc_feature (1)..(230): Xaa is any amino acid
MMAECCSPPQAPGFEGAEISCGMTAQAGAINRISLKKDSSANWFAYDLPVIPNGGQETLYYTTAGNEKARGICGSGLIDAIAIMKKLGVIEESGAFADCYAQTVFPVADGIGINQADIRRFQTAKSAIFSGITILCKTAGVSFAALDKSYIAGGLGFYIDLESAAYTGLLPRETISKAVVCGNTSLKGAVLSLTDESFLPRCREIIARSTVVDLAVDREFAEAFADNMVI

SEQ ID NO: 351 - DNA, 621 bp, Unknown
  Obtained from environmental sample
  misc_feature (1)..(621): n is a, c, g, or t
atgaaaaaagtcagccctcaggatgcccttgcccacccgacatggaacatggggccgaagatcaccattgattcggcttctatggcaaacaagggactggaagtgatagaggcggcgcggttattcacgctgtccgacgggcagtccttgcccccggaaaaaatcaaagtggtgattcatcctcaaagtatcgtacactcaatggtcaggatgaaggacggcgcggtatacgcccagctttcccgccccgatatgcgccttcccattcataaggctttatactggccgcaaacaacttcttgtgaattcggacgactcgactttgattcactgacccttaccttctaccaacccgacacggaaaaatttcccctgctggcgctggcgtatgaggcggtaaaaaaaggcggactatacccctgcgcgtacaatggggcaaatgaggcggcggtaggcgcttttcttgcggggcgtattggcttccttgatataagccgcgttacacggtatgttttagataaggattggagcgccgaaccggacggcattgccgccgttctggaagcggacaggcaggcaaggataatggcggaaaaggaaattgagggattagtatgttaa

SEQ ID NO: 352 - protein, 206 aa, Unknown
  Obtained from environmental sample
  DOMAIN (1)...(42): 1-deoxy-D-xylulose 5-phosphate reductoisomerase C-terminal
  misc_feature (1)..(206): Xaa is any amino acid
MKKVSPQDALAHPTWNMGPKITIDSASMANKGLEVIEAARLFTLSDGQSLPPEKIKVVIHPQSIVHSMVRMKDGAVYAQLSRPDMRLPIHKALYWPQTTSCEFGRLDFDSLTLTFYQPDTEKFPLLALAYEAVKKGGLYPCAYNGANEAAVGAFLAGRIGFLDISRVTRYVLDKDWSAEPDGIAAVLEADRQARIMAEKEIEGLVC

SEQ ID NO: 353 - DNA, 384 bp, Unknown
  Obtained from environmental sample
  misc_feature (1)..(384): n is a, c, g, or t
ttgcttacgcctagcgttctccaatacacctgtagaagacatagaacgcggaatggaaatcgtggccgacgctgtcaaggcgtttgtcaagaaataaacattattaaaacaaaaaggattaacaaaatggtagacaaagaactgctggaaattctctgctgtcccgaaacgaagcaaagcgtctcgctgatcgacagcgacgccgtccaaaagatcaacgacggcataaaatccggaaccgtcgtcaaccggggcggagcgacggtcaaggaggccatcgacggcggtctgttgcgcgaagacggaaagtatctgtaccccatccgagaggatatccccataatgttgattgacgaggcgttttcggtcggagttgaagcttga

SEQ ID NO: 354 - protein, 127 aa, Unknown
  Obtained from environmental sample
  DOMAIN (45)...(118): Trm112p-like protein
  misc_feature (1)..(127): Xaa is any amino acid
MLTPSVLQYTCRRHRTRNGNRGRRCQGVCQEINIIKTKRINKMVDKELLEILCCPETKQSVSLIDSDAVQKINDGIKSGTVVNRGGATVKEAIDGGLLREDGKYLYPIREDIPIMLIDEAFSVGVEA

SEQ ID NO: 355 - DNA, 570 bp, Unknown
  Obtained from environmental sample
  misc_feature (1)..(570): n is a, c, g, or t
ttggaagacgccgacaagccgctcacancaaccatgaagtctatgcctacccactccgtggagatatgctacaccagctcattcgccaagatattcgcccccggcatgcgcctgggctggctctgcgcgtcgcaggagataatagacaagtgccagctggccaagcagtcgatggacgcctgctccccgcccttcacgcaggcattggccgccgagttcctgtcaaaaaacaagatgcccgcctacctggagggcctgcgcgtagcctacaaacgccgcgccggaataatgttgaacagcctaaaggagcttatgcccgaaggcgtgaactggacgacccccagaggcggcttctacatttgggtaactttacctgaatacatgaacgcctccgacgtcttccaaaaagccttcgagggcggcgccgcatttgttatcggtagcgctttcgatccggcgggaaagaaaaacgattgcttacgcctagcgttctccaatacacctgtagaagacatagaacgcggaatggaaatcgtggccgacgctgtcaaggcgtttgtcaagaaataa

SEQ ID NO: 356 - protein, 189 aa, Unknown
  Obtained from environmental sample
  misc_feature (1)..(189): Xaa is any amino acid
MEDADKPLTXTMKSMPTHSVEICYTSSFAKIFAPGMRLGWLCASQEIIDKCQLAKQSMDACSPPFTQALAAEFLSKNKMPAYLEGLRVAYKRRAGIMLNSLKELMPEGVNWTTPRGGFYIWVTLPEYMNASDVFQKAFEGGAAFVIGSAFDPAGKKNDCLRLAFSNTPVEDIERGMEIVADAVKAFVKK

SEQ ID NO: 357 - DNA, 750 bp, Unknown
  Obtained from environmental sample
  misc_feature (1)..(750): n is a, c, g, or t
ttgagtcctattccagcctgtggggggatattacaattaccggaatctatgcacaataggagtatggtaacggtaatttcactgggcggctccatagtagctcccgacagcgttgacggaccatttcttaaacaatgcgcacagctcatccgcagcctgattgaagcggacgatgagcggcgattcatttttgtggtaggcggcggcggccccgcccgcgcctggcaaaacgcctaccgcgaagtctgcggcaattcagttcgtgatgaagaagcggactggattggaattatggcgacgcggctcaacgcccaactggtcaaggcggtaatggctgaatggtgctgccaggatgtggtcaccgatcccacccgcgcagaacctcttaaaggcaaggtactggtagccgcgggctggaagccgggtttttcttcggataacgacgcggtactgcttgccgagcggttcaatgcaaaaattgttatcaatctttccaacattgaaaaggtctataccgccgatcccaaaaaagacccttccgcccggccgctggaccgcatttcatgggcggattttcgcgcaatggtgggtgacgaatgggttcccggcaaaaatgttccctttgatcccgttgccagccgccatgcggaaaaaatcggtttgaaggtgatatgcgccgcggggagggatcttgaaaacctcaaaaaaataatctgcggcggggagttaataggtacaaccattggctga

SEQ ID NO: 358 - protein, 249 aa, Unknown
  Obtained from environmental sample
  DOMAIN (22)...(227): Amino acid kinase family
  misc_feature (1)..(249): Xaa is any amino acid
MSPIPACGGILQLPESMHNRSMVTVISLGGSIVAPDSVDGPFLKQCAQLIRSLIEADDERRFIFVVGGGGPARAWQNAYREVCGNSVRDEEADWIGIMATRLNAQLVKAVMAEWCCQDVVTDPTRAEPLKGKVLVAAGWKPGFSSDNDAVLLAERFNAKIVINLSNIEKVYTADPKKDPSARPLDRISWADFRAMVGDEWVPGKNVPFDPVASRHAEKIGLKVICAAGRDLENLKKIICGGELIGTTIG

SEQ ID NO: 359 - DNA, 507 bp, Unknown
  Obtained from environmental sample
  misc_feature (1)..(507): n is a, c, g, or t
atgtatcagatcggcacgagtggacaaaatcaggacaacatacagtcagtttcattaccaatagaaaaaccattagaaaaaaaaagctggtatattccaaagaaaaaattcaagccttttgctcgtatcaatcgtgctagcccggcttcattattaaattttattcaaggtgagcatcctcagattatcgcccttcttttggcgcacatgaaaccggacaaagctgctattattttacaaaacttatggcacgatttgcaaaccgatgtgtttaggcgtatcgttgtcatggattgggtcagagatgaaatagcaagtgaaattgagcgaactattgagaatatgcttaacgaatcgtccttcaaaagaaataactcaatagccggcggcgttgtaagcgccgctaagctccttaactttgttgaccgggcttcagaaaagcaaatattagatgatcttgaaaaagaagacccttttcttgtcgaagagataaaaaaaaggcagtga

SEQ ID NO: 360 - protein, 168 aa, Unknown
  Obtained from environmental sample
  misc_feature (1)..(168): Xaa is any amino acid
MYQIGTSGQNQDNIQSVSLPIEKPLEKKSWYIPKKKFKPFARINRASPASLLNFIQGEHPQIIALLLAHMKPDKAAIILQNLWHDLQTDVFRRIVVMDWVRDEIASEIERTIENMLNESSFKRNNSIAGGVVSAAKLLNFVDRASEKQILDDLEKEDPFLVEEIKKRQ

SEQ ID NO: 361 - DNA, 429 bp, Unknown
  Obtained from environmental sample
  misc_feature (1)..(429): n is a, c, g, or t
ttgccgcgggtttttcgccctgatacaaaagacaaaaaaggagttccattgattagtattgccgcaagaaacggacatttaaaaacccttgatcttctgctccgtttcggcgctcaagtgaatctcactgccgatgacagggattctaccgctctttttgacagcgctcttgaaaaaaataaagatatgataaaaacccttattgaagccggagcggatgtgaatattcagagcaaggacggtcagaccgcgctggttgtcgttgtaggcgaaggggatgaagaaattgttgaaatgctggttaaggcaggggctgaccctgacattaaagatgctcttggcgttagcgcaagaaagtatgctaccatttttggtaatagtaagatgttagctatttttgatagaaaggaatttgacgaggcgatttaa

SEQ ID NO: 362 - protein, 142 aa, Unknown
  Obtained from environmental sample
  DOMAIN (47)...(79): Ankyrin repeat
  misc_feature (1)..(142): Xaa is any amino acid
MPRVFRPDTKDKKGVPLISIAARNGHLKTLDLLLRFGAQVNLTADDRDSTALFDSALEKNKDMIKTLIEAGADVNIQSKDGQTALVVVVGEGDEEIVEMLVKAGADPDIKDALGVSARKYATIFGNSKMLAIFDRKEFDEAI

SEQ ID NO: 363 - DNA, 501 bp, Unknown
  Obtained from environmental sample
  misc_feature (1)..(501): n is a, c, g, or t
gtggagatcagccatgccctgagcggggttctgggacatttcgactaccacttggcccaggaaataaccaacaccctgattgaggaattcttaagcggcactatccgggaagtctggatactgaccaccaaatacatgggcatggcccggcaggagccggtcctcatgcccctgttgcccctcttgcccctgctcccggacaccgctgaagagaagccggcccacttggtgggctacgatgggtatctggtggagcccgatccggtcaccctcttcaatcacctgattccccgcagcctgaccataggcgttttccaggcccttcttgaatcgatcaccagcgaaaacgcggcccggatgctggccatggacaacgccagcaagaattgcaaggaactcaccgaaagtctgaccacggtctataataaattgcggcatgccgccgtcaccaacgaactcttggatattgtcaacggttccgaggcgctggccgccgcctga

SEQ ID NO: 364 - protein, 166 aa, Unknown
  Obtained from environmental sample
  DOMAIN (1)...(163): ATP synthase
  misc_feature (1)..(166): Xaa is any amino acid
MEISHALSGVLGHFDYHLAQEITNTLIEEFLSGTIREVWILTTKYMGMARQEPVLMPLLPLLPLLPDTAEEKPAHLVGYDGYLVEPDPVTLFNHLIPRSLTIGVFQALLESITSENAARMLAMDNASKNCKELTESLTTVYNKLRHAAVTNELLDIVNGSEALAAA

SEQ ID NO: 365 - DNA, 582 bp, Unknown
  Obtained from environmental sample
  misc_feature (1)..(582): n is a, c, g, or t
atggcaaatataagggttgaattttattctacttcattattgcgttcggttgcgtttgaaatgtatatgccaaatgatcatcgccctgaaatacaaatacagaataatccgtattatgacaggaaatgcaaaacagtttttgtgttacacgggtttacaggttgggggaaaggttgggatgttttatatgagcttgccgagaagtataatttagctttaatatttccttccggagaaaacagtttttatcttgacacggaagcttcaaccggaaaatacggaacttttatcggctcagagcttgttgaatatataagaaaaacctttggcctttgccgctctaaagaagatacgtttataagcggactttcgatgggaggtttcggagctatacatacagggcttgcgtatcctgatactttcggtaaaattgtcgcgttatcatccgcgttaattatacatggaatttccggtatgaaacccggcgaaaataacgaaatagcaaattattactattatcgcaattattttggcgatcttgaaaagctaatcgaaagtgataataaccctgaaacgctttaa

SEQ ID NO: 366 - protein, 193 aa, Unknown
  Obtained from environmental sample
  DOMAIN (2)...(183): Putative esterase
  misc_feature (1)..(193): Xaa is any amino acid
MANIRVEFYSTSLLRSVAFEMYMPNDHRPEIQIQNNPYYDRKCKTVFVLHGFTGWGKGWDVLYELAEKYNLALIFPSGENSFYLDTEASTGKYGTFIGSELVEYIRKTFGLCRSKEDTFISGLSMGGFGAIHTGLAYPDTFGKIVALSSALIIHGISGMKPGENNEIANYYYYRNYFGDLEKLIESDNNPETL

SEQ ID NO: 367 - DNA, 504 bp, Unknown
  Obtained from environmental sample
  misc_feature (1)..(504): n is a, c, g, or t
gtggacaggaacaaattctacgctacggccctgaaaaagccgctggcgcttttgtacaaggaaagagattattccctggtatcaaccgatgccgtaaagaacaatatttccgaaatgaaaatgctgggagatgtcagtggcaaaaacgttttaatggccgacgatatgctgggcacaggcggtacccttttaaaagcaatgacattcctgaaagaccagggagccggaaaggtaatctgcgccataagccttcctcttttttccggggacgcgataaaatattttgacgaagcctacaagaacgggcttttctatcgaatcatcggaacaaacgctgtatatcatgaggaggttctcaagcgggaatggtacattagcgttaacataacaaagcttttcgccaaaacaatctcccggctccataggggactttcactgagttcgattttggataaccgggatataatcgtgaagcacttccaggaaaaccccgaaaaggcctag

SEQ ID NO: 368 - protein, 167 aa, Unknown
  Obtained from environmental sample
  DOMAIN (2)...(105): Phosphoribosyl transferase domain
  misc_feature (1)..(167): Xaa is any amino acid
MDRNKFYATALKKPLALLYKERDYSLVSTDAVKNNISEMKMLGDVSGKNVLMADDMLGTGGTLLKAMTFLKDQGAGKVICAISLPLFSGDAIKYFDEAYKNGLFYRIIGTNAVYHEEVLKREWYISVNITKLFAKTISRLHRGLSLSSILDNRDIIVKHFQENPEKA

SEQ ID NO: 369 - DNA, 357 bp, Unknown
  Obtained from environmental sample
  misc_feature (1)..(357): n is a, c, g, or t
atgtcgccggtaatactttcggttgacattggcactacttcgcttaaggcggcttttattgatcttgacgggaagctcaaagcgttcagccgctttgcttatcaaatgggttccgcagccgaggtttgggaaaaagcctttgcacgggttctggaagaccttcatgctcaaaatcctaacggtaaaatcgaagggatatgtatctccggcaacggccccaccctggtgcctgtaagccgcgaaggaaacgcccttccgcctctttactggtttgaaggcgcggaaaaagccgcagcaaagtctttatttctttccccatgttgtgtctttcaaagaaaaagcgcctttcccatatga

SEQ ID NO: 370 - protein, 118 aa, Unknown
  Obtained from environmental sample
  misc_feature (1)..(118): Xaa is any amino acid
MSPVILSVDIGTTSLKAAFIDLDGKLKAFSRFAYQMGSAAEVWEKAFARVLEDLHAQNPNGKIEGICISGNGPTLVPVSREGNALPPLYWFEGAEKAAAKSLFLSPCCVFQRKSAFPI

SEQ ID NO: 371 - DNA, 366 bp, Unknown
  Obtained from environmental sample
  misc_feature (1)..(366): n is a, c, g, or t
atggcgacacctaaatggcacgttgagaggttgagcgaattattgcatagggagatcgggacggtgatcgctcaagatgtccgcgatccgggcattcccggtattgttacggttacggaggtaaagctgtccaaggacgtgaggaacgcgacggtgtacgtcagcgttatggacggcgacagggaagaaaaagaggccgtcatagattcgctgaatagggcgacgccgtttataaagcgtgcggtggcctcgcggatggttataaaaaattttccgcaaatagttttcaagttagacacatcaatagagcatggtcagcgtatcaatgagttgtttaaagatattcaggatgatctggctcgttaa

SEQ ID NO: 372 - protein, 121 aa, Unknown
  Obtained from environmental sample
  DOMAIN (7)...(112): Ribosome-binding factor A
  misc_feature (1)..(121): Xaa is any amino acid
MATPKWHVERLSELLHREIGTVIAQDVRDPGIPGIVTVTEVKLSKDVRNATVYVSVMDGDREEKEAVIDSLNRATPFIKRAVASRMVIKNFPQIVFKLDTSIEHGQRINELFKDIQDDLAR

SEQ ID NO: 373 - DNA, 435 bp, Unknown
  Obtained from environmental sample
  misc_feature (1)..(435): n is a, c, g, or t
atggctgtacatgatgaaatcggatccttcctttcaagtatgattctttcccattcaggctggcgcggtgttttttccgtttccggcgatgaagaagaccggacaggcgtaatcagcatggcgcagggaattatagcggcggcggcggccgtggtatttgccgaatacctgcgttctaaaaccctggcggacaaaccgccaatagcgctgattggacgcgacagccgtcccagcggcaaagccctggcggacataataaatactactcttatgacacataactgcgagccgcgctttgccggtattacagccgcgcccgaaattatggcatgggcaagaagctgcggctgcaactgtgaccgcaaatgcggccgcaactgcggcttcatctatatatcggcaagccacaaccccataggcccacacgggttttaa

SEQ ID NO: 374 - protein, 144 aa, Unknown
  Obtained from environmental sample
  misc_feature (1)..(144): Xaa is any amino acid
MAVHDEIGSFLSSMILSHSGWRGVFSVSGDEEDRTGVISMAQGIIAAAAAVVFAEYLRSKTLADKPPIALIGRDSRPSGKALADIINTTLMTHNCEPRFAGITAAPEIMAWARSCGCNCDRKCGRNCGFIYISASHNPIGPHGF

SEQ ID NO: 375 - DNA, 780 bp, Unknown
  Obtained from environmental sample
  misc_feature (1)..(780): n is a, c, g, or t
ttgatctacgacaagagcggcatcacgctcggcgaaggtaaagaggcgctcgtttcggcccgcgtgggcaagcgtcttcgcgctttggggtacgataactacaaggattacctgcaattcctgaccggcagcagcaatgagtcggagacggagttcatcgagtttctcgacgtgatctccacgaacgtcacctcgttcttccgcgaaaacgaccacttcgcgttcatggcggattacgtcaggaagatgattgaggaggagaggcgggacaaggtgcgcatttggtgcgcggccagctccagcggcgaggagccgtacacgctcgccatgactttcctcgaaaacgccaagggttttcgcggggattgcaagatattggccaccgacatatctacgaaaatattgaagatggctaaggcggggcagtactccgagtcgaagatgcagggggtcaacccgcagctgcggagcaagtatttcacggtgcaggggtcggggtcgaacaaagtgtacacggtgaacagcacgctgtcgggcatgattacgttcaagaggctgaatttgtccaagccgccgtttcccatgaaaggcccgttcgacttgatcttctgccggaacgttatgatatatttcgataatatcgtgaggaagaagctgatggacgagttttcccggttgttgcgtccgggcggctacctgatggtcggtcattcggagagcatggcggggatgttgtgcgatatggagaccgtgcagccttccgtgtatttgaaagcgtag

SEQ ID NO: 376 - protein, 259 aa, Unknown
  Obtained from environmental sample
  DOMAIN (62)...(259): CheR methyltransferase, SAM binding domain
  misc_feature (1)..(259): Xaa is any amino acid
MIYDKSGITLGEGKEALVSARVGKRLRALGYDNYKDYLQFLTGSSNESETEFIEFLDVISTNVTSFFRENDHFAFMADYVRKMIEEERRDKVRIWCAASSSGEEPYTLAMTFLENAKGFRGDCKILATDISTKILKMAKAGQYSESKMQGVNPQLRSKYFTVQGSGSNKVYTVNSTLSGMITFKRLNLSKPPFPMKGPFDLIFCRNVMIYFDNIVRKKLMDEFSRLLRPGGYLMVGHSESMAGMLCDMETVQPSVYLKA

SEQ ID NO: 377 - DNA, 531 bp, Unknown
  Obtained from environmental sample
  misc_feature (1)..(531): n is a, c, g, or t
atggagcctgtaaatgaaatgcccggggaacctgcgaaagaacttcctttggaagttcctccgcccccgggaaataatacccatccgcctaattttcgggattatccgccaccgtttgtcttgttgggaatatccgcgatgccgcagccgcagacccctcctcccatggggcaacagcctccggagcgtatgcaacccaggaaaccggagccggttcctttcgaggaagaagaagaaacgcttgaagagttggagcttgagcaagaaaaggaagaaattgaggaaattccttcggaagaaccaataaaagaacctgtattggaaaagttaccagaggagaaaatatcggagccaatcgaagataacaaacaagaggacttatccaaagttcttgatcttcttggttttctccatgggttgacagaggcgcttccagaagagcggcgaaaaacctataccgaaggcaaacttcaaacagccatgggatcggttattgatagtttaaagaacctgactataatcaaagaatag

SEQ ID NO: 378 - protein, 176 aa, Unknown
  Obtained from environmental sample
  misc_feature (1)..(176): Xaa is any amino acid
MEPVNEMPGEPAKELPLEVPPPPGNNTHPPNFRDYPPPFVLLGISAMPQPQTPPPMGQQPPERMQPRKPEPVPFEEEEETLEELELEQEKEEIEEIPSEEPIKEPVLEKLPEEKISEPIEDNKQEDLSKVLDLLGFLHGLTEALPEERRKTYTEGKLQTAMGSVIDSLKNLTIIKE

SEQ ID NO: 379 - DNA, 558 bp, Unknown
  Obtained from environmental sample
  misc_feature (1)..(558): n is a, c, g, or t
gtgcttcaccattcaaaagaagtggcgataattgcgggaatgcttgcggcggaagtcggctgtaaccgagaccttgccaaacgagccgccttgttacacgacatcggcaaaggtacggaaacaaactccgatcttaaccacgctgaaatcggcatggatatggctcgcaaaatgggcgaagacccaaggattatcaacgccatcggtagccatcacaacgacattgagccgacctgcatagaggcggttcttgtacaaatagccgacgcaatttcggcggcaagacccggagcgagaaaagagacgctggataactacatcaagcgacttgaaaaccttgaaaacatagccacaggctttagcggcgtagataaatcgtttgccattcaggcgggtcgtgagcttcgcatacttgtaaacaacgaagcggtcaacgacgagcaaaccagagagatggcaaaagaaatcgccaaaaagattgaaaacgatctgcgctaccctggacgcattaaggttacgatgatccgtgagacgagaattacagagtacgcaagataa

SEQ ID NO: 380 - protein, 185 aa, Unknown
  Obtained from environmental sample
  DOMAIN (1)...(94): HD domain
  misc_feature (1)..(185): Xaa is any amino acid
MLHHSKEVAIIAGMLAAEVGCNRDLAKRAALLHDIGKGTETNSDLNHAEIGMDMARKMGEDPRIINAIGSHHNDIEPTCIEAVLVQIADAISAARPGARKETLDNYIKRLENLENIATGFSGVDKSFAIQAGRELRILVNNEAVNDEQTREMAKEIAKKIENDLRYPGRIKVTMIRETRITEYAR

SEQ ID NO: 381 - DNA, 324 bp, Unknown
  Obtained from environmental sample
  misc_feature (1)..(324): n is a, c, g, or t
atgccgaatccagaactcggcgtgctgcgaatgatagtaaaccgcaccgacgacgccctatccgtcctgaagaacgcgggattcattgtgaagaagaaccccgtactcgccgtggaagtagacgaccgcgagggcatcctgcacgacatcatggaactctgcggttccgcggaactcaacatcgagtacctatactcctttgtcgagcaagtgtccggaaaggcgatactctttatgcggttcgaggggacggaggcggcggagaaggtctttacggacaaagggtaccggctgctctcggaggaagaggtctgtttgatttaa

SEQ ID NO: 382 - protein, 107 aa, Unknown
  Obtained from environmental sample
  misc_feature (1)..(107): Xaa is any amino acid
MPNPELGVLRMIVNRTDDALSVLKNAGFIVKKNPVLAVEVDDREGILHDIMELCGSAELNIEYLYSFVEQVSGKAILFMRFEGTEAAEKVFTDKGYRLLSEEEVCLI

SEQ ID NO: 383 - DNA, 570 bp, Unknown
  Obtained from environmental sample
  misc_feature (1)..(570): n is a, c, g, or t
ttggagagcgttgatagcggcatctggggttacgaggtaaacgtctcctgccccaacgtaaaccacggcggcctcgccttcggcaccgaccctgtgcaggtggagcggcttacatcgtctntgcgtaatttgacaaaaaagccgctgattataaaacttactccgaatgttacggacatcgtcccgatagccaaagccgcggaggcgggcggggcggacgcggtttcgttaatcaatacgcttgttggcatggtgatagacgtcaaagcgaaaaagccggcgctcggcgctaagacgggcggtctctccggtccggctgtgcgtccggtcggtgtcgcgcttacatacaaagcaaggcgggcggtatcaatccccataatcggtatgggcggaataacgtgcgccgacgacgcgttgcagtatataatggcgggagcgtcggcggtgcagatagggacggccaactttatcaaccccaagacggcgagtcttgtactggcggggataaaagagtactgcgtcaacaataatgtgtcgtcgctggaaaaaatctgcggaattattgattga

SEQ ID NO: 384 - protein, 189 aa, Unknown
  Obtained from environmental sample
  DOMAIN (3)...(173): Dihydroorotate dehydrogenase
  misc_feature (1)..(189): Xaa is any amino acid
MESVDSGIWGYEVNVSCPNVNHGGLAFGTDPVQVERLTSSXRNLTKKPLIIKLTPNVTDIVPIAKAAEAGGADAVSLINTLVGMVIDVKAKKPALGAKTGGLSGPAVRPVGVALTYKARRAVSIPIIGMGGITCADDALQYIMAGASAVQIGTANFINPKTASLVLAGIKEYCVNNNVSSLEKICGIID

SEQ ID NO: 385 - DNA, 735 bp, Unknown
  Obtained from environmental sample
  misc_feature (1)..(735): n is a, c, g, or t
atgatggaaagcggcctttccccggaagaactgcgcctgcttgccgaagccctgggcaatgaagggcaatatcaggaatccatgcgcctggtttcattatatatgaagcaggcttcttatcaatatcagcaaagggatttggaattactgtatccacggccgttcagcgaacaggtcagccaatacgcgcaggaaaccggaataaaccccgcgagattatacggccttatacggacggaaagcgcgtttaatcccgacgctatttcccgttccggcgctatcgggcttacccaactgatgcccgcgacggcggaagaaatggcggcgcgcatcctccggcggggcgggcctgattatacgcggaaatccgacaaagaaagcgttgatgaaatttcaacagatacgcgcgccgagcctgacgcgggcggcggcgccacaggcggcgccataggcggcggtttaatcgccagcgaagtgggcgttgatctgctggatcccgaggcgaacatccacatgggcgcggcctatcttgcctatctggaggaacgcctgggagaccctctgcttgccctgcttgcctacaacggcggcatgaaccgcgtccgccgctggcgcaatgccgcgcccgcaaaatttccgcccgaacttttcctggaaacggtagaatacgccgaaaccatggattacggcagatcagtcatgtccgcctcggcgatttacagagctttatattag

SEQ ID NO: 386 - protein, 244 aa, Unknown
  Obtained from environmental sample
  DOMAIN (57)...(217): Transglycosylase SLT domain
  misc_feature (1)..(244): Xaa is any amino acid
MMESGLSPEELRLLAEALGNEGQYQESMRLVSLYMKQASYQYQQRDLELLYPRPFSEQVSQYAQETGINPARLYGLIRTESAFNPDAISRSGAIGLTQLMPATAEEMAARILRRGGPDYTRKSDKESVDEISTDTRAEPDAGGGATGGAIGGGLIASEVGVDLLDPEANIHMGAAYLAYLEERLGDPLLALLAYNGGMNRVRRWRNAAPAKFPPELFLETVEYAETMDYGRSVMSASAIYRALY

SEQ ID NO: 387 - DNA, 624 bp, Unknown
  Obtained from environmental sample
  misc_feature (1)..(624): n is a, c, g, or t
atggaggcatgctcggcgatgaacggcataggcctggtgaaagttatgggacgtgaatcaggatttatcgccgcctgtaccgcgctggcaagccacgaggtaaatttcgtgcttatccccgaagttcctttcaatctggaaggctataacggattcctccaccaccttgaagcgcggcttaaaacgcgcaaacacgccgtgatcatcgttgcggaaggggcgatgcaggaacagcttctgaccgaaaagaaaaccgacgccggcggcaacctgaaactcgccgacgtaggcacctatatcaaagacagaatcatcaagtattttgacgagaagaaaattgatatcagtcttaaatacatcgatccaagttatatgataaggtcggctccggcaaatccggcggactccatctattgtgagcgtcttggaaacgccgcggcgcacgcggcgatggcgggaaaaaccaaggtgataatcggccttgtaaacaacaagtatgtgcatctgcccattaaggcggctattgcccaacgccgccatgtcgatcccgaaggaaacctctggcgcgatacaattgatgcaacacaccagcctgcgcagatggttaacaaatttgagaagtga

SEQ ID NO: 388 - protein, 207 aa, Unknown
  Obtained from environmental sample
  misc_feature (1)..(207): Xaa is any amino acid
MEACSAMNGIGLVKVMGRESGFIAACTALASHEVNFVLIPEVPFNLEGYNGFLHHLEARLKTRKHAVIIVAEGAMQEQLLTEKKTDAGGNLKLADVGTYIKDRIIKYFDEKKIDISLKYIDPSYMIRSAPANPADSIYCERLGNAAAHAAMAGKTKVIIGLVNNKYVHLPIKAAIAQRRHVDPEGNLWRDTIDATHQPAQMVNKFEK

SEQ ID NO: 389 - DNA, 576 bp, Unknown
  Obtained from environmental sample
  misc_feature (1)..(576): n is a, c, g, or t
ttgtatttcaacaagttcttgatattttatgtcgtcaaatggtcaggcggtattgcaaagcttaatattttgttttatattataaatatgtcgctttctattaataatggcagaataatattcaggtttgcagtaattttttacctgttttccctgttttcccccggttttccccaaaaacagcaggaaattcctgaaaatgaaaacggtattggcggcggaagctttaataatgaagatatttcattaactctcgcttccttagaagcgccttctattgatgagactgccgctcttgagccggagttattatcaaaaacccgtgttttgctctacgatacatatacggttacacagggtgaaaatatcagtacccttgcggtcaatatggggcttaaccagggtacgattatttccgtgaacaagataacaaatacccgcctgttgcagattggtaaagttttgaaaataccccaccaggacggcgttttatacacgataagaagtggggatacccttggcctcaatgccgaaaaatataaaggccgaaatgggagatataaaaatagcgaatga

SEQ ID NO: 390 - protein, 191 aa, Unknown
  Obtained from environmental sample
  DOMAIN (115)...(158): LysM domain
  misc_feature (1)..(191): Xaa is any amino acid
MYFNKFLIFYVVKWSGGIAKLNILFYIINMSLSINNGRIIFRFAVIFYLFSLFSPGFPQKQQEIPENENGIGGGSFNNEDISLTLASLEAPSIDETAALEPELLSKTRVLLYDTYTVTQGENISTLAVNMGLNQGTIISVNKITNTRLLQIGKVLKIPHQDGVLYTIRSGDTLGLNAEKYKGRNGRYKNSE

SEQ ID NO: 391 - DNA, 549 bp, Unknown
  Obtained from environmental sample
  misc_feature (1)..(549): n is a, c, g, or t
atgtttccaattgactcaaagtttccgctggaaagttatcaaagattaagaggggcggaaaatgaggaaagcaaaaaaacattcaagaaagattttattgcaagcgtaaaaaagcgcattgacgagaccgcgaagtacattaatcccgccgaaggcacttttgaattcgctatgatgtatatccccgcggaaaatattttttacgaagttataataaacgatgattatacaaacaaagaatacgagcttatgaactatgccatgagcaaacatgtaatacctgtatcgcctaacagtttttacgcgtatctaatggcgcttgtattgggcttgaagggattgaaaatcgaacaggaagccaaaaccattctaggcgaactttcccacattcaagacagattcacaaaattcttcgctgactacgcccttgtaggaaaacacatttcatccgccgccaacaaatacgccgactccgaaaaaagcgccggaaaattaaatgaccaaattaacaaaattaccggaaacaagacggagttgattacagattaa

SEQ ID NO: 392 - protein, 182 aa, Unknown
  Obtained from environmental sample
  DOMAIN (1)...(182): RmuC family
  misc_feature (1)..(182): Xaa is any amino acid
MFPIDSKFPLESYQRLRGAENEESKKTFKKDFIASVKKRIDETAKYINPAEGTFEFAMMYIPAENIFYEVIINDDYTNKEYELMNYAMSKHVIPVSPNSFYAYLMALVLGLKGLKIEQEAKTILGELSHIQDRFTKFFADYALVGKHISSAANKYADSEKSAGKLNDQINKITGNKTELITD

SEQ ID NO: 393 - DNA, 423 bp, Unknown
  Obtained from environmental sample
  misc_feature (1)..(423): n is a, c, g, or t
atgtttttcgcgattctgttggtactgtttctgttggtgtgcgtgtttctctgcctgctgatcctcatccagtccgacaagggcggggggatctccggcgccatcggcggcctgagcggggccaacagctttttgggcacgcaggatacggccaatgtgctcacgaagggcacgtacatattcggttctgtgttcttggtgctgtgcgtcctcatgacgctctttgcccccggcggcagcggggttgcgaagagcgcgttgcaaaagagagcggaacgggttcaaacggtaacccctatgcccgcctcgtctttcggggcggaggggacgacagaggaagacgccaacgccctcttcggtactgaggcggcgccggcggagggtggcgcggcggctgcgggtgagagcgcggctcangagtaa

SEQ ID NO: 394 - protein, 140 aa, Unknown
  Obtained from environmental sample
  SIGNAL (1)...(28)
  DOMAIN (3)...(77): Preprotein translocase SecG subunit
  misc_feature (1)..(140): Xaa is any amino acid
MFFAILLVLFLLVCVFLCLLILIQSDKGGGISGAIGGLSGANSFLGTQDTANVLTKGTYIFGSVFLVLCVLMTLFAPGGSGVAKSALQKRAERVQTVTPMPASSFGAEGTTEEDANALFGTEAAPAEGGAAAAGESAAXE

SEQ ID NO: 395 - DNA, 396 bp, Unknown
  Obtained from environmental sample
  misc_feature (1)..(396): n is a, c, g, or t
atgaaaacactagaaaaaacattccgcccctccgccgtaatctttgacatggacggccttatgttcgacactgaaaacttgacaatccccctatgggatattgcaggtaaaccgtttggctataacataacttatgacatcgttcttcgcatggtaggtataagcgctgaaaaagctcggttggtcatgtatgaagaattcggcactaattttccctacgacacgattcgcattgaatttagaaggcttgtacaagaagaagttgataaaaacggagttcccttaaagcccggtcttatatacctgcttgaccgtctttccgccgcaaagataccttttggcgttgcgacttcttcgcgcactgccacggcaactaatatgctcagaaagccgtaa

SEQ ID NO: 396 - protein, 131 aa, Unknown
  Obtained from environmental sample
  misc_feature (1)..(131): Xaa is any amino acid
MKTLEKTFRPSAVIFDMDGLMFDTENLTIPLWDIAGKPFGYNITYDIVLRMVGISAEKARLVMYEEFGTNFPYDTIRIEFRRLVQEEVDKNGVPLKPGLIYLLDRLSAAKIPFGVATSSRTATATNMLRKP

SEQ ID NO: 397 - DNA, 303 bp, Unknown
  Obtained from environmental sample
  misc_feature (1)..(303): n is a, c, g, or t
atggagcggatgaccgaactggctgaacgtttccccgatgatacaggccttaaagagagagcgctaaatcaggcggcgcgcgaaatactgcttgcccaatcttccgactggcctgccctattattcaggcaggattcaaccgaatatgcctgcaatcaggcaggaaacgcccttcgcaattttacaacgatttacgaagcccttggcagcaattacatcagcacagagtggctcaccactctggaacgaagacataatattttcccgggtattaactatagggtttttagaagaaagaagtag

SEQ ID NO: 398 - protein, 100 aa, Unknown
  Obtained from environmental sample
  misc_feature (1)..(100): Xaa is any amino acid
MERMTELAERFPDDTGLKERALNQAAREILLAQSSDWPALLFRQDSTEYACNQAGNALRNFTTIYEALGSNYISTEWLTTLERRHNIFPGINYRVFRRKK

SEQ ID NO: 399 - DNA, 576 bp, Unknown
  Obtained from environmental sample
  misc_feature (1)..(576): n is a, c, g, or t
atgatcgacgagcattcccggatccgggccgagatcatcgccgatcacgccggccgtgagagcctccgcctcatcgccaacgagggcgtccagttcggcttcggccgcgacacctccggggccttggccgtgctgggcataaacaacatcttcaccggcgactccagttccaatatcgccgtcaaccaggagctgttgcgcaaccccagcctcctgggggccggcatcgcggatcccgacggcctgcgggcccccggctccaatgaaaacgccctggccatggccgggctcaaggaccagtcctatagcttctacaacttaagttcggccaccctgggcggggccttcaacaccctctactccgaactgggggccgaaagccgctccgtgaccacggaatacgacttcaccgccggggtcttaagcgaattgaacgaccgccaggaccggctggccggggtcaatatcgacgaggaactggccgacgtgctgcgctttcagtatatgtaccaggccgcggccaagatgatctcgaccgtggatgagatgatgcagactattttggccatgaaataa

SEQ ID NO: 400 - protein, 191 aa, Unknown
  Obtained from environmental sample
  DOMAIN (152)...(190): Domain of unknown function (DUF1078)
  misc_feature (1)..(191): Xaa is any amino acid
MIDEHSRIRAEIIADHAGRESLRLIANEGVQFGFGRDTSGALAVLGINNIFTGDSSSNIAVNQELLRNPSLLGAGIADPDGLRAPGSNENALAMAGLKDQSYSFYNLSSATLGGAFNTLYSELGAESRSVTTEYDFTAGVLSELNDRQDRLAGVNIDEELADVLRFQYMYQAAAKMISTVDEMMQTILAMK

SEQ ID NO: 401 - DNA, 450 bp, Unknown
  Obtained from environmental sample
  misc_feature (1)..(450): n is a, c, g, or t
atgaaaacaaggggatataaacttatgtataaaaaaacagtatatttggtgtttttagtgctgatatgtattggaaatatattcgccgataataatgtaattttcactttagatattaccggaataaatgtaaatgatggaaaaatttacgtaaaaatatactcaaatgaaagggattataaaaaagacattccttatatctcttttgcattggagagtataagtaaaaatattacccattcatttgatataatggaaggtgagtatttaatagcattatttcaggatacaaataataatggggtgttggatacaaatttctttaattttcccaaggagcctgttggtttatcaaattataatggcggtattcctggcggctttaacaagcaaaaagtcccaataaacgctgtttcaaataagataacaattaatattggaagggtttaa

SEQ ID NO: 402 - protein, 149 aa, Unknown
  Obtained from environmental sample
  SIGNAL (1)...(29)
  misc_feature (1)..(149): Xaa is any amino acid
MKTRGYKLMYKKTVYLVFLVLICIGNIFADNNVIFTLDITGINVNDGKIYVKIYSNERDYKKDIPYISFALESISKNITHSFDIMEGEYLIALFQDTNNNGVLDTNFFNFPKEPVGLSNYNGGIPGGFNKQKVPINAVSNKITINIGRV

SEQ ID NO: 403 - DNA, 558 bp, Unknown
  Obtained from environmental sample
  misc_feature (1)..(558): n is a, c, g, or t
ttgcgcgtatanttgttctggattttatcaacgcgcgctttcattaagcaggttccgcccaatcaggtaattttggggatttccctgtttctaacagtgtttataatgtggcctacttttaacacaatttataataacgcgataaaaccgctttccgcgggagaacttaacgtgcagaacgcctatcgcgaggcggaaagccctttaaggatttttatgtacaaacagatggggcgcagcagggaagcgcagggaaatatcatgctttttatggcaatgcgcggtcttgaaagaccggccgttttagaagatgttcccacttatatattaattccggcgttcattcttaatgaacttaccgtggcgtttaaaatcgggatactgctgtttattccgttcatagtaattgacatggtggtggcaagcgcccttatgtccatgggcatgattatgcttccgcctgtaatgatatccatgccgtttaaacttattctttttattcttgtggacggctggggactgttgacgaatcaactggttcgttcttttgaattatga

SEQ ID NO: 404 - protein, 185 aa, Unknown
  Obtained from environmental sample
  DOMAIN (1)...(180): FliP family
  misc_feature (1)..(185): Xaa is any amino acid
MRVXLFWILSTRAFIKQVPPNQVILGISLFLTVFIMWPTFNTIYNNAIKPLSAGELNVQNAYREAESPLRIFMYKQMGRSREAQGNIMLFMAMRGLERPAVLEDVPTYILIPAFILNELTVAFKIGILLFIPFIVIDMVVASALMSMGMIMLPPVMISMPFKLILFILVDGWGLLTNQLVRSFEL

SEQ ID NO: 405 - DNA, 357 bp, Unknown
  Obtained from environmental sample
  misc_feature (1)..(357): n is a, c, g, or t
atggatatcgcccttacccatcatgaaaactgggacggtacagggtatccgggctggatagatccattaagcggggaaattcaaaaggccgatgacgaaggcaacccgcttggcaagaagggagaagaaattccccttggcggcagaattgtcgcagtagccgacgtattcgacgcccttagctcaagacgcgtatataaagacccgtggaccgaagacgatgttttaaaggagatgcgaaaactttccggaaccaaatttgatcccgagcttgttgaaatattctttgaaattctccccaatatcaggcaaacgcaaaatcatttccccgatttacctgaaatgcctgaagcataa

SEQ ID NO: 406 - protein, 118 aa, Unknown
  Obtained from environmental sample
  misc_feature (1)..(118): Xaa is any amino acid
MDIALTHHENWDGTGYPGWIDPLSGEIQKADDEGNPLGKKGEEIPLGGRIVAVADVFDALSSRRVYKDPWTEDDVLKEMRKLSGTKFDPELVEIFFEILPNIRQTQNHFPDLPEMPEA

SEQ ID NO: 407 - DNA, 471 bp, Unknown
  Obtained from environmental sample
  misc_feature (1)..(471): n is a, c, g, or t
atgaaaattcttgtagacgcggattcctgtccgaaacaggcaagagatcttgttctccgcagggctgtaaaaatggatatcactgttatttttgccgctaaccgtccgattcccgacgcggcgggcgctcaaatggaaatctgtcccgcaagcgataacgcagcagacgaccgcatagtagaattggccgaaagcggcgacatcgcgctgacaagggacgtgccgctggcgaagcgtcttgtggaaaaagacataaacgtccttgacgaccgcggccgggtttttacaaagaacaacattaacgaattattgtcagttagaaattttaccgtaggtcttgccaacaacggccttgaatttgaaagaaccgcaaactacggcaagaaagagttgaaaacctttgcggatagtctggatagaattttaacgaagctttatgcttcaggcatttcaggtaaatcggggaaatga

SEQ ID NO: 408 - protein, 156 aa, Unknown
  Obtained from environmental sample
  DOMAIN (1)...(144): Uncharacterized BCR, YaiI/YqxD family COG1671
  misc_feature (1)..(156): Xaa is any amino acid
MKILVDADSCPKQARDLVLRRAVKMDITVIFAANRPIPDAAGAQMEICPASDNAADDRIVELAESGDIALTRDVPLAKRLVEKDINVLDDRGRVFTKNNINELLSVRNFTVGLANNGLEFERTANYGKKELKTFADSLDRILTKLYASGISGKSGK

SEQ ID NO: 409 - DNA, 879 bp, Unknown
  Obtained from environmental sample
  misc_feature (1)..(879): n is a, c, g, or t
ttgaaaaaaccgcttcaatattttaaaggaaatgagtacgctatgattaacgattgtctgataatggccggaggttccggtgcccggctttggccggcaagcaattcaagaaaccccaaacagtttttaccggcggcaaaagacggaacagagactttctttttcatgagccttgagcgggcgctgcgggttgtcgcggaaagcgacggcagggtaattgttattgtgggaaaaacacatctgccttttgttattactgcctgttccacattgagcgccgctgaaaaaaaacgacttgtgttgattcccgagccggaagcaaagaacaccgcgccggcaattgcctgcgccattgcatacgccgggaagaccggcggctggaaccgtaccatgctggtgctgacctgcgatcacattatcaaaccatttgaggtttttttgaaagatacaggcacagcagcgcaattcgcggcgcaggaccgtcttgttgtgtttggcatttccccttcaagaccggaaaccggttacggctatattgaaacggcggatgaactcgccggagatgtttatgacgttgcctcgttttgtgaaaaacccggccgggaaacagtggaacaatttttcgcttcaaaaaagtatttctggaattcggggatgtttgcttttcgctgtgaatttctggcggaagaataccgccgtctggcggcggatgtaagcagcccctttgaaaatcttaagccccctgataaaaagtcatacactaaaacaaagggtctgtgtgtattgaatgcctgggcgggattggacaaagcttacaatcaggtacagcgtatttcttttgattatgccattgccgagaaatgcgcccaaaccgtatga

SEQ ID NO: 410 - protein, 292 aa, Unknown
  Obtained from environmental sample
  DOMAIN (20)...(278): Nucleotidyl transferase
  misc_feature (1)..(292): Xaa is any amino acid
MKKPLQYFKGNEYAMINDCLIMAGGSGARLWPASNSRNPKQFLPAAKDGTETFFFMSLERALRVVAESDGRVIVIVGKTHLPFVITACSTLSAAEKKRLVLIPEPEAKNTAPAIACAIAYAGKTGGWNRTMLVLTCDHIIKPFEVFLKDTGTAAQFAAQDRLVVFGISPSRPETGYGYIETADELAGDVYDVASFCEKPGRETVEQFFASKKYFWNSGMFAFRCEFLAEEYRRLAADVSSPFENLKPPDKKSYTKTKGLCVLNAWAGLDKAYNQVQRISFDYAIAEKCAQTV

SEQ ID NO: 411 - DNA, 594 bp, Unknown
  Obtained from environmental sample
  misc_feature (1)..(594): n is a, c, g, or t
atgcataataagcttaataaccgcgccgttcttcatacctacctgtcttttatgcaaaacaaccttaaccagcgggccaagagccgtctgcttgaagaatttgcgcgaatagacatggacaggattaatatacagacagtagggggaaacctgcgggaagtagcgggaaagatacagcttatcccctattatgacggaaaccttgtgaaggatatcgtcaggcaggttttgggcacgctgaccaatcctgccgacggcctccacgttgacagggtttatacggtggaagttcttaacgggaccactgtgtccggtcttgcgggaaggaccgctgaaattttacggggatttggttatgacgtaatttctatcggcaacgcccctcataccagccatgaaaacaccgtagtcattgatcgctcaggcgtggatggaatggcggagtattttgccggaataatccgctgtaaaaatatcatcaaggaaaattccggcagggatagtccggaagctatgcaaaatattgagtatcgttccgactttactcttataataggaagggattttaatggaaggtatgtcaccggaaactga

SEQ ID NO: 412 - protein, 197 aa, Unknown
  Obtained from environmental sample
  misc_feature (1)..(197): Xaa is any amino acid
MHNKLNNRAVLHTYLSFMQNNLNQRAKSRLLEEFARIDMDRINIQTVGGNLREVAGKIQLIPYYDGNLVKDIVRQVLGTLTNPADGLHVDRVYTVEVLNGTTVSGLAGRTAEILRGFGYDVISIGNAPHTSHENTVVIDRSGVDGMAEYFAGIIRCKNIIKENSGRDSPEAMQNIEYRSDFTLIIGRDFNGRYVTGN

SEQ ID NO: 413 - DNA, 999 bp, Unknown
  Obtained from environmental sample
  misc_feature (1)..(999): n is a, c, g, or t
atgcgcggtcttaaggacattatgcgcaccacgatggaaacggagagcaggcagattctggaagtaacgggccgggccatgggaacccttagccgctatgtcaacagacttggcctgcagatggaatacaattatccggttgttgaaaacgaacgcatgctggacgagatcaggggggtagccgcgctggtttctgatttgctgcaaaattttatagtcagggagatagagttcgcggcggttcagagtcagcggattaaaaagcgggcgataattatcggcataggggaattcgccgttattcttaccgcggtttacttctcgatactcatgcggagagccataaaaacccttatcgaagaaaatatccgcgagcagcgaaatttgcaaaaatcagaaatgaaagcactccaggcccagattaccccgcactttttatacaatacccttgattccattgtatggcttgcggagggaaacaaaaacgagcaggttatcgccattacaagggcattctcggattttttcagaatctccctgaatcgaggggatgagtgggtacgggttcagaatgaatttaaacacattgaaagctatttaaccatacagaagattcgctaccgggacattcttgattattccatagaatacgaacataaaatggaacaaaaagttatgctcaaactgttattgcagccgctggtggaaaacgctttgtatcacggcattaaaaacaagcggggcaggggaaccattgttgtcaagggccggcaggaaaaaggtttgctttgcttcagcgttgcggataacggaataggcatgaccggggagcagcttgcttcggtaaaggagcagcttgccggaatgtccgcgcttaagaagagcgaaactgaaaaccgnatatacggattgtacaatgtggcccaaaggctggaattgtactantacaggacggatcttctggatattcagaggcgctaccggggaggtacggaataa

SEQ ID NO: 414 - protein, 332 aa, Unknown
  Obtained from environmental sample
  DOMAIN (222)...(324): Histidine kinase-, DNA gyrase B-, and HSP90-like ATPase
  misc_feature (1)..(332): Xaa is any amino acid
MRGLKDIMRTTMETESRQILEVTGRAMGTLSRYVNRLGLQMEYNYPVVENERMLDEIRGVAALVSDLLQNFIVREIEFAAVQSQRIKKRAIIIGIGEFAVILTAVYFSILMRRAIKTLIEENIREQRNLQKSEMKALQAQITPHFLYNTLDSIVWLAEGNKNEQVIAITRAFSDFFRISLNRGDEWVRVQNEFKHIESYLTIQKIRYRDILDYSIEYEHKMEQKVMLKLLLQPLVENALYHGIKNKRGRGTIVVKGRQEKGLLCFSVADNGIGMTGEQLASVKEQLAGMSALKKSETENRIYGLYNVAQRLELYXYRTDLLDIQRRYRGGTE

SEQ ID NO: 415 - DNA, 408 bp, Unknown
  Obtained from environmental sample
  misc_feature (1)..(408): n is a, c, g, or t
atgaagaaatacaatattcgtgtagcgcccgcggcaaatgatagaatggccggacactttgagtttcttgcaagagtcagcgggaatgccgcatataaattactggacgaacttatcgaagatataaaattacttgggactaaccctcagataaatccatatttggacaggccttatttagaacccgggaagtaccgatacaaattatcttatggccgttaccggattatttatcaaattgtcaatgatactgtttatgtagacgacattcaggattgccgccagtgtactgctatagttaatttaaaaggtgacaatcattgcgcggttaaattctccttgttaccaaaccccgaaccctgcccccccagttcctattccctctgcgcctccgcgagctctgcgtga

SEQ ID NO: 416 - protein, 135 aa, Unknown
  Obtained from environmental sample
  DOMAIN (6)...(97): Plasmid stabilisation system protein
  misc_feature (1)..(135): Xaa is any amino acid
MKKYNIRVAPAANDRMAGHFEFLARVSGNAAYKLLDELIEDIKLLGTNPQINPYLDRPYLEPGKYRYKLSYGRYRIIYQIVNDTVYVDDIQDCRQCTAIVNLKGDNHCAVKFSLLPNPEPCPPSSYSLCASASSA

SEQ ID NO: 417 - DNA, 597 bp, Unknown
  Obtained from environmental sample
  misc_feature (1)..(597): n is a, c, g, or t
atggaaaacgtcgaccgcgcccaggccagcggggcgtacagggcggcccgcgcggtattcaaggaggccggctacggcctcacggaggtggtgctgaacgccgctttgtgtggggtgccgcagcgccgcaagcgctttttctgcgtcggggcgctgggcgcggaggacggcttcttggaagcacacataattgaccagttgagcgaaagggagaccacgcttagggactacttcggcgcttccctaggcttcgagcactactacaggcacccaaggaactacagcagacgcgcggtctattcgattgacgagccttccccgaccatccggggcgtgaaccgccccgtcccgcagggctaccccggccaccccaacgacgcgcatgcactggacgcatccatacgcccgttgaccacgccggagagggcgctcatacagacattccccccagacttcaggtggacggggagtaaaaccggcattgagcagatgataggcaacgctgtccccgtaaagctggccgagttcgtggccaaggcgctggcttaccgcatagaggcggaagagacaggttgccagttgacagtagccagttga

SEQ ID NO: 418 - protein, 198 aa, Unknown
  Obtained from environmental sample
  DOMAIN (1)...(183): C-5 cytosine-specific DNA methylase
  misc_feature (1)..(198): Xaa is any amino acid
MENVDRAQASGAYRAARAVFKEAGYGLTEVVLNAALCGVPQRRKRFFCVGALGAEDGFLEAHIIDQLSERETTLRDYFGASLGFEHYYRHPRNYSRRAVYSIDEPSPTIRGVNRPVPQGYPGHPNDAHALDASIRPLTTPERALIQTFPPDFRWTGSKTGIEQMIGNAVPVKLAEFVAKALAYRIEAEETGCQLTVAS

SEQ ID NO: 419 - DNA, 384 bp, Unknown
  Obtained from environmental sample
  misc_feature (1)..(384): n is a, c, g, or t
atgggtaaacatcttttgaaggcgcatgagctctgcaccgcgataggggtgcgttttgaggactatgttgaccgcgtgctgcggataccccgcaccgcggcaaacatggcgattaaaatgttcagctacgacctaaacccgcagacgggcgccgataacatgcgttttctcgccggtatccgcgacgccggcgagcgaaaagcggccgagaccgccctgcttaaaaacaaaagccccgatacggtaaaaacggcgattcgccaaaagaccaaaaacgaagaccccacgctaatgcttgagcgagaaaagaaccgccttgaacgcaccattgagacactctccaagcggcttgaggaagtgaagaaggagcttgggcagaaataa

SEQ ID NO: 420 - protein, 127 aa, Unknown
  Obtained from environmental sample
  misc_feature (1)..(127): Xaa is any amino acid
MGKHLLKAHELCTAIGVRFEDYVDRVLRIPRTAANMAIKMFSYDLNPQTGADNMRFLAGIRDAGERKAAETALLKNKSPDTVKTAIRQKTKNEDPTLMLEREKNRLERTIETLSKRLEEVKKELGQK

SEQ ID NO: 421 - DNA, 690 bp, Unknown
  Obtained from environmental sample
  misc_feature (1)..(690): n is a, c, g, or t
ttggttttgcattgcaggaggattcaaatgaaaatcagttttaagcttacggcgattatgtttgtgttgagccttttcagcataggcacggtcagtgttgttctgcttacccgttcccgttccgctatttctgatcttacgacaaagtatgccactaccattgcaaaagaatcctcgcttgaaatttccaaatttcttgaaacttactggtctaccgcggagaccacttcgcagatattgaagcagtacccatcaatgattgttgctaatagaaggagattctttaatatcatactccgcgggttattggaagaaaatccggaacttatcggcgtctggagcatctgggaacctaatactcttgagggcaacgacagggaatacattgggactgccggaaccaatcctgacgggcgctttgcttcctattggtatagaacaagcttggggatgcagaatatccccctggtagattttgatgtgggggcggcgggagattgctattttctggcgagggactcagggcgtataacggttatggatccttacgaatacgaactggacgggaaaactgtgctaatgactacggttgccgctcccattcgcgggccggacagaaaggttgtgggagttataggcattgacattgatatagacaggattcaggagatctcccctctccgaatctga

SEQ ID NO: 422 - protein, 229 aa, Unknown
  Obtained from environmental sample
  SIGNAL (1)...(29)
  misc_feature (1)..(229): Xaa is any amino acid
MVLHCRRIQMKISFKLTAIMFVLSLFSIGTVSVVLLTRSRSAISDLTTKYATTIAKESSLEISKFLETYWSTAETTSQILKQYPSMIVANRRRFFNIILRGLLEENPELIGVWSIWEPNTLEGNDREYIGTAGTNPDGRFASYWYRTSLGMQNIPLVDFDVGAAGDCYFLARDSGRITVMDPYEYELDGKTVLMTTVAAPIRGPDRKVVGVIGIDIDIDRIQEISPLRI

SEQ ID NO: 423 - DNA, 672 bp, Unknown
  Obtained from environmental sample
  misc_feature (1)..(672): n is a, c, g, or t
atggaattaggagtaatgattttaatcgccgccctcatcctgctggccatcataattttcgccagtgtggcgagccgttggcgtgtgcctcttgtggtcgtttcaatctttgtgggtatgctcttcggtaacgacgtgctgaatgtagggaacttcggtcagaaccccggcgattacgggttggcgcaaacggtagcgaactccgcgcttgtctttgtactcttcgtgggcggtttcggcacgaagatgagcaggctcaggatggtgttcggcccggccatgatgttagcttcggtgggcgtaataatcaccgccgtagtcacctcgttttccctatattggttgctccgggcggtccacattgacattgacgcgcagacgtctatgttgatagggtgtattatagcgtctacggacgcggcggcggttttttcgatactgcggtcgcggtcgctggatcccaagatgtcggcggtggtggagattgagtcggcgacaaacgacccaatggccatcatcatgaccaccatggccgtgggttttgccgtcgcctcagtcccgtcgtcgggcggcggcggtatagtctctctgggtacggtagggatccttgcgtggaagggtttgggcgggctggggatagggctgctggtcggtttgccgcttgctggttga

SEQ ID NO: 424 - protein, 223 aa, Unknown
  Obtained from environmental sample
  SIGNAL (1)...(24)
  misc_feature (1)..(223): Xaa is any amino acid
MELGVMILIAALILLAIIIFASVASRWRVPLVVVSIFVGMLFGNDVLNVGNFGQNPGDYGLAQTVANSALVFVLFVGGFGTKMSRLRMVFGPAMMLASVGVIITAVVTSFSLYWLLRAVHIDIDAQTSMLIGCIIASTDAAAVFSILRSRSLDPKMSAVVEIESATNDPMAIIMTTMAVGFAVASVPSSGGGGIVSLGTVGILAWKGLGGLGIGLLVGLPLAG

SEQ ID NO: 425 - DNA, 333 bp, Unknown
  Obtained from environmental sample
  misc_feature (1)..(333): n is a, c, g, or t
ttgacagttcgccagccgctcatggcgaaattgtcgtggcccaccctcttttgcaactcgctggaaattgcgggcgacggctctgttaccggctaccgcctaaggcaaaaaaacggcaaacgcgaagcggtaagagcgtttaaatcggtaaatatgcgcatttttgcggcaggggattctttcaacgaccttgccatgatccgcgaagccgacggcggctgcctgttccgcgcccccgaaaaaatccgcaaagactgcgcggatatccgctgcgcggacaccttcaacgacttgctcgccgagataaataaattttttttcaatgaacaatga

SEQ ID NO: 426 - protein, 110 aa, Unknown
  Obtained from environmental sample
  misc_feature (1)..(110): Xaa is any amino acid
MTVRQPLMAKLSWPTLFCNSLEIAGDGSVTGYRLRQKNGKREAVRAFKSVNMRIFAAGDSFNDLAMIREADGGCLFRAPEKIRKDCADIRCADTFNDLLAEINKFFFNEQ

SEQ ID NO: 427 - DNA, 441 bp, Unknown
  Obtained from environmental sample
  misc_feature (1)..(441): n is a, c, g, or t
atggatgaactctatcttacttcatgcatgatgaggcgtatgtacggaaaaacaatgccgatgcagccttcgctttttcttcacgagattgacacaagctgtctgcaaataaaagaactcgctccaacgcaaagcgccgctacgccgtattacacgggcaaaagaccattaatcgggcgaaattttaatccgcttaatccgcaaagtttacacgcaagcggcagcacaagcagcggcacaaatgccgaacttgaagaacgcgcaggatggcgaaaaggacagcgtttgtttcacgaagatcacggttacggcgcagtcatgggagtaaaggacagcgaggacggacccgttgtccatgtccgttttgattcagggcaggacaagcgatttttaagcgacattcaaggcagggcctatgaaaaaataggagaagactgctaa

SEQ ID NO: 428 - protein, 146 aa, Unknown
  Obtained from environmental sample
  misc_feature (1)..(146): Xaa is any amino acid
MDELYLTSCMMRRMYGKTMPMQPSLFLHEIDTSCLQIKELAPTQSAATPYYTGKRPLIGRNFNPLNPQSLHASGSTSSGTNAELEERAGWRKGQRLFHEDHGYGAVMGVKDSEDGPVVHVRFDSGQDKRFLSDIQGRAYEKIGEDC

SEQ ID NO: 429 - DNA, 366 bp, Unknown
  Obtained from environmental sample
  misc_feature (1)..(366): n is a, c, g, or t
atggaaataaaagacgatttttacttattaaaaaaaatcccaaatgttcttcgcgcaagaggctttcgtctttatttatctaacggaaaacgtctagtcgatctctggctaaacggcggcgcggctatccttggacacactccgccgaatattctgcgcgaaataaaaaacaccgcaagccgcggtctgtacgcccctttcccgcattttacggaagggcgttacctgaaagcattgtcaaaactttttcccggacgcgccttccgcatctacgccgcgccgccgccggaaatatccgtatttttcaactcgggagaggcaaaaatttggcggccttttaccaaccccccgatccgttcgcggtaa

SEQ ID NO: 430 - protein, 121 aa, Unknown
  Obtained from environmental sample
  misc_feature (1)..(121): Xaa is any amino acid
MEIKDDFYLLKKIPNVLRARGFRLYLSNGKRLVDLWLNGGAAILGHTPPNILREIKNTASRGLYAPFPHFTEGRYLKALSKLFPGRAFRIYAAPPPEISVFFNSGEAKIWRPFTNPPIRSR

SEQ ID NO: 431 - DNA, 300 bp, Unknown
  Obtained from environmental sample
  misc_feature (1)..(300): n is a, c, g, or t
ttggcagagggttttgagcaggaaaaaaaagaaattgaaatttggcttggcgagcattacgaagctgcaaaggtagatgttctatctctcccacgggttttgcccgcctcttatatgaacttcatattcgtaaatggcggtttacttgtgcctatatataattgcgaaaatgattctgccgcattggaatatttcaaaaaaatatttccagacagagaagttattggcatagattgcacaacccccattgaagaaggcgggagtttgcattgtttgtctaagcaggaaccatctatataa

SEQ ID NO: 432 - protein, 99 aa, Unknown
  Obtained from environmental sample
  misc_feature (1)..(99): Xaa is any amino acid
MAEGFEQEKKEIEIWLGEHYEAAKVDVLSLPRVLPASYMNFIFVNGGLLVPIYNCENDSAALEYFKKIFPDREVIGIDCTTPIEEGGSLHCLSKQEPSI

SEQ ID NO: 433 - DNA, 657 bp, Unknown
  Obtained from environmental sample
  misc_feature (1)..(657): n is a, c, g, or t
gtggattcgctcgctatggtcagnnaaatgcnggatagccttgtgnagttcaatataattttaccaaaaaatgggcaaaaattggaagactatacctttgaaaactttcgcgtacctatagaaaatcacaagtatttgctgataaacacgctttttaccagaaataaaattgttccgcaaaatttgaaaatgggagatactataagtggtgcccttgatttgagttttttcagtaaacttgcccgcacaggatttttagcccgccataatccaaatatgccgcaaaaaagcctttttggaagccgcctcgttggctacgacacttttgacggttctcaactggaagacttggaagcaaacgtagcacttgaaaatggcttggaattgaagtggcaaataacagtgaatggaaaaccagttaatcaatacacggtgaaagaccaagtttattttatgatgggcgacaaccgcgacaattccgcagacggtcgctattggggttttgtgagcgcaaggaatataaaagcaaaagcattcataatatacttcagcctagacaaagaatccaaaattgaactcctaaaaccttggacatggatttacctgccagccgacatccgctggagccgcatagcgcggattatacatcttatatag

SEQ ID NO: 434 - protein, 218 aa, Unknown
  Obtained from environmental sample
  misc_feature (1)..(218): Xaa is any amino acid
MDSLAMVXXMXDSLVXFNIILPKNGQKLEDYTFENFRVPIENHKYLLINTLFTRNKIVPQNLKMGDTISGALDLSFFSKLARTGFLARHNPNMPQKSLFGSRLVGYDTFDGSQLEDLEANVALENGLELKWQITVNGKPVNQYTVKDQVYFMMGDNRDNSADGRYWGFVSARNIKAKAFIIYFSLDKESKIELLKPWTWIYLPADIRWSRIARIIHLI

SEQ ID NO: 435 - DNA, 957 bp, Unknown
  Obtained from environmental sample
  misc_feature (1)..(957): n is a, c, g, or t
atggacgctctgtatcttctgtgcgggttagcttcgccctcttcggcaagaccgtggacggtgaacgaagctcaggaaatactgaatagaattgagtccgacttgcttaatcaggcggaaagcgtcctctatgatcatatatccgctgaaatttccaagccgcttcgctttaacgcagacggcgcgtttagttttgacgcaaggctggatctcgcgctggaagcgtacgcccacactaacacggatgattttgtcctgaacgaagactggaattatggctacgaacaacggcagccggcggcaaaactttttctggaaatgaatttatattcatggttttatatttgtacggatctcatgtataaccggaaccgttttaacgaaaaagacgaattcaggcgcgttaaagatttggagcaagggataggagcggaaacttctttacctgattcatataggatcacgcggcaatcatgggcgtattcaaaatcatttattacaaatgttccgacagggacggatgaatttgattttgactggccaaagcgcgcgaatatcactttcggaggccggtactggaacatcagtatagcaagagatcgcattcaatggggcaggggctattcgggaaattttgtgtttgacggacacagggattacgatgaatactttcgtttttccgctttttcacaaaagtttaaatatgaatggctgaatgtattttatcccggtaaattgttcatggcgcataggcttgaataccgtttattctcgtctctggttttcgcggtgtcggaaaatatcatgtgcgcttcagacgcttttaatccgcgttatattaatcccgcttttatttttcataattggtatgaccgggacaatatcaactctcttgctcaattagaaattgattttgttccttttaatggataccgttttatactcaggcggccttga

SEQ ID NO: 436 - protein, 318 aa, Unknown
  Obtained from environmental sample
  SIGNAL (1)...(16)
  misc_feature (1)..(318): Xaa is any amino acid
MDALYLLCGLASPSSARPWTVNEAQEILNRIESDLLNQAESVLYDHISAEISKPLRFNADGAFSFDARLDLALEAYAHTNTDDFVLNEDWNYGYEQRQPAAKLFLEMNLYSWFYICTDLMYNRNRFNEKDEFRRVKDLEQGIGAETSLPDSYRITRQSWAYSKSFITNVPTGTDEFDFDWPKRANITFGGRYWNISIARDRIQWGRGYSGNFVFDGHRDYDEYFRFSAFSQKFKYEWLNVFYPGKLFMAHRLEYRLFSSLVFAVSENIMCASDAFNPRYINPAFIFHNWYDRDNINSLAQLEIDFVPFNGYRFILRRP

SEQ ID NO: 437 - DNA, 498 bp, Unknown
  Obtained from environmental sample
  misc_feature (1)..(498): n is a, c, g, or t
gtgcatcaggatttcgcaaggtatcaaatcccgctaaaagacaatttgactataggctgcggaagtttcagcgaagaagatttattgtcgcttattgaaaaaatgggattgacagaaaggtttaactccttgcctgagcgtttagatacagatgtcggcaggcttggggattatgacgttgatttctccgggggcgaatggcagcgcattgccattatacgggcgctgatgcgaaatgcgccaattcaggtaatggacgagcctacagcatcgcttgaccccataagcgaaagagatttgtatgacctgtttgcaaattcgtttcagggcgacattggaattttaatcacccacagattgggcggggcaaaaaacgctgatgaaataatggtgatttccggcgggcgcgtatgcgagcagggaacgcataatgagctaatcgcgcgcaaaggcaaatactctgaaatgtacgaagcccaaaggtactggtattcatga

SEQ ID NO: 438 - protein, 165 aa, Unknown
  Obtained from environmental sample
  DOMAIN (5)...(135): ABC transporter
  misc_feature (1)..(165): Xaa is any amino acid
MHQDFARYQIPLKDNLTIGCGSFSEEDLLSLIEKMGLTERFNSLPERLDTDVGRLGDYDVDFSGGEWQRIAIIRALMRNAPIQVMDEPTASLDPISERDLYDLFANSFQGDIGILITHRLGGAKNADEIMVISGGRVCEQGTHNELIARKGKYSEMYEAQRYWYS

SEQ ID NO: 439 - DNA, 525 bp, Unknown
  Obtained from environmental sample
  misc_feature (1)..(525): n is a, c, g, or t
atgtacggtcccgaagaccctctcatctggcattcccccgacccccgctgtgtaatcttccccgaaaaactgcacgtttcctcatctatgcgaaaaatcttaaacgccggcacattcaaaataacctacgatgaaaactttgacggagtaataagaggctgcgccgaaaaaatacgcccgggtcagaacggaacatggataacaaaggacataattgaagcgtatacggaacttcatcaacttggttttgttcattccgccgaagcgtggcaggacggaacccttgtcggcggctgttacggtttactgcttggaaaagttttctgcggcgagtcaatgttcgccaacgtgcccaacgcctcaaaagccgccttcctaagctttgcggaaaaaatttttgcggaaggagccgctttcattgactgccaaataccgacaaggcatttgattagtcttggcggggaagagatgtcacgcagggattttcttgagttgctgaataagtatatagctttgcgtaattaa

SEQ ID NO: 440 - protein, 174 aa, Unknown
  Obtained from environmental sample
  DOMAIN (1)...(159): Leucyl/phenylalanyl-tRNA protein transferase
  misc_feature (1)..(174): Xaa is any amino acid
MYGPEDPLIWHSPDPRCVIFPEKLHVSSSMRKILNAGTFKITYDENFDGVIRGCAEKIRPGQNGTWITKDIIEAYTELHQLGFVHSAEAWQDGTLVGGCYGLLLGKVFCGESMFANVPNASKAAFLSFAEKIFAEGAAFIDCQIPTRHLISLGGEEMSRRDFLELLNKYIALRN

SEQ ID NO: 441 - DNA, 819 bp, Unknown
  Obtained from environmental sample
  misc_feature (1)..(819): n is a, c, g, or t
ttgcggaacgaggggcgggttcggcgcgtcttggcggatatcggcggggacgcggagaggtgcgagtttaccgttgagcactgcccggaagagataaccgcggaggacaggcgggccacggtttggaagaccaagaggggctcgtccatagtccgttgcgtcactctgcaaaaagaggggctcgcggacgcctcgatcagcgccggggacacgggggttttgatcgggtcggcgctgttcatactgggctgtgttgacggcgcggcccgtccggcgctcgccgctttcatcccgacgcccaagaagccggtactcatcatggatgttggcgcgaacatcagctgccgggcggagctgctggcggggttcgctaggctgggctgcgagtacgtaagccgcgtaagagggggcaagccgcccaaggccgcgttgcttaacgtggggtcggagcctcacaagggcccgccggaggtacgcgccgcggcggaactgctaagcggctgcgaaaactacataggattcatagagggcaacaaggtgttttcgggggaggcggacgttgtggtctgcgacggcttcgtgggcaacgccctgctcaaagcctgcgagagcttttacgccctaacgtcggaatttctggccgacagccccgagacctacgagaagctgtcgcaaaagataggcgccctgaacccggaaaactacggggcggtgccgttcttggggataaaggggactgtgctgaaagctcacgggggatcgtcgataacgtcaattaaaagcgccgtgttaacggcggttaaagcggtaggcgggtaa

SEQ ID NO: 442 - protein, 272 aa, Unknown
  Obtained from environmental sample
  DOMAIN (1)...(271): Fatty acid synthesis protein
  misc_feature (1)..(272): Xaa is any amino acid
MRNEGRVRRVLADIGGDAERCEFTVEHCPEEITAEDRRATVWKTKRGSSIVRCVTLQKEGLADASISAGDTGVLIGSALFILGCVDGAARPALAAFIPTPKKPVLIMDVGANISCRAELLAGFARLGCEYVSRVRGGKPPKAALLNVGSEPHKGPPEVRAAAELLSGCENYIGFIEGNKVFSGEADVVVCDGFVGNALLKACESFYALTSEFLADSPETYEKLSQKIGALNPENYGAVPFLGIKGTVLKAHGGSSITSIKSAVLTAVKAVGG

SEQ ID NO: 443 - DNA, 894 bp, Unknown
  Obtained from environmental sample
  misc_feature (1)..(894): n is a, c, g, or t
ttgatcatccgcacagacctggacaaatacgaaagcgtcagggaaaaaatagaaagctccgttaacgataaattctgcatactgggccgcgtcgatacgggaacgacggatatcgtctcaaaccgcgcgggaacccacgggcttgttatggatatgatcctttctgagtctttcatcacgcccgtcggaatataccggcaggcgcttatcgcctttgtcttcgtcgcgttgttttttctggcaagtatgcacttttcgcccccggcaagggtgtcctcaggtttcattctggccgcccttgcggtcgcgattaccgccgtactgttccgttttacaggcattttcttcaaccccttcacggcggtcatatccatggcggcgtcggtcattctgagggagattatctcttacgcagaatcgaaaaaagaaaaacaatttatcaaaaacgctttttccgcctatgtttgcgacggcacagtaaaggagataatcgccgatccttcccggctccggctcgggggaaccatgcgccgcatgacggctctttttacggatattaaaggtttttccacaatttctgaaaagctcgacccggaaaaactcgttaccctgcttaatatttacctttccgccatgagcggtgtattgcttgaggaaaagggcaccatcgacaagttcgatggtgacgcgatcatcgccttcttcggcgccccgatggagcttcccgaccacgcgctgggggcctgccattcggccatagcgatgaaaaaaattgaaaaagaacttaancagacaattatggaagaaaatctctcccccgccccgcttttgaccaggattggcattaacacgggaagcatgacagccgggaacatgggcacggaaaacagatga

SEQ ID NO: 444 - protein, 297 aa, Unknown
  Obtained from environmental sample
  DOMAIN (174)...(297): Adenylate and Guanylate cyclase catalytic domain
  misc_feature (1)..(297): Xaa is any amino acid
MIIRTDLDKYESVREKIESSVNDKFCILGRVDTGTTDIVSNRAGTHGLVMDMILSESFITPVGIYRQALIAFVFVALFFLASMHFSPPARVSSGFILAALAVAITAVLFRFTGIFFNPFTAVISMAASVILREIISYAESKKEKQFIKNAFSAYVCDGTVKEIIADPSRLRLGGTMRRMTALFTDIKGFSTISEKLDPEKLVTLLNIYLSAMSGVLLEEKGTIDKFDGDAIIAFFGAPMELPDHALGACHSAIAMKKIEKELXQTIMEENLSPAPLLTRIGINTGSMTAGNMGTENR

SEQ ID NO: 445 - DNA, 720 bp, Unknown
  Obtained from environmental sample
  misc_feature (1)..(720): n is a, c, g, or t
atgatggacgagcttgggcggctaaaggacgcggcaaaaccggatgagcttcttcttgtagcggacgcaatgaccggtcagtctgcggtggacatcgcgaaagcctttgatgaaaaaatcggcctaaccggagttgtgctaaccaaatttgacagtgacacaaggggcggcgcagctctctcgttaaaaaccatcacaggcaagccgttaaaatttgtggggactggcgagaagcccgaagattttgagcccttccatcccgacagggcagccgggcgaattctgggcatgggcgacgttgtctcgctggtggaaaaagcccaggaagttatcgacgaaaaggaagctctcgccctccagaaaaaaatggagaaggaaaccttcacgcttgaggactggcttcagcagctccgttcgatgaagaagatgggctctctaaaatccatgctgaacatgatccccggcatggctggccagataagcgaagaagacatcgacaaggcagagctaaaaagccaggaagctatcctttcgtccatgacccgcaaggagcgggcaaaccaccttatcatcgggccttcgcgccgttcccgcattgcccgcggctcaggcacttccgtcgcggaagttgcccgccttctaaaaaaattcgagaaaatgaagggtatgatgaaaaagatgaccaagatgggcaaagacccaaactttatgttaaaatag

SEQ ID NO: 446 - protein, 239 aa, Unknown
  Obtained from environmental sample
  DOMAIN (1)...(96): SRP54-type protein, GTPase domain
  misc_feature (1)..(239): Xaa is any amino acid
MMDELGRLKDAAKPDELLLVADAMTGQSAVDIAKAFDEKIGLTGVVLTKFDSDTRGGAALSLKTITGKPLKFVGTGEKPEDFEPFHPDRAAGRILGMGDVVSLVEKAQEVIDEKEALALQKKMEKETFTLEDWLQQLRSMKKMGSLKSMLNMIPGMAGQISEEDIDKAELKSQEAILSSMTRKERANHLIIGPSRRSRIARGSGTSVAEVARLLKKFEKMKGMMKKMTKMGKDPNFMLK

SEQ ID NO: 447 - DNA, 660 bp, Unknown
  Obtained from environmental sample
  misc_feature (1)..(660): n is a, c, g, or t
gtggcctaccgcaggcactacaaggccgagcgcggagcccacggcaaggggaaaaaccagaccggcaggagcgccgaggacgtcgtgatccccgtgccgctgggcaccatcgtctacgacgacgccacgggggagacgctgctcgactgcctgaacgagggtcagcaagagctgatagctaaaggcggacgcggcgggcgcggcaacgcggcgctggcctcattccatgatccgaacccgcagttctgcgaacccggaaagccgggcgaggagaggaaactgaagctggtattgaaagtattggcggacgttggactggtgggacgaccaaacgcgggaaagtcgactttcctgtcgcgtatatcgcacgccaggcccaagatcgccgattacccatttaccaccaaagaaccgcaactcggcatagtcaagagcgcaagcgggccgtttgggtcgtcatacgtagtggcggacattcccgggttgatagagggatgccacgaggggaaagggatggggatacgctttctgcggcatatcgagcggacgggtgtgcttgcgattatggttgaagcggggtcggaggatccgcagggcgacgctaaggttcttttgaacgaattgacgcattacagcgaactgctggcgggaaagccctaa

SEQ ID NO: 448 - protein, 219 aa, Unknown
  Obtained from environmental sample
  DOMAIN (2)...(100): GTP1/OBG
  misc_feature (1)..(219): Xaa is any amino acid
MAYRRHYKAERGAHGKGKNQTGRSAEDVVIPVPLGTIVYDDATGETLLDCLNEGQQELIAKGGRGGRGNAALASFHDPNPQFCEPGKPGEERKLKLVLKVLADVGLVGRPNAGKSTFLSRISHARPKIADYPFTTKEPQLGIVKSASGPFGSSYVVADIPGLIEGCHEGKGMGIRFLRHIERTGVLAIMVEAGSEDPQGDAKVLLNELTHYSELLAGKP

SEQ ID NO: 449 - DNA, 744 bp, Unknown
  Obtained from environmental sample
  misc_feature (1)..(744): n is a, c, g, or t
atggaagatttacggaaaagattgaaagaaaggggagcgggccccgccatagatgaattaatgcgcgcgcttaatttgaaatcaagaccggaaagaatcgagggctttgatatcgctcagttagacgggaaacaccccgtcgcctcgttaatttcttttaagaacggggttcccgaccgtaaaaattaccgctattttaaactgcgcacagttatcggaatagtagacgactttgcttccatgcgtgaagcggtaaagcggcgttattcacgtcttatccgtgaaggaaaagaacttcccgatctgatacttgtagacggcggcattgggcaggtaaacgccgcaaagggagtgttagacgaactgggagcggattgcggtcttgtggggcttgccaaacgtgaagaggagctatggcttcccgcggcgaaggagccgctggttttatcaaggcaatcggaagcgttaaaagttttacagcacgtccgtgacgagtgccaccgtttcgctacaggttttaatcaacggcttcggtcaaaagacctttttttcccgatactggaatccgtggaaggagtcggccccaaacgagcggcggcaataatgaaagaatacggctcaatagcgaatatcgccgtcgcacagccttcggaaatagcggaacgctgtcaaataagcgaaaataccgcccgcgcggtgcgcgccgtggctagattggaagcggactccataaaactcggttga

SEQ ID NO: 450 - protein, 247 aa, Unknown
  Obtained from environmental sample
  DOMAIN (20)...(171): UvrC Helix-hairpin-helix N-terminal
  misc_feature (1)..(247): Xaa is any amino acid
MEDLRKRLKERGAGPAIDELMRALNLKSRPERIEGFDIAQLDGKHPVASLISFKNGVPDRKNYRYFKLRTVIGIVDDFASMREAVKRRYSRLIREGKELPDLILVDGGIGQVNAAKGVLDELGADCGLVGLAKREEELWLPAAKEPLVLSRQSEALKVLQHVRDECHRFATGFNQRLRSKDLFFPILESVEGVGPKRAAAIMKEYGSIANIAVAQPSEIAERCQISENTARAVRAVARLEADSIKLG

SEQ ID NO: 451 - DNA, 399 bp, Unknown
  Obtained from environmental sample
  misc_feature (1)..(399): n is a, c, g, or t
ttgtataatcgggacgtggctaaaactgtttgccctaaaggttggcatttgccaagcgagaaagaatggcatactttgtatagcttcgtaggtgttgtaataaatcacgaaagccagtttgaaattagatctttgagagcaaagaatggttgggctgttgatgaagatgttttggatggcacagacaattacggattttccgcactgccgggtggtttccacgatgcggatcgcggcgatttcgaaagtgtcggcgatgctggctattggtgggttagttacgacgatggtttcacaatcatagatatagatataactaacaagagaaatagtgccttaccaagagaccgcaactgttgtggtaatttttggattagtgttcgctgtttgaaagattaa

SEQ ID NO: 452 - protein, 132 aa, Unknown
  Obtained from environmental sample
  misc_feature (1)..(132): Xaa is any amino acid
MYNRDVAKTVCPKGWHLPSEKEWHTLYSFVGVVINHESQFEIRSLRAKNGWAVDEDVLDGTDNYGFSALPGGFHDADRGDFESVGDAGYWWVSYDDGFTIIDIDITNKRNSALPRDRNCCGNFWISVRCLKD

SEQ ID NO: 453 - DNA, 303 bp, Unknown
  Obtained from environmental sample
  misc_feature (1)..(303): n is a, c, g, or t
atgttggagatgatcccgggaatgcaggggcagatcagcgaggacgacattgacaaagaagaattgaaacatcaggaagcgatactaagctccatgacgcgcaaggaaagggcgaaccatttgatcatcggaccgccgcgccgaagcagaatagcgcgaggttccggtacgtccgtcgcggaagtagcgcgtctgctaaaaaagtttgagaaaatgcgcggtatgatgaaaaagatggcaaagggcgcaagaaccggcgccatgaacggaatgatgggcggcatgccaggattcccgcagtaa

SEQ ID NO: 454 - protein, 100 aa, Unknown
  Obtained from environmental sample
  DOMAIN (1)...(76): Signal peptide binding domain
  misc_feature (1)..(100): Xaa is any amino acid
MLEMIPGMQGQISEDDIDKEELKHQEAILSSMTRKERANHLIIGPPRRSRIARGSGTSVAEVARLLKKFEKMRGMMKKMAKGARTGAMNGMMGGMPGFPQ

SEQ ID NO: 455 - DNA, 330 bp, Unknown
  Obtained from environmental sample
  misc_feature (1)..(330): n is a, c, g, or t
atgnaagccgacgcgcccctcttcagttgggcggaagaacagggtagcgctctgtgtcttcactttgacaacgcgaaaagcggccttgaatttcgcggcagtacaaatgatgtcgccgtaagttttgagattgccggagagcaaagtaaatactatcccgcgaaggctgtaatagaaaacgacagcgtgattttaagttctgataaagtgcaataccccaaaagagcgcgttacgcgtggtataaatacggtccgactctgttatacgcaaagaacggtcttgctgccatgcccttccgcacaaacagagatgaacccattgactgctaa

SEQ ID NO: 456 - protein, 109 aa, Unknown
  Obtained from environmental sample
  misc_feature (1)..(109): Xaa is any amino acid
MXADAPLFSWAEEQGSALCLHFDNAKSGLEFRGSTNDVAVSFEIAGEQSKYYPAKAVIENDSVILSSDKVQYPKRARYAWYKYGPTLLYAKNGLAAMPFRTNRDEPIDC

SEQ ID NO: 457 - DNA, 336 bp, Unknown
  Obtained from environmental sample
  misc_feature (1)..(336): n is a, c, g, or t
atgtacagaatgttcctgaacagcaaactgcgcgacgtacggataacgggagtaaatctcgagtacgagggcagcatcaccatagacgaggattaccttgagcgcgccgggatgctgcctgacgaagaggtgcacgtcttgaacgtgaacaccggcgtccggctgactacttatgtgataaaaggcgagcgcggctccgggattatggagctgaacgggccggcggcgcggttggggatggtgggcgacagaatcatggtgctgacctacgctatgctcagcccggaggagatcgcggggcataagccgaccataatcagcgtcggagtgaagtaa

SEQ ID NO: 458 - protein, 111 aa, Unknown
  Obtained from environmental sample
  DOMAIN (1)...(111): Aspartate decarboxylase
  misc_feature (1)..(111): Xaa is any amino acid
MYRMFLNSKLRDVRITGVNLEYEGSITIDEDYLERAGMLPDEEVHVLNVNTGVRLTTYVIKGERGSGIMELNGPAARLGMVGDRIMVLTYAMLSPEEIAGHKPTIISVGVK

SEQ ID NO: 459 - DNA, 747 bp, Unknown
  Obtained from environmental sample
  misc_feature (1)..(747): n is a, c, g, or t
gtgggaaaaacggaactcgccaaaacactggcggattttttgttcaatgacgaaaaagccctcaccagaattgacatgagcgagtacggagaaaaacattcggtaagccgcctnatcggcgcgccgcccggctatgtgggttatgaacagggcggtcagcttacagaggcggtcaggcgccgcccttacagcgtgattctttttgacgaaatcgaaaaaggacaccccgaagtgtttaatgtgtttttgcaaatactcgacgacggcagactgacagacggtcagggacgcgttgtcgattttaaaaatgtaattatcattatgacaagcaacttgggatcggacttgatactggaagcgaaaaatcctgaatccttgcgtgaatctttaatggagcttttaaaacacagtttcagaccggaatttataaatagaattgacgagactgtaatttttaatcgtcttggcaaaggtgaaatcggtaaaatagttgatattcagctaacgcggctttcaaagcggcttgcggagcgtaaaattacgcttgtgttaactgacgcggcaaagtctctgctcgccgagcgcggatatgatccgctgtttggcgcgcgtccgttaaaaagaacaattcaaagcgaccttgaaaatccgcttgcaaagcagattatcgcgggaacaattcgcgaaggcgacacagttacagcggacattgcgcctgataaaggaattgtttttaagaaaaaataa

SEQ ID NO: 460 - protein, 248 aa, Unknown
  Obtained from environmental sample
  DOMAIN (2)...(149): ATPase family associated with various cellular activities (AAA)
  misc_feature (1)..(248): Xaa is any amino acid
MGKTELAKTLADFLFNDEKALTRIDMSEYGEKHSVSRLIGAPPGYVGYEQGGQLTEAVRRRPYSVILFDEIEKGHPEVFNVFLQILDDGRLTDGQGRVVDFKNVIIIMTSNLGSDLILEAKNPESLRESLMELLKHSFRPEFINRIDETVIFNRLGKGEIGKIVDIQLTRLSKRLAERKITLVLTDAAKSLLAERGYDPLFGARPLKRTIQSDLENPLAKQIIAGTIREGDTVTADIAPDKGIVFKKK

SEQ ID NO: 461 - DNA, 462 bp, Unknown
  Obtained from environmental sample
  misc_feature (1)..(462): n is a, c, g, or t
ttgaattcggcggtaaccgccttgcaatccgcaatgacaaccttcagcggctcatggcaggaaggcacaaaaaaaccaggttttacttccaccgttacaggcgtaacggtaaatcccaataccgctatagtcgcaaaaggcgcaacacaaacctttaccgtgacagttaccggaacaaacagtcccgcgcaaaccgttacttggtcaatcgaccaaacagataaaaacgcggaaactaatattaacacaggcggggtacttaccgtagccgccgcagaaactcttacatcgcttaccgtaagggcaacatcaacagtggatactgcaaagagtggaacggcaacagtaaccgtaacctctggtgacggcacacaaacttttcacgaaataacagccggacaattagtcgctgatataaaaatcggctggatttgggtaacacgcttgacgctaacaatttaa

SEQ ID NO: 462 - protein, 153 aa, Unknown
  Obtained from environmental sample
  DOMAIN (31)...(130): Bacterial Ig-like domain (group 2)
  misc_feature (1)..(153): Xaa is any amino acid
MNSAVTALQSAMTTFSGSWQEGTKKPGFTSTVTGVTVNPNTAIVAKGATQTFTVTVTGTNSPAQTVTWSIDQTDKNAETNINTGGVLTVAAAETLTSLTVRATSTVDTAKSGTATVTVTSGDGTQTFHEITAGQLVADIKIGWIWVTRLTLTI

SEQ ID NO: 463 - DNA, 771 bp, Unknown
  Obtained from environmental sample
  misc_feature (1)..(771): n is a, c, g, or t
atgtccaacggcgacatatccgccctcgacgaggacgagaccctcgaccgctaccacaaaatacgcgataagctgatcccgttcatcaaagacaccgccgcgtacctcttcaacgccgagcgcgacggaaaacgcctgctcttcgagggagcgcagggaactttcctggacgtagaccacggaacatacccgttcgtcacctcctccaacacaaccgccggcagcgcctgcgcaggcgcaggcgtaggcccgcgctcaataggagagtgcataggcatagtcaaaacatacaccacccgcgtgggcaacggccccttccccaccgaactgaccgacgacacaggcttccacctccgcgccgcaggcaacgagttcggctccaccacaggacgccccagacgctgcggatggttcgacagcgtaatggtgcgaaaagccgtccagctaaacggcttctccaaactcgccctgacaaaactagacgtcctgaacgacctggacgaaatcaacatctgcacaagctacgaaatcaacggaaaaaccgtcgaacagctccccacaaacatgcaggaactggaaatcgcgaaacccatatacgaaaccatgcccggatggaaacaagacataaacgtatgcaaaaaaatatccgacctgccggacgaggccgtagtctacataaacaaaatcaaaaccctgtgccacgacgtccctatactgctaatctccgtaggaccggacaggacgganaccatagaaactgagaaaatctga

SEQ ID NO: 464 - protein, 256 aa, Unknown
  Obtained from environmental sample
  DOMAIN (1)...(252): Adenylosuccinate synthetase
  misc_feature (1)..(256): Xaa is any amino acid
MSNGDISALDEDETLDRYHKIRDKLIPFIKDTAAYLFNAERDGKRLLFEGAQGTFLDVDHGTYPFVTSSNTTAGSACAGAGVGPRSIGECIGIVKTYTTRVGNGPFPTELTDDTGFHLRAAGNEFGSTTGRPRRCGWFDSVMVRKAVQLNGFSKLALTKLDVLNDLDEINICTSYEINGKTVEQLPTNMQELEIAKPIYETMPGWKQDINVCKKISDLPDEAVVYINKIKTLCHDVPILLISVGPDRTXTIETEKI

SEQ ID NO: 465 - DNA, 495 bp, Unknown
  Obtained from environmental sample
  misc_feature (1)..(495): n is a, c, g, or t
gtgcataggcatagtcaaaacatacaccacccgcgtgggcaacggccccttccccaccgaactgaccgacgacacaggcttccacctccgcgccgcaggcaacgagttcggctccaccacaggacgccccagacgctgcggatggttcgacagcgtaatggtgcgaaaagccgtccagctaaacggcttctccaaactcgccctgacaaaactagacgtcctgaacgacctggacgaaatcaacatctgcacaagctacgaaatcaacggaaaaaccgtcgaacagctccccacaaacatgcaggaactggaaatcgcgaaacccatatacgaaaccatgcccggatggaaacaagacataaacgtatgcaaaaaaatatccgacctgccggacgaggccgtagtctacataaacaaaatcaaaaccctgtgccacgacgtccctatactgctaatctccgtaggaccggacaggacgganaccatagaaactga

SEQ ID NO: 466 - protein, 164 aa, Unknown
  Obtained from environmental sample
  misc_feature (1)..(164): Xaa is any amino acid
MHRHSQNIHHPRGQRPLPHRTDRRHRLPPPRRRQRVRLHHRTPQTLRMVRQRNGAKSRPAKRLLQTRPDKTRRPERPGRNQHLHKLRNQRKNRRTAPHKHAGTGNRETHIRNHARMETRHKRMQKNIRPAGRGRSLHKQNQNPVPRRPYTANLRRTGQDGXHRN

SEQ ID NO: 467 - DNA, 825 bp, Unknown
  Obtained from environmental sample
  misc_feature (1)..(825): n is a, c, g, or t
atgtcgccgttttccattctcttttgccaactggatgccatcgaaaccattatctggctgccgaagctcccgaaaccgaaaaaaacgggcttgatatacagggagacggaggggagtttaaccgtatctgtaccaaactatgcttatgcccgcgaagtattaggcgatattgcaaacagtcagaatatnttagtcattaacgatgaagcccatcacgcatggaggcgcaacccagaaatcaaagaaaaaataaccaaagaatataaagaagctgaaaaagaagcgacaatatgggtaagcggccttgaccgtattcacaacgcaaggaaaatattaacttgttacgatttttccgcaaccccttttgctccttccggcaagaaaaacgattcagaagctctgtttacatggattgtaagcgacttcggcttaaatgacggaatagaatccggcctggttaaaactcccagaatcgtagtccgtgatgacaacacccccgacgctaaaaacttccgttcaaagttatatcatatatacgctgataacgatgtaaaagacaatatcaaccaatcggctaaacctgaaattccgcttcctgaccttgttatacaggcatataatcttttaggcgcagactggctggaaacatataccgcatggaaaaaagacggttccgatgtcccccctgtaatgataaccgtagccaaccgtaccgagaccgcggcgcgggcttcgccgttcttcatacgaaatagaagaaaacggattatacaaaccagaatatgtgaatatttttggcataccattttcatttttaccgcatga

SEQ ID NO: 468 - protein, 274 aa, Unknown
  Obtained from environmental sample
  misc_feature (1)..(274): Xaa is any amino acid
MSPFSILFCQLDAIETIIWLPKLPKPKKTGLIYRETEGSLTVSVPNYAYAREVLGDIANSQNXLVINDEAHHAWRRNPEIKEKITKEYKEAEKEATIWVSGLDRIHNARKILTCYDFSATPFAPSGKKNDSEALFTWIVSDFGLNDGIESGLVKTPRIVVRDDNTPDAKNFRSKLYHIYADNDVKDNINQSAKPEIPLPDLVIQAYNLLGADWLETYTAWKKDGSDVPPVMITVANRTETAARASPFFIRNRRKRIIQTRICEYFWHTIFIFTA

SEQ ID NO: 469 - DNA, 432 bp, Unknown
  Obtained from environmental sample
  misc_feature (1)..(432): n is a, c, g, or t
gtgctgaacgagacgctgatgagcgcccagcggtcgagcgacgaggcccgggtgaacgcacagaaagaggcggaactaatcataaaggacgctcagatacgcgccgaccgctacgagagcgaggcgcggcagcgggtaaacgcgctggagagcgaaatcatctccatccgcaaccagcgcgacagctttctcgcccgcttcaaggctatgctctcgacgcaattgaatttgctggaagtgataagcggcgacctgcgcaacgacgatcaggacgggcagggggaggcgccggcagattcgccgcgccaacggcagcaggcgcccaccccggcgttcccgccacctcagaggggcgcgccgatgcggaacccgttcccgccgaacgacgacaagtctcagggcggggtgccgccgcagccgattatactgtga

SEQ ID NO: 470 - protein, 143 aa, Unknown
  Obtained from environmental sample
  misc_feature (1)..(143): Xaa is any amino acid
MLNETLMSAQRSSDEARVNAQKEAELIIKDAQIRADRYESEARQRVNALESEIISIRNQRDSFLARFKAMLSTQLNLLEVISGDLRNDDQDGQGEAPADSPRQRQQAPTPAFPPPQRGAPMRNPFPPNDDKSQGGVPPQPIIL

SEQ ID NO: 471 - DNA, 435 bp, Unknown
  Obtained from environmental sample
  misc_feature (1)..(435): n is a, c, g, or t
atgtcctgtgaaatnatcgccgatggtttccacatacacccggacttgtacaagttgcttttaagggacaagcccgtggacaggatcgtgctcatcaccgacgcccttaaacccacagagcaggtcaaaggccccttgcttgccaacggggaagaagtgatctttcaggatggggtttttcaccgcaaagccgataatgttattgccggttcggccctgaccatgatcaagggcgtacaaaacctggtgaacttcggctttagcctggaagaggctgtaaaaaccgcttcgttcaatcccgcacaggtaatgcgctaccggaacaaaggcgcgattatccccggctacgacgcggatttggttgtctttagcagaaactttaagatgatggctgtgttggcacgcggggtcatcaagaaaaacttattcgagtag

SEQ ID NO: 472 - protein, 144 aa, Unknown
  Obtained from environmental sample
  misc_feature (1)..(144): Xaa is any amino acid
MSCEXIADGFHIHPDLYKLLLRDKPVDRIVLITDALKPTEQVKGPLLANGEEVIFQDGVFHRKADNVIAGSALTMIKGVQNLVNFGFSLEEAVKTASFNPAQVMRYRNKGAIIPGYDADLVVFSRNFKMMAVLARGVIKKNLFE

SEQ ID NO: 473 - DNA, 429 bp, Unknown
  Obtained from environmental sample
  misc_feature (1)..(429): n is a, c, g, or t
atgaataaaaaaatggtatcattggtgtttacagcgctggtatgtattggaaatatacgcgccgataataatataactttcatcttggatattaccggaataaatgtaagtgatggaaaaatttacgtaaaaatatactcaaatgaaagagattacaaaaaagacattccttatacctcttttgtattggaaagtgtaagtataaatattacccattcatttgatataccggaaggcgagtatttaatagcattatttcaggatacaaataataatggggtgttggatacaaattttcttaattttccgaaggagcccgtcggcttgtcaaattatagcggcggtattccgggcggctttaataagcaaaaaatcccaataaatgctgtttcaaacaggataacaataaatatagggaaggtttcatga

SEQ ID NO: 474 - protein, 142 aa, Unknown
  Obtained from environmental sample
  SIGNAL (1)...(21)
  misc_feature (1)..(142): Xaa is any amino acid
MNKKMVSLVFTALVCIGNIRADNNITFILDITGINVSDGKIYVKIYSNERDYKKDIPYTSFVLESVSINITHSFDIPEGEYLIALFQDTNNNGVLDTNFLNFPKEPVGLSNYSGGIPGGFNKQKIPINAVSNRITINIGKVS

SEQ ID NO: 475 - DNA, 402 bp, Unknown
  Obtained from environmental sample
  misc_feature (1)..(402): n is a, c, g, or t
atggcaatttgtatctgcggcaagttcgaagcggagctttcggacataaccaatatagaagaaaaacttgcgttccttgaggagttgggtcttaaagagccgggactttcttcccttatccgctctgcgtatcaacttcttaacctgcgtactttttttactgccggagaagatgaatgccgagcgtggacaattcacgcgggcgacagcgcacccaaagcggcgggcgttattcacacggattttgaaaaaggttttataaaagcggaagtttatacatgcgatgatatttttaagtacgaaacagaagcgaaaataaaagaagcgggaagatatcgagttgaaggaagagattatatagtccaagacggcgatgtaatgttcttcaaattcaacgtatga

SEQ ID NO: 476 - protein, 133 aa, Unknown
  Obtained from environmental sample
  DOMAIN (49)...(132): Protein of unknown function (DUF933)
  misc_feature (1)..(133): Xaa is any amino acid
MAICICGKFEAELSDITNIEEKLAFLEELGLKEPGLSSLIRSAYQLLNLRTFFTAGEDECRAWTIHAGDSAPKAAGVIHTDFEKGFIKAEVYTCDDIFKYETEAKIKEAGRYRVEGRDYIVQDGDVMFFKFNV

SEQ ID NO: 477 - DNA, 498 bp, Unknown
  Obtained from environmental sample
  misc_feature (1)..(498): n is a, c, g, or t
atggacaagctgacaatcctcagagaaaaattcggctactcatcttttcgtccggggcaggaagaagtgatcgacgccattcttgcgggtacggacgctcttgcggtgatgcccactggagcgggaaaatctctctgctaccaaatccccgccctcatgcttgacggcatgacaatcgttatctcaccgcttatttctttaatgaaggatcaagtcagcgcgttgaaagaagcggggtgcggagcggcatttctaaacagttcattaagcggcggtgaatattatgatacgatggaagaaataacgaacggtgatattaaactgctttacattgcgcctgaacgtttacaaagaacggatatacctgagcttgagattaacagcgttccgcttgttgtgattgacgaggcgcattgcgtatcacagtggggacatgactttaggacaagttatctgcaaatagcgaaatttataaaggcattaaccttcgtcccgtag

SEQ ID NO: 478 - protein, 165 aa, Unknown
  Obtained from environmental sample
  DOMAIN (13)...(159): Type III restriction enzyme, res subunit
  misc_feature (1)..(165): Xaa is any amino acid
MDKLTILREKFGYSSFRPGQEEVIDAILAGTDALAVMPTGAGKSLCYQIPALMLDGMTIVISPLISLMKDQVSALKEAGCGAAFLNSSLSGGEYYDTMEEITNGDIKLLYIAPERLQRTDIPELEINSVPLVVIDEAHCVSQWGHDFRTSYLQIAKFIKALTFVP

SEQ ID NO: 479 - DNA, 528 bp, Unknown
  Obtained from environmental sample
  misc_feature (1)..(528): n is a, c, g, or t
ttgctactggggttttttctatctaatattacagatatgggtttaatcaatctggaccttgatgccattgaaggttatgtatcaaaccatttgaggcttttcctttcaatggctgctgggctaataatattggtaggaatagtggctgtgtcagtgttttttatcaatgtgcagggagccgaacggaccatggttcccgatgttcagggacgggatctgacagctgcccttcttgaacttcaggtaaaggaactttaccccagaatcagccttcgttacagccaaagctctacggacaagggccttgttttggaacaaagtccgcagccgggtgctatagttaaggctggcaggaggattcagctcgtggtaagccagggggtaatggttaataccatagaaaattatcttggcagaaacatagatgaagttcgtatggatatccagacccttttgtcaacgcagagcgtaacggggaacgtacagcaagtcaccattaaagagccgtgtaatgtaccaatattctaa

SEQ ID NO: 480 - protein, 175 aa, Unknown
  Obtained from environmental sample
  DOMAIN (63)...(126): PASTA domain
  misc_feature (1)..(175): Xaa is any amino acid
MLLGFFLSNITDMGLINLDLDAIEGYVSNHLRLFLSMAAGLIILVGIVAVSVFFINVQGAERTMVPDVQGRDLTAALLELQVKELYPRISLRYSQSSTDKGLVLEQSPQPGAIVKAGRRIQLVVSQGVMVNTIENYLGRNIDEVRMDIQTLLSTQSVTGNVQQVTIKEPCNVPIF

SEQ ID NO: 481 - DNA, 765 bp, Unknown
  Obtained from environmental sample
  misc_feature (1)..(765): n is a, c, g, or t
gtgtcgccactaccttccactgtcgccttcaatcttaaagaagcctgcggcgttgcgataatcggcggagcggacgggcccacaacaatttacatcgcggcaaaacttgcccctcaccttttagcgactgtagcggtagcggcatattcctacatggcccttgtgcctatgatccagccgcccatcatgaaactgctcacaaccaaaaaagagcggcttatcaaaatgaaacagcttcgccctgtttccaaaacagaaaaaatcgccttcccgataattgtattctcactggcaattctgttgattcccgcggcagcccctcttatcggctgtcttatgttcggcaactttatccgtgaaatcggcgtggtggacaggatttcaaagacagcccaaaacgagctgatgaatatagtgtcaatgttcctgtctttgggtgtcggcagtcagatgactcctgaaaagttccttaattccaagtcattgattatcgtagtaatgggtcttcttgccttcgcgatagcgaccgccacaggcgttcttgtagcgaagtttatgaacctgtttcttaaagaaaagatcaacccgctcatcggctccgccggtgtttccgcggttccaatggcggcccgtgtgtcaaacaaagtcggtcttgaatacgatcccggcaacttcttattaatgcacgcgatgggcccgaatgtggcaggtgtaataggaacagcaatagccgcgggagttatgatagcggtttacgcaaggtaa

SEQ ID NO: 482 - protein, 254 aa, Unknown
  Obtained from environmental sample
  DOMAIN (1)...(253): Na+-transporting methylmalonyl-CoA/oxaloacetate decarboxylase, beta subunit
  misc_feature (1)..(254): Xaa is any amino acid
MSPLPSTVAFNLKEACGVAIIGGADGPTTIYIAAKLAPHLLATVAVAAYSYMALVPMIQPPIMKLLTTKKERLIKMKQLRPVSKTEKIAFPIIVFSLAILLIPAAAPLIGCLMFGNFIREIGVVDRISKTAQNELMNIVSMFLSLGVGSQMTPEKFLNSKSLIIVVMGLLAFAIATATGVLVAKFMNLFLKEKINPLIGSAGVSAVPMAARVSNKVGLEYDPGNFLLMHAMGPNVAGVIGTAIAAGVMIAVYAR

SEQ ID NO: 483 - DNA, 372 bp, Unknown
  Obtained from environmental sample
  misc_feature (1)..(372): n is a, c, g, or t
ttgcggtcgcccaatcccgcggtgatgcccaatcccgcaatcccgatgcccaatcccgcggtgatgcccaatcccgcaatcccgatgcccaatcccgcggtgatgccaccgcanatgcgaatacaaatgcacacagggcgaccgcccaatcccgcggtgatgcccaatcccgcaatcccgatgcccaatcccgcggtgatgccaccgcaaatgcgaataccaatgcccccaagggcgaccgcaagggtcgcccctacaaaaaattgggcgtattatcgggggcataaaaatcgttgggtttttacaaaatgtttggaaatattcaaatcgaaaaaaatggattttagggaaatttatggcacgcaattttag

SEQ ID NO: 484 - protein, 123 aa, Unknown
  Obtained from environmental sample
  misc_feature (1)..(123): Xaa is any amino acid
MRSPNPAVMPNPAIPMPNPAVMPNPAIPMPNPAVMPPXMRIQMHTGRPPNPAVMPNPAIPMPNPAVMPPQMRIPMPPRATARVAPTKNWAYYRGHKNRWVFTKCLEIFKSKKMDFREIYGTQF

SEQ ID NO: 485 - DNA, 423 bp, Unknown
  Obtained from environmental sample
  misc_feature (1)..(423): n is a, c, g, or t
ttgggagcggaanacccccccctgtttgcggttatgttagaggccggttggagcgaggggaaggctttcccctacctcacaaactggtatgtccgccgaagccgccgccgtttctggaaaagcgacaacgacagcgacaaaaacaacgcctacgcaacgctatacaaagcactcgtggatttcagcaaaatcctagccccattcctgccattcttggcagaggagatttatcaaatactcgtgagggaagcgaaccccaacgcccctgtttctgttcatctcacctcataccccgaacacaacgcagagtacgcaaacgaaaaactagttcgccgaatgtcattggttagaagcgccatagaaaaaggcagagcgatacgcagcgcaaacgaaatcaaaaaccgccagcccctaaaaacatga

SEQ ID NO: 486 - protein, 140 aa, Unknown
  Obtained from environmental sample
  DOMAIN (18)...(139): Anticodon-binding domain
  misc_feature (1)..(140): Xaa is any amino acid
MGAEXPPLFAVMLEAGWSEGKAFPYLTNWYVRRSRRRFWKSDNDSDKNNAYATLYKALVDFSKILAPFLPFLAEEIYQILVREANPNAPVSVHLTSYPEHNAEYANEKLVRRMSLVRSAIEKGRAIRSANEIKNRQPLKT

SEQ ID NO: 487 - DNA, 561 bp, Unknown
  Obtained from environmental sample
  misc_feature (1)..(561): n is a, c, g, or t
gtgaaaacacccgattgggcaagtataagcccgtatgaccggtattttgattttatatccgataacgccgaccgttacgcgatactcattgaatgtataaacaaattaaatcttaacccgtctgtaatagaaatggcgggaaaccgccatatttttatttttccgccgggacaaaaatccctgcgctcggctggcggcgtttttccttttaacaaattaagcccctttttattttgcgcccattacgaccgcgttccgggaagccccggcgcgaatgacaacagcatcgccgtttttcacctgcttaacacggcctcaatcctggcaaaacgcggtatagacaagtggatcatagtttttaccgacaaggaagaattaaaggccggcgaaagtatcgaaaatatcggttctttttcgatgggggaaaaattaaaatcatggggccttgaaaaggcaaaaatctacaattttgacgcctgcggttccggcagcgttttcattttttcaactaccagccgaccattatctaaaaanccggcgctctgccatcatgccnnttaa

SEQ ID NO: 488 - protein, 186 aa, Unknown
  Obtained from environmental sample
  misc_feature (1)..(186): Xaa is any amino acid
MKTPDWASISPYDRYFDFISDNADRYAILIECINKLNLNPSVIEMAGNRHIFIFPPGQKSLRSAGGVFPFNKLSPFLFCAHYDRVPGSPGANDNSIAVFHLLNTASILAKRGIDKWIIVFTDKEELKAGESIENIGSFSMGEKLKSWGLEKAKIYNFDACGSGSVFIFSTTSRPLSKXPALCHHAX

SEQ ID NO: 489 - DNA, 324 bp, Unknown
  Obtained from environmental sample
  misc_feature (1)..(324): n is a, c, g, or t
ttgtacttacaggatgaatatgaagtccataaagcgaagtccgggcaggaagcgttagataatataaccaacaataaatttatacccaatataatattattggatttaatgatgccaaacatgaccggctgggaagtttttaagagattaagacaaatagattccttaaagaatgttccaatcgcgtttgtaacgtcaatagcggaaaaagaagaaaagaataaagcctttaagatgggaattgcggattatattttgaagccgtttaacatgacagaattgaagggcagagtaaaagatataagaaagaaatttaagatttaa

SEQ ID NO: 490 - protein, 107 aa, Unknown
  Obtained from environmental sample
  DOMAIN (2)...(99): Response regulator receiver domain
  misc_feature (1)..(107): Xaa is any amino acid
MYLQDEYEVHKAKSGQEALDNITNNKFIPNIILLDLMMPNMTGWEVFKRLRQIDSLKNVPIAFVTSIAEKEEKNKAFKMGIADYILKPFNMTELKGRVKDIRKKFKI

SEQ ID NO: 491 - DNA, 534 bp, Unknown
  Obtained from environmental sample
  misc_feature (1)..(534): n is a, c, g, or t
gtgggtgaaaattatattgaatggtccgattcttattcgcttgggataaaaatgattgatgaccagcacaaggggcttctggatattgtcaatgatttatacagccattctaccggtaacgaaacggaagagatgttttattttaaggatgtcattcaccaagcggtagattatataaagaatcattttatggtggaagaaaaattactggttgcgaccaaatacccgggctatgcggagcataaaaaggcacatgatcaatttacgctgacggtagttacaagcgcgaaggactttgaagcaggcaagcgttttgttatggagaaatttgcccattttttaagggactggattttatcccatatagccgtaatggatcaggactatgccacatatctaagaaaaatcgcaacgcgtaaagcagatggaaagctgtctgtcggaatggtggatatagggaaggcttcacccagtttaattattaatttctcattaagggacagggggattaaccgtaaccccctttcttgttag

SEQ ID NO: 492 - protein, 177 aa, Unknown
  Obtained from environmental sample
  DOMAIN (15)...(73): Hemerythrin HHE cation binding domain
  misc_feature (1)..(177): Xaa is any amino acid
MGENYIEWSDSYSLGIKMIDDQHKGLLDIVNDLYSHSTGNETEEMFYFKDVIHQAVDYIKNHFMVEEKLLVATKYPGYAEHKKAHDQFTLTVVTSAKDFEAGKRFVMEKFAHFLRDWILSHIAVMDQDYATYLRKIATRKADGKLSVGMVDIGKASPSLIINFSLRDRGINRNPLSC

SEQ ID NO: 493 - DNA, 498 bp, Unknown
  Obtained from environmental sample
  misc_feature (1)..(498): n is a, c, g, or t
gtggtatctttggtagagataaagtctgttggtcgtgcaagcaaaggtgtatttgaagatctcaagcaaaaatatcatagataccaattcagatttaggcaagcaatcaacaaaccggagataaatgacaaactaaattcaattgacaatcgattaggggaaactttttttgtaaaagagtcgaatataaaaccagatggaggaattatcgaagttcaagacaaaaataagaaatggagggtagttttagttagcgaagccaaatttcaggggaaagatgttgaaaacgttaaggcaggtgttcttgttgggaagaacaaagatcaagagttaatggtagcggggaatgcaattgaaagagtatataaaaatattaatgaaattagaaatttcatgctagatgaatatcattttccgtatgcagtattttgcaaggctcgaactttgcaactgaaactgttcaagtgtttaaaccagacggttcttttgtggaaataa

SEQ ID NO: 494 - protein, 165 aa, Unknown
  Obtained from environmental sample
  DOMAIN (9)...(160): Restriction endonuclease EcoRI
  misc_feature (1)..(165): Xaa is any amino acid
MVSLVEIKSVGRASKGVFEDLKQKYHRYQFRFRQAINKPEINDKLNSIDNRLGETFFVKESNIKPDGGIIEVQDKNKKWRVVLVSEAKFQGKDVENVKAGVLVGKNKDQELMVAGNAIERVYKNINEIRNFMLDEYHFPYAVFCKARTLQLKLFKCLNQTVLLWK

SEQ ID NO: 495 - DNA, 303 bp, Unknown
  Obtained from environmental sample
  misc_feature (1)..(303): n is a, c, g, or t
ttgcaaggctcgaactttgcaactgaaactgttcaagtgtttaaaccagacggttcttttgtggaaataaggcataattcgggtgctatgaacagaattgatagagtaacggctgcaaattactgtatgaaaattaatcaaaactactgtaaaaacatttttataggtcacgataacttatccattatgcttcaagcagcttccatttacgcaagatgtgaaccttggaaagaggacgaaatgcgacagattatgatgaacatcgcagatacatctataggagttttaaatcaattgggatag

SEQ ID NO: 496 - protein, 100 aa, Unknown
  Obtained from environmental sample
  DOMAIN (1)...(98): Restriction endonuclease EcoRI
  misc_feature (1)..(100): Xaa is any amino acid
MQGSNFATETVQVFKPDGSFVEIRHNSGAMNRIDRVTAANYCMKINQNYCKNIFIGHDNLSIMLQAASIYARCEPWKEDEMRQIMMNIADTSIGVLNQLG

SEQ ID NO: 497 - DNA, 765 bp, Unknown
  Obtained from environmental sample
  misc_feature (1)..(765): n is a, c, g, or t
atgcttgtggtttaccggggcacggatatgacgcttgtcggatggaaagaaagttttaacatgagtttgattacatccatcccctcgcaaaaagaagccgtatcctaccttgagaaaacagccaaaagataccgttatcccctgattatagccggacattcaaagggcgggaatctggcggtttacgcgtccgccttttgcagcaaacgcgtccgaaagcgcgtctctgccgtttacagcaatgacgcgccgggctttcacaagcaggtgatagagagcgaaggttacaaggcgatctgcccccggattcgctcctttattccgcagtcgtcgttaatcgggatgctgtttgagcatggcgagaccccgatggtggtaaaaagcgccgcgaacggccccatgcagcatgacctctgttcgtgggaagttacatataacaacatggccgatgccggcgaactcacgccgcagagccgccttgttaacaatattatcagcgaatggatcaatcagattgacgaggggcagaggcagcagtttattcaggctatatacaagatccttgtttcctgcgacgcggattccgtgactgatcttaccgatgactggaaaaataccgccggcggcataatcaacgccctaatcaatatggacaagccccacaaaaaacttttggggaaaataataggggatctcttcaaaaccgcgaaagataacttcgggaaagcgtacaacgctaaacattcgaaaacggcacgatgttga

SEQ ID NO: 498 - protein, 254 aa, Unknown
  Obtained from environmental sample
  misc_feature (1)..(254): Xaa is any amino acid
MLVVYRGTDMTLVGWKESFNMSLITSIPSQKEAVSYLEKTAKRYRYPLIIAGHSKGGNLAVYASAFCSKRVRKRVSAVYSNDAPGFHKQVIESEGYKAICPRIRSFIPQSSLIGMLFEHGETPMVVKSAANGPMQHDLCSWEVTYNNMADAGELTPQSRLVNNIISEWINQIDEGQRQQFIQAIYKILVSCDADSVTDLTDDWKNTAGGIINALINMDKPHKKLLGKIIGDLFKTAKDNFGKAYNAKHSKTARC

SEQ ID NO: 499 - DNA, 486 bp, Unknown
  Obtained from environmental sample
  misc_feature (1)..(486): n is a, c, g, or t
ttgatggaaaacaacgataatgaaattattcaatacatagaacccattctgcattattgcattaagcggctgaacaaccgccaggacgccgaagacttggcgggcgaaataatggttcacatattaagcggcataaggaaatacaagattgattcgctggaaaaatggatatggagcatcgctcataaccgttacgtgaaatttgtagacaaaagaaataaaaccaattatacggaaacggatgccgattacgcggaaatcgcggatacttatgattttatcgaccaattgattatttcaaacaggtatcaaaatgtgtttaaggcgcttcacgcgctttcaggcgagtaccgcgatattttggttgattattatgttaatgagttttctgttaagcagattgccgagaaatataaattgccggaaactacggttaaatggcggcttaatgcggggagggggaaaattaggggggaggtacaatga

SEQ ID NO: 500 - protein, 161 aa, Unknown
  Obtained from environmental sample
  DOMAIN (103)...(156): Sigma-70, region 4
  misc_feature (1)..(161): Xaa is any amino acid
MMENNDNEIIQYIEPILHYCIKRLNNRQDAEDLAGEIMVHILSGIRKYKIDSLEKWIWSIAHNRYVKFVDKRNKTNYTETDADYAEIADTYDFIDQLIISNRYQNVFKALHALSGEYRDILVDYYVNEFSVKQIAEKYKLPETTVKWRLNAGRGKIRGEVQ

SEQ ID NO: 501 - DNA, 597 bp, Unknown
  Obtained from environmental sample
  misc_feature (1)..(597): n is a, c, g, or t
atgaagaagattgatatattgattatttgtattattctcttcctccttttcggctgtacatttgactacggcgaaaaagaacctaccggcgaagaacagcccggccttatcatgaaaaatgttgagtatatacgggtaaggtcttccgacccaagagcgaggtttaaggcggaaatcgccgagcgttacgaaaaacaaggcttaatgagaattcaaaacatgacatttgaacaatacggcgacggtggtaaagaaattaacgctatgggaaacgccgggtacgcttccgtggaaattcaaaccggcgatatcttcatggataaaaacgtcaggatcgatgtggaaaccgacgatataacaatccaaacataccagcttgaatggagggaagaaccgcatgtactttccacgccggaagaaaatgaggtaaacatttttcaggataacggaacaaattttacgggaaccggcctttatgttgaaacgcgcggccgtcaatgggaatttaaaggagatgtcagaggtttgtttgtccacgataatgatgaagaagaggaagatgaaattatcgaagaaacaacggcggataatttatga

SEQ ID NO: 502 - protein, 198 aa, Unknown
  Obtained from environmental sample
  SIGNAL (1)...(24)
  misc_feature (1)..(198): Xaa is any amino acid
MKKIDILIICIILFLLFGCTFDYGEKEPTGEEQPGLIMKNVEYIRVRSSDPRARFKAEIAERYEKQGLMRIQNMTFEQYGDGGKEINAMGNAGYASVEIQTGDIFMDKNVRIDVETDDITIQTYQLEWREEPHVLSTPEENEVNIFQDNGTNFTGTGLYVETRGRQWEFKGDVRGLFVHDNDEEEEDEIIEETTADNL

SEQ ID NO: 503 - DNA, 510 bp, Unknown
  Obtained from environmental sample
  misc_feature (1)..(510): n is a, c, g, or t
atgggcacggaaatacttaaaaacaaatacaccgtctaccctattccgtcaggggagcaggctttgcaaatattaaagaaagtagttcccgatctgatcctgcttgacattgaaatgcccgttatggatggttatgcggtcatcaataagctcaaacaggagaaggagacaaaggacataccggtgatgtttctcacctcgcacaccgatccggggaacgagcttgacggattaagcatgggcgcgattgattatatcaccaagcctttctcccccctgctccttgtacagcgcattgataatcatctttcgataatttcgcaaaggaaagagcttcttcagtacaataaaactttacaggaaacaatagaacaaaaaaacaaagaaattgaagagctccaaaatgccattcaaaatacaatttcggaaattaatagtttaaggaccgaattatcaagttctcagattgaaagcatcatgaaacatttacagtcagttgaaactccctga

SEQ ID NO: 504 - protein, 169 aa, Unknown
  Obtained from environmental sample
  DOMAIN (3)...(100): Response regulator receiver domain
  misc_feature (1)..(169): Xaa is any amino acid
MGTEILKNKYTVYPIPSGEQALQILKKVVPDLILLDIEMPVMDGYAVINKLKQEKETKDIPVMFLTSHTDPGNELDGLSMGAIDYITKPFSPLLLVQRIDNHLSIISQRKELLQYNKTLQETIEQKNKEIEELQNAIQNTISEINSLRTELSSSQIESIMKHLQSVETP

SEQ ID NO: 505 - DNA, 780 bp, Unknown
  Obtained from environmental sample
  misc_feature (1)..(780): n is a, c, g, or t
ttgatcagattggccgagacggcttatctgttcgtttttatcggactcaacgcgcgggtaatggcctttggccgggcccggaattttcaaactcagtttccgtctatgttcaagaccggtaccgccaaccagtaccagagcattgtcgccctgggagctacgccgaaatacaccgcaggagtttggatgggaaattttaccggcgaaactgttatcggaaaaacaggaagctccattcccgccgccattgcgcgtgacgctctggttttcctgcagtccggaccgcgcggcgcggcgcccgatttttccgcgcctgaaaaccggcagctacagcgcgtctgcgccctttccggcatggcgcctacagacgcgtgcctttcgcttataagcgaataccgttaccatggcgaggagggcgaaccctgcacatggcaccggacggtaaacggccgaagcgaggcagtgtatcccgccgaatatcaggcctggtttacagcatcctcgcgggaaggctcccttgactatggttcccgcccgctggaaattatcagcccccgcgaaggttttgtgtaccttagcagccccggtataggccgggatgaaattccggtagaagttataggcggcggcggcgatgaattgcgcgtaacgttcaacggcaatacgttcagcgtcgggcggccctttgttttttcccttccccgcgcgccgggttcccatactttaagggtccggaacggagatgaggaagaggaagtgagctttacggtcgaaccgtga

SEQ ID NO: 506 - protein, 259 aa, Unknown
  Obtained from environmental sample
  misc_feature (1)..(259): Xaa is any amino acid
MIRLAETAYLFVFIGLNARVMAFGRARNFQTQFPSMFKTGTANQYQSIVALGATPKYTAGVWMGNFTGETVIGKTGSSIPAAIARDALVFLQSGPRGAAPDFSAPENRQLQRVCALSGMAPTDACLSLISEYRYHGEEGEPCTWHRTVNGRSEAVYPAEYQAWFTASSREGSLDYGSRPLEIISPREGFVYLSSPGIGRDEIPVEVIGGGGDELRVTFNGNTFSVGRPFVFSLPRAPGSHTLRVRNGDEEEEVSFTVEP

SEQ ID NO: 507 - DNA, 624 bp, Unknown
  Obtained from environmental sample
  misc_feature (1)..(624): n is a, c, g, or t
atgagccaaagacagaaatacctgatattggtaggcgacggcatggccgactttcctattccgtcacttaacggcaaaactccggttgagtcagcttccacgcccaacatggacaagatagccgcagccggacggataggcttgctgtccacgatcccggacggcttccttcccggcagcgacatcggcaatatgtcattattgggatatgacccgcgccgctacttctgcggccgcgcgcctatagaggcggcgagtatgggaattcccatagggcctgacgacgtcgttttccgttgtaatttggtgacaatcgataacaacataatgaaggactactccgccggccacatctccaccgaggccgcgcacaccgttattaacgctttgcaaaaatccctaggtattgacggagagttgaaattccaccccggggtgagttaccgccatctgttgacggtgaagaaaaccggcgcgaaactaaagtgtacccctccccacgacatcaccggtcaaaaaattgatcaatacttgcctaacggtgatgatgtcggcggcaaagattacatattatcattaatgaaccgcgcgaagcctatatcgccaaacgctcggccgatctga

SEQ ID NO: 508 - protein, 207 aa, Unknown
  Obtained from environmental sample
  misc_feature (1)..(207): Xaa is any amino acid
MSQRQKYLILVGDGMADFPIPSLNGKTPVESASTPNMDKIAAAGRIGLLSTIPDGFLPGSDIGNMSLLGYDPRRYFCGRAPIEAASMGIPIGPDDVVFRCNLVTIDNNIMKDYSAGHISTEAAHTVINALQKSLGIDGELKFHPGVSYRHLLTVKKTGAKLKCTPPHDITGQKIDQYLPNGDDVGGKDYILSLMNRAKPISPNARPI

SEQ ID NO: 509 - DNA, 798 bp, Unknown
  Obtained from environmental sample
  misc_feature (1)..(798): n is a, c, g, or t
gtggtggtcaataaagcggcgggggaggctgtcgaagggccgggcaaagggatgattgacctgccagaactgttggctgagcaaatgcccagcctcaatgtacagccggccttgccggaaggggacgtccttgccctgccaaccgcagttcaccgtctggatgttccggtttccggctgcgtggcgtttgcccgtaccggaaccgccgttcgcttcgtgaataacgcgtttagcagtaatatggtagaaaaatactactgggcaatcgttgaacagcccagagacagcggtgtctgccaatgggttgaaggattatcttccgaatttaccgagattattcattggattcagtttaatccgcggaaaaacaagtcagttgcccataatgaacagggtcggggacgaaaaaaagccatacttcgctgccgtttggccggcaagggcagggattacctgtttttggaagtaaatttggtcacggggcggcaccaccagataagggcgcagtttgaaaagctgggtctgcatatcaaaggggaccttaaatatggggccagacgcagtgagcgggatggcggcatacgcctccatgcccgatcactttctttcccccgcgtggaggaccctggccctggtgtcaggcggattaccgtgcgggccaaccccttgattattgtctcaaccgccgagcgagtgttaacgagcgaaggttcccctccggacaagctttggcaggcgtttgaactggctgtagacaattttctgactattgacaaagcctccccagagcgattataa

SEQ ID NO: 510 - protein, 265 aa, Unknown
  Obtained from environmental sample
  DOMAIN (1)...(172): RNA pseudouridylate synthase
  misc_feature (1)..(265): Xaa is any amino acid
MVVNKAAGEAVEGPGKGMIDLPELLAEQMPSLNVQPALPEGDVLALPTAVHRLDVPVSGCVAFARTGTAVRFVNNAFSSNMVEKYYWAIVEQPRDSGVCQWVEGLSSEFTEIIHWIQFNPRKNKSVAHNEQGRGRKKAILRCRLAGKGRDYLFLEVNLVTGRHHQIRAQFEKLGLHIKGDLKYGARRSERDGGIRLHARSLSFPRVEDPGPGVRRITVRANPLIIVSTAERVLTSEGSPPDKLWQAFELAVDNFLTIDKASPERL

SEQ ID NO: 511 - DNA, 747 bp, Unknown
  Obtained from environmental sample
  misc_feature (1)..(747): n is a, c, g, or t
atgcttgccttcgccacggaaataggcatgaaaggtctcggttacatttccgttcttgaagacgattcgctaaagggaccaatcgttaaatttctttcagcggagaaacagaccgcgcttaggaaaaacctctctcttaaaaaaagcgacaccctgtttttcatagcggacacgcccaagctggtgaacggccttgcggggcagatccgcgccgctctcggcgaacagttaggactaatcaacaagaacaagtttgagttctgctttgtcgtagacttcccgatgttcggcacaaacgaggaaacaggcgcggttgaatttacacacaatcctttctccatgccacagggcgggcttgaggctcttaacacaaagaatccgcttgatattctcgcgtggcagtacgacatcgtgtgcaacggcgtggaactttcctcgggcgccgtgcgaaaccatctgcccgaagttatggtaaaagcgtttgaaatagccggctacacccaagccgacatagaaaccaaattttccgctttattcaacgccttccactacggcgcaccgcctcacgctggcatggctcccggcattgaccgcattgtgatgcttcttgcggacgaagaaaatatccgcgaagtaaccgcgttcccaatgaacagtaacgcgcaggatctgctaatggaagcgccatgcgaagttacggaacaacagttgcgcgaagtgcatattaaaataagacagaagcattaa

SEQ ID NO: 512 - protein, 248 aa, Unknown
  Obtained from environmental sample
  DOMAIN (1)...(66): GAD domain
  misc_feature (1)..(248): Xaa is any amino acid
MLAFATEIGMKGLGYISVLEDDSLKGPIVKFLSAEKQTALRKNLSLKKSDTLFFIADTPKLVNGLAGQIRAALGEQLGLINKNKFEFCFVVDFPMFGTNEETGAVEFTHNPFSMPQGGLEALNTKNPLDILAWQYDIVCNGVELSSGAVRNHLPEVMVKAFEIAGYTQADIETKFSALFNAFHYGAPPHAGMAPGIDRIVMLLADEENIREVTAFPMNSNAQDLLMEAPCEVTEQQLREVHIKIRQKH

SEQ ID NO: 513 - DNA, 345 bp, Unknown
  Obtained from environmental sample
  misc_feature (1)..(345): n is a, c, g, or t
atgatcattgagggcggtttcgccgccgaatcgatcatcgttgacggctttgatttttccaacgccggtcgtgagcaaatcgccaagattaaggcctttgccaaagaattggggctttcggtctggtacagttgcactgtaaaagaaaacagccaactccagtacgataacgacaagatacctatggcgatcaaggattatgccgatcttgttgacattgtaatcgtgctggagccaaaggcggatcacattgaactttcggtttccaaagaccgcgacgcccgcggcattacaaccctggcgatgcggcttgatcccaagacgctgttgattcaagaagaataa

SEQ ID NO: 514 - protein, 114 aa, Unknown
  Obtained from environmental sample
  misc_feature (1)..(114): Xaa is any amino acid
MIIEGGFAAESIIVDGFDFSNAGREQIAKIKAFAKELGLSVWYSCTVKENSQLQYDNDKIPMAIKDYADLVDIVIVLEPKADHIELSVSKDRDARGITTLAMRLDPKTLLIQEE

SEQ ID NO: 515 - DNA, 636 bp, Unknown
  Obtained from environmental sample
  misc_feature (1)..(636): n is a, c, g, or t
ttgnacgtggagattctggaaactcagcgccagggtctgttcaagaaaggtcatgtacggataaaggttcataccgacaggcctgtgacgcggaaaaaacaggctgaggccggtgatggagaaaaagcgcgacaggaacgttcccgtcaaccagtctttggcgatcccgccgctcagaatgaatttgagaaaaaaataattggctttgtcgaggaacttatcagacggatgggttacgtgggaaaagtttcggtcatgtttcgggatgaatccaaacttggcctcaagatcgattccgaacattcttccatactaattgggaaaaaagggaaaaaccttgatgcccttcagcttctggtgaatatctatgccgggaggcagggccgtgaagacatgcgggttattctggacagtgaaaattaccgcatacgacgcgaagaatcgctggtacggcttgcctatactgtcgccgaccgcgtccgggaaagccgtacttcggtactgcttgaaccgatgaatccctttgatcgccgcctaatccacactacgttaaacgacataaccgatatagaaaccaagagcgaaggcgatggcctgtacaaacaggtaagggtctttttccgtggcgtgaaataa

SEQ ID NO: 516 - protein, 211 aa, Unknown
  Obtained from environmental sample
  DOMAIN (153)...(208): R3H domain
  misc_feature (1)..(211): Xaa is any amino acid
MXVEILETQRQGLFKKGHVRIKVHTDRPVTRKKQAEAGDGEKARQERSRQPVFGDPAAQNEFEKKIIGFVEELIRRMGYVGKVSVMFRDESKLGLKIDSEHSSILIGKKGKNLDALQLLVNIYAGRQGREDMRVILDSENYRIRREESLVRLAYTVADRVRESRTSVLLEPMNPFDRRLIHTTLNDITDIETKSEGDGLYKQVRVFFRGVK

SEQ ID NO: 517 - DNA, 753 bp, Unknown
  Obtained from environmental sample
  misc_feature (1)..(753): n is a, c, g, or t
gtgaaggtgcgggaattttcccagtattcgcgccggcgctgttccacctcgcgcggttcatatcctttggggagcgcgtcttccgccatacagtcctctcttgaaaacgccgcgcacggcaaccggacggcgggttcccttggctttcaggctggaatatcctatgttgccgccatgctcgaacccgtatatctcctctgggacaagtcccatatctggggattgaccgcatggtgggccttggcgtccatgggagtgccccatcgtctgctcaaggctgcatccatagcgcagggagcgctttctggcaagcctccctcggtgttgctggcgccgggcggcacagcccgcctcaagtcagaggctctaggcgcggcaggccgcgccgccatccgcgcctacatcgccaaaggcggacactaccttggtttttgcggcggtgccggtcttgccctgtccggagaagaaggtctcggcctctgcccctggaaacgggccgcgtacagcaatcggctgcatcattttctttccgggcatatctatgtccaaacgcttgcggaacacccgctgacgcccccggatgcggatgcgccgctgcccctgccggtatggtggccgggccgctttgccccacnagaggcggatgaagtggaaagtctcgcctcctacctgtatcccgcgggagacgtccggctggctgatctgcccctgtccgcgctgccttccgggacgcgggacacaggggagacgtga

SEQ ID NO: 518 - protein, 250 aa, Unknown
  Obtained from environmental sample
  misc_feature (1)..(250): Xaa is any amino acid
MKVREFSQYSRRRCSTSRGSYPLGSASSAIQSSLENAAHGNRTAGSLGFQAGISYVAAMLEPVYLLWDKSHIWGLTAWWALASMGVPHRLLKAASIAQGALSGKPPSVLLAPGGTARLKSEALGAAGRAAIRAYIAKGGHYLGFCGGAGLALSGEEGLGLCPWKRAAYSNRLHHFLSGHIYVQTLAEHPLTPPDADAPLPLPVWWPGRFAPXEADEVESLASYLYPAGDVRLADLPLSALPSGTRDTGET

SEQ ID NO: 519 - DNA, 819 bp, Unknown
  Obtained from environmental sample
  misc_feature (1)..(819): n is a, c, g, or t
atgagtcccgaaaacaggctgccgctggtaataaaatcattgaagatgctggtggaagaactgaacggcgccgataaagtggctatctgcgtgtacgcgggggcggcgggaaccgtattgccacccacaagcatcgacaacaaaaaagccatattggccgcgttggcaaaattaagctccggcggctctaccgcgggcggtgaaggaattgcgcttgcctataatttagctgaacaaaactttaatccgcaggcggtaaaccgcgttatcctgtgtaccgacggcgattttaacgtggggattaccaaccgcggcgatcttattgatcttgtaacccaaaaagcaaagaccggggtatatttaacggtgctgggttttggcatggataattttcaggacgggacattgaaacagctcgcctccaaaggcaacggcaattatggttatatagacactatagaagaagcgcgtaaaattcttgtaaatcaattaagcggcacgttaattaccattgcggaagatgtaaaaatccaggttgaatttaatcccgcgaacgtcggcgcgtacaggcttataggatatgaaaaccgcgtaatgcgcgatgaggattttaacaacgacgcagaagacgccggcgacataggcgccggacacgccgttaccgctttttatgaaatcatacctccggnggcggaagcgggcgccttgccccggcgcgatctcctaaaatacgcgccgtcgcccacagactacaaaccccgatttcaggatgaactgntaaccgtaaaaaccgttaataaactgcgggcgagagcgtga

SEQ ID NO: 520 - protein, 272 aa, Unknown
  Obtained from environmental sample
  DOMAIN (1)...(164): von Willebrand factor type A domain
  misc_feature (1)..(272): Xaa is any amino acid
MSPENRLPLVIKSLKMLVEELNGADKVAICVYAGAAGTVLPPTSIDNKKAILAALAKLSSGGSTAGGEGIALAYNLAEQNFNPQAVNRVILCTDGDFNVGITNRGDLIDLVTQKAKTGVYLTVLGFGMDNFQDGTLKQLASKGNGNYGYIDTIEEARKILVNQLSGTLITIAEDVKIQVEFNPANVGAYRLIGYENRVMRDEDFNNDAEDAGDIGAGHAVTAFYEIIPPXAEAGALPRRDLLKYAPSPTDYKPRFQDELXTVKTVNKLRARA

SEQ ID NO: 521 - DNA, 348 bp, Unknown
  Obtained from environmental sample
  misc_feature (1)..(348): n is a, c, g, or t
atggaaaatgaaaagaaactggtcatacttgtagacgataaccttgccaatcttaagatcggcaataattttttggaagagaaatataccgtcgccaccgctccgtcggccgcaaaaatgttcggccttttaaaaaacaacacccccgctataattcttctggatattgacatgccggaaatggacggctatgaagctatcaaaatactcaagtcaaatccggaaacgaaaaatattccggtgatctttcttaccgcanaaaacgaatccgagaatgaactggaaggtctttccctgggcgcgattgactatatcaccaagccgttcaatccggccctgcttctttaa

SEQ ID NO: 522 - protein, 115 aa, Unknown
  Obtained from environmental sample
  DOMAIN (6)...(115): Response regulator receiver domain
  misc_feature (1)..(115): Xaa is any amino acid
MENEKKLVILVDDNLANLKIGNNFLEEKYTVATAPSAAKMFGLLKNNTPAIILLDIDMPEMDGYEAIKILKSNPETKNIPVIFLTAXNESENELEGLSLGAIDYITKPFNPALLL

SEQ ID NO: 523 - DNA, 690 bp, Unknown
  Obtained from environmental sample
  misc_feature (1)..(690): n is a, c, g, or t
atgatcggcgagagcgcctttattgattgcgggttttatgacgttattccaatatcgttggaaagggacgctcttaatttcaaactgaatgaaataaaacctaaatatgtttttataaatagcgaattttactcgtgcgtaacgccttttaagataggctcgcttcatgaagattttcccgatttaaatatcaacattgttaatttcggcaattttcccgacagtctcgcggtgcgcttcttttatcatggggctaaatcctatctcaatgttaatgacggcattaaagaatttaaaaacggtctaaaaacaattaaggcaggtgaaaattattattccccgggcgttgacaggtatataagagaattagatgatattaaaaatcttagaacatatacaactgaccgtgaatggcaggttttatttcttatctgtaacgggtttcttaacgaagggattgctttctatctttcgataagcgaaaagacggtagaaaatcacattcttaatttgtataggatatttgacgttggcaacagattaaatttagcaagaaaagccgataaaatgggatggattaaaaaaaaggaattagtctttaacggcgatgatataaaaatcccgaaaaatcctacaaagaaaagaatgaaaaaaattgcccccttgcatggcgggggcgggttttgttaa

SEQ ID NO: 524 - protein, 229 aa, Unknown
  Obtained from environmental sample
  DOMAIN (130)...(187): Bacterial regulatory proteins, luxR family
  misc_feature (1)..(229): Xaa is any amino acid
MIGESAFIDCGFYDVIPISLERDALNFKLNEIKPKYVFINSEFYSCVTPFKIGSLHEDFPDLNINIVNFGNFPDSLAVRFFYHGAKSYLNVNDGIKEFKNGLKTIKAGENYYSPGVDRYIRELDDIKNLRTYTTDREWQVLFLICNGFLNEGIAFYLSISEKTVENHILNLYRIFDVGNRLNLARKADKMGWIKKKELVFNGDDIKIPKNPTKKRMKKIAPLHGGGGFC

SEQ ID NO: 525 - DNA, 780 bp, Unknown
  Obtained from environmental sample
  misc_feature (1)..(780): n is a, c, g, or t
atggttatattaaaaataaatcataataaaaggcataattggcggtgtttttgcgcgggcttgatagttatgcaggccatttttgccgggcagcttgccgccgcgccgctggactcaggctttgcccttgcccctaaagcgtccgcttccccggatgaaaaggacgccgcataccgggaagccagggcccgccttctcgcggcggccggaaaatacgaacgcacgccctaccgttacggcggaatggatcgaaggggccttgattgttcgggttttgtgttcgttagtttccttgatgccttgggagtttccgtgccaagaaacgctgaaagcctgtattcctgggttgaaaggattaatattgtaaatgcccagccgggcgatcttgtatttttcaggacgaccaaaaccaataaaatttcgcatgtggggatatttaccggcgacgggcgctttatccactccgcctcagatgggccggtaacaggggtcatatattcaagacttgacgaaaagtactggtcccgcacttacgccgggactggaagggctttcccggcggccggtacatatgacagcgctgacagggaaaacgccctgacaacgggtcagaaagaacgcggcaaagaaaagacctcggctggaaggcaaaaagacaggggcatcctgattggtttcgctgccgcgccgacatggaatttcgccgacggcaatgtcatcaggggagcggcggggcagttctgttttggggcggttgtccgcccgtttgctcacagatga

SEQ ID NO: 526 - protein, 259 aa, Unknown
  Obtained from environmental sample
  SIGNAL (1)...(29)
  DOMAIN (74)...(183): NlpC/P60 family
  misc_feature (1)..(259): Xaa is any amino acid
MVILKINHNKRHNWRCFCAGLIVMQAIFAGQLAAAPLDSGFALAPKASASPDEKDAAYREARARLLAAAGKYERTPYRYGGMDRRGLDCSGFVFVSFLDALGVSVPRNAESLYSWVERINIVNAQPGDLVFFRTTKTNKISHVGIFTGDGRFIHSASDGPVTGVIYSRLDEKYWSRTYAGTGRAFPAAGTYDSADRENALTTGQKERGKEKTSAGRQKDRGILIGFAAAPTWNFADGNVIRGAAGQFCFGAVVRPFAHR

SEQ ID NO: 527 - DNA, 471 bp, Unknown
  Obtained from environmental sample
  misc_feature (1)..(471): n is a, c, g, or t
ttgatgccggttaacatgacggatttttctctttcagagtcgccttacggggctttaggtatggctgttaatgttacaaagtttttatctatgcgcaccggagtaatggtaaaatctggaagcagccgtattactgtcggcagcgccatcgacatggataaaatttcttttgatataaactatactctggatttgcttacgcagttacagccccttaacaggatcagtcttgcggtgcgttttgatttaggcgacggaggcagggggcttttgtcaaaaaaagtagatgaattgtatattttgggtcttgaggcttattcaaaaggaaatctggacgacgccagattatgctgggaagaagcgcttaaacttaatccgaaatacgatcctgcccgtgaaagccttgatatgctggaaagccgcgaaggtttaaaacaaaaaatcgaagacctttataaactggatttctag

SEQ ID NO: 528 - protein, 156 aa, Unknown
  Obtained from environmental sample
  DOMAIN (95)...(128): Tetratricopeptide repeat
  misc_feature (1)..(156): Xaa is any amino acid
MMPVNMTDFSLSESPYGALGMAVNVTKFLSMRTGVMVKSGSSRITVGSAIDMDKISFDINYTLDLLTQLQPLNRISLAVRFDLGDGGRGLLSKKVDELYILGLEAYSKGNLDDARLCWEEALKLNPKYDPARESLDMLESREGLKQKIEDLYKLDF

SEQ ID NO: 529 - DNA, 648 bp, Unknown
  Obtained from environmental sample
  misc_feature (1)..(648): n is a, c, g, or t
ttgatgaaattgaaaaaagcccaccgcgatgtttttaacctgtttctgcagtatggggaagaaggtgaactgcgcgacaatntgggtcatacggtcagcttccgcaacacggttatcataatgaccagcaacgccggtgtgcgggaaatttcccgcgactcccgattgggcttcgcctccggttccggccagatgagtatggaagaaattgaatcgcaggcaatgtcggaactcaaacggctgttcaaccccgaattcctcaaccgcgttgatgacgtggttgttttccatcccctcagcatggagcagatagaggcgatttttgacattgagttacatgagctttccgcccgtcttgcggagcaaaattaccgcatacgcgttctaccctccgcccgccgcttcctcattgaaaagggctgggatcccaaattcggcggacggcccctgcgccgcacgattcaaaaagaactggaagacccgctggcgcagatgttactggtacgcggctggcctgccggcacggtgtttaacgccggatgccgcgaaggaaaaataaaactcatcggcaaggctccgtttattgaaagcgacaacgatgaagccctgatcggcgaggaattggtaatgcatgaaaatggcgcttga

SEQ ID NO: 530 - protein, 215 aa, Unknown
  Obtained from environmental sample
  DOMAIN (1)...(93): ATPase family associated with various cellular activities (AAA)
  misc_feature (1)..(215): Xaa is any amino acid
MMKLKKAHRDVFNLFLQYGEEGELRDNXGHTVSFRNTVIIMTSNAGVREISRDSRLGFASGSGQMSMEEIESQAMSELKRLFNPEFLNRVDDVVVFHPLSMEQIEAIFDIELHELSARLAEQNYRIRVLPSARRFLIEKGWDPKFGGRPLRRTIQKELEDPLAQMLLVRGWPAGTVFNAGCREGKIKLIGKAPFIESDNDEALIGEELVMHENGA

SEQ ID NO: 531 - DNA, 708 bp, Unknown
  Obtained from environmental sample
  misc_feature (1)..(708): n is a, c, g, or t
atgatagaccctccccaggtttcggaattcgccagccgcatggaagaacccatgggaaacggtacagaggcgattcggatttccaacctgtgccattggtatgagccgggcaggatcatacttgaagggataaacctgtcaatcgcggatggcgagtttgcgacgattatcggccaaaacggatccggcaagacaacgctgttaaaaaatatcagcggccttttgcgcccgcgccagggtgaaattttcatccggggaaagaatatgaccggggcggacccgactgaaatcgccaaagaagccggatatgtgatgcaggatcatgacaaccagctttttgaacaaacggtattcgacgaggttgcgttttccctgaagcgtatatgtacaaaaaaggaaatcacgcggaaggttgaagaggcgcttgagaccgtcggcctcatggacaggaaggacgccttcccccccgccctgccccactgtgaccggataaaggttgttttcgcggcagtgctcgcgatgggcacgggtattctgctcctggacgagcccgtcgccggccaggacagccgcggctgccgcatgatcatggacataatagcggggctgcaccaaaagggcaaaacggttctcttgattacacataacatcggcgttgccgcgcgttacgcccgcaggttaatcgtaatgaagaacngggcgtattga

SEQ ID NO: 532 - protein, 235 aa, Unknown
  Obtained from environmental sample
  DOMAIN (51)...(233): ABC transporter
  misc_feature (1)..(235): Xaa is any amino acid
MIDPPQVSEFASRMEEPMGNGTEAIRISNLCHWYEPGRIILEGINLSIADGEFATIIGQNGSGKTTLLKNISGLLRPRQGEIFIRGKNMTGADPTEIAKEAGYVMQDHDNQLFEQTVFDEVAFSLKRICTKKEITRKVEEALETVGLMDRKDAFPPALPHCDRIKVVFAAVLAMGTGILLLDEPVAGQDSRGCRMIMDIIAGLHQKGKTVLLITHNIGVAARYARRLIVMKNXAY

SEQ ID NO: 533 - DNA, 336 bp, Unknown
  Obtained from environmental sample
  misc_feature (1)..(336): n is a, c, g, or t
atgtatcagatcggccgagtattcgagaatttagtggtggctgaggcgctcaaggcaaattacaacataggacagagcgcgaatatgttctactaccgcgaccgcgaaggcttcgagatagacctcatcctgccgagaggaggcgacatcctgccgatagaggtaaagtcaggttcaaccttcgatcccctgttcgccaaaaatataaagcgcttccacaccttcgcggaaaatatcctggacggatacgtcgtctactgcggagcggagagcgaccgcgtgccgagggtcaagtacatcaacttccgtgatgtgggcggggtcgtgcaggggtag

SEQ ID NO: 534 - protein, 111 aa, Unknown
  Obtained from environmental sample
  misc_feature (1)..(111): Xaa is any amino acid
MYQIGRVFENLVVAEALKANYNIGQSANMFYYRDREGFEIDLILPRGGDILPIEVKSGSTFDPLFAKNIKRFHTFAENILDGYVVYCGAESDRVPRVKYINFRDVGGVVQG

SEQ ID NO: 535 - DNA, 459 bp, Unknown
  Obtained from environmental sample
  misc_feature (1)..(459): n is a, c, g, or t
atgaaaaaaggaagccttgccgacattatgaggggcgccgacgtgttcataggcgtttccgcgcctaaaacggttacagccgaaatggttaagtcaatgtcgcgtaaccctatactgttccccatgtccaaccccgtcccggagatcatgcccgacgaggcaaaagccgccggagccgccatagtgggaacaggccgcagcgattttgccaaccagataaacaacgtccttgccttccccggcattttccgcggcgcgcttgatgtccgcgcgagcgacataaacgaagaaatgaaaatcgccgccgcatacgcattagctaacctaatcagcgataacgaattgcgtcccgattacataattcccgcggcctttgacccgcgcgtgaaagacgcggtggcctcggcgacggcggaagcggcgaggaaaagcggagtagcgagactaattttttcttaa

SEQ ID NO: 536 - protein, 152 aa, Unknown
  Obtained from environmental sample
  DOMAIN (2)...(142): Malic enzyme, NAD binding domain
  misc_feature (1)..(152): Xaa is any amino acid
MKKGSLADIMRGADVFIGVSAPKTVTAEMVKSMSRNPILFPMSNPVPEIMPDEAKAAGAAIVGTGRSDFANQINNVLAFPGIFRGALDVRASDINEEMKIAAAYALANLISDNELRPDYIIPAAFDPRVKDAVASATAEAARKSGVARLIFS

SEQ ID NO: 537 - DNA, 417 bp, Unknown
  Obtained from environmental sample
  misc_feature (1)..(417): n is a, c, g, or t
atgtttcatccgccacctcaaatgctggtgatagaaaggcaaagggacattgccgtgcttaaggtgacaggcgctggcgcaaggggaataacgaatgtctttctctggggtagcttcctcacgggcctgtgcggcgcgattataggcattgccgccggtcttttactcggtaatttcatcaatcacgttatccgctcattggaaaaatttttaagttttttcagcaggctggccggcggttcggaggtaaagattctggatcccggtttctaccttgaaactatacctatagtcatcgactggaaagccgtattcctgatcggctgttttacggtgttgtgttccgtgcttgcctcatggctccccgcaacgcgcgcgggaaagctgaaaccgatggaactgttaagaaaaaattag

SEQ ID NO: 538 - protein, 138 aa, Unknown
  Obtained from environmental sample
  DOMAIN (6)...(131): Predicted permease
  misc_feature (1)..(138): Xaa is any amino acid
MFHPPPQMLVIERQRDIAVLKVTGAGARGITNVFLWGSFLTGLCGAIIGIAAGLLLGNFINHVIRSLEKFLSFFSRLAGGSEVKILDPGFYLETIPIVIDWKAVFLIGCFTVLCSVLASWLPATRAGKLKPMELLRKN

SEQ ID NO: 539 - DNA, 426 bp, Unknown
  Obtained from environmental sample
  misc_feature (1)..(426): n is a, c, g, or t
ttggatcaattaggatatattatactaggggggaggaatatggaaacagccgcttttttaaataattcaggtatcgcgctgacagaggcgaatcgtccttatgaagcgattcccctgttccgcaaggctctgggcatggagccggaaaacccgttgttgtggctcaatctggggatcgcccaacagcgcaccggaaattatgaagaagctataaactgctttcataaagcgctcaacatagacgattgccttggcgaagcctggctttccatgggccttatccattatgaaatggaagaattcgaactatgcgaggattgttacagatccgcattgggcgcaaacgaggatgatccaaaagcctggaaacatctgggagttttatcttttacaagggagaatatgaagaggccggcaatgttttga

SEQ ID NO: 540 - protein, 141 aa, Unknown
  Obtained from environmental sample
  DOMAIN (51)...(83): Tetratricopeptide repeat
  misc_feature (1)..(141): Xaa is any amino acid
MDQLGYIILGGRNMETAAFLNNSGIALTEANRPYEAIPLFRKALGMEPENPLLWLNLGIAQQRTGNYEEAINCFHKALNIDDCLGEAWLSMGLIHYEMEEFELCEDCYRSALGANEDDPKAWKHLGVLSFTRENMKRPAMF

SEQ ID NO: 541 - DNA, 408 bp, Unknown
  Obtained from environmental sample
  misc_feature (1)..(408): n is a, c, g, or t
ttgaattcgcccgttcgctgtccgctgtcgaataaaaaacgttcctctcggcgaattcacgttttgggatacagttcaaaagaactgcgggaaagatcacataatcctgaaaaatattatgggtacaagcaccttttgatgcatcattccatgggggcgctgcccctgcacatgaacctcttgcgcgcctccgccagggaggccgaaattgcggcagccgctatcctgcgcgagccgattgtttccaatcccgagttttgcgagccgcaggatgccgtaaaacgctgccgcaaagacattgtagaagcgttaaacagtctttcaagcttgttctacattttaatttataaatatcttccaaaaaactattcccctgtcggaacgatgaatggagtcatgaaatgttaa

SEQ ID NO: 542 - protein, 135 aa, Unknown
  Obtained from environmental sample
  misc_feature (1)..(135): Xaa is any amino acid
MNSPVRCPLSNKKRSSRRIHVLGYSSKELRERSHNPEKYYGYKHLLMHHSMGALPLHMNLLRASAREAEIAAAAILREPIVSNPEFCEPQDAVKRCRKDIVEALNSLSSLFYILIYKYLPKNYSPVGTMNGVMKC

SEQ ID NO: 543 - DNA, 480 bp, Unknown
  Obtained from environmental sample
  misc_feature (1)..(480): n is a, c, g, or t
ttgaaacccagccgcggttatttcggcaaaatcgtgactacgcataaatatgacgatagggtggccaccgtccgtagggcgaaggcggcgggattgcgtgtgtgctgcggaggcattttcggcgttggagagagctgggaggataggatcgcgctgtgtttggagttgcgggggttgggtgttgacaccgtgcctataaattttctgaacgcgattgagggaacgcgggtaaagccgcctaaggagacgccgtttgagtttttgaaaatcgtttcgctgtttagattggcaatgcctaaggcgactatcaaggtttgcggtgggcgggagaagaatttgggagtattgcaaccgttgatttttcaggccggggctaatggatacattaccggcgggtatttgactaccgggggggcgggggtggatgcggacgacgggatgattgaggcgatggggttatctcggattccacgattgtga

SEQ ID NO: 544 - protein, 159 aa, Unknown
  Obtained from environmental sample
  DOMAIN (65)...(155): Biotin and Thiamin Synthesis associated domain
  misc_feature (1)..(159): Xaa is any amino acid
MKPSRGYFGKIVTTHKYDDRVATVRRAKAAGLRVCCGGIFGVGESWEDRIALCLELRGLGVDTVPINFLNAIEGTRVKPPKETPFEFLKIVSLFRLAMPKATIKVCGGREKNLGVLQPLIFQAGANGYITGGYLTTGGAGVDADDGMIEAMGLSRIPRL

SEQ ID NO: 545 - DNA, 486 bp, Unknown
  Obtained from environmental sample
  misc_feature (1)..(486): n is a, c, g, or t
ttggccgagcgtggtggagatgaacgagcaccagaagcgccgttttgtgaaaatatgcttcgagcgatgttcaacaccgtggccggcaagagaatagcgctcttaggattcgctttcaaggccgacaccggcgacactcgggaatcaccggcgatagacgtggccgttcaactcgtaaaagaacacgcgaacgtggttatatccgaccccaaggcgcttgacaacgcgaaaatcgacttagccgactgtggcgttgacaatgtggaattcgtgaaagatccctacgaagcggccaaaggcgcgcacgccattgccgtgatgacggagtggaatatgtacaaagagctggattatgggaagatatacgcggaaatggagcgtccggcgtttatttttgacggcaggaatgtgttgaaccataaggcgctgttcgaaatgggattcaacgttttcccattaggacaaccggcgttgaagcacttttaa

SEQ ID NO: 546 - protein, 161 aa, Unknown
  Obtained from environmental sample
  DOMAIN (33)...(140): UDP-glucose/GDP-mannose dehydrogenase family, UDP binding domain
  misc_feature (1)..(161): Xaa is any amino acid
MAERGGDERAPEAPFCENMLRAMFNTVAGKRIALLGFAFKADTGDTRESPAIDVAVQLVKEHANVVISDPKALDNAKIDLADCGVDNVEFVKDPYEAAKGAHAIAVMTEWNMYKELDYGKIYAEMERPAFIFDGRNVLNHKALFEMGFNVFPLGQPALKHF

SEQ ID NO: 547 - DNA, 312 bp, Unknown
  Obtained from environmental sample
  misc_feature (1)..(312): n is a, c, g, or t
ttgcggatcgtggacaaagacctngtcttcaccgctatctatagggatgaggagacaaaattcccatatatcaagcggtttaaggtggagcagttccaattgaacaagggctatgccatcgttcccgataattgcacgctgctacgattaacgacggacccggacgcggtggtaacgatagagtacaaacccaagccgcggttgaaagtgctggaggagaacttcaaagttaagaacttcttggtgaagggggccaaggctggaggaatcaggctggcgagcaaggagatgaagtcggtgaggatgggatga

SEQ ID NO: 548 - protein, 103 aa, Unknown
  Obtained from environmental sample
  misc_feature (1)..(103): Xaa is any amino acid
MRIVDKDLVFTAIYRDEETKFPYIKRFKVEQFQLNKGYAIVPDNCTLLRLTTDPDAVVTIEYKPKPRLKVLEENFKVKNFLVKGAKAGGIRLASKEMKSVRMG

SEQ ID NO: 549 - DNA, 441 bp, Unknown
  Obtained from environmental sample
  misc_feature (1)..(441): n is a, c, g, or t
atgaacggcggggaaatctccggcaatacttcttctgacgaaggcggcggggtgcatgtgcagtctggtaacgcaaccttcaccatgagcggtggaaaaatttccggcaacaacgcatcaagctatggcggcggggtgtatgcggagggaaccttcaccatgagcggcggagaaatttccggcaacaacgcatcaagctatggcggcggggtgactgtgggttccggcgtaatctttacaaaatcaggcggcggaaccattacgggttatgccagtgatacggtgaacggcaatgtggtgaagaacagttccggcgttgttcagaataactgtgggcatgcggtgtatgttttcggcagcccagccaaacgaagggaaactaccgcgggaccgggagttaatcttgatgcgagtaagagcggctctgcggggggatggtaa

SEQ ID NO: 550 - protein, 146 aa, Unknown
  Obtained from environmental sample
  misc_feature (1)..(146): Xaa is any amino acid
MNGGEISGNTSSDEGGGVHVQSGNATFTMSGGKISGNNASSYGGGVYAEGTFTMSGGEISGNNASSYGGGVTVGSGVIFTKSGGGTITGYASDTVNGNVVKNSSGVVQNNCGHAVYVFGSPAKRRETTAGPGVNLDASKSGSAGGW

SEQ ID NO: 551 - DNA, 372 bp, Unknown
  Obtained from environmental sample
  misc_feature (1)..(372): n is a, c, g, or t
gtgaacttcgtaattaaatctcacgaaaagcctatgaaagacgtgaaatcgcaaatacacatgcgcttctatttgaaatggctcaataaatatgaacgcaggaatgacgaaaatgaaccaataggaattattctttgtacgaaagcaagccgtaaacagattgaattaatggagttagataagtcaggtattgcggttgaggaatattggactaatttaccgcccaaagaagaatttgaaagaaaaataaaagaaatatttatagaagcgcaagaacgtcttgaacgcagaanatcgcttttcaaaggcaacatcttgaaacaactagattatttctacgattcanaagacgatgatnatggagaccagtaa

SEQ ID NO: 552 - protein, 123 aa, Unknown
  Obtained from environmental sample
  misc_feature (1)..(123): Xaa is any amino acid
MNFVIKSHEKPMKDVKSQIHMRFYLKWLNKYERRNDENEPIGIILCTKASRKQIELMELDKSGIAVEEYWTNLPPKEEFERKIKEIFIEAQERLERRXSLFKGNILKQLDYFYDSXDDDXGDQ

SEQ ID NO: 553 - DNA, 609 bp, Unknown
  Obtained from environmental sample
  misc_feature (1)..(609): n is a, c, g, or t
gtgacacctaacgccctcgacagattaatcactttattttccaaactgccgggcatcggtaaaaaaagcgccggcagaatcacctaccacctgcttgactcaagccccgcccttgcgcaaacctttgcaaaagaactctctgaacttcatcaggcgataagacgctgcagtgtctgcggcggttttaccgaagacgatccttgcgctgtctgttccaacactgagagagaccattcaatcatctgcgtagttgaaagcgcgcaagatatgcgaattattgaagactcgcatgagttccccggagtctatcatgttctcggcggattaatcgcgccgctggaaggagtaagccccgcaaatctttccatagataaactaattaaccgtctccgcgccgacgccccaaacggcgcgcgcgtaaaggaattaatcctcgcgctgaaccccacagtcgaaggggacacaacggcgctgtatcttcaaaagactctaaaagatttccccgtggagatttcccgtctcgcttcgggaatgcctgtcggggggaatattgagtatattgacaagcttacgctctcacggagttttaggggacgggtgaaagtgtaa

SEQ ID NO: 554 - protein, 202 aa, Unknown
  Obtained from environmental sample
  DOMAIN (79)...(177): Toprim domain
  misc_feature (1)..(202): Xaa is any amino acid
MTPNALDRLITLFSKLPGIGKKSAGRITYHLLDSSPALAQTFAKELSELHQAIRRCSVCGGFTEDDPCAVCSNTERDHSIICVVESAQDMRIIEDSHEFPGVYHVLGGLIAPLEGVSPANLSIDKLINRLRADAPNGARVKELILALNPTVEGDTTALYLQKTLKDFPVEISRLASGMPVGGNIEYIDKLTLSRSFRGRVKV

SEQ ID NO: 555 - DNA, 570 bp, Unknown
  Obtained from environmental sample
  misc_feature (1)..(570): n is a, c, g, or t
gtgatgaacatttccgtcctggcgctaacctccgtctacccgcgctttaacgaagacgccgaggttccgtggctgcggatatttatgcgcgaacttgccgcgcacgggtgcaacgtgaatatcgccgccccatcctacaaaggactcaaaggccaccgcatcgacggcatacccgtccaccgctacagatacgcgccggcgggtctggagtttttgacccacgatgagggcgccccctccaaaatagcgcgtaacccgttcctgcagcttttggccgtcccctacctaatatcgggttcgttgaaaaccctcctcttgtgcctaaaactaaaacccgatattatccacgtccattggcccttcccgcacgcctttatggccctcttcgcgcgcttctttcgcagacggacaaaaatcgtgctgacattctacagcgcggagcttctgctcgccaaaaagaaaaaatggatcagaccgatattgaaaagattcattaagcgggccgactcggtcatagcgataagcgccttcgccaaagacaccgtaaaaacatcttcaacagagagatga

SEQ ID NO: 556 - protein, 189 aa, Unknown
  Obtained from environmental sample
  misc_feature (1)..(189): Xaa is any amino acid
MMNISVLALTSVYPRFNEDAEVPWLRIFMRELAAHGCNVNIAAPSYKGLKGHRIDGIPVHRYRYAPAGLEFLTHDEGAPSKIARNPFLQLLAVPYLISGSLKTLLLCLKLKPDIIHVHWPFPHAFMALFARFFRRRTKIVLTFYSAELLLAKKKKWIRPILKRFIKRADSVIAISAFAKDTVKTSSTER

SEQ ID NO: 557 - DNA, 330 bp, Unknown
  Obtained from environmental sample
  misc_feature (1)..(330): n is a, c, g, or t
gtggatttggtcttctataataggctacttcaatgctatgtgctgattgacctaaagaccggaaagttgaaacatcaagatttgggtcaaatgcagatgtatgtaaactactttgatcgctacgtcaagaccgacgctgagaaaccgactgttggcattctgctgtgcaaggaaaagaacgacaacatagttgaattaacgctgccgaaagacacgaacatctacgcgtcggcgtacaacctttatctgcctgacaaagcgcttctgcaacgtaaactcacagagtgggttgaggagtttgaggaagaacacggggggaactgcaaataa

SEQ ID NO: 558 - protein, 109 aa, Unknown
  Obtained from environmental sample
  DOMAIN (1)...(96): Protein of unknown function (DUF1016)
  misc_feature (1)..(109): Xaa is any amino acid
MDLVFYNRLLQCYVLIDLKTGKLKHQDLGQMQMYVNYFDRYVKTDAEKPTVGILLCKEKNDNIVELTLPKDTNIYASAYNLYLPDKALLQRKLTEWVEEFEEEHGGNCK

SEQ ID NO: 559 - DNA, 330 bp, Unknown
  Obtained from environmental sample
  misc_feature (1)..(330): n is a, c, g, or t
atgaaccaatccgttaaaacagaactcgacaaaatcgtaaacacgctggccgaaactgggatcgtaaccaaaatcatcctgttcggctcttacgctaagggagacgagacccccgacagcgacattgatttgtgcgtcatcacgccggtaaacgataaacgccctattgaactcatgtccggcttcagaaaaaaactacgcggtgtcaagactatgccgctagacttattagcttttaatcagaatgatttttcttatcgcgcggcatacgccggttcgcttgaacacgaattcgcaaaggaaggcatggtgctgtatgagcacaaataa

SEQ ID NO: 560 - protein, 109 aa, Unknown
  Obtained from environmental sample
  DOMAIN (5)...(106): Nucleotidyltransferase domain
  misc_feature (1)..(109): Xaa is any amino acid
MNQSVKTELDKIVNTLAETGIVTKIILFGSYAKGDETPDSDIDLCVITPVNDKRPIELMSGFRKKLRGVKTMPLDLLAFNQNDFSYRAAYAGSLEHEFAKEGMVLYEHK

SEQ ID NO: 561 - DNA, 594 bp, Unknown
  Obtained from environmental sample
  misc_feature (1)..(594): n is a, c, g, or t
atggggttatcaatgcaggaaaaaaaagctcttacaagagaaataagtaaacggtatcaaaaagcggagaaaaaagagaagactgaaattcttaacgaactggttaaaacaacaggatataaccgtaaatacattttacacgtcctcgccaattggggaaaaacttcagtagtccgacaccactgcggaacgtctgattcaggagagttttgcctcactcttaccgccactgacgtgtattcaggctgggttgaactgcgccctacgctgaacaaagcgaacaagtgggtttttcaagccctgttggacataaaatcttccatccctttccccctcacgggcatagacagagacaacggtgcagagtttatcaattttgccctgctcaaatggtgctgcgacgagcgtatccagttcacgcgtacaaggacgtaccgtaaaaacgacaactgtttcgttgaacaaaaaaactgcacctgcgtcagaaacttcgtcggttattaccgtttctccgccgcagccgaatgcgatgctctgtccgcagtttatcgttctctgtgccccttgatgaatttctttatgcctaccatttaa

SEQ ID NO: 562 - protein, 197 aa, Unknown
  Obtained from environmental sample
  DOMAIN (58)...(193): Integrase core domain
  misc_feature (1)..(197): Xaa is any amino acid
MGLSMQEKKALTREISKRYQKAEKKEKTEILNELVKTTGYNRKYILHVLANWGKTSVVRHHCGTSDSGEFCLTLTATDVYSGWVELRPTLNKANKWVFQALLDIKSSIPFPLTGIDRDNGAEFINFALLKWCCDERIQFTRTRTYRKNDNCFVEQKNCTCVRNFVGYYRFSAAAECDALSAVYRSLCPLMNFFMPTI

SEQ ID NO: 563 - DNA, 312 bp, Unknown
  Obtained from environmental sample
  misc_feature (1)..(312): n is a, c, g, or t
atgctaaaactacaggacgtaacggtggtgtaccccgataagacgaaggcgattaataacattagcttctcgttaggcgaaaacgaaagcgtggcgataatcggcgaaaacggcgccggaaagacgacgctattgcttgctatagtcggaatactcgagttatcggacggcaatattgaaataaacggcgtacagcttactaaaaagaacgtaaacgagatccgcaaacagatcggtctggtattccaaaaccccgacgaccaatattctgccgcgaatatactcggccatctgatattgaannnnnaataa

SEQ ID NO: 564 - protein, 103 aa, Unknown
  Obtained from environmental sample
  misc_feature (1)..(103): Xaa is any amino acid
MLKLQDVTVVYPDKTKAINNISFSLGENESVAIIGENGAGKTTLLLAIVGILELSDGNIEINGVQLTKKNVNEIRKQIGLVFQNPDDQYSAANILGHLILXXX

SEQ ID NO: 565 - DNA, 612 bp, Unknown
  Obtained from environmental sample
  misc_feature (1)..(612): n is a, c, g, or t
atgatggcgctctcggaaacgccgtactcaatgttgctaaagcgatttttgatagcgttgcccttttgcctttttgccggaatagcaaatgtgatattcgataatgccgtagcgtntacggtaggcgccgtgacggtcagttacggtacggtctctctgttcaccctgctgtttaagacatatttatgcgttatggccgtgttgttgctggtttccgtgacgccgcttgcgggaattacggactcgatgcgccgcttgaaagttccgggtatatttgtcgccatgtttgaaatgacctaccgttatgtcggcgtgttgttctcggaagcgtactccatgcataccgcctataccctgcgaagcgccggcggaaagggtatagctatgaaagatatgggcagttttgtaggacagctgttgctccgcagcatagaccgcgccgaccgcgtctacaacgcaatgaagtgcagaggttactccctgcatattacacaacgtagttgcaggaaaatcaaatggcaagacatactcttttgcgccgtagtctgtttattatgcgcaacgttccgcgttattaatgtaaacgcgttattcgtcggagggttaacgtaa

SEQ ID NO: 566 - protein, 203 aa, Unknown
  Obtained from environmental sample
  DOMAIN (1)...(166): Cobalt transport protein
  misc_feature (1)..(203): Xaa is any amino acid
MMALSETPYSMLLKRFLIALPFCLFAGIANVIFDNAVAXTVGAVTVSYGTVSLFTLLFKTYLCVMAVLLLVSVTPLAGITDSMRRLKVPGIFVAMFEMTYRYVGVLFSEAYSMHTAYTLRSAGGKGIAMKDMGSFVGQLLLRSIDRADRVYNAMKCRGYSLHITQRSCRKIKWQDILFCAVVCLLCATFRVINVNALFVGGLT

SEQ ID NO: 567 - DNA, 654 bp, Unknown
  Obtained from environmental sample
  misc_feature (1)..(654): n is a, c, g, or t
ttgaggaaactttacaagatacttgttttggccaggcagatgaaaaaactgaaacaaaccggcggggtcagcattgacggaacaaaaattcatgcgaacgcgagcaaacacaacgcggtaagctacaagcgggccggagaaataataaaagagttgaaggaagaagtgaaacagctgacgcggatggcggatgaggcggacgggaaagcggagaagccggtgatggacatacccggtgaaataaagctgaggaaagaacggaagaaagcgctggaagaagcgaaagccgagatggaaaagatgtatgaggcggcaacggaagaagggactaaaacacggaaaaaactggatgaataccagcataatttcaccgataaggacagccggataatgaaagttggaaaaaaggagcattatgaacagagctacaacgcgcaggcggcagtggacacggaagggagcatgctgatacttggcggatatgtaacgcaaaacgtaaatgacaagaaggaaatggagcctgcggtggcgagcgttgataaagaagcgcgcgaaataaacacaatatgcatggacagcggattttacagtgaagaggcggtagccgcggttgaaaaggcgaataaaaaaaaagagcgaaaatgtcatttataa

SEQ ID NO: 568 - protein, 217 aa, Unknown
  Obtained from environmental sample
  misc_feature (1)..(217): Xaa is any amino acid
MRKLYKILVLARQMKKLKQTGGVSIDGTKIHANASKHNAVSYKRAGEIIKELKEEVKQLTRMADEADGKAEKPVMDIPGEIKLRKERKKALEEAKAEMEKMYEAATEEGTKTRKKLDEYQHNFTDKDSRIMKVGKKEHYEQSYNAQAAVDTEGSMLILGGYVTQNVNDKKEMEPAVASVDKEAREINTICMDSGFYSEEAVAAVEKANKKKERKCHL

SEQ ID NO: 569 - DNA, 510 bp, Unknown
  Obtained from environmental sample
  misc_feature (1)..(510): n is a, c, g, or t
gtggtctcccgttacgaaggcngaaggggcgcccccgccatccggaaaatgttcaaatccatgaagttgttgcacgccttcggtttggccaagaggacgccgttggttacgaacgccggtttttcgggcacgaccaacggctgcttcgtcggccacgtatcgcccgaagcccaggaggggcgcccccatcgccctcgtgcgggacggcgacgcgatcagcatcgacattcccggccagacgctgcacgtggacgtgtcggacgcgaccttggccgagcggcgcgcaagctggcaggcgccggccccgcgcgtgaccgaaggctacctgtacctgtacagccgtctggccgagtccgcggccaagggcgccatcatcaaaaaccgggcggattgacggcaaaaacaaaacgtgcgtgttcaaatccggacatgctcacatcaacccaaaaggatggattcatgaaaacgagcttgctcaaagcgttgctgctctgcgcagtcttaccctga

SEQ ID NO: 570 - protein, 169 aa, Unknown
  Obtained from environmental sample
  misc_feature (1)..(169): Xaa is any amino acid
MVSRYEGXRGAPAIRKMFKSMKLLHAFGLAKRTPLVTNAGFSGTTNGCFVGHVSPEAQEGRPHRPRAGRRRDQHRHSRPDAARGRVGRDLGRAARKLAGAGPARDRRLPVPVQPSGRVRGQGRHHQKPGGLTAKTKRACSNPDMLTSTQKDGFMKTSLLKALLLCAVLP

SEQ ID NO: 571 - DNA, 417 bp, Unknown
  Obtained from environmental sample
  misc_feature (1)..(417): n is a, c, g, or t
atgttatcgcctaaaaaggtaaagtggagaaagacgcagcgcggcaggatgggcggtatggcccagcgttgcaacgaggtgtctttcggggagttcggcctgcaatctacgcagccgggctggatcgacaaccgccagatagaggcggcgcgtatcgctatgacgcgtttcatcaagcgcggcggcaaggtgtggatacgcatattccccgataagcctaccacgaagcatccggccgagtcccgtatgggcaagggcaagggcgcgccggaggggtgggtggccgttgttaggccgggtacggttatgttcgaaatcggcgggatcaaggccgacatcgcgaaggaggccatgaggcttgccgcgcagaagttgcccgtgctcacgcgtttcattgaattggagaagcagatataa

SEQ ID NO: 572 - protein, 138 aa, Unknown
  Obtained from environmental sample
  DOMAIN (2)...(137): Ribosomal L10
  misc_feature (1)..(138): Xaa is any amino acid
MLSPKKVKWRKTQRGRMGGMAQRCNEVSFGEFGLQSTQPGWIDNRQIEAARIAMTRFIKRGGKVWIRIFPDKPTTKHPAESRMGKGKGAPEGWVAVVRPGTVMFEIGGIKADIAKEAMRLAAQKLPVLTRFIELEKQI

SEQ ID NO: 573 - DNA, 744 bp, Unknown
  Obtained from environmental sample
  misc_feature (1)..(744): n is a, c, g, or t
atgaaacgcgtgagcacgggcaacttctgcgcggcaagcctcatggcctccttcgcgatgtcggccttgatcccgccgatttcgaacataaccgtacccggcctaacaacggccacccacccctccggcgcgcccttgcccttgcccatacgggactcggccggatgcttcgtggtaggcttatcggggaatatgcgtatccacaccttgccgccgcgcttgatgaaacgcgtcatagcgatacgcgccgcctctatctggcggttgtcgatccagcccggctgcgtagattgcaggccgaactccccgaaagacacctcgttgcaacgctgggccataccgcccatcctgccgcgctgcgtctttctccactttacctttttaggcgataacattatgcttaccctatcctttcgtcgcttccgcgtttgccctggccgcggccatcgcccgcgacattacctcgcctttgcagatccacaccttgatgccgatgcaaccgtacgtggtgtgcgaagtcgctgtcgcgtagtctatatcggcgcgcaaagtgtgcagggggatgcgaccctccttgaaagtctcggtacgggcgatctcggcgccgttcaaccggcccgaaaccattatctttattccctcggcgcccatacgcatcgcggtggagatcgccttctttatcgcttttttgtaagaaacgcgcttttccacttggcgcgctatgttgtcggccacaagctgtga

SEQ ID NO: 574 - protein, 247 aa, Unknown
  Obtained from environmental sample
  SIGNAL (1)...(21)
  misc_feature (1)..(247): Xaa is any amino acid
MKRVSTGNFCAASLMASFAMSALIPPISNITVPGLTTATHPSGAPLPLPIRDSAGCFVVGLSGNMRIHTLPPRLMKRVIAIRAASIWRLSIQPGCVDCRPNSPKDTSLQRWAIPPILPRCVFLHFTFLGDNIMLTLSFRRFRVCPGRGHRPRHYLAFADPHLDADATVRGVRSRCRVVYIGAQSVQGDATLLESLGTGDLGAVQPARNHYLYSLGAHTHRGGDRLLYRFFVRNALFHLARYVVGHKL

SEQ ID NO: 575 - DNA, 486 bp, Unknown
  Obtained from environmental sample
  misc_feature (1)..(486): n is a, c, g, or t
gtgacggtgggcgtccacacgtcgcgcccccccatagtgatcggaagaaggggcgaggaggtcgagaggctgaagggcgagttgcagcatctcacccagaaagagatacagataaacatccgcgaagtcaaaaagcctgagatggactcacagcttgtggccgacaacatagcgcgccaagtggaaaagcgcgtttcttacaaaaaagcgataaagaaggcgatctccaccgcgatgcgtatgggcgccgagggaataaagataatggtttcgggccggttgaacggcgccgagatcgcccgtaccgagactttcaaggagggtcgcatccccctgcacactttgcgcgccgatatagactacgcgacagcgacttcgcacaccacgtacggttgcatcggcatcaaggtgtggatctgcaaaggcgaggtaatgtcgcgggcgatggccgcggccagggcaaacgcggaagcgacgaaaggatag

SEQ ID NO: 576 - protein, 161 aa, Unknown
  Obtained from environmental sample
  DOMAIN (2)...(54): KH domain
  misc_feature (1)..(161): Xaa is any amino acid
MTVGVHTSRPPIVIGRRGEEVERLKGELQHLTQKEIQINIREVKKPEMDSQLVADNIARQVEKRVSYKKAIKKAISTAMRMGAEGIKIMVSGRLNGAEIARTETFKEGRIPLHTLRADIDYATATSHTTYGCIGIKVWICKGEVMSRAMAAARANAEATKG

SEQ ID NO: 577 - DNA, 396 bp, Unknown
  Obtained from environmental sample
  misc_feature (1)..(396): n is a, c, g, or t
atgaaaaatgaaacgtcgggttgggtgttttttgcgaacaacgatatgcttacggcggaactgataattgaccatgcggaattatcgggagaaatcgcgtttctttgccagcaggctattgagaaatactttaagggctatttgacagaacacggcaagaagttcaagaaaatccatgacctgttgatgttgtactctgaagtaaagagtatcaaagattggaatctggacgaaatcatgcttagaggcattagcaacctatatacggtaacacgttatcccggtaatatcggcatgatgcccgacggacagctgccgtccatagaaaaaacccgaagttattgggagtttgccaagaaggtcaaggttatttttactgagttggtcggaaaataa

SEQ ID NO: 578 - protein, 131 aa, Unknown
  Obtained from environmental sample
  DOMAIN (5)...(128): HEPN domain
  misc_feature (1)..(131): Xaa is any amino acid
MKNETSGWVFFANNDMLTAELIIDHAELSGEIAFLCQQAIEKYFKGYLTEHGKKFKKIHDLLMLYSEVKSIKDWNLDEIMLRGISNLYTVTRYPGNIGMMPDGQLPSIEKTRSYWEFAKKVKVIFTELVGK

SEQ ID NO: 579 - DNA, 363 bp, Unknown
  Obtained from environmental sample
  misc_feature (1)..(363): n is a, c, g, or t
atggctaaaatcattgaccagcttattatcaattccccttacgaagaaccaaaagagtattgggattacaatgaaaacagccagtcatttgaccgaaaatcaggaagacgctccgcaggttattatatcgcatatcaaggaagcaaccagttcaatgagaaaggtaattttataccgttacccctcgtcaacgatatacgtaaccgtgtaaaagcatggagaataaataattatcctgggattacaagcgttacccgaaaactgattgaacactggtacgcaaaagagcggcggcaaaactaccgtcatggcgatgctcatagcgtggcaagtatgcaacaaggtttcatacccgcacgataa

SEQ ID NO: 580 - protein, 120 aa, Unknown
  Obtained from environmental sample
  misc_feature (1)..(120): Xaa is any amino acid
MAKIIDQLIINSPYEEPKEYWDYNENSQSFDRKSGRRSAGYYIAYQGSNQFNEKGNFIPLPLVNDIRNRVKAWRINNYPGITSVTRKLIEHWYAKERRQNYRHGDAHSVASMQQGFIPAR

SEQ ID NO: 581 - DNA, 360 bp, Unknown
  Obtained from environmental sample
  misc_feature (1)..(360): n is a, c, g, or t
atgccgatttcactaaaaaatccgcaaataatagatattcccgttgcgcacgacaagcgcggaaatttaagcgttgtagagggcaagcagacaattccattcaacataaaacgtgtttattatctatatgacgttcctgggggcacaaagcgcggtgggcacgcgcatcgcanactggagcaattgattatcgccgccagcggcagctttaccgttgttttgcacaacggcaaaaaaaaggaaagctatatcctcaatcgctcnaacattggcttatacatacccaaaatgacttggcgagaaattgaaatttctcnagtggtgcggtgtgccttgtgctggcagcgagcattacgatga

SEQ ID NO: 582 - protein, 119 aa, Unknown
  Obtained from environmental sample
  DOMAIN (6)...(108): WxcM-like, C-terminal
  misc_feature (1)..(119): Xaa is any amino acid
MPISLKNPQIIDIPVAHDKRGNLSVVEGKQTIPFNIKRVYYLYDVPGGTKRGGHAHRXLEQLIIAASGSFTVVLHNGKKKESYILNRSNIGLYIPKMTWREIEISXVVRCALCWQRALR

SEQ ID NO: 583 - DNA, 342 bp, Unknown
  Obtained from environmental sample
  misc_feature (1)..(342): n is a, c, g, or t
gtggttacgcaaaatgaaagactggggataaggatcgccatagacgatttgggcaccggatactcctcgctgagctacctgaagcgcttcccgatagacacgctgaagatagacaggtcgttcatcatagacatcccggaaaattcaagagacgcggagatcgtcaaggcgataataacgatggcgcactcgcttgacctgtcagtgatagccgagggggtggagacggagccgcaggcgcagtatctgctggagaacgggtgcgagagcatgcagggatatttgttcagcccgccggtgccgctgacggagttcgataaactttgggcgaagcataaataa

SEQ ID NO: 584 - protein, 113 aa, Unknown
  Obtained from environmental sample
  DOMAIN (1)...(99): EAL domain
  misc_feature (1)..(113): Xaa is any amino acid
MVTQNERLGIRIAIDDLGTGYSSLSYLKRFPIDTLKIDRSFIIDIPENSRDAEIVKAIITMAHSLDLSVIAEGVETEPQAQYLLENGCESMQGYLFSPPVPLTEFDKLWAKHK

SEQ ID NO: 585 - DNA, 702 bp, Unknown
  Obtained from environmental sample
  misc_feature (1)..(702): n is a, c, g, or t
atgtgcaaactccccgctcctagcggggtgtcagcgaagctgacggggtgtggtgaaatgtttttagacgaaaaaaaaattgaggtcgtttctggcaggggtgggggaggtatttgcagttttcgcagagaaaagcacgttccgctaggaggaccagatggcggcgatggcggtgatgggggcagcatttatttgcgggcaaatgagcaatacaccacgcttttggatatgggaaatatttacagatatgcagcagaagctggagcaacaggcgaggcagcaaaccgaacaggaaaaagcggaaaaaacgtttatgttgatgttccaatgggaacaatagttcgcgatagcgaaggcagaattttaacagatttaacagaggctggtgcaacttggatggcggcacgtggtggggcagggggccttgggaattccagattttcttctgcaacaaatagagcaccgaggcagcacaccagcggcaagcctggcgaaaaacgaattttgaatttagagcttaaattaatggcagatgttggtttggtgggttttttaaatgcgggcaaatcttcccttgttcgcaaaattttcagcgcaaaacccaaagtagcagaatatcctttcacaacaatagaacccatattaggcattgcgaagataaaaaacaggagttttgtaatgcagatatccccggctaattga

SEQ ID NO: 586 - protein, 233 aa, Unknown
  Obtained from environmental sample
  DOMAIN (177)...(230): GTPase of unknown function
  misc_feature (1)..(233): Xaa is any amino acid
MCKLPAPSGVSAKLTGCGEMFLDEKKIEVVSGRGGGGICSFRREKHVPLGGPDGGDGGDGGSIYLRANEQYTTLLDMGNIYRYAAEAGATGEAANRTGKSGKNVYVDVPMGTIVRDSEGRILTDLTEAGATWMAARGGAGGLGNSRFSSATNRAPRQHTSGKPGEKRILNLELKLMADVGLVGFLNAGKSSLVRKIFSAKPKVAEYPFTTIEPILGIAKIKNRSFVMQISPAN

SEQ ID NO: 587 - DNA, 645 bp, Unknown
  Obtained from environmental sample
  misc_feature (1)..(645): n is a, c, g, or t
ttggacgcggaaaccgacaccctgatccggaagacgcggtcatcgcaaacgcccgagttccttcccgcgaaagatgtggaaaaagactattcccaaatttttagtgaaatagagcaggcgccccgagcctattccgcgatacacattgacggggagagggcttcggcgcttgcccgccgtggagaaacgcctgaaatgcgaaagcgtccggtgacaatttatcggctggagcttctttcctgggagccgccctatgccaaaattttcgtccactgttcaagcgggacctacattcgctcgcttgccagagacatagcgctagccgccgggagcagagcgcatttgacagcgttgattagaacgcaagtcgcgggatttaagttacagttggcgctgagcaatgagcagggactggtacgcccgatagacaaagccgtctttaacgcgctcaacattccctgccttgatgtggttccgtcagatgtatcaaaaatcatacagggtaagcctctggcgcagatactcaaagatgtttccgccggaaaagataccgccgccgcgctcttttcagaaggaaaatttatcgcaatgacagaaagacagaacaataaatggaattacggatatgtctatgcgcgtgattag

SEQ ID NO: 588 - protein, 214 aa, Unknown
  Obtained from environmental sample
  DOMAIN (11)...(98): TruB family pseudouridylate synthase (N terminal domain)
  misc_feature (1)..(214): Xaa is any amino acid
MDAETDTLIRKTRSSQTPEFLPAKDVEKDYSQIFSEIEQAPRAYSAIHIDGERASALARRGETPEMRKRPVTIYRLELLSWEPPYAKIFVHCSSGTYIRSLARDIALAAGSRAHLTALIRTQVAGFKLQLALSNEQGLVRPIDKAVFNALNIPCLDVVPSDVSKIIQGKPLAQILKDVSAGKDTAAALFSEGKFIAMTERQNNKWNYGYVYARD

SEQ ID NO: 589 - DNA, 693 bp, Unknown
  Obtained from environmental sample
  misc_feature (1)..(693): n is a, c, g, or t
gtgagccagatcaggttgcagcctgatgtcgtgcagaacgtcgttacctataccgtggtgatattagccgataataacgacggaacgttgttgccgggcatgacggcaaacgtggagtttattgaggcgcgggagacaaacgccatgacggtccccgcgtcggtattccgcttccagccgccgaaagaggcgcaggataagttgaagaagatgatggacgaacgcaaagcggcgagggagggcggcatcgggatggacggagggatgatgccggatgctgacggcgttggcgggatgaagatggccgtgattaaaaacgaaggcggcgggatgatgggcggcggcgacggtcaattcaaagtggatagggaacgccgtaaggacggcggcggacgcggcgaaggccgccgcgagggcggtcagggcgggggagggaagagacctcccgccggcgttacgggcagccgcggagttctgtggacattggacgaaaacggcgcgttcaaaccggtgttcgtgaagatagggctgagcgacggcgtgaccacagtcgtcaccggaagagatgatttgaccgaggggatgaagatcgtcgttggcgaggtgaggagcgacaaggacaagaagccgtcggataagaagaaacagaacaacccgcttacgccgggcggcggcgggccgaggaggatgtaa

SEQ ID NO: 590 - protein, 230 aa, Unknown
  Obtained from environmental sample
  misc_feature (1)..(230): Xaa is any amino acid
MSQIRLQPDVVQNVVTYTVVILADNNDGTLLPGMTANVEFIEARETNAMTVPASVFRFQPPKEAQDKLKKMMDERKAAREGGIGMDGGMMPDADGVGGMKMAVIKNEGGGMMGGGDGQFKVDRERRKDGGGRGEGRREGGQGGGGKRPPAGVTGSRGVLWTLDENGAFKPVFVKIGLSDGVTTVVTGRDDLTEGMKIVVGEVRSDKDKKPSDKKKQNNPLTPGGGGPRRM

SEQ ID NO: 591 - DNA, 813 bp, Unknown
  Obtained from environmental sample
  misc_feature (1)..(813): n is a, c, g, or t
ttggggcctgacgcgcttatcgtccaggatttcggggtggttgccatggttcgctctcaatttccttcgctgcgcctgcacgcctcaacccaaatgaacatagcttcaagccggggagccaatgccctctccaaatacggcgtttcccgtgtagttcttgccagggagttgagcctcggcgagctgcgggatgtaaggcaggaaaccaatatggaactggaggtttttgtgcatggtgccctgtgcgtcagcgcttccggtttatgccttttttccagctacctgggcggcaagtctgcgaatcgtggtttgtgtacccaggcttgccgtaggctctattcacgcgaagatagtcccgggcaaagcggctactatttcagccctgcggatctgcgacttttggaacgcctgcccgaccttgccgccgccggggttaacgcccttaagatcgaaggccgcatgaaaagcgctgattatgtgggtgttgtggtcagcgcataccgatcggttttggatgcaattgcgggaggggatgaaggagaaatccaggggagtatccagcagggtatggagatactgcgaaatgactttgcccgctcgaagactcagttttattttgacgcanagcctgataaggatgctttgccctcagtttccattgattggctgaatccggatcaggacggggggacaggcatcaatctggggacaattctaaaggtaaaagggagagatagccgcgctctgatctcctgtgacggaggagtacttccctgtttgggggattcggtgcggccttcccagcaaggatga

SEQ ID NO: 592 - protein, 270 aa, Unknown
  Obtained from environmental sample
  DOMAIN (1)...(212): Peptidase family U32
  misc_feature (1)..(270): Xaa is any amino acid
MGPDALIVQDFGVVAMVRSQFPSLRLHASTQMNIASSRGANALSKYGVSRVVLARELSLGELRDVRQETNMELEVFVHGALCVSASGLCLFSSYLGGKSANRGLCTQACRRLYSREDSPGQSGYYFSPADLRLLERLPDLAAAGVNALKIEGRMKSADYVGVVVSAYRSVLDAIAGGDEGEIQGSIQQGMEILRNDFARSKTQFYFDAXPDKDALPSVSIDWLNPDQDGGTGINLGTILKVKGRDSRALISCDGGVLPCLGDSVRPSQQG

SEQ ID NO: 593 - DNA, 459 bp, Unknown
  Obtained from environmental sample
  misc_feature (1)..(459): n is a, c, g, or t
ttgactcaaaaaccttcaaaaataaaggcttttttgcaaaatccgtcttcttgcaagaagtacggcagactatacaattggaagattgctaaaacagtctgtcctaaaggatggaagttgtcgtctcgcgaggattgggataaattggttgcgacagcgggcggaaaagagatggcgagtaaaaggttgaaatcaaagagcgggtggaaaaatctggatgatggaagtagcggaaatggtacagatgattatggattttcggccatgtccggcggttaccggaacttcaatggtacgttccacgatgttggctacaacggcagctggtggacggctacggagggttccgacgctaacgcttacctccgatacatgcactacagcagcgactacgtgcacgagggctacggcgacgaaaacggcggcttctctgtgcggtgcgtcgccgacaacccatga

SEQ ID NO: 594 - protein, 152 aa, Unknown
  Obtained from environmental sample
  misc_feature (1)..(152): Xaa is any amino acid
MTQKPSKIKAFLQNPSSCKKYGRLYNWKIAKTVCPKGWKLSSREDWDKLVATAGGKEMASKRLKSKSGWKNLDDGSSGNGTDDYGFSAMSGGYRNFNGTFHDVGYNGSWWTATEGSDANAYLRYMHYSSDYVHEGYGDENGGFSVRCVADNP

SEQ ID NO: 595 - DNA, 576 bp, Unknown
  Obtained from environmental sample
  misc_feature (1)..(576): n is a, c, g, or t
gtggttgaactggttccggcgcggccccttgttccgggccgtcatcaaaagcaaaaccttcttgccgccggccttgccctgcttggtttgggtctgcctgcggaaattatcagaaagggtctggaaacttttcccggcgttgaacatcggctggaattgttttatcaggcgggcggcataaagttttacaatgacagcgcggccaccattcccgaagcggcggcggcggcgctggaagcccttggccacacagacggcggacggctcattctcgttaccggcggcactgataaaaaccttgacttttccccgctggtgcaggccgccgggcaggcaaaggccattattcttctggctggtaccggcagcgaaaaactgtgcgaccagtttgatgacgcggacatagcctaccgcggcccctttgacgacttggacaaagcggtcgccgccgctctggaaaccgctacgccgggggaccgcgtagccttgtctcccggctgcgcctcgtttgggatgttcctcaatgaatttgaccgcggccgcaaatggaaagacgcggtgaggcggctggcataa

SEQ ID NO: 596 - protein, 191 aa, Unknown
  Obtained from environmental sample
  DOMAIN (47)...(128): Mur ligase family, glutamate ligase domain
  misc_feature (1)..(191): Xaa is any amino acid
MVELVPARPLVPGRHQKQNLLAAGLALLGLGLPAEIIRKGLETFPGVEHRLELFYQAGGIKFYNDSAATIPEAAAAALEALGHTDGGRLILVTGGTDKNLDFSPLVQAAGQAKAIILLAGTGSEKLCDQFDDADIAYRGPFDDLDKAVAAALETATPGDRVALSPGCASFGMFLNEFDRGRKWKDAVRRLA

SEQ ID NO: 597 - DNA, 474 bp, Unknown
  Obtained from environmental sample
  misc_feature (1)..(474): n is a, c, g, or t
atggcgactgaggcttctttcaacagggccaaaaaagagattgacgcggcccttgcgggcgcggcggaaataacagtcagggcaaaggcggccatcaaaggcgacgttgtcacggttgagtgtgaattctcaaaggcgttggagggcgccgagtacaacatcgcgctagtccagacggaagaagatttcaagggcggcaacggcgtagcccagcacaacatggtggtgcgcgacttcaagtccgtggcccccgccgaaaaggccactgtcgcctttaacatagccgaatccgaaaaagcggctaatgcctatgtcaccgaatgggccaagacggccaatgggcgcaacaaagagctatccgccacaaggcgccacaaaatagaccgcaaaaaactaaaggccgtggtctttgtgcaggacaaaaagacaaagcaggtctataacgcgtttgtggccgaggtgggtattcagtag

SEQ ID NO: 598 - protein, 157 aa, Unknown
  Obtained from environmental sample
  misc_feature (1)..(157): Xaa is any amino acid
MATEASFNRAKKEIDAALAGAAEITVRAKAAIKGDVVTVECEFSKALEGAEYNIALVQTEEDFKGGNGVAQHNMVVRDFKSVAPAEKATVAFNIAESEKAANAYVTEWAKTANGRNKELSATRRHKIDRKKLKAVVFVQDKKTKQVYNAFVAEVGIQ

SEQ ID NO: 599 - DNA, 390 bp, Unknown
  Obtained from environmental sample
  misc_feature (1)..(390): n is a, c, g, or t
atgcgacggtgtcctgcaattccggccgaggattttgatgagcagtacagaaatttgtatgacgctaacacgggacttgatcttacgggagccggcacatacacagtaaaatcgggcgatacattgtcggccatttcaaagcacgcctataatgatggtttttattaccccgtcattatgctcgcttcgcggggcgtggtaataaaccctgacaaaattcagccaggtatggagttgacaattcccgatctgnaaagaaacaaggccaacgctaccagcagaaagagcatgaaaaattgccttaaaggatttgccaacattgaaaaaacaaaggcgaacccgaatcaaagtttgatcgacgggtttaagaaacgcgcagacgaactttaa

SEQ ID NO: 600 - protein, 129 aa, Unknown
  Obtained from environmental sample
  DOMAIN (34)...(82): LysM domain
  misc_feature (1)..(129): Xaa is any amino acid
MRRCPAIPAEDFDEQYRNLYDANTGLDLTGAGTYTVKSGDTLSAISKHAYNDGFYYPVIMLASRGVVINPDKIQPGMELTIPDLXRNKANATSRKSMKNCLKGFANIEKTKANPNQSLIDGFKKRADEL

SEQ ID NO: 601 - DNA, 402 bp, Unknown
  Obtained from environmental sample
  misc_feature (1)..(402): n is a, c, g, or t
atgaccctggcgcggaagatggctatagaacgttaccgggttccgcaggactggtttgattttaaccatatacacctgcacataccggaaggagcgacgccaaaagacggcccttcggccggaataacaatggctacggccctgctttcgcttatgcgggacaaggtaatcaccgaacggcttgtaatgacaggcgagctttccctgacgggcagggtgctccccatcggcggcctgaaggaaaaaacaatagccgcaaggcggaacaaagcccggcacatcattatcccaaagcagaacgagcgcgatcttgacgagattcccgaccatgtaaagaaggacatcagtttccacccggtagagcgttttgaggaagtgctggcattagcgctgccggaataa

SEQ ID NO: 602 - protein, 133 aa, Unknown
  Obtained from environmental sample
  DOMAIN (4)...(133): Lon protease (S16) C-terminal proteolytic domain
  misc_feature (1)..(133): Xaa is any amino acid
MTLARKMAIERYRVPQDWFDFNHIHLHIPEGATPKDGPSAGITMATALLSLMRDKVITERLVMTGELSLTGRVLPIGGLKEKTIAARRNKARHIIIPKQNERDLDEIPDHVKKDISFHPVERFEEVLALALPE

SEQ ID NO: 603 - DNA, 312 bp, Unknown
  Obtained from environmental sample
  misc_feature (1)..(312): n is a, c, g, or t
atgtccttctttacatggtcgggaatctcgtcaagatcgcgctcgttctgctttgggataatgatgtgccgggctttgttccgccttgcggctattgttttttccttcaggccgccgatggggagcaccctgcccgtcagggaaagctcgcctgtcattacaagccgttcggtgattaccttgtcccgcataagcgaaagcagggccgtagccattgttattccggccgaagggccgtcttttggcgtcgctccttccggtatgtgcaggtgtatatggttaaaatcaaaccagtcctgcggaacccggtaa

SEQ ID NO: 604 - protein, 103 aa, Unknown
  Obtained from environmental sample
  SIGNAL (1)...(30)
  misc_feature (1)..(103): Xaa is any amino acid
MSFFTWSGISSRSRSFCFGIMMCRALFRLAAIVFSFRPPMGSTLPVRESSPVITSRSVITLSRISESRAVAIVIPAEGPSFGVAPSGMCRCIWLKSNQSCGTR

SEQ ID NO: 605 - DNA, 339 bp, Unknown
  Obtained from environmental sample
  misc_feature (1)..(339): n is a, c, g, or t
ttgtgggtttacggtttcaggttctatttcactcccctcgccggggttcttttcgcctttccctcacggtacttctgcgctatcggtcgtatccagtatttagccttggatcgtggtcgacccggattccggcagggtttctcgtgccccgccgtactcaggattccgctacctcatagtcatcatttcaaatacggggctttcaccctctctggcaggctttcccaaaacctttctcctatcatgactacaaagacatcgcggtccttcaaccccgctctttcgagcggtttaggctcctccgatttcgctcgccgctactttcggaatctcgtttga

SEQ ID NO: 606 - protein, 112 aa, Unknown
  Obtained from environmental sample
  misc_feature (1)..(112): Xaa is any amino acid
MWVYGFRFYFTPLAGVLFAFPSRYFCAIGRIQYLALDRGRPGFRQGFSCPAVLRIPLPHSHHFKYGAFTLSGRLSQNLSPIMTTKTSRSFNPALSSGLGSSDFARRYFRNLV

SEQ ID NO: 607 - DNA, 504 bp, Unknown
  Obtained from environmental sample
  misc_feature (1)..(504): n is a, c, g, or t
ttgcaaacattgaaaaatccattgttttctcccgcgacggcgacaagatgtggcattgcggcaactgcggacatattgtcatcgggaaaaacgccccggaagtctgcccggtctgcaagcatccgaaagcctatttccagatccgcgcggaaaattattaacgaaaaaggaataataatgaaatccagattctctaatttcttttggggtgttgttttgctgctcgcggcggcgtttgtgctgaccaataaatatatcggcatcgccgacatcggcattggcagcatagttatcacgattcttgcattggcgtttattgtgcagtgtatagcgcatttgaatatcgcgccccttgtgatcccaatcgcggttttgtattttattttcaggaagcctttgggcctgcctgtaatacagacatggaagctgatcgcggcaaccgctctcgcattcataggattgaacatcctgatcccaaaaggcgcggcatctcggccgatctga

SEQ ID NO: 608 - protein, 167 aa, Unknown
  Obtained from environmental sample
  SIGNAL (1)...(22)
  misc_feature (1)..(167): Xaa is any amino acid
MQTLKNPLFSPATATRCGIAATADILSSGKTPRKSARSASIRKPISRSARKIINEKGIIMKSRFSNFFWGVVLLLAAAFVLTNKYIGIADIGIGSIVITILALAFIVQCIAHLNIAPLVIPIAVLYFIFRKPLGLPVIQTWKLIAATALAFIGLNILIPKGAASRPI

SEQ ID NO: 609 - DNA, 534 bp, Unknown
  Obtained from environmental sample
  misc_feature (1)..(534): n is a, c, g, or t
atgaaaggatcaaagacagacaaaaatttaaaggcggcttttgccggcgaatcccaggcgcataccaagtaccagtattacgcctcaaaagcggaaaaagacggttatgtgcagattggggcgattttcagggaaaccgcgctcaacgaaaaagaacacgcaaaaatatggttcaagcttctgcacggcgacggagtgcccgccactaccgtaaacctgaaagacgccgcggacggcgagaactttgagtggacaaacatgtacgcagatttcgcgaagaccgcaaaggaagaaggcttcaacaatatcgccgccctgttcgagatggtaggcaagatcgaaaaagaacacgaagagcgttaccgcaaactccttgcaaacattgaaaaatccattgttttctcccgcgacggcgacaagatgtggcattgcggcaactgcggacatattgtcatcgggaaaaacgccccggaagtctgcccggtctgcaagcatccgaaagcctatttccagatccgcgcggaaaattattaa

SEQ ID NO: 610 - protein, 177 aa, Unknown
  Obtained from environmental sample
  DOMAIN (139)...(170): Rubredoxin
  misc_feature (1)..(177): Xaa is any amino acid
MKGSKTDKNLKAAFAGESQAHTKYQYYASKAEKDGYVQIGAIFRETALNEKEHAKIWFKLLHGDGVPATTVNLKDAADGENFEWTNMYADFAKTAKEEGFNNIAALFEMVGKIEKEHEERYRKLLANIEKSIVFSRDGDKMWHCGNCGHIVIGKNAPEVCPVCKHPKAYFQIRAENY

SEQ ID NO: 611 - DNA, 324 bp, Unknown
  Obtained from environmental sample
  misc_feature (1)..(324): n is a, c, g, or t
gtggagcgcttaaagaaaaggaatgagattagggaggtttttgataaagggaagcgtaccggctgtcagggtgcaaaactttttgcgctgaaaaacaatctgccccgcaaccgtatctgctttaccttttcccgcggttttggaaccgcggtgaagcggaaccgcgccaggcggcttggcagggaagtataccggaacttaaagtcccgcctgtgttgcgggtatgattttatcctgttgctctaccccgaagatgcgagccagacccttgccgggcgtatgaggcaaatggaatatctgtttatcagggctgggttactgtga

SEQ ID NO: 612 - protein, 107 aa, Unknown
  Obtained from environmental sample
  DOMAIN (2)...(105): Ribonuclease P
  misc_feature (1)..(107): Xaa is any amino acid
MERLKKRNEIREVFDKGKRTGCQGAKLFALKNNLPRNRICFTFSRGFGTAVKRNRARRLGREVYRNLKSRLCCGYDFILLLYPEDASQTLAGRMRQMEYLFIRAGLL

SEQ ID NO: 613 - DNA, 300 bp, Unknown
  Obtained from environmental sample
  misc_feature (1)..(300): n is a, c, g, or t
atgannctcgttcctgtcggcggcaagttccaggaaaccacccgcgtcctgaccaacgccgccatagccggcagcaccgactatctgcggggcctcaaggaaaacatcatcatcggtcaccccatacccgcgggtaccggcatgaagcgttaccgggaaattaagttatacgatgaagacagccaggacctggacaagcagatgcaggaaattctggaacagcgcaaacttgaagcggccgttatcgccgaagcggctatggcggcggatattaccgttgaagacaatgatgaagactag

SEQ ID NO: 614 - protein, 99 aa, Unknown
  Obtained from environmental sample
  misc_feature (1)..(99): Xaa is any amino acid
MXLVPVGGKFQETTRVLTNAAIAGSTDYLRGLKENIIIGHPIPAGTGMKRYREIKLYDEDSQDLDKQMQEILEQRKLEAAVIAEAAMAADITVEDNDED

SEQ ID NO: 615 - DNA, 753 bp, Unknown
  Obtained from environmental sample
  misc_feature (1)..(753): n is a, c, g, or t
atgtcaaagggtaaaattgattatcaaaaagacaaggacaggtatagtttattcgccgaagggttaatcgacagccgggaaatcgagacggtaatcgcggaagaagaagcgctccggcgcaagcgggaaaaattccgcaatgcctggctgtacatggcggatctgaaaagcggcggtcttgccaaagcgcagaagggcagttacacggtgattgggcagcttaccgcgctgaggaaaatgcaggacaaaaacggcaatgaaatggcgtttgggacattgcatgactttgagggtgatattgatctggtattcttttcaaaaatctgggccgagtgccgcgacattttgaatcttgatgaatttaccgctttaaaagggagcattgatcccgcaagcgaccgcaacccgcaaaaaccaagcctaaaagtcagcagtatcgccgacatcgccgctctcagccgttccgccgagcgcaaggcatccgccggagaggagccgaaagtcccggcatggacgccgccggctgtgccgcaggctgtccatatccgcctggacagcgccgccgcgggccgcgatgaaggcatctacccactgcgtaattatattctgggaaatcccggcccctgtccggtgtttattcacatttcagctaacggtgaaaaaataatccgcacgactgccggcataagccctgaagcggagttaaaaaactgcgcgggagttgtagaaacatggaaggaactatgcgtataa

SEQ ID NO: 616 - protein, 250 aa, Unknown
  Obtained from environmental sample
  DOMAIN (68)...(149): OB-fold nucleic acid binding domain
  misc_feature (1)..(250): Xaa is any amino acid
MSKGKIDYQKDKDRYSLFAEGLIDSREIETVIAEEEALRRKREKFRNAWLYMADLKSGGLAKAQKGSYTVIGQLTALRKMQDKNGNEMAFGTLHDFEGDIDLVFFSKIWAECRDILNLDEFTALKGSIDPASDRNPQKPSLKVSSIADIAALSRSAERKASAGEEPKVPAWTPPAVPQAVHIRLDSAAAGRDEGIYPLRNYILGNPGPCPVFIHISANGEKIIRTTAGISPEAELKNCAGVVETWKELCV

SEQ ID NO: 617 - DNA, 405 bp, Unknown
  Obtained from environmental sample
  misc_feature (1)..(405): n is a, c, g, or t
atggatataatacgtgagggtgtgcttgagaatttcgcgttgacgttgtacggctcacgaaaatccggaagaccaagggcgcttaattcagcttttgaaaatattgaggttgcctcgggtgataagccgttacaggaaatcatcagggtaattgatagaggtattctgatgaaccgtttttccggcggctcgtccggtgctagcggcgaaatgtccggggtggcgaaaaatagttttctgatagagaacggaaaagtgaccgacgcccttaaagaaacgatggtgtctttcgacatagtaaacgttctttcgaatatcaccgctatttcatctgaacgatgtcggaacggagtaaccatactgccatggtgctgctttgacggcattacaatttcggggaaataa

SEQ ID NO: 618 - protein, 134 aa, Unknown
  Obtained from environmental sample
  misc_feature (1)..(134): Xaa is any amino acid
MDIIREGVLENFALTLYGSRKSGRPRALNSAFENIEVASGDKPLQEIIRVIDRGILMNRFSGGSSGASGEMSGVAKNSFLIENGKVTDALKETMVSFDIVNVLSNITAISSERCRNGVTILPWCCFDGITISGK

SEQ ID NO: 619 - DNA, 513 bp, Unknown
  Obtained from environmental sample
  misc_feature (1)..(513): n is a, c, g, or t
ttgcaacaaattgagcatgtggaaggattaagtccggcgtacagcattaaaggaagtaccgatcntgcagtatggggggacattgatgcaacatgggatgctgtaataatcgttgctggttctaccggttatcgtttaccaacagaagcgcagtgggaatatgcgtgtcgcgccggaacgactactgcgtacaacacgggagctacgataagcgacaaaacggggtggtattccagtaacagtaaagatgagccgtggccggtttcggggcatgaaaatgcgtggggattgtatgatatgcacggaaacgtgtatgaatggtgctgggattggtatgacagttacccaagcaatgcgcagaccgacccaatgggcgcgtcctcggggactaaccgcgtggttcgcggcgggtgctattccaatacgcctgagcgcctgcgttctgcgtaccggggctacaccatcccgagcaacaggtacgacattcttggcttccgtcttgcccgcccctag

SEQ ID NO: 620 - protein, 170 aa, Unknown
  Obtained from environmental sample
  DOMAIN (6)...(169): Domain of unknown function (DUF323)
  misc_feature (1)..(170): Xaa is any amino acid
MQQIEHVEGLSPAYSIKGSTDXAVWGDIDATWDAVIIVAGSTGYRLPTEAQWEYACRAGTTTAYNTGATISDKTGWYSSNSKDEPWPVSGHENAWGLYDMHGNVYEWCWDWYDSYPSNAQTDPMGASSGTNRVVRGGCYSNTPERLRSAYRGYTIPSNRYDILGFRLARP

SEQ ID NO: 621 - DNA, 354 bp, Unknown
  Obtained from environmental sample
  misc_feature (1)..(354): n is a, c, g, or t
ttgcataacaatgacgttccgccgaccaccgacaatcttaaagccgccgcggacggtgaaaactatgaatggacagatatgtacgcgggtttcgcaaaaaccgccaaagaagaaggctttgaccaaattgccacgttatttgaaatggtcggtaaaattgagaaagagcatgaggagcgttaccgcaaactgcttgccaatgttaaagacggtcttgtgttttcacgggacggcgaccaggtttggcagtgttccaactgcggacacattattgtcggcaagaaagctccggaatcatgcccggtgtgcaagcatcccaaggcgtatttccagattaaagcttcaaattattaa

SEQ ID NO: 622 - protein, 117 aa, Unknown
  Obtained from environmental sample
  DOMAIN (79)...(110): Rubredoxin
  misc_feature (1)..(117): Xaa is any amino acid
MHNNDVPPTTDNLKAAADGENYEWTDMYAGFAKTAKEEGFDQIATLFEMVGKIEKEHEERYRKLLANVKDGLVFSRDGDQVWQCSNCGHIIVGKKAPESCPVCKHPKAYFQIKASNY

SEQ ID NO: 623 - DNA, 780 bp, Unknown
  Obtained from environmental sample
  misc_feature (1)..(780): n is a, c, g, or t
ttgtccgccgccaaattgagtacgagagggagtatttttttgacgcgtataaaaaacattatggcaaacatattttggaagactttccaaatcttgttgctatggcaaaacgccgtattaagcatatttccccaaagacttcacacaaagagcacgaagggacaaagagcacaaagggaagagaaaagtggggattatcctttacttcttgatattggctgcgcttatgggccgtttcttgtcgcggcaaaagaagaaggttttctgccatttgggattgatcctgcaggggacgcggtgcgctatgtacaagaaacgcttaatattccctccgttcaaggttttttcccaaactgccaactgcccactgctcactgctcactttgcgacgttgtcacactgtggtatgttatcgaacattttacagactgccttaccgtattagccgaggtaaaaaaaatattaaagcccggcggtattatggcgttttcaacaccttcgttttcaggcataagcgggcgcaaatcacttcgcaagtttttagaaaacagccctgccgatcattttacaatctggtcgccaaaaatgtgtaaaaaagcgcttaccctcgctggctttaaagtaaagaaaatagtgataagcggctgccaccccgagcgtttcccgcttttaggaaaattcgctaaaaacgcaaaaagccctttgtatagtctgcttatggttatcagtaaaatttttggcttgggtgacacttttgaggtttatgcagaaaggagataa

SEQ ID NO: 624 - protein, 259 aa, Unknown
  Obtained from environmental sample
  DOMAIN (70)...(161): Methyltransferase domain
  misc_feature (1)..(259): Xaa is any amino acid
MSAAKLSTRGSIFLTRIKNIMANIFWKTFQILLLWQNAVLSIFPQRLHTKSTKGQRAQREEKSGDYPLLLDIGCAYGPFLVAAKEEGFLPFGIDPAGDAVRYVQETLNIPSVQGFFPNCQLPTAHCSLCDVVTLWYVIEHFTDCLTVLAEVKKILKPGGIMAFSTPSFSGISGRKSLRKFLENSPADHFTIWSPKMCKKALTLAGFKVKKIVISGCHPERFPLLGKFAKNAKSPLYSLLMVISKIFGLGDTFEVYAERR

SEQ ID NO: 625 - DNA, 558 bp, Unknown
  Obtained from environmental sample
  misc_feature (1)..(558): n is a, c, g, or t
gtgggacagcttgcctcggtcgcgggaggttccgccctggtgctgttcacttcgtaccagtccctgcaaagctgttggcttgcggctcagcctgaattgacagcattgggcatacgctgcctcaagcagggcgatgacgaccgttcccggcttttgcaaaccttccttaacgatacccaatcggtgctgtttgccacggactcgttttgggaaggggtagacgcgccgggcgacaccctgcggctggtgatactctgccgcctgcccttcaggactcccaacgacccggttttcgaggcccgccgggaagcggtggaaaagaacgggggcaaccccttcatggatctttcgctgcccgaggcggtgatgaaattcaaacagggctttggccggcttatgcgccgttccagcgaccacggcgttgtagcggtgctggacgggcgaatcctgaaaaagcgttatgggacatttttccgtgagtccctgccggaaacgcttaccagcttcggcagctttgacggcatactaagagacaccgagaattttctatatccctag

SEQ ID NO: 626 - protein, 185 aa, Unknown
  Obtained from environmental sample
  SIGNAL (1)...(24)
  misc_feature (1)..(185): Xaa is any amino acid
MGQLASVAGGSALVLFTSYQSLQSCWLAAQPELTALGIRCLKQGDDDRSRLLQTFLNDTQSVLFATDSFWEGVDAPGDTLRLVILCRLPFRTPNDPVFEARREAVEKNGGNPFMDLSLPEAVMKFKQGFGRLMRRSSDHGVVAVLDGRILKKRYGTFFRESLPETLTSFGSFDGILRDTENFLYP

SEQ ID NO: 627 - DNA, 540 bp, Unknown
  Obtained from environmental sample
  misc_feature (1)..(540): n is a, c, g, or t
ttgcctgaagcttgcatacttacagttgaaccgggagtgccccaatcggggtattttgccggttttctgcgctcggcttttttggaattgaaccgtcctcccctgtcgccttgcactcatcaggcatcatgcccgatgtccggcggcggcaagacaaaaaagcgctggtgccactttgcctttgatacggcagacgcgccgaaagaacttcaccgcctttccgcttccgcaggtatcccaaaagagcggcttgtgttaagttatttactggcgggcggcgaaaaacaaccgcttgtgtcacaagcttcgcatgtgtcacaagcttcgcgtgtgcggataatttccgatgcgttttcgcttcccgaaggcaaatacggaagatacggctgttgttccgaaggacttattcttgtaacaggggacaaaaaccgtatagaaaaaaccgcatccgggaaacttgtgccgaacagcatcgctgacagcgccgctgacagcgcccgtgacaagaaaagcggcgctttgataatggagataaaatga

SEQ ID NO: 628 - protein, 179 aa, Unknown
  Obtained from environmental sample
  misc_feature (1)..(179): Xaa is any amino acid
MPEACILTVEPGVPQSGYFAGFLRSAFLELNRPPLSPCTHQASCPMSGGGKTKKRWCHFAFDTADAPKELHRLSASAGIPKERLVLSYLLAGGEKQPLVSQASHVSQASRVRIISDAFSLPEGKYGRYGCCSEGLILVTGDKNRIEKTASGKLVPNSIADSAADSARDKKSGALIMEIK

SEQ ID NO: 629 - DNA, 819 bp, Unknown
  Obtained from environmental sample
  misc_feature (1)..(819): n is a, c, g, or t
ttgaacgcgcatcttgcatctgagcttgaacacctcaaatcggaggcgggcgcttttgaaaagggaatactggatcagatgaaaaccgccgaggtaatgaaacagaaagcgctggatgaataccgccttgcccaggatattgagttcacccggcttaaagcccttgccgatgattctgaaaaaaaggacgcggaacttcgccgctatacccaggaagcaacagagcagttgaaggatgaattttcagcttaccaggtagaagcggaaaagctgcggaaagccgagatggaaaatttctttctggcagcggcgcgttttaagggagggatggcggaacttgaaaaagggctggaagagctgagggccgcatcctacgataatatttctgaaaagcttaaaacatctgaaaaggaattattagccgatctttacaagcggaacaatgacatagatctgcggattactgaatggcagggcagccttgaagggcggctttcgacaatagctgataattccgaaacagccctgcgggaatcggagcgcagccatgcggatgaaatgaagaaaaacctggccgctttggacgcacaccttgcatccgagcttgaacgcctcaaatcagaaacagcagcttttgaaaaggaaatactggatcagattaaaaccgcagaggagatggagcagcaagccctggaagccaacgatgtcaggcttgaagaataccgccgcgcccaggacgttgaattccgccgattggaaactcttgccgatgattccagaaaacttgacgcagaacttcgccatatatacaggaactaa

SEQ ID NO: 630 - protein, 272 aa, Unknown
  Obtained from environmental sample
  misc_feature (1)..(272): Xaa is any amino acid
MNAHLASELEHLKSEAGAFEKGILDQMKTAEVMKQKALDEYRLAQDIEFTRLKALADDSEKKDAELRRYTQEATEQLKDEFSAYQVEAEKLRKAEMENFFLAAARFKGGMAELEKGLEELRAASYDNISEKLKTSEKELLADLYKRNNDIDLRITEWQGSLEGRLSTIADNSETALRESERSHADEMKKNLAALDAHLASELERLKSETAAFEKEILDQIKTAEEMEQQALEANDVRLEEYRRAQDVEFRRLETLADDSRKLDAELRHIYRN

SEQ ID NO: 631 - DNA, 420 bp, Unknown
  Obtained from environmental sample
  misc_feature (1)..(420): n is a, c, g, or t
ttgaacagctgtaaaacgaatatatgcggcaattataataaatcatgggtttgccctcccgcctgcgaaagcattgaggagcaaaagaaaaaaatattttcctataaaaaacttttggtatttacgacaacatacactttggaagattcctttgattatgaaggaatggaagaaggaagggaactccataccttattgatattagagttaagaaaaatattgaacgttcccgtttacggcgcaggaaactgccccacatgcaaaccttgctcttttccatcgccttgtctctctcctgaaaaaagaatagactcggtagaagccgccggaattgacgtaacaagtttgagtaaagctgcgaatatcaattataataacggacaaaatacggttacttttttttctattgcgttgttttaa

SEQ ID NO: 632 - protein, 139 aa, Unknown
  Obtained from environmental sample
  misc_feature (1)..(139): Xaa is any amino acid
MNSCKTNICGNYNKSWVCPPACESIEEQKKKIFSYKKLLVFTTTYTLEDSFDYEGMEEGRELHTLLILELRKILNVPVYGAGNCPTCKPCSFPSPCLSPEKRIDSVEAAGIDVTSLSKAANINYNNGQNTVTFFSIALF

SEQ ID NO: 633 - DNA, 348 bp, Unknown
  Obtained from environmental sample
  misc_feature (1)..(348): n is a, c, g, or t
atggaaagcgatattagatgggttcaaagatttgatagctataaaaaagctcttgccacattggaacgctccgttgaagttgctaagagcagaagtttaaacgaattggaagaacagggtttaattcagagttttgaatttacatttgagctttcttggaaattgttaaaagattatttggaatcaaaaggctttaaagattttcacggctcaaaagatacatttaaattagcttttcaagaggagttaatcagcgatggcgaactatggatggaaatgatagacagcagaaatcattcttcgcatacttatgatgtaaatggattaaggtttaacaagcatacttga

SEQ ID NO: 634 - protein, 115 aa, Unknown
  Obtained from environmental sample
  misc_feature (1)..(115): Xaa is any amino acid
MESDIRWVQRFDSYKKALATLERSVEVAKSRSLNELEEQGLIQSFEFTFELSWKLLKDYLESKGFKDFHGSKDTFKLAFQEELISDGELWMEMIDSRNHSSHTYDVNGLRFNKHT

SEQ ID NO: 635 - DNA, 402 bp, Unknown
  Obtained from environmental sample
  misc_feature (1)..(402): n is a, c, g, or t
atgatgcttaaaacgccggttatttccgtagttctgggcgaaggcggatcaggcggagcgctcgctctgggcgtttgcgatcaacttgccatgcttgagaacgctctttattcggtaatttcgccgaaagggttcgcctcaattttatggaaagacggttcaagggaaagggaagccgcagaactgctgaaaatcacggcggaagacctgaaacgttttggaatctgcgatcaaattattgcggagccggacggcggagcgtcgaaggatatcgagtttacggcgaaaaacattaaagcgttccttgtagaaactgtaaataagttgattaaagaggactttaagagtttgcccgaaaaacggtatcagaaattccgcaagattggagtgttcaaagagtaa

SEQ ID NO: 636 - protein, 133 aa, Unknown
  Obtained from environmental sample
  misc_feature (1)..(133): Xaa is any amino acid
MMLKTPVISVVLGEGGSGGALALGVCDQLAMLENALYSVISPKGFASILWKDGSREREAAELLKITAEDLKRFGICDQIIAEPDGGASKDIEFTAKNIKAFLVETVNKLIKEDFKSLPEKRYQKFRKIGVFKE

SEQ ID NO: 637 - DNA, 378 bp, Unknown
  Obtained from environmental sample
  misc_feature (1)..(378): n is a, c, g, or t
atgacatttgacgtatcaaaaactttacttttaattattgacgcgcagaatgatttctgtccgggcggcgcgttggcggtgaacgacggagacgccgttgtttctccgctgaacgctatatcccgctctcttgccgaaaaaggcggtcgagtcgccgccactcaggactggcacggtacggggcatatctctttcgcgtcgtcgcataacggcaaaaaatccggcgatgttatcgacactccgctcgttaaaggacaggttctctggcccgaccactgcgttcagggaatccagggagccgattttcacaaagacattgatctcnaacccattttcatgattgtcccgcaagggtttcacaaagatattgattcctaa

SEQ ID NO: 638 - protein, 125 aa, Unknown
  Obtained from environmental sample
  misc_feature (1)..(125): Xaa is any amino acid
MTFDVSKTLLLIIDAQNDFCPGGALAVNDGDAVVSPLNAISRSLAEKGGRVAATQDWHGTGHISFASSHNGKKSGDVIDTPLVKGQVLWPDHCVQGIQGADFHKDIDLXPIFMIVPQGFHKDIDS

SEQ ID NO: 639 - DNA, 414 bp, Unknown
  Obtained from environmental sample
  misc_feature (1)..(414): n is a, c, g, or t
atgcttttattaagaaaaactcaaatttgcatgggttttatcgcgctgcaggccctctttgccgggcggcttgttgccgctcccctggacagcggttttgcccttgcccccaatgaatccgcttctccggctgaaaaagacgccgcgtacagggaagcgcgttcccgccttcttgccgcggccggaaaatacgaacgaacgccttaccgttacggcggaatgaatcgaaagggccttgattgttcggggcttgtgtttctcagtttccttgacgccgtgggagtttccgtaccgagaaacgccgaaagcctgtattcatgggttgaaaggattccgattgacgatgcacagccgggtgatcttgtgtttttcaggacaaccggaggcggtaggatttcacatgtggggatataa

SEQ ID NO: 640 - protein, 137 aa, Unknown
  Obtained from environmental sample
  SIGNAL (1)...(26)
  DOMAIN (66)...(137): NlpC/P60 family
  misc_feature (1)..(137): Xaa is any amino acid
MLLLRKTQICMGFIALQALFAGRLVAAPLDSGFALAPNESASPAEKDAAYREARSRLLAAAGKYERTPYRYGGMNRKGLDCSGLVFLSFLDAVGVSVPRNAESLYSWVERIPIDDAQPGDLVFFRTTGGGRISHVGI

SEQ ID NO: 641 - DNA, 753 bp, Unknown
  Obtained from environmental sample
  misc_feature (1)..(753): n is a, c, g, or t
atgacagattcggccgagggcattgttcctatgtcgcgcattgacgacgctgttatacgtattctgcgctttaagcaaaaactaaagttatttgaaacccctctgataacgcgcgcgggcgaaatcggcactgctgaaaacagggccgccgcgcgagagcttgtttccgactcgcttgttcttttgcgtaacgagaaagacacacttagaaaactttccgaaagtaaaaaaattttagttacgggtcagggagccaacaatatcggaatgcaatgcggcggatggacaataacatggcaaggaggaaacggcaatattacaaaagggactacaatactggaaggaatacgggaagtagtaaaggacaaagcttcggtttcttatgccgaaaacggcgacgtgggcggcacctttgacgctgtaatcgccgtaatcggagaggatccttacgccgaaacacaaggcgaccgctccggcaatatcagcatccgtcccaaagacatggaaatgcttaaaaaagcttatacttatcactgccctgtaacagtaatcatgttatcgggccgacctatgaacataggcgatgaacttaggaaatgggacgcgtttatcgccgcttggctgccggggacagaaggcgcaggtgttgcggacgttcttttcggagggaaaagttttgcggggcgcactccttacacatggcggaggacttataatggggcggttttgtttccttttggggcggggctttag

SEQ ID NO: 642 - protein, 250 aa, Unknown
  Obtained from environmental sample
  DOMAIN (59)...(250): Glycosyl hydrolase family 3 C terminal domain
  misc_feature (1)..(250): Xaa is any amino acid
MTDSAEGIVPMSRIDDAVIRILRFKQKLKLFETPLITRAGEIGTAENRAAARELVSDSLVLLRNEKDTLRKLSESKKILVTGQGANNIGMQCGGWTITWQGGNGNITKGTTILEGIREVVKDKASVSYAENGDVGGTFDAVIAVIGEDPYAETQGDRSGNISIRPKDMEMLKKAYTYHCPVTVIMLSGRPMNIGDELRKWDAFIAAWLPGTEGAGVADVLFGGKSFAGRTPYTWRRTYNGAVLFPFGAGL

SEQ ID NO: 643 - DNA, 429 bp, Unknown
  Obtained from environmental sample
  misc_feature (1)..(429): n is a, c, g, or t
ttgaaaataccgccttcctcttcatataaaaaaacgcaaggtattcaaattttaacaaaatggcagggcttggacgccgcctacagaaaaaccaaaagcatatcatttgattacgcaatagctgaaaagtgccggtcagtcatcatggttcgcgtgaattttaactggatcgacattggcaactgggaagaatatgttaatttattcgggagtaaaggcgcgcgggttttcaatgtgtcatcggaaagctgttttgtggactcagacattcccgtcgcccttgccggagtagaaaatttaatcgtggtaatccgcgtcggaaaaaacggttctcccgcgtccgcgctaatcacaaaaaaaggccaaacccagaaagtccgtgacatagtcgaacaaataaaaaaatccggaaaaacggacattctataa

SEQ ID NO: 644 - protein, 142 aa, Unknown
  Obtained from environmental sample
  misc_feature (1)..(142): Xaa is any amino acid
MKIPPSSSYKKTQGIQILTKWQGLDAAYRKTKSISFDYAIAEKCRSVIMVRVNFNWIDIGNWEEYVNLFGSKGARVFNVSSESCFVDSDIPVALAGVENLIVVIRVGKNGSPASALITKKGQTQKVRDIVEQIKKSGKTDIL

SEQ ID NO: 645 - DNA, 369 bp, Unknown
  Obtained from environmental sample
  misc_feature (1)..(369): n is a, c, g, or t
atggtttatcttgaggtgggcttcccgcttagatgccttcagcggttatcccttccgaacgtagctacccggcacttgcccttggcaggacaaccggtacaccagaggttcgtccatttcggtcctctcgtactaaaaacagctcctctcaaccatccaacgcccatggcagatagggaccgaactgtctcgcgacgttctgaacccagctcacgtaccgctttaattggcgaacagccaaacccttgggacctgcttcagccccaggatgcgatgagccgacatcgaggtgccaaaccttcccgtcgatgtggactcttggggaagatcagcctgttatccccggagtaccttttatccgttaagtga

SEQ ID NO: 646 - protein, 122 aa, Unknown
  Obtained from environmental sample
  misc_feature (1)..(122): Xaa is any amino acid
MVYLEVGFPLRCLQRLSLPNVATRHLPLAGQPVHQRFVHFGPLVLKTAPLNHPTPMADRDRTVSRRSEPSSRTALIGEQPNPWDLLQPQDAMSRHRGAKPSRRCGLLGKISLLSPEYLLSVK

SEQ ID NO: 647 - DNA, 705 bp, Unknown
  Obtained from environmental sample
  misc_feature (1)..(705): n is a, c, g, or t
gtgcgccttgacgcgcgtttggccgcggcgcggcctgataccgcggttgaaacgggcgttcttacggtgcagatcgaggtacccgacagcgggattgggattagtcccgaaaatcaggctcgccttttccatcctttctataaggccgatccgcacgttccgcatgaacacgccagggccgaactgggcctgtcaatttccaggcgccttgttgaaatgatgggcgggcgtatatgggttgactctgaactgggcatgggcgcgactatcggctttacttttccggcggagcggggcaaagccggtgaaaacggtctgcatatttgctggtcaaataaacgggcgctggttgtggacgatgcccccaatactctcgtatacttccgcagcgaggcatcccggctctctatttcctgcgatgtcgcgttaagcggcgaggcggcgcttgagatggttgagaaaaacggcccgtacgacatttactttatcgactggaagatgcacggcatgaacggcattgagaccgccgccaggatcagggaacttggcgccggcaagccttcaatagccttaatgatcccctcgcatgagcggaagctggcagaggaagacgccaaaaaagcgggcgttgaatattatttgcagaagccgctgttccgttccgatattattaactgccttaacaacttcttcactaatttatag

SEQ ID NO: 648 - protein, 234 aa, Unknown
  Obtained from environmental sample
  DOMAIN (113)...(228): Response regulator receiver domain
  misc_feature (1)..(234): Xaa is any amino acid
MRLDARLAAARPDTAVETGVLTVQIEVPDSGIGISPENQARLFHPFYKADPHVPHEHARAELGLSISRRLVEMMGGRIWVDSELGMGATIGFTFPAERGKAGENGLHICWSNKRALVVDDAPNTLVYFRSEASRLSISCDVALSGEAALEMVEKNGPYDIYFIDWKMHGMNGIETAARIRELGAGKPSIALMIPSHERKLAEEDAKKAGVEYYLQKPLFRSDIINCLNNFFTNL

SEQ ID NO: 649 - DNA, 789 bp, Unknown
  Obtained from environmental sample
  misc_feature (1)..(789): n is a, c, g, or t
gtggaaataaataaaaccgcgcgtgttctggaattgggtttggagccgggactttataacattactctgcagcaaggcggcgatctgttccgtaccgaggtaacgcttattcagggacagcgcactttggtttcaatgaaagattttactcgtattggaacagaccctgcccgcaggagaggagatgacgaagaaaatgatgttatcaagaataaatatatatatactttctttttaaatatggtttatgaaccttttccgtatccattgataggttttgtaaatattgcgtttggaaatcatagtatttttcaggctggctatgttaattggaattcggaagattttagcggttttcaagcggcttttaccaatacagtaggaggagattttaaagggttccagatggggtttgttaatgttaataaacatgaaacaaagggaatgcagataggtttttctaatcttgcagtaaaaaaaatggaaggcgtacagattggatttgtaaacattgcggcgcaagacatgaaaggacttcaacttggtcttattaactacgcggaaagtataaacggaacgccgatagggcttatttccatagtaaagaacggcggttatatggcgattgaatattttaattctgattatcacaattacaatttaagttttaaatcgggaatagaaaagttatatacttcaatagttgtttcatataataaatcttatgaaaatacatggaataatttcgcttcgggaatgggaattggttccatcctnntccataggtaa

SEQ ID NO: 650 - protein, 262 aa, Unknown
  Obtained from environmental sample
  misc_feature (1)..(262): Xaa is any amino acid
MEINKTARVLELGLEPGLYNITLQQGGDLFRTEVTLIQGQRTLVSMKDFTRIGTDPARRRGDDEENDVIKNKYIYTFFLNMVYEPFPYPLIGFVNIAFGNHSIFQAGYVNWNSEDFSGFQAAFTNTVGGDFKGFQMGFVNVNKHETKGMQIGFSNLAVKKMEGVQIGFVNIAAQDMKGLQLGLINYAESINGTPIGLISIVKNGGYMAIEYFNSDYHNYNLSFKSGIEKLYTSIVVSYNKSYENTWNNFASGMGIGSILXHR

SEQ ID NO: 651 - DNA, 699 bp, Unknown
  Obtained from environmental sample
  misc_feature (1)..(699): n is a, c, g, or t
ttggctcccgatgcgctgatgcagtctatcgccatggaaaatcaattgtcagagacggctttctttgtgccagagggggagggctacaggataaggtggtttacgcccgcaaacgaggttgacctatgcggccatgcgactttggccagtgcttgggtgctgctcaacgagctgcgccccgattgccgggaggtcaaattcctatccgtcagcgggccattgagcgttttcagagatggcgaatggctggtgctggattttcccaggcggcccggcgcgccggcggccgcacacatcccagcgctgacgagagttcttggcatcgagcctacggaagcgctgttgtcccgcgatttggtggcagtcctcgactcggaagagcaggtcaggacccttgcgcctgattttggggcgatggccgacctgcctggctttggggtcttggctacggccaagggcaatgggcacgattttgtcagcaggtgctttttcccaaaggacagcatcccagaagaccctgtgactggcagcgcccacagcacgctcatcccatattggtctaagcgattgaataaaaaacaccttagcgcattccaagcgtcccagaggggggggaggctgcgctgccaagattgtgacaatcgtgtgctgattggcggcaaggctgttaaaataatggaaggtacgatgtttgtctga

SEQ ID NO: 652 - protein, 232 aa, Unknown
  Obtained from environmental sample
  DOMAIN (2)...(228): Phenazine biosynthesis-like protein
  misc_feature (1)..(232): Xaa is any amino acid
MAPDALMQSIAMENQLSETAFFVPEGEGYRIRWFTPANEVDLCGHATLASAWVLLNELRPDCREVKFLSVSGPLSVFRDGEWLVLDFPRRPGAPAAAHIPALTRVLGIEPTEALLSRDLVAVLDSEEQVRTLAPDFGAMADLPGFGVLATAKGNGHDFVSRCFFPKDSIPEDPVTGSAHSTLIPYWSKRLNKKHLSAFQASQRGGRLRCQDCDNRVLIGGKAVKIMEGTMFV

SEQ ID NO: 653 - DNA, 576 bp, Unknown
  Obtained from environmental sample
  misc_feature (1)..(576): n is a, c, g, or t
atgacttttcgcatttcatttaagaaaattatcctctgtttcctcggatgtatgtttcttccgttttctctgtattcattgggtaaatccgaacagggtaaagaaaactccgcaaacataatcccggctgcggaaccagaaagacatgaacctcctaaacaggaagtaaggagtccggtaatgcttgccggaacaatcaacgggctttattccatggaaccgacagggcttagtacgctgcgatccggggaagtaaagaaaatattgcatgtaaaacctaatggctctgcaggaaatcctgacgggtactggtctattctgggcggcgatgggattttggtttcgacggatttaaaaagatgggaacaacgcggtcaggggcttccaataaaaacgattaaggtttttcaggacgggaacaaatcatttttgcgtgtgccgcaggagataaaggatctggaaataaatccggcggatccgcggataatggtctgcgccaccaaggacaacgtatacttaagcagggatcagggcgtgtcatggagaaaccctgggcgctcctccttatcggactaa

SEQ ID NO: 654 - protein, 191 aa, Unknown
  Obtained from environmental sample
  SIGNAL (1)...(28)
  misc_feature (1)..(191): Xaa is any amino acid
MTFRISFKKIILCFLGCMFLPFSLYSLGKSEQGKENSANIIPAAEPERHEPPKQEVRSPVMLAGTINGLYSMEPTGLSTLRSGEVKKILHVKPNGSAGNPDGYWSILGGDGILVSTDLKRWEQRGQGLPIKTIKVFQDGNKSFLRVPQEIKDLEINPADPRIMVCATKDNVYLSRDQGVSWRNPGRSSLSD

SEQ ID NO: 655 - DNA, 741 bp, Unknown
  Obtained from environmental sample
  misc_feature (1)..(741): n is a, c, g, or t
atggcaaatacagaattaaacgcgctgaataaggcgcaggcgtaccaactggcggatattaccaaaaccccgccgcaattcggcgcaatcactccgcgctggctgacccgttttctggaattcaaagggcttgatgccggtatttaccgtgtaaacaaagtggctgagggagaaacgccgctcgatgttttatgctcatctgaaaagaaaagcgccgagattccagaaggatatgtggagtatcaacaaaaaccgagggaatatacgctcaactcaatttctaccattatcaacgttgataccgccgtagaggacgtattctcttcgccttacgaccagacaaaagagcagcttcatttggctattgaaagcttgcgtgagcgtcaggaaagccaaatcatcaataatgatgattacggcctgttgaaaaatgttcccgatagccagcgcataacgccaggaaacaaggcgggttctcccatgcccgatgatctggatgaattgcttactaaagtgtggaaagagccggcgttctttttggcgcacccgcgggctgttgccgcttttcagcgggaatgtacacgcagaggtgttcctcccgctaccacgtcaatttttggcggcacatttatactgtggcgcggcattcccatagtacctacggataaattgtttgtggacggtctgaaaaacccaaaaagcaagagcggaaaaaccatatttactggttcgtaccggtga

SEQ ID NO: 656 - protein, 246 aa, Unknown
  Obtained from environmental sample
  misc_feature (1)..(246): Xaa is any amino acid
MANTELNALNKAQAYQLADITKTPPQFGAITPRWLTRFLEFKGLDAGIYRVNKVAEGETPLDVLCSSEKKSAEIPEGYVEYQQKPREYTLNSISTIINVDTAVEDVFSSPYDQTKEQLHLAIESLRERQESQIINNDDYGLLKNVPDSQRITPGNKAGSPMPDDLDELLTKVWKEPAFFLAHPRAVAAFQRECTRRGVPPATTSIFGGTFILWRGIPIVPTDKLFVDGLKNPKSKSGKTIFTGSYR

SEQ ID NO: 657 - DNA, 546 bp, Unknown
  Obtained from environmental sample
  misc_feature (1)..(546): n is a, c, g, or t
atggaaacagcggcttttttgaataattcaggcattgcgttaaccgaggcaaatcgcccttacgaagcgattccccttttccgcaaagccttaggtctggaaccggaaaaccccttattgtggctcaatctgggaatagcccagcagcacaccggcaactatgaagaggctattgagtgctttcacaaagcgcttaacatagacaaccgccttggcgaagcatggctttccatggggcttatccactatgaaatggaagaattcgagctttgcgaggattgttacagatccgcgcttgcccataatgacagtgatccgaaagcctggaacaatctgggggttttgttctttacaaaaggtgattatgaagaagcccgcagatgttttgaggaagcggtaagccttgtgccacattaccatgacgccctggttaacctgagggacagctgccggcagcttggcgatttccgcgccgcggcggaatttgaagggctctctcagaactcggtggggacaaataagtttgagaagtctgtatgtcgctga

SEQ ID NO: 658 - protein, 181 aa, Unknown
  Obtained from environmental sample
  DOMAIN (72)...(105): Tetratricopeptide repeat
  misc_feature (1)..(181): Xaa is any amino acid
METAAFLNNSGIALTEANRPYEAIPLFRKALGLEPENPLLWLNLGIAQQHTGNYEEAIECFHKALNIDNRLGEAWLSMGLIHYEMEEFELCEDCYRSALAHNDSDPKAWNNLGVLFFTKGDYEEARRCFEEAVSLVPHYHDALVNLRDSCRQLGDFRAAAEFEGLSQNSVGTNKFEKSVCR

SEQ ID NO: 659 - DNA, 447 bp, Unknown
  Obtained from environmental sample
  misc_feature (1)..(447): n is a, c, g, or t
atgaagatcgcggccaaaaataacaaggctttccacgactacgaggtcatcgagagggtggaggcgggggtcatgctgaccggcgcggaggtcaagtccgtccgggccgggcgcataagcctcgccgacagctacgccgtctgcatccacggcgagatgttcgtgaaccacctgcacataagttcctacgagcgcggcggcctctacacgcccgaacccacgcgccggcgtaaactgctgatgcacaagaaacaggtcacgttcttctgcaccgaggtggaacgcaaacagttggcgttgatccccctgtcggtctacttcaaggatcaatgggtcaagatagagataggcctctgccgggggcggaagaagtacgataagaggcagaagatcgcggagcaggaggccaaaaagaggatcgctcagttggtgaaggctcggaattaa

SEQ ID NO: 660 - protein, 148 aa, Unknown
  Obtained from environmental sample
  DOMAIN (2)...(70): SmpB protein
  misc_feature (1)..(148): Xaa is any amino acid
MKIAAKNNKAFHDYEVIERVEAGVMLTGAEVKSVRAGRISLADSYAVCIHGEMFVNHLHISSYERGGLYTPEPTRRRKLLMHKKQVTFFCTEVERKQLALIPLSVYFKDQWVKIEIGLCRGRKKYDKRQKIAEQEAKKRIAQLVKARN

SEQ ID NO: 661 - DNA, 579 bp, Unknown
  Obtained from environmental sample
  misc_feature (1)..(579): n is a, c, g, or t
atgaaaaacaatttgttttctatattattattaatttttactatatcttttgttatttcttgttcatcaagcagcgtcaatggcgctattgaaaaatcaaataagcatggcagtactgccggagtattattaagctttgatgattataacccgactacatgggaaaaacatttttatttatttgataaatacggcgcaaaagtaacattttttgttacaggaagatctgttacaaaatttatgcttgatgcgcaaaaacgcggacatgagattggttatcataccattaatcatccgaatttatcaaaagtatcaaaaaccgtattttatacacaaactatttccagaaaaaacgcattcaaaagaggcggtattgaattaacttcatttgcttatccttacggaagttatactccatggatgaatagagaattattgaaacattacaaaatagtcagaggatttaatggatttaatatttattcaaaggacgaaataaaatcggggtttataaattcagcgtctattgantattatttttttggtactgataaatcatttaaaacaaatattgattaa

SEQ ID NO: 662 - protein, 192 aa, Unknown
  Obtained from environmental sample
  SIGNAL (1)...(28)
  DOMAIN (35)...(154): Polysaccharide deacetylase
  misc_feature (1)..(192): Xaa is any amino acid
MKNNLFSILLLIFTISFVISCSSSSVNGAIEKSNKHGSTAGVLLSFDDYNPTTWEKHFYLFDKYGAKVTFFVTGRSVTKFMLDAQKRGHEIGYHTINHPNLSKVSKTVFYTQTISRKNAFKRGGIELTSFAYPYGSYTPWMNRELLKHYKIVRGFNGFNIYSKDEIKSGFINSASIXYYFFGTDKSFKTNID

SEQ ID NO: 663 - DNA, 681 bp, Unknown
  Obtained from environmental sample
  misc_feature (1)..(681): n is a, c, g, or t
gtgattagcacagatagttgcataattgtgcatttttacatttatgttgaaaatagggatcttatttcctatattttaaattctccaaaagctatgaatgaaaaatttaacaatgaattggaagctcaaataaatggagacttgcctaaagggcatatttaccagcttggcagacctgaggatattctgcggaatacaggaataccagacttgcctattgaagtaaatgcaacaaccttaacaaaaaaatcagatccgaactacaaaaattcacatccatttgagctatcggaaataaaagacttgccaaatgctatacaagaccctattatgatttttgacagcaaaacgagaaaagggagtaaggttattttaaccgagttgcaaagcaagggcgttaattttgtcgtggctatggagataaatcataaaagaggggctaacaagggcgtaatagaagtaaactcaattagaagcctctatccaaaggaccaattaaaggatatttacaattgggttaaggaaggattgttgaaatacgtcaataaagaaaaggcttccacattcgtgaaccaactgcggtctcaatttccgcagaagtggcacggcgatgtggaagcctatatggataatatagtaaataatttagaggaaagcaagggaaaaggcgaaaaaaagtag

SEQ ID NO: 664 - protein, 226 aa, Unknown
  Obtained from environmental sample
  misc_feature (1)..(226): Xaa is any amino acid
MISTDSCIIVHFYIYVENRDLISYILNSPKAMNEKFNNELEAQINGDLPKGHIYQLGRPEDILRNTGIPDLPIEVNATTLTKKSDPNYKNSHPFELSEIKDLPNAIQDPIMIFDSKTRKGSKVILTELQSKGVNFVVAMEINHKRGANKGVIEVNSIRSLYPKDQLKDIYNWVKEGLLKYVNKEKASTFVNQLRSQFPQKWHGDVEAYMDNIVNNLEESKGKGEKK

SEQ ID NO: 665 - DNA, 813 bp, Unknown
  Obtained from environmental sample
  misc_feature (1)..(813): n is a, c, g, or t
atgaagaacgccgggaaatcaggggcgccggcttacttctacatggccgcctctccgggagaagaagaattctacctgaagggcatcagcgatgtaatcggaagggttccgtatttcgggggaagcgccgcggacaacactatctcgggcgcatggaaactgtttgccaacaaccatgttttcgcggacggcgtggcagtcgccttcttttatacggacaaaccggtgacaaacctttttaccggcgcttaccgtgagaccgcggatgttgggatcatcacaaaggtgaaagacaacaggacgcttgtggagattgacggagtgccggcgcttaagaaatacgcgcaatgggcgggagttgatccggaaactctcaaaggcgacgatctgctggtctatacgatcacgtccccgttaggtgtaaaggacaggcttggcgacctcatcgctatccggcatcccatgaacggcaacgacgattattcaatggccatcggggcaaatctcgccgaaaaaacggctgtaatacgaatggagggatcggcggaagaactggtttcatccgcctcgcatacgattgacgctttgaagaataaaatgaaaacccctcccgcggcgtaccaccttgttcactgcggcggacgcagggccggaattggggagcgtattgacgaagtggttcaggaggtgaagaaagcggcgggcggcgttccatttatcatggaattcacgtttggtgaatacggctacgaagacgacggcaataacacaaccggcggccttatgctgtcttacacgggtttcgcgcaatag

SEQ ID NO: 666 - protein, 270 aa, Unknown
  Obtained from environmental sample
  DOMAIN (5)...(172): Domain of unknown function (DUF1745)
  misc_feature (1)..(270): Xaa is any amino acid
MKNAGKSGAPAYFYMAASPGEEEFYLKGISDVIGRVPYFGGSAADNTISGAWKLFANNHVFADGVAVAFFYTDKPVTNLFTGAYRETADVGIITKVKDNRTLVEIDGVPALKKYAQWAGVDPETLKGDDLLVYTITSPLGVKDRLGDLIAIRHPMNGNDDYSMAIGANLAEKTAVIRMEGSAEELVSSASHTIDALKNKMKTPPAAYHLVHCGGRRAGIGERIDEVVQEVKKAAGGVPFIMEFTFGEYGYEDDGNNTTGGLMLSYTGFAQ

SEQ ID NO: 667 - DNA, 732 bp, Unknown
  Obtained from environmental sample
  misc_feature (1)..(732): n is a, c, g, or t
atgtttgacgcacagaaagttaaaaatgatattgttgattggatacgcgctttcttcaacgactgcggccccggttgcaacgcggtggtcgggatcagcggcgggaaggacagctccgttaccgcggcgctctgtaccgaagcgcttggggctgacagggtcgtcggcgttttgatgcctcgtggcgaacagtatgatattgatttctcccgtgaagtcgtcaatcacctaaagataaaaagttacgtcgtcaacataaaggatgccgtggacgctcttttcgcctctgtcaacgcgggggggctgacgcccggccctcaggcgcttgtcaatactccggcccgtatcaggatgtccgtcctctacgcggtcgcggctactgtcaacgggcgggtggccaatacttgcaatttgagcgaggactgggtgggctactccacgaagttcggcgacagcgccggagacttttcgccgcttgctcaaatcacggtggcggaggtcagggcgcttgggcgggcgctgtctctgccggcaaaaatcatcgaaaaggtgccggaggacgggctatccggaaaatcggacgaggagaaccttggctttacttacgcggtgctggacaagtacatccgcgaaggaatctgcgaagacgcgacggtcagggagcggattgacaagcttcacgaggctaatctgcacaagctgcgctttatgccgtgctttgagttgcgttga

SEQ ID NO: 668 - protein, 243 aa, Unknown
  Obtained from environmental sample
  DOMAIN (7)...(238): NAD synthase
  misc_feature (1)..(243): Xaa is any amino acid
MFDAQKVKNDIVDWIRAFFNDCGPGCNAVVGISGGKDSSVTAALCTEALGADRVVGVLMPRGEQYDIDFSREVVNHLKIKSYVVNIKDAVDALFASVNAGGLTPGPQALVNTPARIRMSVLYAVAATVNGRVANTCNLSEDWVGYSTKFGDSAGDFSPLAQITVAEVRALGRALSLPAKIIEKVPEDGLSGKSDEENLGFTYAVLDKYIREGICEDATVRERIDKLHEANLHKLRFMPCFELR

SEQ ID NO: 669 - DNA, 624 bp, Unknown
  Obtained from environmental sample
  misc_feature (1)..(624): n is a, c, g, or t
atggaggcatgttcggcgatgaacggcataggcctggtaaaattgatgggacgcgagtccggatttatcgccgcatgtancgcgctggcaagccacgaggtgaatttcgtgcttatccccgaggtgcctttcaacctggaaggctataacggattcctccaccaccttgaggaacgccttaaaaagcgcaaacacgccgtgatcatcgtggcggaaggcgccatgcaggaacagctcttaaccgagaagaaaaccgacgccggcggcaacttgaaactggccgacgtaggcacctatatcaaggacaggatcatcaagtattttgacgataaaaaaatcgacatcagtctcaagtacatcgatccgagttatgtgatacgatccgctccggcaaatccggcggattcgatttactgcgaacgcctcgggaacgcggcggcgcacgcggcgatggccggaaaaaccaatgtggtaatcggactggtaaacaacaaatatgtgcatgtgcccattaaggcggctattgcccagcgccgccatgtcgatcccgaaggaaacctctggcgcgatatgcttgacgctacccagcagcccgcgcagatggtgaacaagtttgagaaatga

SEQ ID NO: 670 - protein, 207 aa, Unknown
  Obtained from environmental sample
  misc_feature (1)..(207): Xaa is any amino acid
MEACSAMNGIGLVKLMGRESGFIAACXALASHEVNFVLIPEVPFNLEGYNGFLHHLEERLKKRKHAVIIVAEGAMQEQLLTEKKTDAGGNLKLADVGTYIKDRIIKYFDDKKIDISLKYIDPSYVIRSAPANPADSIYCERLGNAAAHAAMAGKTNVVIGLVNNKYVHVPIKAAIAQRRHVDPEGNLWRDMLDATQQPAQMVNKFEK

SEQ ID NO: 671 - DNA, 372 bp, Unknown
  Obtained from environmental sample
  misc_feature (1)..(372): n is a, c, g, or t
gtgaaaaaaaatcaaaaatcaaaaataacccagaatgacgtagcccggcttgcgggggtaacccgtagcatggtgtcttatgtaatcaacggcaatgaccgctccgtcgcgcctgttaccagacaaaaaattcttgacgccataagcgagcttgaatacaggccgaataaattcgcccaggctttaagcaagggcaacaagggtgtttttgcggatcaaaatataggcattgtgctgtgcgatgccggtatatttctgcggccgtattatgcggaaatactggcggggattcaccaggcggcgcatgagaagggccttcacatacggtttatacgtttttttaatgatttaaaagatccgggttctgtttaa

SEQ ID NO: 672 - protein, 123 aa, Unknown
  Obtained from environmental sample
  DOMAIN (9)...(34): Bacterial regulatory proteins, lacI family
  misc_feature (1)..(123): Xaa is any amino acid
MKKNQKSKITQNDVARLAGVTRSMVSYVINGNDRSVAPVTRQKILDAISELEYRPNKFAQALSKGNKGVFADQNIGIVLCDAGIFLRPYYAEILAGIHQAAHEKGLHIRFIRFFNDLKDPGSV

SEQ ID NO: 673 - DNA, 408 bp, Unknown
  Obtained from environmental sample
  misc_feature (1)..(408): n is a, c, g, or t
ttgtggggccttgacgataaaatgagtctgcaacgcgccaaaacggacgcggaccgcataaggctttcaggccttttggattacgcccgagacacaacccaatgcagaaggcagactctgttaaaaatgcttaattacgacagcggcggcgaaagcccggaaacccaatgctgcgacgtgtgcgaacatgaggcaagcgccgcgttacgcgaagaagcgggcgtccttaattttttccgcagaaacaaacgctgttattcgataaatgaggcctgcggtaaattggcgcaatcagaaagccattactggtcagagggagaggcgaagcagacgattaatcatttactctccgccggaaagcttaaggaatcaaagaatcccttgttcaatcgccgtataatatgttaa

SEQ ID NO: 674 - protein, 135 aa, Unknown
  Obtained from environmental sample
  misc_feature (1)..(135): Xaa is any amino acid
MWGLDDKMSLQRAKTDADRIRLSGLLDYARDTTQCRRQTLLKMLNYDSGGESPETQCCDVCEHEASAALREEAGVLNFFRRNKRCYSINEACGKLAQSESHYWSEGEAKQTINHLLSAGKLKESKNPLFNRRIIC

SEQ ID NO: 675 - DNA, 537 bp, Unknown
  Obtained from environmental sample
  misc_feature (1)..(537): n is a, c, g, or t
ttgataatgataacatccgatttcctaatccgtatacccgcgatcctcttagccctaactctccacgagctctcccacgcgttaaccgcctgcaaattaggcgaccccaccgcccgcgaccaaggccgccttacgctcaacccgctcgcccatctcgacctattaggcaccataatgctcctcaccggcctgttcggctgggccaaaccggtacccgtgaacccgtacaacctccgcaaccccaaacgcgacctcatgcttataagcgtcgcaggcccgttgtcaaacatcatacaagcgctatgctgcggttttatcataagagcgatcatggcgtcagtaccgaccgccgcggctctccaagaaacgccgctgaccagatacttgttattgttctttatcttggcattctggataaactccggcttagccttcttcaacctgctgccgctctacccgtggacggttcgaagatactcgctggttcctgccggacaaacacatctcggccgatctgatcattgccgnnnnnnatag

SEQ ID NO: 676 - protein, 178 aa, Unknown
  Obtained from environmental sample
  SIGNAL (1)...(27)
  DOMAIN (10)...(168): Peptidase family M50
  misc_feature (1)..(178): Xaa is any amino acid
MIMITSDFLIRIPAILLALTLHELSHALTACKLGDPTARDQGRLTLNPLAHLDLLGTIMLLTGLFGWAKPVPVNPYNLRNPKRDLMLISVAGPLSNIIQALCCGFIIRAIMASVPTAAALQETPLTRYLLLFFILAFWINSGLAFFNLLPLYPWTVRRYSLVPAGQTHLGRSDHCRXX

SEQ ID NO: 677 - DNA, 336 bp, Unknown
  Obtained from environmental sample
  misc_feature (1)..(336): n is a, c, g, or t
ttgcgccttgccatagatgcaacaacccacgcgggccagtatgcttacgttcaccgccgcgacaaaaaaggcgattaccgctccttgtggataacccgcctgaacgcagcagtccgcgagcacgataaggttgaactacagcgagttcatacacttgctcggtgccgccaacataaacctcaaccgcaaggttctggcagatttggcaatcacagatccggccgcatttgcaaaggtagtggaaatagccgcatttctcttgaccgtgtttcacggttcagcagagatagcggctacaagctctgcccntcggcgatctgtcatgggnnnaaatga

SEQ ID NO: 678 - protein, 111 aa, Unknown
  Obtained from environmental sample
  misc_feature (1)..(111): Xaa is any amino acid
MRLAIDATTHAGQYAYVHRRDKKGDYRSLWITRLNAAVREHDKVELQRVHTLARCRQHKPQPQGSGRFGNHRSGRICKGSGNSRISLDRVSRFSRDSGYKLCPSAICHGXK

SEQ ID NO: 679 - DNA, 342 bp, Unknown
  Obtained from environmental sample
  misc_feature (1)..(342): n is a, c, g, or t
gtgatagaactgtactatggccatgccacaagcgaacagtttcacagcgaattgaaaagcgacatgggccttgagcggctgccgtcagtgaaacttgcggtaaacaagatagtgctggcagtggcgatgaacgcttataacgctttgaagctgcttggtcaaaaatccatagagaaggatggccgtaaaaaactgaaacggaagcgtctggtaaaacacggcagagacttgatatttaaaataaatgaaagagaccctgcgctgcctgtatttgagcgnatttctttgtgttgnttttttgaagtctattcattttttatacggattaatgtaactaaataa

SEQ ID NO: 680 - protein, 113 aa, Unknown
  Obtained from environmental sample
  misc_feature (1)..(113): Xaa is any amino acid
MIELYYGHATSEQFHSELKSDMGLERLPSVKLAVNKIVLAVAMNAYNALKLLGQKSIEKDGRKKLKRKRLVKHGRDLIFKINERDPALPVFERISLCXFFEVYSFFIRINVTK

SEQ ID NO: 681 - DNA, 921 bp, Unknown
  Obtained from environmental sample
  misc_feature (1)..(921): n is a, c, g, or t
atgaatattctctctgataccanaattttctgcgtggaattttttacagttgggtatcccgaaaaaccggtaaatattttgtttcanagcggagtaggcctgcttgtagcctacagaggaggagaagatggattatttaatgatgttacaaagaatcgtggttcttttttggtggatgcggcagccggagtaaccataccgctgtcttctacatggcatattgagccttcaattcgtataggctatccgcacattgcgggaatcagcgtaacaataggacgcaaaataaatttcggagcgggacagaataaatattcttgtgaaaaatgtttttctgcggttgagccggtcatatctgaacctaatacggaacaatctaacgtaaatattgaaagcgacaataggaataaaaacgaacctgttctaaatgatgttgtaaatcccgaagctgtcatgcttggagctgagatagaacaatccaacgtaaatattgacagtgataaacagaaactaaacggacttattttcagcgatattgcgtatgttgaatccgtcatgtttggagcggacatagaacaatataacgtaaatgttgacagcgatacgataaaacataatgaatcggttcttaatgaaattacgaaaatgttaaaaaagaatcctaattatcgggtaagaatagaaggtcacgcaaatccttttgtcagtgatccaaacaaagctaaagggcttatagctttcagcaaaaggcgggcggatacagttgccgaacagtttagggcaatgggcgtagatgaaaaacaaatgtttgttatcgcttttggcggcgcaagacctattagcggcaataaatacaacagcgaaaagaatcgccgtgttgaacttatagtttttaaagatactgttgtgactatgccatga

SEQ ID NO: 682 - protein, 306 aa, Unknown
  Obtained from environmental sample
  DOMAIN (197)...(291): OmpA family
  misc_feature (1)..(306): Xaa is any amino acid
MNILSDTXIFCVEFFTVGYPEKPVNILFXSGVGLLVAYRGGEDGLFNDVTKNRGSFLVDAAAGVTIPLSSTWHIEPSIRIGYPHIAGISVTIGRKINFGAGQNKYSCEKCFSAVEPVISEPNTEQSNVNIESDNRNKNEPVLNDVVNPEAVMLGAEIEQSNVNIDSDKQKLNGLIFSDIAYVESVMFGADIEQYNVNVDSDTIKHNESVLNEITKMLKKNPNYRVRIEGHANPFVSDPNKAKGLIAFSKRRADTVAEQFRAMGVDEKQMFVIAFGGARPISGNKYNSEKNRRVELIVFKDTVVTMP

SEQ ID NO: 683 - DNA, 837 bp, Unknown
  Obtained from environmental sample
  misc_feature (1)..(837): n is a, c, g, or t
ttgtttatatggccgaagaccgcgatattggcggatcattacacatttatatccaagctggattacccgcatcttcgcataaacgatgtcctgaacgtttcggtaggtttgattaaggaaacagcctacgcctcattgtttaaaggttggtttcccgaccataaaaacgtcgtggaatacgaaaactccaacgccgcttttgacgcgctcgaacgcggcgaagtcgatctggtgatggcgaatttgagccagctcctcatgctgaccaattactacgagcgcgccggttacaaggcgaatatcgtattcgatttcgtttccgagtccacctttggatttaataagaacgaggctgttttatgctcaatagtggacaaggcgctagcgcttgtggacacaaaggagatatccgaacagtggatgcgcaagacatataattacaacgcgaaattggcgaggttgcatcgtttttggttaatcatcgcggctgttttgcttttttccatactcgtacttttgttcattttctttcaaaatagccgccgctccgcaaaacagcttgaaatacttgtgcagaagcggaccgccgagcttgtgagcgccaaccgcgccaaatcgtcgttcctttccaacatgagccacgaaatgcgaacgcctcttaacgcgataaccggcatgacgatgatcggtagaagagccaaagacattgagcgcaaagattacgcgcttgataagataggcgaagcctcaacgcacctgctcggtgtcataagcgatgtgctggatatgtcaaaaatcgaagctaatatgctggaaatatcgcctgtggaattttaa

SEQ ID NO: 684 - protein, 278 aa, Unknown
  Obtained from environmental sample
  DOMAIN (204)...(269): His Kinase A (phosphoacceptor) domain
  misc_feature (1)..(278): Xaa is any amino acid
MFIWPKTAILADHYTFISKLDYPHLRINDVLNVSVGLIKETAYASLFKGWFPDHKNVVEYENSNAAFDALERGEVDLVMANLSQLLMLTNYYERAGYKANIVFDFVSESTFGFNKNEAVLCSIVDKALALVDTKEISEQWMRKTYNYNAKLARLHRFWLIIAAVLLFSILVLLFIFFQNSRRSAKQLEILVQKRTAELVSANRAKSSFLSNMSHEMRTPLNAITGMTMIGRRAKDIERKDYALDKIGEASTHLLGVISDVLDMSKIEANMLEISPVEF

SEQ ID NO: 685 - DNA, 678 bp, Unknown
  Obtained from environmental sample
  misc_feature (1)..(678): n is a, c, g, or t
gtgagcgacacaggcataggaataagcgaggaacagcaggaaatcctcttcaacccgttccaacaggcggagtccaacacgacgcgcaaatacggcggcaccgggcttggcctcgcgatctcaaaaagcatcgtggagatgatgggcggcaaaataggaatcatatcagaaatcggaaacggctctgtttttacatttacggtacaggcccaaaaaggttcttttgtaaatgatacgcgtgacaccgacgacaccgcgaataagaacgaggcggacatcgtcggtatttttgagggccgtaacattctgctagtggaagacgtgtaccttaaccgtgagatagtgcgggcgttgcttgaaccgacgcgggcctctatagactgcgcggaaaacggcgcggaagccgtgcgcatgttctcggaagcccccgacaagtacgccctgatcttcatggacgtgcagatgcccgaaatggacggctacgaggccacgcggcgcatacgggctatggatatgcccaaggcccaaaccattccgatcatcgcgatgaccgcgaacgtctttaaggaagatatagagaagtgcgaagcggccggcatggacagccatctcggcaagccgcttgattttgaggaacttctgaacaaattgcgcgggtatttgcttcanaacccgtag

SEQ ID NO: 686 - protein, 225 aa, Unknown
  Obtained from environmental sample
  DOMAIN (1)...(71): Histidine kinase-, DNA gyrase B-, and HSP90-like ATPase
  misc_feature (1)..(225): Xaa is any amino acid
MSDTGIGISEEQQEILFNPFQQAESNTTRKYGGTGLGLAISKSIVEMMGGKIGIISEIGNGSVFTFTVQAQKGSFVNDTRDTDDTANKNEADIVGIFEGRNILLVEDVYLNREIVRALLEPTRASIDCAENGAEAVRMFSEAPDKYALIFMDVQMPEMDGYEATRRIRAMDMPKAQTIPIIAMTANVFKEDIEKCEAAGMDSHLGKPLDFEELLNKLRGYLLXNP

SEQ ID NO: 687 - DNA, 735 bp, Unknown
  Obtained from environmental sample
  misc_feature (1)..(735): n is a, c, g, or t
ttgatgccgggatgtttaacggtcgtccgggatttttctcttctctcgtatttaaatatagtttataataaatatgggtgtaatttcttttggaggggagagtcaaaattgtctgctcgagcactgttcacagcgctgtttatatggatatttgttttttctgtaacaaatgtcttcgctcagagcgatcttgccggagatcctccggcctcagaagaaacccctgaccctatcagaaccaacgaacagtcgctgataatcgggagcgccgacacaggggtcgcagtgcctgctgcttcgtcagtttccgtttttagcatcttaagggtgcttctgactctcgcggtggtcgctgcggcaatctacgggttggtctattttctgaaattcagacgggcatcaagcgccggggcggaacaggatccatttctcaagattctcgcaaatgtcccgctgggtacgagccgtggcgtttatgtagtttctgtcggaccgcaggcatggcttgtgggctcagccgaaaacggcgtaaacctgataagcgaaataacggacaaggacacgataaacgcgatgctccttgaggattcaaaaagggtagccgcgccgtccggaactgccaggcctttgcttgattttaaggctatactggaaaagtttggagcttcagcaaaaaccgaaaattcaggcccggatcaaatacgcaaacgcagcgaaaggctcaaggggctctga

SEQ ID NO: 688 - protein, 244 aa, Unknown
  Obtained from environmental sample
  misc_feature (1)..(244): Xaa is any amino acid
MMPGCLTVVRDFSLLSYLNIVYNKYGCNFFWRGESKLSARALFTALFIWIFVFSVTNVFAQSDLAGDPPASEETPDPIRTNEQSLIIGSADTGVAVPAASSVSVFSILRVLLTLAVVAAAIYGLVYFLKFRRASSAGAEQDPFLKILANVPLGTSRGVYVVSVGPQAWLVGSAENGVNLISEITDKDTINAMLLEDSKRVAAPSGTARPLLDFKAILEKFGASAKTENSGPDQIRKRSERLKGL

SEQ ID NO: 689 - DNA, 798 bp, Unknown
  Obtained from environmental sample
  misc_feature (1)..(798): n is a, c, g, or t
ttgaccattgaagacatccttgctgtcaaacatcagccaaaaatcgaaacatttgaaaattaccgttttatctccctgaaatcaattacacagggagaaaaggaatttgttattgagcatatcagtataatcataatgaaaaacgtgttaataaccgttcaggaaatacctggcgattcattcggggagataaggaaacatattttgagtaatatcgggcggatccgcaaaatggggacggattatcttgcctactccctgattgataccgtggttgacgaatattttattacattggcccatctggaagacgatattgaagaccttgaagaccgcgcctcaaaaacaaataacgacacgttcatttcagaaatacaggatacaaagaaaaaccttttccatataaaacgggcaatgctgccgctgcgggaaaatcttatgagtatatcccgccaggatatgctgtcggcaaacgaggaactaaagcccttccttcaggacctgcgggaaaatttatcaaacgcgatagaatccgtagagacctaccgtgaatggctgacaaacataatggacgtaaatctttcggttctgtcataccaattaaacaaagtgatgaaaatactggctgtaatatcggcggtatttatcccattgacttttatcgcgggggtatacggcatgaattttcaatttatgcccgaactggcgcaccccctgggctaccctattgtgctggtatgcatgatatctgtcgcgatgataatgcttatattatttaaaatacggaaatggttttaa

SEQ ID NO: 690 - protein, 265 aa, Unknown
  Obtained from environmental sample
  DOMAIN (1)...(265): CorA-like Mg2+ transporter protein
  misc_feature (1)..(265): Xaa is any amino acid
MTIEDILAVKHQPKIETFENYRFISLKSITQGEKEFVIEHISIIIMKNVLITVQEIPGDSFGEIRKHILSNIGRIRKMGTDYLAYSLIDTVVDEYFITLAHLEDDIEDLEDRASKTNNDTFISEIQDTKKNLFHIKRAMLPLRENLMSISRQDMLSANEELKPFLQDLRENLSNAIESVETYREWLTNIMDVNLSVLSYQLNKVMKILAVISAVFIPLTFIAGVYGMNFQFMPELAHPLGYPIVLVCMISVAMIMLILFKIRKWF

SEQ ID NO: 691 - DNA, 405 bp, Unknown
  Obtained from environmental sample
  misc_feature (1)..(405): n is a, c, g, or t
atggaaggcctctgcatgatgatgctggacgatcctgacctggttcatgaaatggccgagttctgggccggttttatcggaaaaatacttaagaaggtttgttccgggatagagctggataccgcgtttataaacgaagatatggcatacaaggcccacagcatgatttcttctcaaatgacgcgggaatttatccagggcgcgtataacgcctgggttccgctaataaaaggatccggctgcccggttgttgaattggacagcgacggttacgtgagttacctcatccctatttggattgaatccggcattaactgtaacagtcccgtggaagtcgcggcccacaataatattcttgaattccgaaagcgttacggaaaggacatggcgttaaaggcgggatag

SEQ ID NO: 692 - protein, 134 aa, Unknown
  Obtained from environmental sample
  misc_feature (1)..(134): Xaa is any amino acid
MEGLCMMMLDDPDLVHEMAEFWAGFIGKILKKVCSGIELDTAFINEDMAYKAHSMISSQMTREFIQGAYNAWVPLIKGSGCPVVELDSDGYVSYLIPIWIESGINCNSPVEVAAHNNILEFRKRYGKDMALKAG

SEQ ID NO: 693 - DNA, 510 bp, Unknown
  Obtained from environmental sample
  misc_feature (1)..(510): n is a, c, g, or t
atgaaagactgcatgcgtcagataagacatttcatgtcctgccacccggatgctgatggatattcaaataacttctacttccccgcgcttaaaaactcccgcaaactgataaaagatgattatgctgacgcaaaatcccttgcggtatattttggcaagctgcgtgattcctgggacagcctcagaatcgtaaagatcgaggctaataccaagccggtaatgcagcgcggcgattcgcttaatgttacggcccacatcgacctcggtaaaatggcgcctaacgatctgctggtggagttgtactacggcgcggtatcgaaccagaacaatgagattaccaatgcccacaagatcgagatgaagtgggtcagcaacaaagacggcctgaaccagtatcatgtacgggttgaatgcgctgacacgggcttccagggccacacggtgcggattttacccaagcacgaagcattgattcatccgtatcggtcaggctttattaaatgggcgtga

SEQ ID NO: 694 - protein, 169 aa, Unknown
  Obtained from environmental sample
  misc_feature (1)..(169): Xaa is any amino acid
MKDCMRQIRHFMSCHPDADGYSNNFYFPALKNSRKLIKDDYADAKSLAVYFGKLRDSWDSLRIVKIEANTKPVMQRGDSLNVTAHIDLGKMAPNDLLVELYYGAVSNQNNEITNAHKIEMKWVSNKDGLNQYHVRVECADTGFQGHTVRILPKHEALIHPYRSGFIKWA

SEQ ID NO: 695 - DNA, 414 bp, Unknown
  Obtained from environmental sample
  misc_feature (1)..(414): n is a, c, g, or t
atgactaaagaggaattggcgagagccattgatccttttgtcaccgacggggtgaagcaccctcaccggaaggtgggactggggcttccgtttttgatacagaccgccgagcagtccggcgggggctgggatatacagtccgaaaaagggaaaggcactactgcgacggcgtggtttgatacgagcaatgtggatatgccgcctgtcggtgatctgccgggaatgttcaggactgtcctgatgttcaacggcccggaagaaattgttatccggcgctttggccaacaggaggctaaggagccgctggaatacgaattccgcaaaacggaacttgcggaagccttgggcggctttgaaggcgccggggccatggtgatgcttgatcagtttttgagatcgcaagaagaagaataa

SEQ ID NO: 696 - protein, 137 aa, Unknown
  Obtained from environmental sample
  misc_feature (1)..(137): Xaa is any amino acid
MTKEELARAIDPFVTDGVKHPHRKVGLGLPFLIQTAEQSGGGWDIQSEKGKGTTATAWFDTSNVDMPPVGDLPGMFRTVLMFNGPEEIVIRRFGQQEAKEPLEYEFRKTELAEALGGFEGAGAMVMLDQFLRSQEEE

SEQ ID NO: 697 - DNA, 462 bp, Unknown
  Obtained from environmental sample
  misc_feature (1)..(462): n is a, c, g, or t
ttgattacctgccgacccgatctgataccaatcgacctaaaacgtcagggacgcgccgaagaacatcttgctcttttttatcctgagaccggaaaagacaaggaagatctttttaaaacactggtacgcaaacttgatcttgatatccgtaatttttcggtagcagaccttttcaaaaaatataaatatgaatattcgggcgcggaccttgaagcggttcttgtacgggcgaaactgcttgcggcaatggatgaccgtatttttgtaaaacgtgaggacatggaagaagcgatgagcgactttgttccggctgcctatccgtatgcagtcgcgttgcagaatcttgtcgctgttttggaatgtacttccaaagagatgataccaaaagatttccgcaatctgccccgcagtaagattataagcgatattcaggaactaaaagctttactgggagaaagatag

SEQ ID NO: 698 - protein, 153 aa, Unknown
  Obtained from environmental sample
  misc_feature (1)..(153): Xaa is any amino acid
MITCRPDLIPIDLKRQGRAEEHLALFYPETGKDKEDLFKTLVRKLDLDIRNFSVADLFKKYKYEYSGADLEAVLVRAKLLAAMDDRIFVKREDMEEAMSDFVPAAYPYAVALQNLVAVLECTSKEMIPKDFRNLPRSKIISDIQELKALLGER

SEQ ID NO: 699 - DNA, 432 bp, Unknown
  Obtained from environmental sample
  misc_feature (1)..(432): n is a, c, g, or t
ttgcaaaatacgaaaaccttgaaaatttattcacagacagggatgtatgggaaggatttgccctgttccgcgaagaaacgcaaaagcaaacaaggggtgttactcaaaacacattcaaatcccggcacgcgggacagtaacggttccgcatgcaagcggttaaacctcgcgctgcgctggcttgtgcgcaagggacctgttgatctcgctctttggaaaaaattaaaacctgccgccttgtacattccgcttgatgtccatgttgcgcggacagcaagaaaacttgggcttttggagcgcacgttaaacgataaaaaagcggtaatagagcttacggaaaaattaaggttattatgtcctgaagacccggtaaagtacgattattcattgttcgggattgggattgaaaatccgctatctttctcccagtaa

SEQ ID NO: 700 - protein, 143 aa, Unknown
  Obtained from environmental sample
  misc_feature (1)..(143): Xaa is any amino acid
MQNTKTLKIYSQTGMYGKDLPCSAKKRKSKQGVLLKTHSNPGTRDSNGSACKRLNLALRWLVRKGPVDLALWKKLKPAALYIPLDVHVARTARKLGLLERTLNDKKAVIELTEKLRLLCPEDPVKYDYSLFGIGIENPLSFSQ

SEQ ID NO: 701 - DNA, 546 bp, Unknown
  Obtained from environmental sample
  misc_feature (1)..(546): n is a, c, g, or t
ttggtgatgtctactaaatttgacaaagacgccgaagaatccgatgaacattacctcctgcttccaaaattgcatctaacacgctccgcgctgttctttgacaatctgcatataaaaaaatcaattaggcgttcattaaaccgttatgaactgcgttatgactctgattttgagcttatcgtgaaccgttgtcaggagattcacggcgctgactggctgaccgggcccctggtttccgccatcagggagataaggcaaaacaggctgcattgggtataccccacgtcattcgccctgtacagggacggtaaactggttgcgggggaattcggggtaaaggtcggaaatgtctatacttcgtattcaggctactacgatgaaagcaatgccggcacagttcagcttattcttgccgcccgctatttacaggagaacggttttgccttttttgacctggggatgcccatggattataaaaacgctcttggcgccgaggacatcagccccgaggaatttgtcgcgctgttccgagcggcccagtgttga

SEQ ID NO: 702 - protein, 181 aa, Unknown
  Obtained from environmental sample
  DOMAIN (10)...(169): Leucyl/phenylalanyl-tRNA protein transferase
  misc_feature (1)..(181): Xaa is any amino acid
MVMSTKFDKDAEESDEHYLLLPKLHLTRSALFFDNLHIKKSIRRSLNRYELRYDSDFELIVNRCQEIHGADWLTGPLVSAIREIRQNRLHWVYPTSFALYRDGKLVAGEFGVKVGNVYTSYSGYYDESNAGTVQLILAARYLQENGFAFFDLGMPMDYKNALGAEDISPEEFVALFRAAQC

SEQ ID NO: 703 - DNA, 750 bp, Unknown
  Obtained from environmental sample
  misc_feature (1)..(750): n is a, c, g, or t
atgacggacagaatgatcctagttacaaacgacgacggcatttgggccaaagggctggaagtgctggcgaacaccgcatccaagtacggaagggtggtggtggtggccccggacaggaacagatccgccatatcttcggccatgtccgtgcacaacatcctgcgggtggaccagatagcgccagacaaacactcctgtgacgggacaccggttgactgtgtgttgatgggcacccgacacgtcctggatagggcccccgactggatactctccggcatcaactggggcttcaacctcgccgaggacgttctgtattctggcaccgtaggggccgcattcgaaggctgcctgcagggcatcaggagcgcggccttttccctgcaccgcagcgcgagccccgacacagtgaccaagtggctggagcgctttttagacaactgggagaagttccccctgcccccaaacaccatctggaacgtcaatttccccgagtgcgagccaaaggggctaagaatgaccgcccagggcaggcgcagctactttgacctgatggaacagcgtattgaccccaggggcaagccctacttctgggtcggcggcgaccgcggaccagagtatgaaagggacgaggggactgacgcggcggcggtcctggccggcttcgtgagcctcactcccgtccaaatggacctgacctgcagggagagccttgcaaggcgcccagacttcaacgccgttttcgggggataa

SEQ ID NO: 704 - protein, 249 aa, Unknown
  Obtained from environmental sample
  DOMAIN (4)...(184): Survival protein SurE
  misc_feature (1)..(249): Xaa is any amino acid
MTDRMILVTNDDGIWAKGLEVLANTASKYGRVVVVAPDRNRSAISSAMSVHNILRVDQIAPDKHSCDGTPVDCVLMGTRHVLDRAPDWILSGINWGFNLAEDVLYSGTVGAAFEGCLQGIRSAAFSLHRSASPDTVTKWLERFLDNWEKFPLPPNTIWNVNFPECEPKGLRMTAQGRRSYFDLMEQRIDPRGKPYFWVGGDRGPEYERDEGTDAAAVLAGFVSLTPVQMDLTCRESLARRPDFNAVFGG

SEQ ID NO: 705 - DNA, 789 bp, Unknown
  Obtained from environmental sample
  misc_feature (1)..(789): n is a, c, g, or t
ttggcggaatctgggttgccagagcccgcccctgcaggggataatcttaataaagcgtcggatgatgaatcattgaaaaagttgcatgagggactgtcggctcccccggaagaaatttcaaaagagcctgtgaaggaaactcctgtgaagcctgcgaaggaaatgccggtggaacctgcgaaggcaattccgaaagaatccccaggggaaacgccgaaggaatctctgaggggaactccagaggaaatccccctacccccgggaaataatcctccgtctaatgaacggagttatccgccgccgattgtcttgttgggaatatccgccatgccgcggccatctctgaagccgcagcctccggagccgccgccgcagtcccctcaaccgccattacctaaggaaccggaaccgctgcaacctttagctaaagagccggaaaagccctcgccaccgccaccgccgccgcaacctcctgtcaaggaagaagaaacacttgaagagttggcgcttgaagaagaaattgaggaaattacttcggaagaacccataaaagaagccttattggaagagctgccggaggaaaaaacgcctgaaccaatcgaagataaaaaacagaatagtttatccaaagtggttgatcttcttggcatcctgcacgaactaacagaggcgcttccggaagaacggcgaaaaacctataacgagggcaagcttcaaacaacggtgggatcggttattgatagtttaaagaagctgactataatcaaagaatcgacagatggaaactaa

SEQ ID NO: 706 - protein, 262 aa, Unknown
  Obtained from environmental sample
  misc_feature (1)..(262): Xaa is any amino acid
MAESGLPEPAPAGDNLNKASDDESLKKLHEGLSAPPEEISKEPVKETPVKPAKEMPVEPAKAIPKESPGETPKESLRGTPEEIPLPPGNNPPSNERSYPPPIVLLGISAMPRPSLKPQPPEPPPQSPQPPLPKEPEPLQPLAKEPEKPSPPPPPPQPPVKEEETLEELALEEEIEEITSEEPIKEALLEELPEEKTPEPIEDKKQNSLSKVVDLLGILHELTEALPEERRKTYNEGKLQTTVGSVIDSLKKLTIIKESTDGN

SEQ ID NO: 707 - DNA, 684 bp, Unknown
  Obtained from environmental sample
  misc_feature (1)..(684): n is a, c, g, or t
gtgaaaaactggatcctaaaaaatacgatcttaaattttaaggagagaaagatggcaataattgatgatatttcaacggccctgcaaaaaggaaaagtaaaagacgttgtcgcgcttgtccagcaagcccttgacgaaggcatatccgcgcaggacattctcgacaaaggcctgttatacggcatgagcctcttgggcgcgcgtttcaaaaacaacgaagtattcgtccccgaagttcttgtcgcggcaagggcgttaaacaagggaaccgagacattaaaacccaaacttatcgaagcgggagtgaaacccataggcaaagtggttctttgcaccgtaaaaggcgacttgcacgacataggcaaaaacttagtgcgcatgatgcttgagggcgccggtttcgaagtaatagacttaggcgttgatatagatgaaaacaaaatagtagaagccgttaaaacgcaccaaccccaaatactgtgcctgtccgcgctgttaacgacgacgatgagccagcaaggcgtggtaatcgaagcgcttaaaaccgccgggttacgcgacaacgttaaagtgatggtaggcggcgcgcctgttactcaaagcttttgcgaagcaatccaagcggacgcctacagcccggacgcggcaagcgcggcggagaaagcaaagacgtttgtggtctaa

SEQ ID NO: 708 - protein, 227 aa, Unknown
  Obtained from environmental sample
  DOMAIN (16)...(103): B12 binding domain
  misc_feature (1)..(227): Xaa is any amino acid
MKNWILKNTILNFKERKMAIIDDISTALQKGKVKDVVALVQQALDEGISAQDILDKGLLYGMSLLGARFKNNEVFVPEVLVAARALNKGTETLKPKLIEAGVKPIGKVVLCTVKGDLHDIGKNLVRMMLEGAGFEVIDLGVDIDENKIVEAVKTHQPQILCLSALLTTTMSQQGVVIEALKTAGLRDNVKVMVGGAPVTQSFCEAIQADAYSPDAASAAEKAKTFVV

SEQ ID NO: 709 - DNA, 477 bp, Unknown
  Obtained from environmental sample
  misc_feature (1)..(477): n is a, c, g, or t
ttgcggttaggtagattactggaagatatgacagcaattgttttgggtaattttgatggttgccatttagggcatagagccttatttgaggcgttgaaaacgcaggcacaaataaataacacgcaacctttggcaatttcttttgagccacacacaaggcatataattcaagaacccggacatccagaacttttaacctctggcgatgaaaaaaaagaattgattgaaagtttcggcgttccgcttgttttgcagaaatttgacaaagatttattcgcagtacccttccgctcatttgtgaacgattttgccatacaaaaatacggcacaaaaatctgggtgctgggtttagaccaaagatttggacgaggcggcaaaggcagcgcagaaacattaagagcatttttcccagatttgctaattcacgaaataaaccccgttttatttgaaatgaagcaattagctcatcgcgcataa

SEQ ID NO: 710 - protein, 158 aa, Unknown
  Obtained from environmental sample
  DOMAIN (9)...(158): FAD synthetase
  misc_feature (1)..(158): Xaa is any amino acid
MRLGRLLEDMTAIVLGNFDGCHLGHRALFEALKTQAQINNTQPLAISFEPHTRHIIQEPGHPELLTSGDEKKELIESFGVPLVLQKFDKDLFAVPFRSFVNDFAIQKYGTKIWVLGLDQRFGRGGKGSAETLRAFFPDLLIHEINPVLFEMKQLAHRA

SEQ ID NO: 711 - DNA, 906 bp, Unknown
  Obtained from environmental sample
  misc_feature (1)..(906): n is a, c, g, or t
ttgcgcggaagttttcaaaacaagaagtttgatcttcaatcggctgattataagcttttccgctcttcatacagggcaaatgttccgctttggcggcgtataatggcgtggatctttccgttgtccgtaattacaccgggaaaattattaacaattatacttttacttggattgtttgcaggttctcaaccgcctatggcgcaggacgcgcaaagctcgcctaacggcggtgaagaaataataagcgcggacgctctttttaaggaggcttccaacgccgactattcggaaaattgggaacgggcgatagaattatacagaaagggttcggaaatttttcctgacgacgcgcgttttccccggtcactgggaaatctttatttcggccgttctcttttcaaccttgcatgggacgaataccggaaagttgaaaatcttgcccctaatgacgtaaccctccttatcaggcttgcgagaaccgccggataccttaaccgcgccgccgaatcggtaagtctttacgagcgcgtacttgatattgaaccggataccatggaagcaatcggcagcctcggctggatgtactttaaagtccacaggcttgaggacggggaaaagcttcttgtttccgccgtagaacgcttcggcattaattcggatatatcaatgacgcttggaactatttactccgatatgtacaagtatgatgacagcaaatattggtataacaaatccattgaaacaggagaagaatacggcgacaatgaatatacttctatagcgtggtataacctttcaattctggaatcgcgtttttacctttacgagctttgcatgtacgcgaccgattcttcattaaaaatgtataaccgcgcttccggacacattgcccgcgcggaactttaa

SEQ ID NO: 712 - protein, 301 aa, Unknown
  Obtained from environmental sample
  DOMAIN (83)...(116): Tetratricopeptide repeat
  misc_feature (1)..(301): Xaa is any amino acid
MRGSFQNKKFDLQSADYKLFRSSYRANVPLWRRIMAWIFPLSVITPGKLLTIILLLGLFAGSQPPMAQDAQSSPNGGEEIISADALFKEASNADYSENWERAIELYRKGSEIFPDDARFPRSLGNLYFGRSLFNLAWDEYRKVENLAPNDVTLLIRLARTAGYLNRAAESVSLYERVLDIEPDTMEAIGSLGWMYFKVHRLEDGEKLLVSAVERFGINSDISMTLGTIYSDMYKYDDSKYWYNKSIETGEEYGDNEYTSIAWYNLSILESRFYLYELCMYATDSSLKMYNRASGHIARAEL

SEQ ID NO: 713 - DNA, 852 bp, Unknown
  Obtained from environmental sample
  misc_feature (1)..(852): n is a, c, g, or t
ttggagcgcgaaacggcaaatggagatacggccatgtctttgcgggtaattgactggactgagtttttggaggatttcccgccggaattcagttcagcgatgacaataggggtttttgacggtgtccatattggtcatcaggcgcttatcaaaaggatagtaagccgcgggccaaatccaacggtactcacatttcgggaaaatccaaaaaagatgctatggcaagctaaaggggccaaaactacagattcatataaaggggatctttacagcttgaaacaaaagacggaggtttttgacagcctgggcgtgaagttccttgtcctgattgacttttctgaagaattcagtaaactaaaaggaagagaattccttgaccttttggggaaaaagggaaggatggcttttttagccatcggcaataatttccgctgcgggttcgcacaggataccgacgcggtttttacaaggcagataaacgaaaagaagggaatcccgacagagcttattccgcctgtatatttaggggggtcggatggcacggcaaccgaacctgtcagttccagccttatcagaaaagcggttctttcgggaaatcttaagctggcgtcagagcttttgggacggaactttagtctggacttgtcggatttaaaggccgaatacgttgagtcagggtttgtttacgatctctgttccgtatgcagagttgccccggctacgggtcaatattctgttctgatgtttcctgacggcaaagccgacggtgttgcgggccgggcgtatgcggaagacggaaaaatttttctgccaatgaaggtggaaagccttgagtttgttacggatttataa

SEQ ID NO: 714 - protein, 283 aa, Unknown
  Obtained from environmental sample
  DOMAIN (30)...(190): FAD synthetase
  misc_feature (1)..(283): Xaa is any amino acid
MERETANGDTAMSLRVIDWTEFLEDFPPEFSSAMTIGVFDGVHIGHQALIKRIVSRGPNPTVLTFRENPKKMLWQAKGAKTTDSYKGDLYSLKQKTEVFDSLGVKFLVLIDFSEEFSKLKGREFLDLLGKKGRMAFLAIGNNFRCGFAQDTDAVFTRQINEKKGIPTELIPPVYLGGSDGTATEPVSSSLIRKAVLSGNLKLASELLGRNFSLDLSDLKAEYVESGFVYDLCSVCRVAPATGQYSVLMFPDGKADGVAGRAYAEDGKIFLPMKVESLEFVTDL

SEQ ID NO: 715 - DNA, 780 bp, Unknown
  Obtained from environmental sample
  misc_feature (1)..(780): n is a, c, g, or t
atggggaaagattacacccctacaaaccaaaggtgcgaaaatgatgttgttgaaagcaaatgcgggagtgattggtataacgctgcgaatacgaatttgagatgccaaagcaatattattgaaagtaaatgcggaagcaattggtacaatgccgcaacacaatcttgctctaatggcacagtgtttataacagattctcgtgatggtcaaacatataaaatcgttacaattggtactcaagtttggatggctaagaatttgagctacaacgcaaccaatagcaagtgttacgataatgacccagccaactgtgcaacttatggcaggctttatgactgggcaactgcaatgaactgcaactccagtacttgcgcttctcaaataaatgcaaaacatagaggtatatgcccggaaggttggcatatacctagcgatgcagagtggaatgttttgatgaaatttgtaaatcctaactgttctgacaatagcgactgtgctggtgctggaactaagttaaaagcgacaagcggttggagcggcagtggcaatggcacagatgcttacggtttttccgcccttccgggtggcgtcggcattttggatagtcgtttcagtttcgaccatgtcggccgcttcggctactggttgagttccgctgagggcggttataacaacgcctacaattacatttggagtatgggctacatctacgaggacgtacactatggctccggcaataagcacgactacttaatcagtgttcgttgcttgcaagactag

SEQ ID NO: 716 - protein, 259 aa, Unknown
  Obtained from environmental sample
  misc_feature (1)..(259): Xaa is any amino acid
MGKDYTPTNQRCENDVVESKCGSDWYNAANTNLRCQSNIIESKCGSNWYNAATQSCSNGTVFITDSRDGQTYKIVTIGTQVWMAKNLSYNATNSKCYDNDPANCATYGRLYDWATAMNCNSSTCASQINAKHRGICPEGWHIPSDAEWNVLMKFVNPNCSDNSDCAGAGTKLKATSGWSGSGNGTDAYGFSALPGGVGILDSRFSFDHVGRFGYWLSSAEGGYNNAYNYIWSMGYIYEDVHYGSGNKHDYLISVRCLQD

SEQ ID NO: 717 - DNA, 606 bp, Unknown
  Obtained from environmental sample
  misc_feature (1)..(606): n is a, c, g, or t
ttgaagcaggccctgtacgatcttcttgagcgggatataatcccactcttttaccagcgcggcagagacggccttccccgcgaatggataaagaggatgaaggattgcatgcgccagatagggcaatccatgtcatgtcacaggatgttgatggattattccaacaacttctatttccccgcccttaaaaactaccgcaaactgataaaagatgaatatgctgacgcaaaatccctggcggcgtattttggcaagctgcgtgattcctgggacagcctcaaaatcgtaaagatcgaggccaataccaaaccgataatgcagcgcggggattcgcttaatgttacggcccatatcgatctcggcaagatgtcgcctaacgatttgctggtagaactgtattacggcgcggtatctaaccagagcaccgaaattaccaatgcccacaggatcgaaatgaagtgggtcagcaataaagacggcctgaaccagtaccatgtgcgggttgaatgttccgacacaggcttccaaggccacacggtgcggattttacccaagcacgaagcattaatccatccgtaccgcacaggctttattaagtgggcgtaa

SEQ ID NO: 718 - protein, 201 aa, Unknown
  Obtained from environmental sample
  misc_feature (1)..(201): Xaa is any amino acid
MKQALYDLLERDIIPLFYQRGRDGLPREWIKRMKDCMRQIGQSMSCHRMLMDYSNNFYFPALKNYRKLIKDEYADAKSLAAYFGKLRDSWDSLKIVKIEANTKPIMQRGDSLNVTAHIDLGKMSPNDLLVELYYGAVSNQSTEITNAHRIEMKWVSNKDGLNQYHVRVECSDTGFQGHTVRILPKHEALIHPYRTGFIKWA

SEQ ID NO: 719 - DNA, 642 bp, Unknown
  Obtained from environmental sample
  misc_feature (1)..(642): n is a, c, g, or t
ttgcccaaagtgataacgcaaagtcccgacggcgcccttacattggtgtccaactgggtttctatggacataagcgtttttgattctgacagcaagaaattactgcgccgcatccccacaggcggaatcccgcgcggcatggcgttctcgcccgacggctctcttgtgtatgccgcgatttacgacacggcgactgtcgcggtaattgacatgacagccaacaaggtgataaaaagatggcgttataacgagggcgccggagcggcgcggcacatcatttaccgcgatgacaagctctatgtttccgatatgttatggggaagcgtgaacataatgaacgccacgacaggcgcggttataaagtcggcgcgtctcggccccaacatcaacaccattactatgtcgtctgacggcaggtacatttttgcttcctcgcgcgggcggaacaaccccgttgattacacaatacccggtcccgatttcggcgcggtatttatgctaaacgctcaggacttaaccataattgataaagtatggggccgcaatcaacccaccggccttgccgtttccccggacggaaagcttctggtgtttaccgattttcttgacatgaatctggaattgtaccggatagagcggtga

SEQ ID NO: 720 - protein, 213 aa, Unknown
  Obtained from environmental sample
  misc_feature (1)..(213): Xaa is any amino acid
MPKVITQSPDGALTLVSNWVSMDISVFDSDSKKLLRRIPTGGIPRGMAFSPDGSLVYAAIYDTATVAVIDMTANKVIKRWRYNEGAGAARHIIYRDDKLYVSDMLWGSVNIMNATTGAVIKSARLGPNINTITMSSDGRYIFASSRGRNNPVDYTIPGPDFGAVFMLNAQDLTIIDKVWGRNQPTGLAVSPDGKLLVFTDFLDMNLELYRIER

SEQ ID NO: 721 - DNA, 615 bp, Unknown
  Obtained from environmental sample
  misc_feature (1)..(615): n is a, c, g, or t
atgatcgccgagatttttggaaagaagcatgaaaggtttgtcaaaatcggaagttcaggtcgtgaaaatttagacaaaaggataaaagatttaaatagcacaaatatgccatttccttttaaatgcgtattttcatgcgaagtggaaaattacaaagaggtagagaaatctatacatatggcttttaataaatttcgcgttaatccaaaaagagaattttttgaaatagagccagaacgaattattcccttgttaaagcaactaaggattaaagacacaacaaaaagcataaatgaaaaaatagataaaacgattgacattgctgataagcaagctggtaaaaaatacgcaaaaagaagaccgtcatttaaatttaaggaaatgggaataaacataggagaaacgatttcgtttgttagagatgaaagcaaaaaagcaacggtaattgagggaaatttagttgaatatggtggcaaagaatattcgcttacagaattaacctccaaactattaggttatatacaggcacctttatcccattggaaatacaaaaataaacctttgcttgaatactacggtgaaacatacggcaaagaaaaattttcgccttcttaa

SEQ ID NO: 722 - protein, 204 aa, Unknown
  Obtained from environmental sample
  misc_feature (1)..(204): Xaa is any amino acid
MIAEIFGKKHERFVKIGSSGRENLDKRIKDLNSTNMPFPFKCVFSCEVENYKEVEKSIHMAFNKFRVNPKREFFEIEPERIIPLLKQLRIKDTTKSINEKIDKTIDIADKQAGKKYAKRRPSFKFKEMGINIGETISFVRDESKKATVIEGNLVEYGGKEYSLTELTSKLLGYIQAPLSHWKYKNKPLLEYYGETYGKEKFSPS

SEQ ID NO: 723 - DNA, 483 bp, Unknown
  Obtained from environmental sample
  misc_feature (1)..(483): n is a, c, g, or t
gtgcgtaaaaccgagaccatagaagtttcaaaagacaccgatgccattggcaaccgcgtaagggttaaggttgtcaagaacaaagtagccccgccgttcaggcgcaccgagcttgaactgatcttcggcaaggggatttcatactacggcagcctccttgacgcggcggtcaagtacaattttatcgaaaaaaaaggcgcgtggtactcttacggagaggaaaaagtagggcagggcagggacaacgcccgcgactaccttgaacagcacccggatttcgccgttgaactggaggtaaaactgcgcaagcagatcttccccggcagggagtttcaaatggcaaaacagccttcagccgcgaaaccggcggctaaacctgaggctaaaacggcgtcggcggcggcccaaccccagcaaggccccggccgcccccgaaagcttgcctctcccggcgggtcactgtcagacgaggcgttgttctaa

SEQ ID NO: 724 - protein, 160 aa, Unknown
  Obtained from environmental sample
  DOMAIN (1)...(107): recA bacterial DNA recombination protein
  misc_feature (1)..(160): Xaa is any amino acid
MRKTETIEVSKDTDAIGNRVRVKVVKNKVAPPFRRTELELIFGKGISYYGSLLDAAVKYNFIEKKGAWYSYGEEKVGQGRDNARDYLEQHPDFAVELEVKLRKQIFPGREFQMAKQPSAAKPAAKPEAKTASAAAQPQQGPGRPRKLASPGGSLSDEALF

SEQ ID NO: 725 - DNA, 618 bp, Unknown
  Obtained from environmental sample
  misc_feature (1)..(618): n is a, c, g, or t
gtgcttacctttcatgtaaaactccccatttttgtagcccgccaatgggtgcggcacagaaccgcaaggcttaacgaaatctccggccgttactccatactgaaagatgatttttacataccaaaagcggaagatgtcgctttgcaaagtactgataacaaacagggccgttccgctgaagctctcgatcctgctctggcggagaaagttcgctcggcgtttgccgaagcgcaaaaatccgcctacgccgcttacagctcgtttgtgaacgaaggacttgccagggaactcgcaaggatcaatatgccgctttcgctttacaccgaatggtattggcagatagatctgcacaatctttttaactttctaaagctccgcctggacgctcatgcccaaaaagaaatccgccgttacgcggaggtactttttgagatcgcgaaaaacgtagcccccaggtgctgcgattcgtttaaaaaacatatactcgacggagtgcgtttttcaggcgaagagatggcggaattacagcggcgtcttgaaggaaaaaatggtagcgaactcactggaaaaaatttggaacgcttcgaggaaaaactaaaaagcggcaggcagctttaa

SEQ ID NO: 726 - protein, 205 aa, Unknown
  Obtained from environmental sample
  DOMAIN (1)...(156): Thymidylate synthase complementing protein
  misc_feature (1)..(205): Xaa is any amino acid
MLTFHVKLPIFVARQWVRHRTARLNEISGRYSILKDDFYIPKAEDVALQSTDNKQGRSAEALDPALAEKVRSAFAEAQKSAYAAYSSFVNEGLARELARINMPLSLYTEWYWQIDLHNLFNFLKLRLDAHAQKEIRRYAEVLFEIAKNVAPRCCDSFKKHILDGVRFSGEEMAELQRRLEGKNGSELTGKNLERFEEKLKSGRQL

SEQ ID NO: 727 - DNA, 936 bp, Unknown
  Obtained from environmental sample
  misc_feature (1)..(936): n is a, c, g, or t
atgtatcagatcggccgagggcccttctccggagcggtgaaatcgacgtcggacatagccgtatacgacctccgcgacagcagctactacattctgaccgccacggagtggaacgacaaacagcccgcgttttcgccggacgggtcgcagttcgtcttcgtctcggacaggaacggggtcgataacctatatatagacagcgtagacaatcccggcaatccgcgcccgctcaccgattacatcggcaagtgcgccaacccggactgggctgcggacgggtcggccatcgtcttcgacctgttcatgaaccaatcctggaatatctggcggatggcgaagcccttggataagactcttggcgacaccgctctgacgccgacggcgtgggcccggcatgaggccgacccgtcggtaccgttcttcaagaggatcgtcccgcccaaggacagcgccgccgccggcgattcggccaaatccgaggatattttgaaacctttcgccgttgatccgcccaacgactcaatcccgccgtcagggcgctacacgttacgcttcacgcctgattttgcgatcttcggactgggcgtgagcacatacagcggcgcctcaggccaagctctcgccgcgttcagcgacatcatgggcgaccaccgcgtcaccgtcgccggcgacttgcaggtggacatagacgattacgcccaaatattcgcctcctacgagtacctaaaacgccgcgtcaatatgatggccggcgtcttttactacaagtattacagctacgacggactcttcaaccgctacttccacgacctggagacgggcggcatactagggctcagctacccgttctctatgttctcgcgcgccgacctgagactctcaggccgttacatcaggcgcgaatcgctatcgggcgacacggcggttgagtggtaa

SEQ ID NO: 728 - protein, 311 aa, Unknown
  Obtained from environmental sample
  DOMAIN (30)...(65): WD40-like Beta Propeller Repeat
  misc_feature (1)..(311): Xaa is any amino acid
MYQIGRGPFSGAVKSTSDIAVYDLRDSSYYILTATEWNDKQPAFSPDGSQFVFVSDRNGVDNLYIDSVDNPGNPRPLTDYIGKCANPDWAADGSAIVFDLFMNQSWNIWRMAKPLDKTLGDTALTPTAWARHEADPSVPFFKRIVPPKDSAAAGDSAKSEDILKPFAVDPPNDSIPPSGRYTLRFTPDFAIFGLGVSTYSGASGQALAAFSDIMGDHRVTVAGDLQVDIDDYAQIFASYEYLKRRVNMMAGVFYYKYYSYDGLFNRYFHDLETGGILGLSYPFSMFSRADLRLSGRYIRRESLSGDTAVEW

SEQ ID NO: 729 - DNA, 345 bp, Unknown
  Obtained from environmental sample
  misc_feature (1)..(345): n is a, c, g, or t
ttggcacaggcaaaaattaaccgccaaatctattatgaagatttatgttatcaatcccaacaagccgttgaaaaggcgctaaaaggtcttttaatatattatggcgttgaaccggagtttactcacaatattgaaatactattaaataaagttaaagagtctacggatattcctgaaaatattaaagaaacggcacaactaaccaattacgctgttcaaacaaggtaccctggtgaatatgatgaaattacacaagaagaatatgaagaaagcataaaaatagcaaaagattgtctgcattgggttgaaaagaaaatgtccgcaagcgggaatctccctcgttag

SEQ ID NO: 730 - protein, 114 aa, Unknown
  Obtained from environmental sample
  DOMAIN (1)...(105): HEPN domain
  misc_feature (1)..(114): Xaa is any amino acid
MAQAKINRQIYYEDLCYQSQQAVEKALKGLLIYYGVEPEFTHNIEILLNKVKESTDIPENIKETAQLTNYAVQTRYPGEYDEITQEEYEESIKIAKDCLHWVEKKMSASGNLPR

SEQ ID NO: 731 - DNA, 414 bp, Unknown
  Obtained from environmental sample
  misc_feature (1)..(414): n is a, c, g, or t
atgcaccagcccaagacggaagaaatcgcctgcgaattgggaataccggcgaaagacatagatnttattcttaatatgagctacggcattctgccgctggaatcggataacagtaaagacgaatactccgcgacaatggaaatccatgaagactatacgtactgtcctgaacggaacctgttccggcaatactaccgtgacagcgcgaggcgttgccttgacaatctgaaagacagggaaagaaaggtgctttcttaccgctaccagcttgaagacgacaagcagtacacgttcaaggaaatcggcgcgaaaatggacttgtcccctgaaatggtacgccagatagagttgaaagccctagcgaagatccgccgccacgcgaacgagttggataactaccaggaagcgatgtaa

SEQ ID NO: 732 - protein, 137 aa, Unknown
  Obtained from environmental sample
  DOMAIN (72)...(125): Sigma-70, region 4
  misc_feature (1)..(137): Xaa is any amino acid
MHQPKTEEIACELGIPAKDIDXILNMSYGILPLESDNSKDEYSATMEIHEDYTYCPERNLFRQYYRDSARRCLDNLKDRERKVLSYRYQLEDDKQYTFKEIGAKMDLSPEMVRQIELKALAKIRRHANELDNYQEAM

SEQ ID NO: 733 - DNA, 537 bp, Unknown
  Obtained from environmental sample
  misc_feature (1)..(537): n is a, c, g, or t
atgaacaatctatacggatatgatatggaagaggcggcccgtttggggcgtcaggcaagaatagccggcatagacgaggccggacgcggcccattggccgggccggtggtcgccgccgtagtcatattgaacatggatcgcccgatagacggggtgaacgactcgaagaagctgacggccgccaagcgtgacaaactgttcgagtcgataaccgataccgctgaagcctacggcgtcggcgtcgccgatcaaggggagattgatgagatcaacatccttcaggcgaccttttcggcgatgaggcgggcgcttgagggcgtggacgggcggtacgacctgctcttggtcgacggcaaccgatacataaccggcgtcccccgcgagcgccaaaaaacgatagtcggcggcgacgcgctgagcgcctccatagccgccgcatccatagtcgccaaggtcacgagggataggatgatggacgggtaccacgagcggtatccccaatacgatttcgcgaaacacaagggatacggcacatag

SEQ ID NO: 734 - protein, 178 aa, Unknown
  Obtained from environmental sample
  DOMAIN (22)...(178): Ribonuclease HII
  misc_feature (1)..(178): Xaa is any amino acid
MNNLYGYDMEEAARLGRQARIAGIDEAGRGPLAGPVVAAVVILNMDRPIDGVNDSKKLTAAKRDKLFESITDTAEAYGVGVADQGEIDEINILQATFSAMRRALEGVDGRYDLLLVDGNRYITGVPRERQKTIVGGDALSASIAAASIVAKVTRDRMMDGYHERYPQYDFAKHKGYGT

SEQ ID NO: 735 - DNA, 492 bp, Unknown
  Obtained from environmental sample
  misc_feature (1)..(492): n is a, c, g, or t
atgtcagacaccgatgctcttgatatggaagaaggcgaggcgccggaatcgggcccaaagaagaaaaaaggcggattgggagcccttctgccgacccttcttaaattcgccgctataggcattggcgcgttgctttttattgtcaccgtctcggttatcacatataatataatgaatgacgggggcaaaacgcagactaacgtaacagacccgtcatcgccgtatattggcagaaaaccgatttttgcgtggtatactgatattggcacggtgacaacaaaaaccagggatgatcctgaaaaaatgcacaccgtgtcagtggtaatgaatctcggttacgatctgaccgatccaaccgcatattcagagctttccggcagaaaatttgagctgcaggattttgtacgtaggtattttgccggaaagtacgcggatgagcttaagacggaaaacgaggaaaagctaaagatggagatcaaggaacagatttaa

SEQ ID NO: 736 - protein, 163 aa, Unknown
  Obtained from environmental sample
  DOMAIN (30)...(163): Flagellar basal body-associated protein FliL
  misc_feature (1)..(163): Xaa is any amino acid
MSDTDALDMEEGEAPESGPKKKKGGLGALLPTLLKFAAIGIGALLFIVTVSVITYNIMNDGGKTQTNVTDPSSPYIGRKPIFAWYTDIGTVTTKTRDDPEKMHTVSVVMNLGYDLTDPTAYSELSGRKFELQDFVRRYFAGKYADELKTENEEKLKMEIKEQI

SEQ ID NO: 737 - DNA, 309 bp, Unknown
  Obtained from environmental sample
  misc_feature (1)..(309): n is a, c, g, or t
gtgggtataaatatggaagatcaggctgaaaaactacgggaaataatgcgaaagaaaccggaaggctcaaaggaaggcgataaaaacaaccgccaggcagccggtttgctgacaaagaaaaacagcaagacaaggattataaccattacaagcgggaagggcggagtcggaaaaacaaacgtatccgtaaatatggccctggcatacgcccgccttggaaaaaaggttgtggtcatggacgcggacctggggcttgccaacgtaaacatcatgctcaatatggttccgcgctttaaccttacgacatga

SEQ ID NO: 738 - protein, 102 aa, Unknown
  Obtained from environmental sample
  misc_feature (1)..(102): Xaa is any amino acid
MGINMEDQAEKLREIMRKKPEGSKEGDKNNRQAAGLLTKKNSKTRIITITSGKGGVGKTNVSVNMALAYARLGKKVVVMDADLGLANVNIMLNMVPRFNLTT

SEQ ID NO: 739 - DNA, 639 bp, Unknown
  Obtained from environmental sample
  misc_feature (1)..(639): n is a, c, g, or t
gtgggcaagaccacgaccgtagcgaaactggcgccgaacttcggcattgacagcaagacgcgcactcacaagcgcaacgttgtgctgattactattgacggttacaggatcggcgctaaagaacaggtagagaaactcagcgaatatatgcagtttccctgtttttccactgtggattacgatgaactaaaagcgatcatcgccaccaattccgaagtggcggatcttatactgattgatactatcgggagaaatccccgggatatggaagagctgggaaaaatgaaaaagctcctagacgccagcgggactctggctgaggtttaccttgttgtggcggccactacaaaaacaagcgacctaaaagagatacttcagcagtttgaatcatttaattaccgctctgtgatcattaccaaaatggacgaaaccatccgtgccggcaatgtaataggcgtcctgtcggaaaaaaataaatccgtgtctttcataaccaacgggcagggggttccggccgatatacaggaagcatcggtgattaagtttttgataaatcttgagggttttaaggtgaacagaaataaacttgaagaaaagttcccggacaaaagaaagggacaaatgcaggagtgggtataa

SEQ ID NO: 740 - protein, 212 aa, Unknown
  Obtained from environmental sample
  DOMAIN (1)...(188): SRP54-type protein, GTPase domain
  misc_feature (1)..(212): Xaa is any amino acid
MGKTTTVAKLAPNFGIDSKTRTHKRNVVLITIDGYRIGAKEQVEKLSEYMQFPCFSTVDYDELKAIIATNSEVADLILIDTIGRNPRDMEELGKMKKLLDASGTLAEVYLVVAATTKTSDLKEILQQFESFNYRSVIITKMDETIRAGNVIGVLSEKNKSVSFITNGQGVPADIQEASVIKFLINLEGFKVNRNKLEEKFPDKRKGQMQEWV

SEQ ID NO: 741 - DNA, 696 bp, Unknown
  Obtained from environmental sample
  misc_feature (1)..(696): n is a, c, g, or t
atgttttccgacggcgtaagtcaagccggactgggacacgggcacggcttgggtatcggatcagacggagtttcctcttatataaaccttaactacaaaacaaacgatattatcagtaaccttccatggcgaattgtagagatgtgcaaaacggtatcgggcggaaactgcgaggatgacactacccttgcactgctccactgccgtgaagcgaaagaattaacattgctgacaggaccgccttcaaatcgttccatgaatcatacttacgcgcttaattttataaatatgtcaggcaagaaagctatatgcggctctacaactacagatattgtggcggaggaattaggattaaaagtagaaaccgtatctatgggtaaaacttacggacaactgccggaatatcatattgaaggaattgatttagtttcggaaggcgcaatcacattgaatcaagttaataatattttggatgaaccggtagaacggttgtccgataattccgtagcggaacgcctctgctttatgctgcacactgcggatattattaatttgatgattggaaacgcggcaaattccgcgcatgacgatttgatctttaagcagtcgggcgtaaaaatccgcaaacatgtaatccgccgaattgccgaaaaattgagaatcatgggcaaactggttattgagcataactactaa

SEQ ID NO: 742 - protein, 231 aa, Unknown
  Obtained from environmental sample
  misc_feature (1)..(231): Xaa is any amino acid
MFSDGVSQAGLGHGHGLGIGSDGVSSYINLNYKTNDIISNLPWRIVEMCKTVSGGNCEDDTTLALLHCREAKELTLLTGPPSNRSMNHTYALNFINMSGKKAICGSTTTDIVAEELGLKVETVSMGKTYGQLPEYHIEGIDLVSEGAITLNQVNNILDEPVERLSDNSVAERLCFMLHTADIINLMIGNAANSAHDDLIFKQSGVKIRKHVIRRIAEKLRIMGKLVIEHNY

SEQ ID NO: 743 - DNA, 651 bp, Unknown
  Obtained from environmental sample
  misc_feature (1)..(651): n is a, c, g, or t
atgcttgccggcgaggcaatgatcgctcttgccagactgcgtgatcttgcgttccgtcctcaaattgaaaatatcatccttgagatgcaaaacccgcggcttaaaattatgggtgtggaggctctgggtatttacgccatacccgattcgcttaatacttttattaatattatagaaaacaccgatccgccgccttatctcctaaacgaagttatactggcgatgtcggcaattctcggcacgcaggatcagttttaccgcatactggtgcgttttatcgccgactcttcgctggccccggcgcttgccttggacgaagcggaatcggccgccgcgtactgcaaatccaatataggctggcgaaaaggcggcaagagaaaaactgaattgccgcttctggaaaggcaggcgggcaatattcatgaggctgtctcttcccttgaacacaacagcgacggcaaagttttgtcgggttggatacagaccctccccgattttgtcttttctgatgatcctgcctttaagaccgcgcagacgcttttttcagaaattcttgttgatgacaatatggcctcccacaagtgcctgcgccttctgatagtccattgggcggcgtatcaaattcgtgtctggacacagaggttaaaatga

SEQ ID NO: 744 - protein, 216 aa, Unknown
  Obtained from environmental sample
  misc_feature (1)..(216): Xaa is any amino acid
MLAGEAMIALARLRDLAFRPQIENIILEMQNPRLKIMGVEALGIYAIPDSLNTFINIIENTDPPPYLLNEVILAMSAILGTQDQFYRILVRFIADSSLAPALALDEAESAAAYCKSNIGWRKGGKRKTELPLLERQAGNIHEAVSSLEHNSDGKVLSGWIQTLPDFVFSDDPAFKTAQTLFSEILVDDNMASHKCLRLLIVHWAAYQIRVWTQRLK

SEQ ID NO: 745 - DNA, 552 bp, Unknown
  Obtained from environmental sample
  misc_feature (1)..(552): n is a, c, g, or t
atgcaatcttttcaaacaatctttaatgcttgtcaggaatggagagaatttggcattgcaatagaacttaaagatgctccgttaaaagaattggaaacaatagttctgcagaaaactggaatagaacttgacaaaaatttgcagaatgtacgtgatttacagaattttttttacgaaaaaccaacttacgcaaccattagtttattgcccgcaaagcaagttgtgcactttgagaatgtggcaagcgttgtagaaattcctctgccaaaagattttccagtgcaaaaaatattttcaaacatattgcaaaccccgccaccaattattccacaacaaccgcagcaacaacctattccacagcaacagtctattcttcaatcgcagccacagcaacaacctgttcctcaaccacaaccgcagcaaccacaatttattccaccgcaaccacaacagcaacagtctattccacaacctcaaccacagcaacaacctgttcctcaactcacaaccgcaacagcaaacacagcagcagcccattccacaaaaaattga

SEQ ID NO: 746 - protein, 183 aa, Unknown
  Obtained from environmental sample
  misc_feature (1)..(183): Xaa is any amino acid
MQSFQTIFNACQEWREFGIAIELKDAPLKELETIVLQKTGIELDKNLQNVRDLQNFFYEKPTYATISLLPAKQVVHFENVASVVEIPLPKDFPVQKIFSNILQTPPPIIPQQPQQQPIPQQQSILQSQPQQQPVPQPQPQQPQFIPPQPQQQQSIPQPQPQQQPVPQLTTATANTAAAHSTKN

SEQ ID NO: 747 - DNA, 660 bp, Unknown
  Obtained from environmental sample
  misc_feature (1)..(660): n is a, c, g, or t
ttgatcggcgagagcgacaaaaataaatttatcaaatcaaatgacaaatttgtaataaaagttgttccgcccagatacccaatgggagaagaacatttcctgatacggcaggcattgagtattccattggaaaacaatgaaattccggcggagcatggaattttaacgttaaatattcaaagtatttaccaaatcggtaaaatagtaaataaatgttatgacaacggtcgttttataactattgctgatttgacaaaggcatctgcaagaatcgcatatgtatatccaaacgataatatattagaacttttaacgcgtgcttttggtgaaatggataataaatatttttatcgtggttatggtgtattggagtgtacggaagcaaaagaaaatgacgttttttccaattatgaaaattttgccgcttatgcagatcaattggaattgtccgaaaaaaataaatgtaaacgctgcggtagttgtacaagaaaatgtcctgttaaaattaaagtttctaaaattattcaatcaattgataataataaggttatggactgtaatatttataatactaagcagtgtatcaaatgtggaagctgtacttatttttgccctgcatataaaaatgtttccggttatattaggaaattaaataattaa

SEQ ID NO: 748 - protein, 219 aa, Unknown
  Obtained from environmental sample
  DOMAIN (148)...(171): 4Fe-4S binding domain
  misc_feature (1)..(219): Xaa is any amino acid
MIGESDKNKFIKSNDKFVIKVVPPRYPMGEEHFLIRQALSIPLENNEIPAEHGILTLNIQSIYQIGKIVNKCYDNGRFITIADLTKASARIAYVYPNDNILELLTRAFGEMDNKYFYRGYGVLECTEAKENDVFSNYENFAAYADQLELSEKNKCKRCGSCTRKCPVKIKVSKIIQSIDNNKVMDCNIYNTKQCIKCGSCTYFCPAYKNVSGYIRKLNN

SEQ ID NO: 749 - DNA, 327 bp, Unknown
  Obtained from environmental sample
  misc_feature (1)..(327): n is a, c, g, or t
atgtccgctataaatactgttttggataataaagtatatttaagcgataacgagagagagagaatacttcaagcaatgacggaagaatcaaaaccgggcgctaaagactggattacttcaattcaattgctttcaaaccgcgaattacaggttttttcattccttgccaagggattgggaaccattgaaatcgcgtctcggttaaatttaagcacaaagacaatcgacactcataaggaacacattaaaattaaactgcaatgcaataccgtacaagaactcaggcaaaaagcgatagaatgggctaaccgcgccggcaatctttaa

SEQ ID NO: 750 - protein, 108 aa, Unknown
  Obtained from environmental sample
  DOMAIN (41)...(98): Bacterial regulatory proteins, luxR family
  misc_feature (1)..(108): Xaa is any amino acid
MSAINTVLDNKVYLSDNERERILQAMTEESKPGAKDWITSIQLLSNRELQVFSFLAKGLGTIEIASRLNLSTKTIDTHKEHIKIKLQCNTVQELRQKAIEWANRAGNL

SEQ ID NO: 751 - DNA, 417 bp, Unknown
  Obtained from environmental sample
  misc_feature (1)..(417): n is a, c, g, or t
gtgttaccgcgtcctaaagacgttcctggtgcaacaagcataaaagcaggttttaattccgtagtttcaggttcagtggttaatttagcgaacgaggcaaatgttatagtttatgtcactggcgaaactccttatgctgaatggaaaggtgatctctcaaatttaacattccaagataataccctcgctaccttgaaaagccaaaactccggcaaaaaaataatcacagtatttataagcggccgcgcaatggacacaaactcgctgattaacaacagcgatgcttttgtagctgcttggcttccgggcagtgaaggcgcatgcattgcagatgtattatttggcgatcatccttttaccggaaaactcccccgcaaatggggtacatacgattatggcgctgggctcagctattaa

SEQ ID NO: 752 - protein, 138 aa, Unknown
  Obtained from environmental sample
  DOMAIN (1)...(138): Glycosyl hydrolase family 3 C terminal domain
  misc_feature (1)..(138): Xaa is any amino acid
MLPRPKDVPGATSIKAGFNSVVSGSVVNLANEANVIVYVTGETPYAEWKGDLSNLTFQDNTLATLKSQNSGKKIITVFISGRAMDTNSLINNSDAFVAAWLPGSEGACIADVLFGDHPFTGKLPRKWGTYDYGAGLSY

SEQ ID NO: 753 - DNA, 789 bp, Unknown
  Obtained from environmental sample
  misc_feature (1)..(789): n is a, c, g, or t
atgctgcgcggcattgacgattatatcgaggcggacgcgctcgaattgttaaaagccggaaaaacggccattgagatcatcgaaggccccctgatggacggcatgaaagaagtggggaaacgctttgacgaaggaaccatttaccttccccatgtcatacgcagcgcgagggtgatgaagaaagccgccgcagcgcttgagccctacatgggcaaggcaacagccgccgcgactccatgtaaaataattctcgcgaccgtaaagggtgatgtccatgacattggcaaaaatatcgtcggcattgtccttgcctgcaacgggtatcaggttatagaccttggggtgatggttcccgccgatcagatactcgacgccgcggaaaaagaacaggcggacatgatcggcctttcggggctgatcgccccctcgctggacgagatggcgcacatcgcgagagagatggaaaagcggcgcatgaagattcccctgcttgtcgggggggccgcagcaagccttgtccacaccagcctgcgcctcgcgccggaatattcaggcccggtggtttatgtgcctaacgcgggaaaatccgccgaaacggtacgcgccctgctttccgatttacagcgtccgcgtttcctgagggaactggaaaaaagttaccagaacgcagcctggcggcatgaggaactcaagacccgcgtagagatcatttcccttgaaaacgcccgcgccaacagagtcccccccgcggcatacaaacccgccgctccaaaaaagccggcattatag

SEQ ID NO: 754 - protein, 262 aa, Unknown
  Obtained from environmental sample
  DOMAIN (1)...(76): B12 binding domain
  misc_feature (1)..(262): Xaa is any amino acid
MLRGIDDYIEADALELLKAGKTAIEIIEGPLMDGMKEVGKRFDEGTIYLPHVIRSARVMKKAAAALEPYMGKATAAATPCKIILATVKGDVHDIGKNIVGIVLACNGYQVIDLGVMVPADQILDAAEKEQADMIGLSGLIAPSLDEMAHIAREMEKRRMKIPLLVGGAAASLVHTSLRLAPEYSGPVVYVPNAGKSAETVRALLSDLQRPRFLRELEKSYQNAAWRHEELKTRVEIISLENARANRVPPAAYKPAAPKKPAL

SEQ ID NO: 755 - DNA, 705 bp, Unknown
  Obtained from environmental sample
  misc_feature (1)..(705): n is a, c, g, or t
atgactccggaagagtacctttatttcgcggcctccgcccgcttgctgccaaaggaaacaagacgtaaagcggtagaagacgccattgcagcctgcggcctggagggtgaaaaaagccaccggattgaaagcctttccaagggctttaagcagcgggtcgggcttgcccaggctataattcacgaccctcccattttaatccttgacgagccgacttccggcctcgacccgaatcagataatcgaaattcgttctttaataactgagttgggaaagcgaaaaaccgtaattctttcgacccatattttgcaggaggtggaagcggtttgctctcaggtactcatattgaacgaaggccgcattgccgcccaggggatgccggatgaaatcgcgaaaaatattcgctcaggcggagggatggacacttgggagctgtaccttaaaggagcggccgctgaagaagtcaaaagcagccttgttaatctggaaaaggaaacagtcgaagcaaaagctgaaactctggaagacgggataatccggctcggcttcgcgataagggattcaggcgcctatgcccttgacggggaatgtatatttgactgggcgatcaagcagggttataaaataatcgggatgaaccggaagaaactcagtctggaagatatctttgtgaagctaacaaccgaagaggagagcaggagatga

SEQ ID NO: 756 - protein, 234 aa, Unknown
  Obtained from environmental sample
  DOMAIN (1)...(119): ABC transporter
  misc_feature (1)..(234): Xaa is any amino acid
MTPEEYLYFAASARLLPKETRRKAVEDAIAACGLEGEKSHRIESLSKGFKQRVGLAQAIIHDPPILILDEPTSGLDPNQIIEIRSLITELGKRKTVILSTHILQEVEAVCSQVLILNEGRIAAQGMPDEIAKNIRSGGGMDTWELYLKGAAAEEVKSSLVNLEKETVEAKAETLEDGIIRLGFAIRDSGAYALDGECIFDWAIKQGYKIIGMNRKKLSLEDIFVKLTTEEESRR

SEQ ID NO: 757 - DNA, 537 bp, Unknown
  Obtained from environmental sample
  misc_feature (1)..(537): n is a, c, g, or t
gtggggtttgcctcctcgtttctctttacggcggtgcagtttgccgggcggatggtggacactgagatgggtttcggttttgtggaggtcgtagacccgttcacggaggagcagacgacggtcttggggcagttgcaggtgatactctttacgatattgttcttggcgataaacggccactactttttgcttatcacggtgcagaagagttttgagatagtccctatgttcagcgccacatttccgggcggcagaataaccgaccacctgacgacgatgacggccgatgtcttcatactaggcctaaagctctccgcccctatcttcgtgacgttattgctgtcagagttagctatgggcatagtggcgcgtacggtgccgcagatgaacatcttcttcgtggggctgccgcttaagataatcgtagggatggcgacgatggtgatagtccttccgatgctggcggatctatttaagagaatggcggagggaatcataaaagatatatggaagttattatacataatgagcgggtag

SEQ ID NO: 758 - protein, 178 aa, Unknown
  Obtained from environmental sample
  DOMAIN (1)...(170): Bacterial export proteins, family 1
  misc_feature (1)..(178): Xaa is any amino acid
MGFASSFLFTAVQFAGRMVDTEMGFGFVEVVDPFTEEQTTVLGQLQVILFTILFLAINGHYFLLITVQKSFEIVPMFSATFPGGRITDHLTTMTADVFILGLKLSAPIFVTLLLSELAMGIVARTVPQMNIFFVGLPLKIIVGMATMVIVLPMLADLFKRMAEGIIKDIWKLLYIMSG

SEQ ID NO: 759 - DNA, 438 bp, Unknown
  Obtained from environmental sample
  misc_feature (1)..(438): n is a, c, g, or t
atgggcgggcacctcggcgaagtgatagagtttatcgtcatacccaagatacgccccgccataaacgctttgggtaaccactcgtttaaagagatcacggcaaggaaaatcatcgagaccgttatcaacgatagaaagagaaaactaaccgaggtagacgtgctgctgtacggcgacaccgaggttatggccgttgagataaagacctgtttgcagacaagcgacgtcgataaacatttggatcgtctgcaaaaactgcgcgaccacgaagcagacgccgaggtcaatggcaagacgcttttcggcgcggtggtaggcgcaatcgtacacgagccaatcagaacctacgccctgaaaaagggcctatatgtcatagagatccgcgaggaagagggtaaactcgacatagacaaacccgacacctgccggaagtggtaa

SEQ ID NO: 760 - protein, 145 aa, Unknown
  Obtained from environmental sample
  misc_feature (1)..(145): Xaa is any amino acid
MGGHLGEVIEFIVIPKIRPAINALGNHSFKEITARKIIETVINDRKRKLTEVDVLLYGDTEVMAVEIKTCLQTSDVDKHLDRLQKLRDHEADAEVNGKTLFGAVVGAIVHEPIRTYALKKGLYVIEIREEEGKLDIDKPDTCRKW

SEQ ID NO: 761 - DNA, 783 bp, Unknown
  Obtained from environmental sample
  misc_feature (1)..(783): n is a, c, g, or t
atgatttttcaggagccaaggcaatcattgaatcccctgatgaaagttggagcgcagatcaccgaagcgctggaattacataatgcccgaactggcgcgcgaaacgttgagcgcgtttatggagatatgcggcagggcataagccccaataaaatcccatttaagaataatgtaacagggcgtacaacgtctaagaaactggctttggaaatgctggaaaaactgcaatttcctcagccggataaaatcatggatgcctggccccaccagctctcaggggggatgtgccagcgggtcatgatcgccatcgctgcgatctgccgcccccggctgcttatagccgacgaaccgacaacggctcttgacacggctaatcagaactatattttagaattgctcaaacagataaacagggaattcggcactgcgatactttttatttcccacgatatttccatggcgcggcatttttgcagccgcttcttggttatgtattccggaaggataatcgaggaagggccaagcgaggcgattttgtcctcacccctgcatccctacacaatagcccttgccgcttccattccctgcaaagaaaacagtggcaaaccccttgcaaatatccccggcagagcgccgccgcttgagataactctgccgggctgccactttgccccgcgctgtccaaaagcgcaaacacagtgtaaagaatctctgcccccattggcagacgcgggcaatggccgttatgtgcgctgtttttttgcggaggggacaaatgtctga

SEQ ID NO: 762 - protein, 260 aa, Unknown
  Obtained from environmental sample
  DOMAIN (18)...(167): ABC transporter
  misc_feature (1)..(260): Xaa is any amino acid
MIFQEPRQSLNPLMKVGAQITEALELHNARTGARNVERVYGDMRQGISPNKIPFKNNVTGRTTSKKLALEMLEKLQFPQPDKIMDAWPHQLSGGMCQRVMIAIAAICRPRLLIADEPTTALDTANQNYILELLKQINREFGTAILFISHDISMARHFCSRFLVMYSGRIIEEGPSEAILSSPLHPYTIALAASIPCKENSGKPLANIPGRAPPLEITLPGCHFAPRCPKAQTQCKESLPPLADAGNGRYVRCFFAEGTNV

SEQ ID NO: 763 - DNA, 375 bp, Unknown
  Obtained from environmental sample
  misc_feature (1)..(375): n is a, c, g, or t
atgtacttgctcgaccgccttcgcgccgcaaatatcccccttggggtagcgacttccacccgcagtcccagagccattgatctcttgggaaaagccggcattcttgaccgttttaaggcgctcacatgcggcgaagatattacaaacgggaaacccgcgccagatattttcctccttgcggcaaaaaaactgggccagccgccctgtaactgcgtgggctttgaggactccaccgccggtcttatgggtcttcacgccgccgggatacgctcgatttttataaaggatgttttaagcccgcccgaagaagtccttgccacagtctggcacagatgcaatgatctttcagaagcggcggcattattcggtttataa

SEQ ID NO: 764 - protein, 124 aa, Unknown
  Obtained from environmental sample
  misc_feature (1)..(124): Xaa is any amino acid
MYLLDRLRAANIPLGVATSTRSPRAIDLLGKAGILDRFKALTCGEDITNGKPAPDIFLLAAKKLGQPPCNCVGFEDSTAGLMGLHAAGIRSIFIKDVLSPPEEVLATVWHRCNDLSEAAALFGL

SEQ ID NO: 765 - DNA, 441 bp, Unknown
  Obtained from environmental sample
  misc_feature (1)..(441): n is a, c, g, or t
atggacaaagccgataaaaacgaggcttcttttccctgccttagccgcgatctttcgtgggtcgattttaacgagcgcgtgcttaacgagggattacgcaaggaactgccgttgcttgagcgtttccgttttttggctattgtctcttccaattttgatgaattttttatggttcgggttgcggcgttaaaaaggatgcagaacgcggttgacccttgcggacttacgccggcgcagcagttaaaggcaatttcggaaaaagtccattctattatgaaaaaacaattcgcttgtttacaaaacgaaaatctttccggggcttgcgaaaaacgggctgtcgcttttacgtccccgatcatggtccgttcctcgcttgattttcttaaccctttttttaaaggcaagttaccctgttctgacccccctcaggctgaaaaatga

SEQ ID NO: 766 - protein, 146 aa, Unknown
  Obtained from environmental sample
  misc_feature (1)..(146): Xaa is any amino acid
MDKADKNEASFPCLSRDLSWVDFNERVLNEGLRKELPLLERFRFLAIVSSNFDEFFMVRVAALKRMQNAVDPCGLTPAQQLKAISEKVHSIMKKQFACLQNENLSGACEKRAVAFTSPIMVRSSLDFLNPFFKGKLPCSDPPQAEK

SEQ ID NO: 767 - DNA, 693 bp, Unknown
  Obtained from environmental sample
  misc_feature (1)..(693): n is a, c, g, or t
ttgcatatagcaagggagagcggggtaaaacatactgtaatttgcggcacatatttttcatactttgacaggaaatggccgcgaatgaaattgtccggtctgcatccgtatataaaaagtcatgtggagagggaagaggctgcgctatcttttggaaacgatgactttgatgtcgccgtccttgaatttccgtatattttcggcgtaaagccggagagcgaacctgtgtggacgcttttggttaaaatactgcgcggcatgaaatgggttacaatgtattccaaaggcggaacgacaatgataacaagaaaccaggccgcgcaggcaatcgcgggcgctttggaaagaacaaaaggagcgaaacgctggcctataggctgttacaatatgccgtggaaggattttctcgcgatagttcaaaaaaacatgggaatgcctgaaagaattgttattacaattcccaactggctgattaaaccggaaataaaatacatcgagagcatactgagaaaagacggcgataaaataggaagaaaatttaatatatataaatttttggaaatacaaagcgctcaaacctacatagacagaattcacggatgcaatccccttggcgtaaaagacgatgacatagaagccgcgataggcgagtcgattcgcttgtcggtagaatatttagataaaaagaattaa

SEQ ID NO: 768 - protein, 230 aa, Unknown
  Obtained from environmental sample
  misc_feature (1)..(230): Xaa is any amino acid
MHIARESGVKHTVICGTYFSYFDRKWPRMKLSGLHPYIKSHVEREEAALSFGNDDFDVAVLEFPYIFGVKPESEPVWTLLVKILRGMKWVTMYSKGGTTMITRNQAAQAIAGALERTKGAKRWPIGCYNMPWKDFLAIVQKNMGMPERIVITIPNWLIKPEIKYIESILRKDGDKIGRKFNIYKFLEIQSAQTYIDRIHGCNPLGVKDDDIEAAIGESIRLSVEYLDKKN

SEQ ID NO: 769 - DNA, 384 bp, Unknown
  Obtained from environmental sample
  misc_feature (1)..(384): n is a, c, g, or t
atgaaatatttattggatactcatactcttatttggtttttcaatggggatttggatttatcggacaaagctaagcagattattctagatacaaataatcaaatatttgcaagtattgtttctgtttgggaattatctataaaagtaagtttgaataaactaaaatttggtgggaaagcgaaaggttttttggatttgatttataaaaatggttttaaattattgaatataaatcagaattatattttcaaattggagcagttggaaaattttcacagagatccatttgataggattttaacggcaactgcgatttctgaaaatatgaaatttataactcgtgatgaaaatattcatttatatcctgtggaatgtgtttggtaa

SEQ ID NO: 770 - protein, 127 aa, Unknown
  Obtained from environmental sample
  DOMAIN (3)...(123): PIN domain
  misc_feature (1)..(127): Xaa is any amino acid
MKYLLDTHTLIWFFNGDLDLSDKAKQIILDTNNQIFASIVSVWELSIKVSLNKLKFGGKAKGFLDLIYKNGFKLLNINQNYIFKLEQLENFHRDPFDRILTATAISENMKFITRDENIHLYPVECVW

SEQ ID NO: 771 - DNA, 537 bp, Unknown
  Obtained from environmental sample
  misc_feature (1)..(537): n is a, c, g, or t
ttgaggcagggggactatttattttcggttaaggacaaccagcagatattgaagggagatatagaaggctatgttcaagacaagcatttgcagaaaacaatggacatggctgcaacggtcgaaaaaacaagcggcagggtcgaacggagaacttccggaaaggaggaatgggagggtctggcttgcattggggctgtgaacacccaagtttccagcaaaaagggacagacaaacgaatggcattattacatcacaagccgcagcttgacggcacaggaactgctcaggcacgcccgtttggaatggtctgtagaaacaatgcactggctgctagacgtgcatttcgatgaggatttctgccgtgttgaggaccggaacgtccagcaaaatctgaacattgtccgcaagatcgcgctaaacacgattaaaggctataaaaacaagatggcttctaaacgccctatttccaaacttatgtttgattgtttacttgaatccgaaaatatcctgtctattttggctgccaatgaaaattga

SEQ ID NO: 772 - protein, 178 aa, Unknown
  Obtained from environmental sample
  misc_feature (1)..(178): Xaa is any amino acid
MRQGDYLFSVKDNQQILKGDIEGYVQDKHLQKTMDMAATVEKTSGRVERRTSGKEEWEGLACIGAVNTQVSSKKGQTNEWHYYITSRSLTAQELLRHARLEWSVETMHWLLDVHFDEDFCRVEDRNVQQNLNIVRKIALNTIKGYKNKMASKRPISKLMFDCLLESENILSILAANEN

SEQ ID NO: 773 - DNA, 369 bp, Unknown
  Obtained from environmental sample
  misc_feature (1)..(369): n is a, c, g, or t
atggaagcaaaaaccggttacagggcggtaagcaagtaccttatgggttcgccctataaaatcaggcccgtggctgatcttgttcgccgccggccctactctgaggccctttccctgctggagaatatgccccagaagggtgcgcggcttatccgtaaaacggtaaagtccgccgcttcctgtgcgcttgccggcaacaaggatcttgatgaagatatgctgtatgtgcgggagatttttatagatgacggcccccgccttaaaagggtttggttccgcggtaaagcaaaggttgataccctgctcaaacggatgtgtcacataacggtcgttgtcgatgaaaccgtacatacaaaggcggaaaaataa

SEQ ID NO: 774 - protein, 122 aa, Unknown
  Obtained from environmental sample
  DOMAIN (9)...(114): Ribosomal protein L22p/L17e
  misc_feature (1)..(122): Xaa is any amino acid
MEAKTGYRAVSKYLMGSPYKIRPVADLVRRRPYSEALSLLENMPQKGARLIRKTVKSAASCALAGNKDLDEDMLYVREIFIDDGPRLKRVWFRGKAKVDTLLKRMCHITVVVDETVHTKAEK

SEQ ID NO: 775 - DNA, 501 bp, Unknown
  Obtained from environmental sample
  misc_feature (1)..(501): n is a, c, g, or t
atgacacttccttctaaaaagtatgactgggctcttcttgagccggatcatgattacactcctgtaataaccattaacgcaaaccgcgcttcgttgaccgccggaaaaatcaaagttgtggtgcagagaagaaactggcccgacgggctggagctttcattttataatcagaaagaaaaactgctttttaaggaacgtgaaaccgggggagccttaagattaatggccagaaaatatacgccactttccggaggcagttacaaaacaagcgccttctttgaatctgaaaccggggaacatctatacggaatggggcagtaccaacaggaatatttcgaccttaaacactgcaacctcgaactggcgcacaggaattcccaatccagcgttccgtttgttttatcaagcctggggcacggttttctctggcataacccgtctatcggcaaggtttcctttactgaatatcaagctcatggtttcggtatggccacaaattga

SEQ ID NO: 776 - protein, 166 aa, Unknown
  Obtained from environmental sample
  misc_feature (1)..(166): Xaa is any amino acid
MTLPSKKYDWALLEPDHDYTPVITINANRASLTAGKIKVVVQRRNWPDGLELSFYNQKEKLLFKERETGGALRLMARKYTPLSGGSYKTSAFFESETGEHLYGMGQYQQEYFDLKHCNLELAHRNSQSSVPFVLSSLGHGFLWHNPSIGKVSFTEYQAHGFGMATN

SEQ ID NO: 777 - DNA, 507 bp, Unknown
  Obtained from environmental sample
  misc_feature (1)..(507): n is a, c, g, or t
gtgatgaaaaaagaacgatttatattgacagtgacgctttgcctgctcccgctgctgtttgcgtcctgcaaagtctacaccttcagcggctccacgctgcccggccacatcaagacggtgatgattccggtattcgccaacaagacactggaacccggcatcgacgacgacgtcacaaccgaactctctaaagaggttctcaaaagccaactgcgtccggctaacagcgatgccgacgctacgatcagcggcgccgtaacccgctacgtcaaccgcccgcataccttcggcgcgggtggcgcagaggtcaacgtcgagcagtacattgtgcaagtgtcggcggaggtagagttcttcgataataggaaagaggagtccatctacaagggcaccgtttccggggagggaatttaccttttcgagagcgaggacgaaacgctggggcgggaaaaggccgtgaagaacttagtggaaaagatcatgcagaactccgtacagatgtggtga

SEQ ID NO: 778 - protein, 168 aa, Unknown
  Obtained from environmental sample
  SIGNAL (1)...(27)
  misc_feature (1)..(168): Xaa is any amino acid
MMKKERFILTVTLCLLPLLFASCKVYTFSGSTLPGHIKTVMIPVFANKTLEPGIDDDVTTELSKEVLKSQLRPANSDADATISGAVTRYVNRPHTFGAGGAEVNVEQYIVQVSAEVEFFDNRKEESIYKGTVSGEGIYLFESEDETLGREKAVKNLVEKIMQNSVQMW

SEQ ID NO: 779 - DNA, 318 bp, Unknown
  Obtained from environmental sample
  misc_feature (1)..(318): n is a, c, g, or t
atggaagaacgctacggcagcgcgttcttctcctactccgtaccggaagcggtaataaaattccgccaagggataggacggctgatacggtcggccgacgataggggaacgctggtcgtgctagacaataggatactcacaaagggttacggcaaacaattctctaaggccgtgggtagtaagataaacgaacttagcggggttgacggtatggtagaggctatgcgggagttctttgagagtaatcgcggccttgatagcggcaaagaagcggctccggcgtcaacaatcacatacgtgccgtttgaggatctgtga

SEQ ID NO: 780 - protein, 105 aa, Unknown
  Obtained from environmental sample
  misc_feature (1)..(105): Xaa is any amino acid
MEERYGSAFFSYSVPEAVIKFRQGIGRLIRSADDRGTLVVLDNRILTKGYGKQFSKAVGSKINELSGVDGMVEAMREFFESNRGLDSGKEAAPASTITYVPFEDL

SEQ ID NO: 781 - DNA, 696 bp, Unknown
  Obtained from environmental sample
  misc_feature (1)..(696): n is a, c, g, or t
gtgcaggtagattccggcatagcgcggaaattcggcggcacaggattgggactggctatttccaaaaaaattgtcgagttgatgaacggtgagataaggatagaatcggaagaaaacaagggatcgtcttttatattcactatccgcgcggaaattgtaagtcctcaaacgcaagcgttaaaaacttccgattctcctgtaaaagaaactcccgtcgtgtccggcgcggacgagggaacggaaatttataaaggcaaacgtattttacttgccgaggacgttgaaataaaccgtgaaatagtcgttaccgtactggaaccgtttggactggaaatagtagaagccgaagacggacagaaagcctatgatttattccgcgaaaatcccgaatcctacgatttgattttcatggatattcacatgcccggcgttgacggttatgaagccacaaaactaatccgcgcctttgaagccgaacacaataaaaacctcccaaattcaagcgcgagtttcaccgaaggtgaaactcgaagcgataataggaatttgcgcaagcaaattcctattatcgcaatgaccgctaatgtttttcgcgaagacgtggaacactgtcttgccgccggtatgaacgatcatgtcgggaaaacgcttgattttgaagtggtgtcgtctaaactgaaaatgtatttaagctga

SEQ ID NO: 782 - protein, 231 aa, Unknown
  Obtained from environmental sample
  DOMAIN (86)...(227): Response regulator receiver domain
  misc_feature (1)..(231): Xaa is any amino acid
MQVDSGIARKFGGTGLGLAISKKIVELMNGEIRIESEENKGSSFIFTIRAEIVSPQTQALKTSDSPVKETPVVSGADEGTEIYKGKRILLAEDVEINREIVVTVLEPFGLEIVEAEDGQKAYDLFRENPESYDLIFMDIHMPGVDGYEATKLIRAFEAEHNKNLPNSSASFTEGETRSDNRNLRKQIPIIAMTANVFREDVEHCLAAGMNDHVGKTLDFEVVSSKLKMYLS

SEQ ID NO: 783 - DNA, 447 bp, Unknown
  Obtained from environmental sample
  misc_feature (1)..(447): n is a, c, g, or t
atggcagtagccgttgttatggtgataacacaggcggtgatagccaaaaaccgttgtgacacatacggcaggctctacaactggtcaacggcaatgggcggcgtttgccccgctggctggcatttgccaagcgatgcggagtggacagcactgacgaattttgtcggctcctctacagcaggaaccaagctgagagcgaattctactctgtggagcacgaacacgggcacagacgacttcggtttttcggctctgcctggcggctacggcaattctggtggcaggttctacgatgtcggcaacatcggctactggtggtctgccacggaggactttgcttcctacgcctacaaccgggacattagctacaacaacgcagttgtgggcagggactacaacgataattcatacttatattcagtgcgttgcgtccaagattcaccttga

SEQ ID NO: 784 - protein, 148 aa, Unknown
  Obtained from environmental sample
  misc_feature (1)..(148): Xaa is any amino acid
MAVAVVMVITQAVIAKNRCDTYGRLYNWSTAMGGVCPAGWHLPSDAEWTALTNFVGSSTAGTKLRANSTLWSTNTGTDDFGFSALPGGYGNSGGRFYDVGNIGYWWSATEDFASYAYNRDISYNNAVVGRDYNDNSYLYSVRCVQDSP

SEQ ID NO: 785 - DNA, 684 bp, Unknown
  Obtained from environmental sample
  misc_feature (1)..(684): n is a, c, g, or t
atgttaacttcagcgggtttaaaaaaagcggcggcgacagtccagccgcccgataccgttatcgtcaatcttagtatttcttgtgaggaaattttagcgtccatgaaaccgaaatggcggtacaatgtttctttagcggaaaagaagggcgtaaaagtcaggacttgcggcgttcaggatatcgaagtattttataatcttttaaaagaaacggctgcaagggacggtatcgcagtacacggaattaattattacaggacgctttttgaagtgtgcgaaaaacaaaataaaaaaaatcaatttatccgtttatatacggcggaacatgaaggcgatactattgcggctattgtcgttctttattggggaaagaacgcgacgtatctttacggcgcgtcttgcaacaataaacgaaatttaatggcaccttacgcgcttcaatggaaagccatgcaggatgccaaagaagcgggatgtgtaaattatgatcttttcggcatacccccgaatgaagatcccaatcatcctatggcgggtctttacaggtttaaaaccggatttggcggacaaattatacaccgtccgggaagctgggattatcggtataaaaaggttatgtacgatctttttaacaaggcggaagccctgcggaaaaaattgcgcgatttaaaaaagaaacgataa

SEQ ID NO: 786 - protein, 227 aa, Unknown
  Obtained from environmental sample
  DOMAIN (1)...(215): FemAB family
  misc_feature (1)..(227): Xaa is any amino acid
MLTSAGLKKAAATVQPPDTVIVNLSISCEEILASMKPKWRYNVSLAEKKGVKVRTCGVQDIEVFYNLLKETAARDGIAVHGINYYRTLFEVCEKQNKKNQFIRLYTAEHEGDTIAAIVVLYWGKNATYLYGASCNNKRNLMAPYALQWKAMQDAKEAGCVNYDLFGIPPNEDPNHPMAGLYRFKTGFGGQIIHRPGSWDYRYKKVMYDLFNKAEALRKKLRDLKKKR

SEQ ID NO: 787 - DNA, 510 bp, Unknown
  Obtained from environmental sample
  misc_feature (1)..(510): n is a, c, g, or t
gtgctaacaaagccttcaaagaagtcgcaacagaaagtcttggagaaaataaggacgatcatacacatccatcgtggagcaaaacaggacgaccttatagccatgctcaaccccgttataaggggatggacaagttaccaccacacggtggtagcaaaaaggattttctcaaaaatggacaaagagttgttccttctcctttggaaatgggcgaggaagaggcacggcaataaaggccggcactggatttcccgccgctattggaaaaccgaagggaataaacactgggtattcaaggacacgctcacgctgcttagattttgcgacaccaaggttaggcggcatataccgctcaaactggaaatgaacccctacatcgacactgaatatttccataagaggagacaccggctgttagtaaacagaacattgggagtgatactcccagagattaaaaaccaagaccaaaccggcagccgtccgacagacggcggcttacttgaggcttga

SEQ ID NO: 788 - protein, 169 aa, Unknown
  Obtained from environmental sample
  DOMAIN (10)...(88): Group II intron, maturase-specific domain
  misc_feature (1)..(169): Xaa is any amino acid
MLTKPSKKSQQKVLEKIRTIIHIHRGAKQDDLIAMLNPVIRGWTSYHHTVVAKRIFSKMDKELFLLLWKWARKRHGNKGRHWISRRYWKTEGNKHWVFKDTLTLLRFCDTKVRRHIPLKLEMNPYIDTEYFHKRRHRLLVNRTLGVILPEIKNQDQTGSRPTDGGLLEA

SEQ ID NO: 789 - DNA, 351 bp, Unknown
  Obtained from environmental sample
  misc_feature (1)..(351): n is a, c, g, or t
gtgggagagagctgggaggataggatcgcgctgtgtctggagttgcgagggcttggggttgatacggtgccgataaactttttgaacgcgattgagggtacgcgggtggagccgcctaaggagccgccgcttgagtttttgaagatagtggcgttgtataggctggctatgcctagggcggttattaaagtgtgcggggggcgggagaaaaatttgggggcgcttcagccgttgattttttttgcgggagcgaatggatatattaccggagggtatttgactacgggcggggctggggtggatgcggatgatgagatgattgaactattggggttgtcgagaaaaaattaa

SEQ ID NO: 790 - protein, 116 aa, Unknown
  Obtained from environmental sample
  DOMAIN (24)...(114): Biotin and Thiamin Synthesis associated domain
  misc_feature (1)..(116): Xaa is any amino acid
MGESWEDRIALCLELRGLGVDTVPINFLNAIEGTRVEPPKEPPLEFLKIVALYRLAMPRAVIKVCGGREKNLGALQPLIFFAGANGYITGGYLTTGGAGVDADDEMIELLGLSRKN

SEQ ID NO: 791 - DNA, 543 bp, Unknown
  Obtained from environmental sample
  misc_feature (1)..(543): n is a, c, g, or t
ttggctgtttcacagatctatttcagttcgccctcccgctgcgccgtcgcggacatgtgcgccatctccattgaccgccgcctgaccatgggcgaaacctataaaagcgcccttgcggaaatcgccgctctgcccaaggtaaaagagtacaaggcaaaagtcaccatgtacaagtacgatctgcccagttataccggagtagtttatcccatcgactgctacttccccacctgggtcatcccggaagacgccaggcctgcaagggccatggtaaaagcctataagggaatgttcggcaagccaaaggtggacaagtggactttttcgactaacggcgtttcgatcatgggccggaacaatatcccctgcataggcttcggccccggcaaggaagagcaggcccacgcccccaacgaaaagacatggaaagccgatctggtccgctgcgccgccgtctacgccgccttgccgagtatatatactagcgaagagttgaacgagaaaaagagtaaagataagaaagctaagagcaaaaaaaggtaa

SEQ ID NO: 792 - protein, 180 aa, Unknown
  Obtained from environmental sample
  misc_feature (1)..(180): Xaa is any amino acid
MAVSQIYFSSPSRCAVADMCAISIDRRLTMGETYKSALAEIAALPKVKEYKAKVTMYKYDLPSYTGVVYPIDCYFPTWVIPEDARPARAMVKAYKGMFGKPKVDKWTFSTNGVSIMGRNNIPCIGFGPGKEEQAHAPNEKTWKADLVRCAAVYAALPSIYTSEELNEKKSKDKKAKSKKR

SEQ ID NO: 793 - DNA, 495 bp, Unknown
  Obtained from environmental sample
  misc_feature (1)..(495): n is a, c, g, or t
gtggaagtccaaaacggcgaattgattgtccgcaccacgaaaaggattaactacaactcaggcaaggccccggttttaacggtttctacacccgcattaaacagtctgaccataacaggggcgtgtacttttaagacgattgacaaaattaaaaccgacactttctaccttgaagttagcggcgctggcgaaggcaaagccgaacttgatgtaaacagactcaaaacaaatatgtcaggcgcgggcagttttgaactttccggcaaagcggacaacgccgaaatttcggttagcggggcaggtgaattaaaagcgttttcgcttcagattcgcgaagcatcagtcaatttttcgggcgcaggcgcaataaggataagctgttctgaaaaattatccgtcgaagcaagcggagcgggtatggtggaatacaaaggttctcctatccttattagcgtgaatacacgcgggcctgtaagtttcaaaaaagtagattaa

SEQ ID NO: 794 - protein, 164 aa, Unknown
  Obtained from environmental sample
  misc_feature (1)..(164): Xaa is any amino acid
MEVQNGELIVRTTKRINYNSGKAPVLTVSTPALNSLTITGACTFKTIDKIKTDTFYLEVSGAGEGKAELDVNRLKTNMSGAGSFELSGKADNAEISVSGAGELKAFSLQIREASVNFSGAGAIRISCSEKLSVEASGAGMVEYKGSPILISVNTRGPVSFKKVD

SEQ ID NO: 795 - DNA, 369 bp, Unknown
  Obtained from environmental sample
  misc_feature (1)..(369): n is a, c, g, or t
ttgatattgcgcggagcggtagacagccacggcgacgcccgtcccaactaccaccacgaagacctgatacgcgccacggagctctatctaaaacgtaaccttttgaatccgactattttcgtcgataccaaccacgacaactccggcaaacgtttccgagagcagacgagaatcacgcgcgaagtccttcgcagcagaagccacgacgcgcagttggcgcagatagtccgcgggctgatgattgagagctatatcgaagagggggcgcagaaagcagacgagaatacgtttggaaaatccatcaccgacccttgtctgggctgggaggagacggagagactgctgtttgagatagcggagacgtgttga

SEQ ID NO: 796 - protein, 122 aa, Unknown
  Obtained from environmental sample
  misc_feature (1)..(122): Xaa is any amino acid
MILRGAVDSHGDARPNYHHEDLIRATELYLKRNLLNPTIFVDTNHDNSGKRFREQTRITREVLRSRSHDAQLAQIVRGLMIESYIEEGAQKADENTFGKSITDPCLGWEETERLLFEIAETC

SEQ ID NO: 797 - DNA, 309 bp, Unknown
  Obtained from environmental sample
  misc_feature (1)..(309): n is a, c, g, or t
atgcnttatgcatttaccgaacaaggcgttgcaatgttagcgtcagttcttaacagccccaaagcagtaactgtaaacatcaacatcatgagggcatttgtaaaattaagacactatgtattatcgcaaagcaaggatgaacaaatagcagaactccgcaagttgcttatgctttacattgaaaagaacgataagcgtaatgatattattatcgccctaaacaatctaaaaacggtgactacttcgttctttggtcaccctagcgttttcccgtgcgtgaacattcggttaaatggacattgctattag

SEQ ID NO: 798 - protein, 102 aa, Unknown
  Obtained from environmental sample
  misc_feature (1)..(102): Xaa is any amino acid
MXYAFTEQGVAMLASVLNSPKAVTVNINIMRAFVKLRHYVLSQSKDEQIAELRKLLMLYIEKNDKRNDIIIALNNLKTVTTSFFGHPSVFPCVNIRLNGHCY

SEQ ID NO: 799 - DNA, 762 bp, Unknown
  Obtained from environmental sample
  misc_feature (1)..(762): n is a, c, g, or t
atgatcgccggcagatgcggcggaaaagctggcatagttaaaaggaagccgctggttttggctaagcagagcgaagaagctttggatatttttcaaaaaaccgcaaaagaaaaaaacagccccttaatttattttcccgaagctgtagaaatttccaacttaaaaatttctcccgaaggcacgaactttactctctgttcaaagaaccagctcttctccgccccgctgtccctcttcattcccgtaccgggcaaggtgcaggctgaaaacgcagctcttgccattaccgccgtaaaaaccgccttcccgctgattagcgaagacgctgtaatcgcggggctgaacaatataaaaatccccgcccgctttgaaaaaatagcgcccgaatttataattgacggtgctcacacgccggagagtctcgctcttgccattgaaaccttttgccaactctacggcgaaggcggcgttctcatcttcggttgcgccgccgacaaagacgctaaggcaatggcaaaaacagcgcatccccgcttcgcgaaaatatttatcaccaccccgggaacttttaaggcaagcaacccgccgcaagtttacgaagcttttgcgtcacaagcggggcgggagaaaatgcggctaatcgctgatacgagggaagctgtgggggaagcgagggaattcgcggcgagaaaccaattgccgattttagggacgggatctttttacttagtctcggaaataagaaaaatcattttgccataa

SEQ ID NO: 800 - protein, 253 aa, Unknown
  Obtained from environmental sample
  DOMAIN (119)...(200): Mur ligase family, glutamate ligase domain
  misc_feature (1)..(253): Xaa is any amino acid
MIAGRCGGKAGIVKRKPLVLAKQSEEALDIFQKTAKEKNSPLIYFPEAVEISNLKISPEGTNFTLCSKNQLFSAPLSLFIPVPGKVQAENAALAITAVKTAFPLISEDAVIAGLNNIKIPARFEKIAPEFIIDGAHTPESLALAIETFCQLYGEGGVLIFGCAADKDAKAMAKTAHPRFAKIFITTPGTFKASNPPQVYEAFASQAGREKMRLIADTREAVGEAREFAARNQLPILGTGSFYLVSEIRKIILP

SEQ ID NO: 801 - DNA, 363 bp, Unknown
  Obtained from environmental sample
  misc_feature (1)..(363): n is a, c, g, or t
ttggttgcgcaaccgctgttggctaaagtaccctattacgcgccggcgtgttatcattgtcaacaatctgtcgaaaaaattcttaaagcctatatcattgcaaaagaaaatatattaataaaaacacatgatcttgatgatctcattaataaatgtgaaaaatacgctatagattttggtaatttcaaagatgctggcgaaaatttaacgctatatacaaccatacgatacccaccatttggaaacctgacggaacaagatatgaagcaagcgctaaatgatgctcaggacgtattggaattcacaaaatctaagttggcggaaatggggttcggagctaatccaaaggacgtaccaatatga

SEQ ID NO: 802 - protein, 120 aa, Unknown
  Obtained from environmental sample
  DOMAIN (3)...(105): HEPN domain
  misc_feature (1)..(120): Xaa is any amino acid
MVAQPLLAKVPYYAPACYHCQQSVEKILKAYIIAKENILIKTHDLDDLINKCEKYAIDFGNFKDAGENLTLYTTIRYPPFGNLTEQDMKQALNDAQDVLEFTKSKLAEMGFGANPKDVPI

SEQ ID NO: 803 - DNA, 330 bp, Unknown
  Obtained from environmental sample
  misc_feature (1)..(330): n is a, c, g, or t
atgaaccaaaacgtcaaaaccgaactcgacaaaatcgtaagcgttctggccgaaaccgggatcgtaaccaaaatcatcctgttcggctcatacgcgaggggagacgagacccccgacagcgatattgatttgtgcgtcatcacgccggtaacccccaaaagcaatgttgagcttatctctaacttccgaagatctgtatggggtatacgtacaatgccgttggatttgttcgcttataaccaagataatttttactttcacgccaaacgcccaacttcatttgaacacgaaatagcggaaacaggagtctcgttgtatgagcacagatag

SEQ ID NO: 804 - protein, 109 aa, Unknown
  Obtained from environmental sample
  DOMAIN (5)...(91): Nucleotidyltransferase domain
  misc_feature (1)..(109): Xaa is any amino acid
MNQNVKTELDKIVSVLAETGIVTKIILFGSYARGDETPDSDIDLCVITPVTPKSNVELISNFRRSVWGIRTMPLDLFAYNQDNFYFHAKRPTSFEHEIAETGVSLYEHR

SEQ ID NO: 805 - DNA, 672 bp, Unknown
  Obtained from environmental sample
  misc_feature (1)..(672): n is a, c, g, or t
atgactcagggagaagataccgataaaaacagacagagttccaaattcaaagaaatacttctttcccttcccaagacggaaatacacctgcatctggaagggcttgcgtcaattgattcaatctgggcattatggcagaaaaacaatctaatctcggcagacatacagactaaagaggatttacttcgccgctttaagataacaacgctggatgaattcattgatgttttcatcaacataatccagcatagtttcagaacagaagacgattttgcgtatctaataaatgatgcaggagaatatcttaaaaataacaacatagtctattcagaaatattttttgcaccgacaaaatttttaaaaatggggtttagtttcccaaagattgttgagatattaacggaaggggcttattcaattcataacaagtatggggttgaaataaaatttttaattgacgtttcacgtacttttggaccggaaaatgcaatgaataatttaaatctgatgttggaatacaaaagtaacgcaattataggcataggtctgggtggcactgaaaaattaggtccatcaaaggattatgcagaagtatttaaaaaagcgcgcgaacatggaattcattttgtggctcattcaggagaggacatggggtgggaacaaatcnggtga

SEQ ID NO: 806 - protein, 223 aa, Unknown
  Obtained from environmental sample
  misc_feature (1)..(223): Xaa is any amino acid
MTQGEDTDKNRQSSKFKEILLSLPKTEIHLHLEGLASIDSIWALWQKNNLISADIQTKEDLLRRFKITTLDEFIDVFINIIQHSFRTEDDFAYLINDAGEYLKNNNIVYSEIFFAPTKFLKMGFSFPKIVEILTEGAYSIHNKYGVEIKFLIDVSRTFGPENAMNNLNLMLEYKSNAIIGIGLGGTEKLGPSKDYAEVFKKAREHGIHFVAHSGEDMGWEQIX

SEQ ID NO: 807 - DNA, 459 bp, Unknown
  Obtained from environmental sample
  misc_feature (1)..(459): n is a, c, g, or t
ttgatgggggagatcgatccggggttaaggtgttttattgaggatctgtcagacaccggctgcgcggttgttgtcgccggcaagacggagtccggcctgcgcgtcaagattcaatttgcccttgataatatccccatctgcataagcggcgttgtccgttccaccagcttcaaggcggacaccaaccgttcggtactgcgtatcgaagcggatcccatgcccatggaaataagaaaccatatcctgggccagatgtttgggatgtcgcttgatgacgatgacgatctgccgttccgcgtcctggaagatgaagccgcaaaaatcaattccaatgccggcgccataattgacgatccttttatcgcggacgccgccgccgacgccgcccttcatgaggaacccaaaatagacgaaaaagatcttaaaataaaagattttaaaatggacgatattttctaa

SEQ ID NO: 808 - protein, 152 aa, Unknown
  Obtained from environmental sample
  misc_feature (1)..(152): Xaa is any amino acid
MMGEIDPGLRCFIEDLSDTGCAVVVAGKTESGLRVKIQFALDNIPICISGVVRSTSFKADTNRSVLRIEADPMPMEIRNHILGQMFGMSLDDDDDLPFRVLEDEAAKINSNAGAIIDDPFIADAAADAALHEEPKIDEKDLKIKDFKMDDIF

SEQ ID NO: 809 - DNA, 699 bp, Unknown
  Obtained from environmental sample
  misc_feature (1)..(699): n is a, c, g, or t
ttgaacggtttttacgccgactgggcggaaccgactttcaagattttacaggtgctgttatgggctttcaccgtggcgattgtgtacccgttactccccggttccgagtccgacgtattcaagggggtttcggtatttgtgggccttatcttttccttcggctcgaccagcgccatcgggaacatggtggcggggctggtgattacctatatgcggccctttaaaatcggcgaccgcgtacagattaaggaaaccaccggttttgtagtggaaaaaaacctgatggtggtgcggttaagaacgcataaaaacgaatatgtcaccttcccgaatatgctcatactcagttccagcatcaccaattacaatacctcatccaccgatgaaaccgagggcttgatactctacacggaggttacatttggttacgcgacaccctgggagaaagttcacgaaattcttattaacgccgcccttgagacggattatgtgcagaagaagcccaagccctttgtgctgcaaacaggcctggataatttttacgcccgttaccagattaactgttacacgaaagaggtggacaaagtcccgaaaatttacgcgtcgctttatgagaatatcccgaatggctttcatgaagcgggaatggacatgaccggcgccaattacggggtgtatgtacagaaaaaagaaaaatag

SEQ ID NO: 810 - protein, 232 aa, Unknown
  Obtained from environmental sample
  DOMAIN (14)...(219): Mechanosensitive ion channel
  misc_feature (1)..(232): Xaa is any amino acid
MNGFYADWAEPTFKILQVLLWAFTVAIVYPLLPGSESDVFKGVSVFVGLIFSFGSTSAIGNMVAGLVITYMRPFKIGDRVQIKETTGFVVEKNLMVVRLRTHKNEYVTFPNMLILSSSITNYNTSSTDETEGLILYTEVTFGYATPWEKVHEILINAALETDYVQKKPKPFVLQTGLDNFYARYQINCYTKEVDKVPKIYASLYENIPNGFHEAGMDMTGANYGVYVQKKEK

SEQ ID NO: 811 - DNA, 690 bp, Unknown
  Obtained from environmental sample
  misc_feature (1)..(690): n is a, c, g, or t
atggagatctcctgccttttgaaaacccttgtgacgcccggcctttcctttatctgcgaagtaaaaaaggcttccccttccaagggaataatctccgaaagttttccttatctggacatcgctaaggaatacgaagccgccggagcctcggcaatttcagtgcttaccgagccggaatattttttgggaagcgatcgttacctgcaagaaattgcggcaaaaacaaccattcccgttcttagaaaagattttatcgttgattcctaccagatctacgaagcgaaacttttgggagcacaggcggttctgctcatcgcggcccttttgaatgatgcgaagacccttgccgcttacatcaagaccgctgacgaattggtgctttcggcgttagttgaaattcacagcgaagcggaaacagaacaggcgctggaagccggagcaaaaattatcggcattaataaccgggatttaaaaacctttaaggtggataccggggttactgccagcctgaaaacatgtatacccgccggaattattatcgttgccgaaagcggcatccgatcagcagacgacgtgcggaagataaaagagataggcgttgacgctgtcttaatcggtgaaagcctgatgcgctcggcggacaaaaaacagttcctggcagaactaaaagcggcggccagtgaaaattaa

SEQ ID NO: 812 - protein, 229 aa, Unknown
  Obtained from environmental sample
  DOMAIN (2)...(222): Indole-3-glycerol phosphate synthase
  misc_feature (1)..(229): Xaa is any amino acid
MEISCLLKTLVTPGLSFICEVKKASPSKGIISESFPYLDIAKEYEAAGASAISVLTEPEYFLGSDRYLQEIAAKTTIPVLRKDFIVDSYQIYEAKLLGAQAVLLIAALLNDAKTLAAYIKTADELVLSALVEIHSEAETEQALEAGAKIIGINNRDLKTFKVDTGVTASLKTCIPAGIIIVAESGIRSADDVRKIKEIGVDAVLIGESLMRSADKKQFLAELKAAASEN

SEQ ID NO: 813 - DNA, 813 bp, Unknown
  Obtained from environmental sample
  misc_feature (1)..(813): n is a, c, g, or t
gtgtggggcgaagaaaaacaccataacgcgattcttgctatggcgagacagaacgcggcggaagatttgcggaaaaggttgaaggagaggggggcggggccggctttggatgaattgcttagggttttgaatttgcagactaagccggaaaggattgaagggtttgatatctcgcatcttgacgggaaacatcctgtcgcttcgcttatctcttttaagaatggggttccggatcgtaagaattaccgttattttaagctgcgcacggtaataggaaaagtagacgactttgccgcaatgcgcgaagcggtacagcggcgttattcccgccttttgcgcgaagaaaaagaaatgcccaatttaatacttgtggacggtgggatcgggcaggtgaacgcggcgaaaactgtgttagacgaaatggaaattaactgcgatattgtcggtcttgccaagcgcgaagaagaactgtggctgccgggcgcgaaagaacctgttgtgctttcaaggcagtcggaagctctgaaagtcctgcaatttgtccgcgacgagtgccatcgttttgcgacggggcttaacaaaaagctgcgttcaaaagacctattctttccggtactggaatcagtggaaggaattgggcccaagcgcgcggcggcaattatgcgctcttacgaaacgctggaaaacatagccgcggcgtccctttcggaaatggccgaacgctgcaagataggcgaagacgccgccagagcggttcgcgctgtggctaaactcgcgcttgaggagaagaaggggccgcgcaaacgggtgtaa

SEQ ID NO: 814 - protein, 270 aa, Unknown
  Obtained from environmental sample
  DOMAIN (39)...(190): UvrC Helix-hairpin-helix N-terminal
  misc_feature (1)..(270): Xaa is any amino acid
MWGEEKHHNAILAMARQNAAEDLRKRLKERGAGPALDELLRVLNLQTKPERIEGFDISHLDGKHPVASLISFKNGVPDRKNYRYFKLRTVIGKVDDFAAMREAVQRRYSRLLREEKEMPNLILVDGGIGQVNAAKTVLDEMEINCDIVGLAKREEELWLPGAKEPVVLSRQSEALKVLQFVRDECHRFATGLNKKLRSKDLFFPVLESVEGIGPKRAAAIMRSYETLENIAAASLSEMAERCKIGEDAARAVRAVAKLALEEKKGPRKRV

SEQ ID NO: 815 - DNA, 891 bp, Unknown
  Obtained from environmental sample
  misc_feature (1)..(891): n is a, c, g, or t
atgctttcagaaaaagtctcagtcatcgttcttaactgcnggagctcagattccagaagaaacggctntgcgtggagggctaagcccgagcgggtagaaatcttcggcgaatcttctcgcgggctttgcaacggcatttacagtttcattgccgcgatgggcataagctggcccgcttccggacaggaaaaactccccaaggcgtgggccggccttacatgcgacaacgtcagcgaaccttcgctttttgacgagaaaaaccccctagccccatgccggcgttttgtgcctgccggaaaaagagagctgggagcaatgctaaaagattgcgaagcctttgccgcctgggcagcacgtaaccgctatgacgccctggttatacccctggcggcgtttgtctccgaaaggcaaaagttaatgccgcttgaaaaatttgccgaggaatatggcattgctttggaagccggaggccacgaactcagttctcttgtaccccgcaaggcgtttcttttacaccgggattattttcgcatggaaggcggtaaaaggaaaaaggatcaccacttctgcccgaccagcccgggtgccatccgccttatcggcgaagaagcgggcaaattgttccgggcggcggacaacgtaaaggttttccacctttggcctgacaacggggcggaaaccgcgtggtgttcttgccccacctgcagggcctttaccacgccggaacagtaccgcatgggcgttaacgccgctgctgacattcttgcggcattaaaccctgacgctctggtaaccttttatgaaaaatcgggcgaagaaggaaaaatccccctgagaaaaaatatatataagatggagaaactgcctgaatcaagaattatcgatacctga

SEQ ID NO: 816 - protein, 296 aa, Unknown
  Obtained from environmental sample
  misc_feature (1)..(296): Xaa is any amino acid
MLSEKVSVIVLNCXSSDSRRNGXAWRAKPERVEIFGESSRGLCNGIYSFIAAMGISWPASGQEKLPKAWAGLTCDNVSEPSLFDEKNPLAPCRRFVPAGKRELGAMLKDCEAFAAWAARNRYDALVIPLAAFVSERQKLMPLEKFAEEYGIALEAGGHELSSLVPRKAFLLHRDYFRMEGGKRKKDHHFCPTSPGAIRLIGEEAGKLFRAADNVKVFHLWPDNGAETAWCSCPTCRAFTTPEQYRMGVNAAADILAALNPDALVTFYEKSGEEGKIPLRKNIYKMEKLPESRIIDT

SEQ ID NO: 817 - DNA, 945 bp, Unknown
  Obtained from environmental sample
  misc_feature (1)..(945): n is a, c, g, or t
atggccgagagtttcgctgaaaaccccgtaacccttgacaggcggcaaagcgccatgctcccactggtggaaggctcgataaaagcggaaaaaatcctgatattctcaggcactcgcgcgttaggcggcgctacgataaaccccgcgattagcgcggaactggtcaataactcaggcatgaaacttcccgcagggcctatcacggtttacgaggacgggacttacgcgggggacgcgctcatcgagttctttcccgaaaacgaaaagcggcttatctcttacggggaagacctctcggtaggcggcagcgttgcttcatcaggtacccgctttattacggcggtaaacatttccagcggcgtcatgaccattacccgccgtcagagttacgagaaagtttacacaataaagaacgtttccggccaggcaaaaaaaataattattgaacaccccattacttccggttctgaactaatggaacctaaagaagccgacgatcgtaccggaagcctctatcgctttaaccggaacctgcccgctaatgaaacattcacttttacggttcgggaagaaacccctgtttttgagcggatcaccctggcgcagctccgcgccgacacttttctgagctatgcctccaaccaggaaatccccgccaatgtccgcgaggcattaacaaaggcaatcgagctaaaaaaggttgccgacgacgcctcctcggcgcagagcaggcttganatccagatgaccaggctcacttccgatcaggacaggatacgccgcaacctcgaagccgccggtaaccagaccccacagggtcaggaataccttanacgcatggctgccctggacgatgagattgacgacttaaaaaaacagatagatgctgcggtgcaggaaacccagagggcaaggcggagtacgatagctatttggcgacagtga

SEQ ID NO: 818 - protein, 314 aa, Unknown
  Obtained from environmental sample
  misc_feature (1)..(314): Xaa is any amino acid
MAESFAENPVTLDRRQSAMLPLVEGSIKAEKILIFSGTRALGGATINPAISAELVNNSGMKLPAGPITVYEDGTYAGDALIEFFPENEKRLISYGEDLSVGGSVASSGTRFITAVNISSGVMTITRRQSYEKVYTIKNVSGQAKKIIIEHPITSGSELMEPKEADDRTGSLYRFNRNLPANETFTFTVREETPVFERITLAQLRADTFLSYASNQEIPANVREALTKAIELKKVADDASSAQSRLXIQMTRLTSDQDRIRRNLEAAGNQTPQGQEYLXRMAALDDEIDDLKKQIDAAVQETQRARRSTIAIWRQ

SEQ ID NO: 819 - DNA, 330 bp, Unknown
  Obtained from environmental sample
  misc_feature (1)..(330): n is a, c, g, or t
atggaatataatataatagtggatgctggcggtgtgcaaataaccaattttgatnttagccgtggttttaacgaagcaattgaagacaaacaggttgcggagcaaaaagcattgacggcaaaaaataatttggaaagaataaaggttgaagccgaacagaaaattgcccaggctcgcggcgaggcagaggctattcgcattcaggcagatgctatacgtgcccaaggcggcaaggaatatgtgaatttaaaagccattgaaaaatgggacggcaggctgcctacttatactggcgggaatgggccaatgccatttttggaagtgaagtaa

SEQ ID NO: 820 - protein, 109 aa, Unknown
  Obtained from environmental sample
  misc_feature (1)..(109): Xaa is any amino acid
MEYNIIVDAGGVQITNFDXSRGFNEAIEDKQVAEQKALTAKNNLERIKVEAEQKIAQARGEAEAIRIQADAIRAQGGKEYVNLKAIEKWDGRLPTYTGGNGPMPFLEVK

SEQ ID NO: 821 - DNA, 369 bp, Unknown
  Obtained from environmental sample
  misc_feature (1)..(369): n is a, c, g, or t
atggctcctcttggattgcacagaagtctgtcgaatatgctggatatgccgattgctcctattatgggcgctattgttatgaaccgtgtaacatggaacaaattgggcgcagacaagcagcgtgatttattaaaggttacccagcggttggcggctgaattggaaacaacaatgataaagacttcggcaaatgctgttacagcgatgagaagggacgggttaaaattgaacaaaccaaatcctacgcagcaggatttatggcgtacagaagtaaacaaagccttgcccatgcttattggaaatgtaattgatcgtaatttgtataatcggataaatcaaatactcgaaaggttcagaaacaggcgatga

SEQ ID NO: 822 - protein, 122 aa, Unknown
  Obtained from environmental sample
  misc_feature (1)..(122): Xaa is any amino acid
MAPLGLHRSLSNMLDMPIAPIMGAIVMNRVTWNKLGADKQRDLLKVTQRLAAELETTMIKTSANAVTAMRRDGLKLNKPNPTQQDLWRTEVNKALPMLIGNVIDRNLYNRINQILERFRNRR

SEQ ID NO: 823 - DNA, 777 bp, Unknown
  Obtained from environmental sample
  misc_feature (1)..(777): n is a, c, g, or t
atgtttggcgatgaagtaacagcggtgtccaatgccgccagaggtaaaagtgatttattgcacaataacccggcaggatatattctcgccgccattcttggcggtatctttatcgggcttggcgtgcttcttgcgtttacggtaggcggtttgttaaccggaaacccctttgccagaattttgatgggctgcgtttttggcagcgccctaagtttggttgtaatagccggaggggaactgtttaccggtaacatttttgtaatggcagtcgggcttactaaaaaaaccatttccgcgggcgggtgtttaaaaatatgggcagtgagttatctcggcaacctgattggctcaatcatccttgcgttaatttttgtttactgcggccttgcatcaggggtcatcagggaatttatatcaagcgcggccgcggcaaaaatgtcgattccgccgctggcgctgatctgccgcggcgtattgtgcaatatactggtatgcctcgcggtttggtgttcctttcgctgtaaatcggaagcggcaaaactcatcatgattttttggtgtctgctggcattattaaccaccggttatgaacactgtgttgtcaacatgacgcttttgacagtcagcctgctttcaccggcatccggcgccgccgtttcattgaacggctggatatacaatatcgccttgtcaacagttggcaacatgattggcggcatcgtctttgtggcgctgccgtattcagttatagcaggcagagatctcgtgccgatctga

SEQ ID NO: 824 - protein, 258 aa, Unknown
  Obtained from environmental sample
  DOMAIN (1)...(256): Formate/nitrite transporter
  misc_feature (1)..(258): Xaa is any amino acid
MFGDEVTAVSNAARGKSDLLHNNPAGYILAAILGGIFIGLGVLLAFTVGGLLTGNPFARILMGCVFGSALSLVVIAGGELFTGNIFVMAVGLTKKTISAGGCLKIWAVSYLGNLIGSIILALIFVYCGLASGVIREFISSAAAAKMSIPPLALICRGVLCNILVCLAVWCSFRCKSEAAKLIMIFWCLLALLTTGYEHCVVNMTLLTVSLLSPASGAAVSLNGWIYNIALSTVGNMIGGIVFVALPYSVIAGRDLVPI

SEQ ID NO: 825 - DNA, 657 bp, Unknown
  Obtained from environmental sample
  misc_feature (1)..(657): n is a, c, g, or t
ttgatggaaaccctgcaaaaaatggtatcctggattccccccttgcttgggggagccaggattactattttactgacaattacttcagtgtccgcagggatttttttaagcgttttccttgctttgggaaaaatgtcaaagcaggtagttataaacaaattttgcagcgcctatattttcttttttcggggaactccccttttaatgcagctttacttcatttattacgcgctgcccatgatgtccacagcctttctcatcaatacaggctatgccgaagcggatcgctttatttacgcgtttattgcctatgccctcaatgtcggcgcttactccgccgagattgtccgggcggcgatccagagtatcgacaaggggcagcttgaagcgtcccgcgcgctgggcctgtcatacgcccagaccatgcggcttgttatcattccccagtcaatcaggcggctcatcccgccggtgggcaacgaatttattttgatactgaaagacacctcgctggtgtccatgatcgcccttatcgacattaccaaggcgacaagaagcatcgaaggctccacccgttccgcccttgtttatataccggcaatgattctgtacctgataatcacatgggcttttttcattgtatttcacaagctttga

SEQ ID NO: 826 - protein, 218 aa, Unknown
  Obtained from environmental sample
  DOMAIN (15)...(213): Binding-protein-dependent transport system inner membrane component
  misc_feature (1)..(218): Xaa is any amino acid
MMETLQKMVSWIPPLLGGARITILLTITSVSAGIFLSVFLALGKMSKQVVINKFCSAYIFFFRGTPLLMQLYFIYYALPMMSTAFLINTGYAEADRFIYAFIAYALNVGAYSAEIVRAAIQSIDKGQLEASRALGLSYAQTMRLVIIPQSIRRLIPPVGNEFILILKDTSLVSMIALIDITKATRSIEGSTRSALVYIPAMILYLIITWAFFIVFHKL

SEQ ID NO: 827 - DNA, 342 bp, Unknown
  Obtained from environmental sample
  misc_feature (1)..(342): n is a, c, g, or t
gtggacgcgnagaaaagcaaggaaagggcggtacagcggatcaagacaacggtggaaaccgagttgcaaaaatncgttacaggatacggatcggtcagagccgaaagttccgcggtcggtgtcgaaaacggtaaggttagttatagcctgttcccggtgtggatactcaataccaaatataataaagaaaattacctgtttttaatgaacgggcagtcgggccgccttgtcggaaagctgcctgccgataccggcaagtcatggaaataccggtttttatttaccggtattttaggcacggctcttacgcttgtcattcagattttgcggatattcctttag

SEQ ID NO: 828 - protein, 113 aa, Unknown
  Obtained from environmental sample
  misc_feature (1)..(113): Xaa is any amino acid
MDAXKSKERAVQRIKTTVETELQKXVTGYGSVRAESSAVGVENGKVSYSLFPVWILNTKYNKENYLFLMNGQSGRLVGKLPADTGKSWKYRFLFTGILGTALTLVIQILRIFL

SEQ ID NO: 829 - DNA, 873 bp, Unknown
  Obtained from environmental sample
  misc_feature (1)..(873): n is a, c, g, or t
atgcgggtcattatcggattttcaatcacaacttgtagcagcagtggtaacaataacaattccaataataattccgattctatggctattccacaaactccgcccgcccctcaaggaccgtccgcacnccagccgtttaatgacattaccgccgcgcaattggttgcggatatcaaaatcggttggaatttaggcaacacgcttgacgcgactaatttaaattcgcttggcgtgaatccgactgtttctcagcttgaaacagcatggggtaaccccgtcactaccaaagcaaatatcacagcgataaaaaacacgggttttaacgcgattagaattcccgtctcctggacaaaatgcactgacaaaaattacaaaattcgcgatgactggatgaagagagttaccgaagtggtaaattacgcggttaacaacgatatgtatattttgcttaacacccaccatgatgaggatgtatttaaatttacaaacgctaataaaaacgcgtcaataaacgcgttcaggaaaatatggggacaaatcgcctataattttcaaaattacaacgaaaaacttatttttgagggcttaaacgagccaagaacaaaaggcagttcggctgagtggaacggcggaacctccgatgaactgacaaacttgaatgaacattacaaagttttcgtggaaacggtacgctcatgcggcggtaataacgacaaacgttttctggtactcaatacctatggcgcttccggcttggcagtggcgatgaacggcttaactatcccggcggataccgcgcaaaacaaaattatagtatcatatcacgcttatgagccatataacttcgctttgaataaaaaccagtcgcggtaa

SEQ ID NO: 830 - protein, 290 aa, Unknown
  Obtained from environmental sample
  DOMAIN (65)...(290): Cellulase (glycosyl hydrolase family 5)
  misc_feature (1)..(290): Xaa is any amino acid
MRVIIGFSITTCSSSGNNNNSNNNSDSMAIPQTPPAPQGPSAXQPFNDITAAQLVADIKIGWNLGNTLDATNLNSLGVNPTVSQLETAWGNPVTTKANITAIKNTGFNAIRIPVSWTKCTDKNYKIRDDWMKRVTEVVNYAVNNDMYILLNTHHDEDVFKFTNANKNASINAFRKIWGQIAYNFQNYNEKLIFEGLNEPRTKGSSAEWNGGTSDELTNLNEHYKVFVETVRSCGGNNDKRFLVLNTYGASGLAVAMNGLTIPADTAQNKIIVSYHAYEPYNFALNKNQSR

SEQ ID NO: 831 - DNA, 351 bp, Unknown
  Obtained from environmental sample
  misc_feature (1)..(351): n is a, c, g, or t
atgccgagaaaagccgcccgcctgtttttgaaagtcacatccgtaaggatagaacaattacaggatattagcgaaaaagacgcgatagctgagggaatgataacaaatgaacaatatgctgaattatctggagaagccgtgccggaagcgtattgcccacaatgtaacggaacagggattcatcttgcgttcggggaaaatttgggaattatggaagttgactgttgcaaatgcgacacagcgaaaaaacggtttagcttattatgggacagccttaattcaaagcgcggctactcatgggaaagtaatccgtgggtttgggtaattgaatttgagaggatagtaaaatga

SEQ ID NO: 832 - protein, 116 aa, Unknown
  Obtained from environmental sample
  misc_feature (1)..(116): Xaa is any amino acid
MPRKAARLFLKVTSVRIEQLQDISEKDAIAEGMITNEQYAELSGEAVPEAYCPQCNGTGIHLAFGENLGIMEVDCCKCDTAKKRFSLLWDSLNSKRGYSWESNPWVWVIEFERIVK

SEQ ID NO: 833 - DNA, 450 bp, Unknown
  Obtained from environmental sample
  misc_feature (1)..(450): n is a, c, g, or t
ttgcagcaattccggggtaggtatgtccagcttgcggctgatttttaccctggcgctgacggggaaacttctccttatttgtcggagttaaggttgatttacagcgctgcggaaccccctccgcctccagcttatgtaaccgcagtggcaagggatggtgcggtggaattgacctggagggccagcgtttcaagggatgttggtggttattatgtttactacggtaccgcaaagggtgaatatctggaatcaaaatgccccattgatgcgggaaacaggacttcaatcctgattgaaggcttaaaaaatgggactctctattattttgccatagcatcctatagcaaatccgaaaacgaagagcgtttattcatacctgagccgggagaattttcccgggaagtagcagccaggccgctggtgcaaacaattgcgaggatgggggaatga

SEQ ID NO: 834 - protein, 149 aa, Unknown
  Obtained from environmental sample
  DOMAIN (40)...(120): Fibronectin type III domain
  misc_feature (1)..(149): Xaa is any amino acid
MQQFRGRYVQLAADFYPGADGETSPYLSELRLIYSAAEPPPPPAYVTAVARDGAVELTWRASVSRDVGGYYVYYGTAKGEYLESKCPIDAGNRTSILIEGLKNGTLYYFAIASYSKSENEERLFIPEPGEFSREVAARPLVQTIARMGE

SEQ ID NO: 835 - DNA, 759 bp, Unknown
  Obtained from environmental sample
  misc_feature (1)..(759): n is a, c, g, or t
ttgtcgaacttacgcggcaggcgcgtttgttttctagcggatttaaaccttgaaggagcgcgaaaactggcgcacgcgataaatgccgaagaaaagagaaccgccgcccttgccattaaagctaacgtctgcgatgaaacttccgtcgaggcaatgtttaagaccattgccgaaacagccggcggcctggatctctgcgtcagcaacgccggggtgctcaaggccggcagtgtgcttgaacagccgctctccgattttaaatttgttaccgatataaactacacgggcttttttattgtctgcaagtacgccggccaacttttacggattcagcattacactgcacctgactggaagaccgacatagtgcagattaattcaaagtccggcctggaaggttcaaacaggaacggcgcatactcaggcggcaaattcggcggccttggccttgtggcaagttttgcccttgaattggtagactacaatatcaaggtaaacgccatctgcccgggcaactttctggacggccccctctggtcagatcccgaaaaaggactctttgtccaatacctgaaaacaggtaaagtgcccggggccaaaaccgttgccgatgtccgttccttttacgagtccaaggttccaatgaaaaggggctgtacaggcaaagatttaatccgctcgcttttttacatcgtggagcaggaatacgaaaccgggcaggcaattccggtaaccggaggccaagtgatgctacactga

SEQ ID NO: 836 - protein, 252 aa, Unknown
  Obtained from environmental sample
  DOMAIN (5)...(159): short chain dehydrogenase
  misc_feature (1)..(252): Xaa is any amino acid
MSNLRGRRVCFLADLNLEGARKLAHAINAEEKRTAALAIKANVCDETSVEAMFKTIAETAGGLDLCVSNAGVLKAGSVLEQPLSDFKFVTDINYTGFFIVCKYAGQLLRIQHYTAPDWKTDIVQINSKSGLEGSNRNGAYSGGKFGGLGLVASFALELVDYNIKVNAICPGNFLDGPLWSDPEKGLFVQYLKTGKVPGAKTVADVRSFYESKVPMKRGCTGKDLIRSLFYIVEQEYETGQAIPVTGGQVMLH

SEQ ID NO: 837 - DNA, 534 bp, Unknown
  Obtained from environmental sample
  misc_feature (1)..(534): n is a, c, g, or t
atgaaagcaatatttgaaacgaacagattatttttgcgcgaatttgttgacagcgattataacgatctgtatgaaattctatgcgacgaagatgtcatgtatgcgtatgaacattcgttttcagaagacgaggttaaaggctggtacaataaactaattgtcgctcattatgcgcaacacgggtttgggttatgggctgttatacgcaaaggaacaaatgaatttttgggccaatgcggcattacaattcaggatataaacgggaaagaatatttggaaattggatatttgtttaagaagaaacattggcacaaaggctatgcgacagaagcggcacttggctgtaaaaaatatgcttttgaaaaattaaacgccaaaagcgtgtattcaataataagggaaagcaacatagcctcgcaaaacgtggcaaaaagaatgggaatggaaaagacgagtgaagtaatgaaacattattacaataaggatatgctgcattatgtgtttgaagttaaaaacgaggcatattctgtataa

SEQ ID NO: 838 - protein, 177 aa, Unknown
  Obtained from environmental sample
  DOMAIN (67)...(149): Acetyltransferase (GNAT) family
  misc_feature (1)..(177): Xaa is any amino acid
MKAIFETNRLFLREFVDSDYNDLYEILCDEDVMYAYEHSFSEDEVKGWYNKLIVAHYAQHGFGLWAVIRKGTNEFLGQCGITIQDINGKEYLEIGYLFKKKHWHKGYATEAALGCKKYAFEKLNAKSVYSIIRESNIASQNVAKRMGMEKTSEVMKHYYNKDMLHYVFEVKNEAYSV

SEQ ID NO: 839 - DNA, 381 bp, Unknown
  Obtained from environmental sample
  misc_feature (1)..(381): n is a, c, g, or t
ttgnnnnacatgacagatcgccgagcacaggtttttgtggactccgatcttatccttggaataggctgccgctttactgaccgccacaccggcgcgattaacgtgtatcgcggagaccgcaaattcatccatataaatatcgagccaaaagaaataggaaagatcttcccagccgatcttggcatggtcgcggacgcaaaaaaagccattctggcactgattgccgaggctaaaaagacgggaacaagtgccagccatgtggatgctgatnaactgcccgccatgcgcnaagagctggccagaanaaccgactacgacnaanaaccgattgttcccccancntggtttcccaggaacttaacaactacttttggagattaa

SEQ ID NO: 840 - protein, 126 aa, Unknown
  Obtained from environmental sample
  misc_feature (1)..(126): Xaa is any amino acid
MXXMTDRRAQVFVDSDLILGIGCRFTDRHTGAINVYRGDRKFIHINIEPKEIGKIFPADLGMVADAKKAILALIAEAKKTGTSASHVDADXLPAMRXELARXTDYDXXPIVPPXWFPRNLTTTFGD

SEQ ID NO: 841 - DNA, 384 bp, Unknown
  Obtained from environmental sample
  misc_feature (1)..(384): n is a, c, g, or t
gtgctgggtggagttggcttcacagttttgaatgtaccgctctctaaaatttatgatatacttactttttatgccatgttcagtactaaagaacggggcgaatatgtgattgaaatctgtcaaagtaccccctgccattttactaaagcgggagaagttgtccattggtttgaagccgcggcagggatcaaggtgggcgaaaccactaaagacggcaagctctccttgtgccgtacaagttgcgtgggagcttgtgatatcgggccggcggtgaaaatcggcgatcacgtgttcgggaatctgactgaggaaagagtaaaaaccctggtcaaatgctgccgggaaggaaattcccaggagttgcaatcattatgtcaaaattga

SEQ ID NO: 842 - protein, 127 aa, Unknown
  Obtained from environmental sample
  DOMAIN (5)...(114): Respiratory-chain NADH dehydrogenase 24 Kd subunit
  misc_feature (1)..(127): Xaa is any amino acid
MLGGVGFTVLNVPLSKIYDILTFYAMFSTKERGEYVIEICQSTPCHFTKAGEVVHWFEAAAGIKVGETTKDGKLSLCRTSCVGACDIGPAVKIGDHVFGNLTEERVKTLVKCCREGNSQELQSLCQN

SEQ ID NO: 843 - DNA, 654 bp, Unknown
  Obtained from environmental sample
  misc_feature (1)..(654): n is a, c, g, or t
ttgtccaagttcatccagagcgagcatccacagaccatcgccctgatactggcccacttgaacgccacgcaggcaggggaattgatagccagccttccggaagacctgcgcgccgaagtgtgcatgaggatggcgaacctgcaagagatcagccccgaagttgtgaggcgcatctctctcatcttggagcaaaagctggaggcccttggctcattcgcaaccgaggcatacggcggcgtacgcgcagtggccgagctgttcaaccgcatggaccgcaacacaggtaggacggtgcttgaaaaaatcgaggccgacaacccccagcttgcgggcagcatccgcgaccttatgttcgtgttcgacgacatcctgctgatagacgatataggcgtggtagaaatcctaaagcgcgcggacaagaaagtcctcactgtggcgctcaagggcaccagcgacgagctgcgaaaccagttctatcgcaacatgtcgtcgcgcgccgtggaaatgatgaaagaagaaatggacttcatgggcccaataaaacttcgtgacgtggaaaaggcgcagcacgagatcgtcgaaatcgtcaggcagcttgaagaagagggcgtgataactatcggcggcggaggcggcgacgactatgtctcctga

SEQ ID NO: 844 - protein, 217 aa, Unknown
  Obtained from environmental sample
  DOMAIN (99)...(208): FliG C-terminal domain
  misc_feature (1)..(217): Xaa is any amino acid
MSKFIQSEHPQTIALILAHLNATQAGELIASLPEDLRAEVCMRMANLQEISPEVVRRISLILEQKLEALGSFATEAYGGVRAVAELFNRMDRNTGRTVLEKIEADNPQLAGSIRDLMFVFDDILLIDDIGVVEILKRADKKVLTVALKGTSDELRNQFYRNMSSRAVEMMKEEMDFMGPIKLRDVEKAQHEIVEIVRQLEEEGVITIGGGGGDDYVS

SEQ ID NO: 845 - DNA, 606 bp, Unknown
  Obtained from environmental sample
  misc_feature (1)..(606): n is a, c, g, or t
atgagcagacttgaattttacgaaaatattttcagcgcaaaggctttgtttgccgctggtttgttaattatgcccgctctgctttttattcccagcaccgagtacagatgttttcagtttgtgtttttttgtctccttgctttgctttcgggtaaaaaaatcaattttatgattatgattccgataataatgtttattatcgtatttaacctgattattccctacggacgcgttttattttctttaggcgtgtttaaaataacatcgggcgcgttaaaagccggagttcacagggcttttaccttgcagtcatttgtaatgctctcaacccttgcgattaggcgcgatttaaaaattcccggcgctttcggcgaattgctttgcgaatctctgcatatattttccgcgataatgaacaagaaatacacttttccgaaacataatgtttttgcagagatcgataatcttatgctggaattaagcaatataacccttcccgcgcccgatgaaaaaataattaaaaccaaacccatcggctttgttattctggctttagttattatttcttcgtggttaccatactatgttttttcttttcgaggataa

SEQ ID NO: 846 - protein, 201 aa, Unknown
  Obtained from environmental sample
  misc_feature (1)..(201): Xaa is any amino acid
MSRLEFYENIFSAKALFAAGLLIMPALLFIPSTEYRCFQFVFFCLLALLSGKKINFMIMIPIIMFIIVFNLIIPYGRVLFSLGVFKITSGALKAGVHRAFTLQSFVMLSTLAIRRDLKIPGAFGELLCESLHIFSAIMNKKYTFPKHNVFAEIDNLMLELSNITLPAPDEKIIKTKPIGFVILALVIISSWLPYYVFSFRG

SEQ ID NO: 847 - DNA, 945 bp, Unknown
  Obtained from environmental sample
  misc_feature (1)..(945): n is a, c, g, or t
gtgatgctattcagatttgaagcgcttatgaaagtaagccctctcttgaatgaagaagaaaggagaatacggcttgaacgcgtcaatacgctcaagatcgatatacaacgatacagagacgacatttgcgaccctataatgaatgcggcgcgtaccggcgattataaccggtgcatagagatagtcgacaagatggaaccttttgtggccgaggtagaagcgcttaccaggggattgtatgaattggcgaatatcgtagagaaaagaacaactaacaaagcgctggttaccaccgaccaaaccaagctgctgctgggtggaattcttgcggtttctgttgttatttcagttatattggctatgttgattgcctcgctcatcgccaggcccattaaaaatatgatcaacatagccaataatgtggcggatggcaatcttaacgtggatatcgacgtttccgcgcaagatgaaacgggtatgctggcaaagagttttgcgaatatcgtagatgttgttaatttgctcaccacggatctgaaagatataagcaaacgctttaatgctgagagcgatgtagacgtgaaattggacacggaacatttcagcggcgcgtacagcgaagttgtggaaagcataaattctttcgtcgccgccgcgctgcgcgcccagaaatcggcgctgctcaccgtgtcggcgatatttgagtcaaatccccatatcactatagtatttgacgactctttcaacgcaatcgactgcaatcccgaagcggttacattaatgggcttcaataccaaagaagaactgcttaacggacttgtcgaccttgtatacaagactcttcccgtcacactttccnacgggcagcagccgcagaccctggccgagcggcttaagaccgccgctacggaaggcagggttcaatccgagacgagtggcttttaa

SEQ ID NO: 848 - protein, 314 aa, Unknown
  Obtained from environmental sample
  DOMAIN (105)...(174): HAMP domain
  misc_feature (1)..(314): Xaa is any amino acid
MMLFRFEALMKVSPLLNEEERRIRLERVNTLKIDIQRYRDDICDPIMNAARTGDYNRCIEIVDKMEPFVAEVEALTRGLYELANIVEKRTTNKALVTTDQTKLLLGGILAVSVVISVILAMLIASLIARPIKNMINIANNVADGNLNVDIDVSAQDETGMLAKSFANIVDVVNLLTTDLKDISKRFNAESDVDVKLDTEHFSGAYSEVVESINSFVAAALRAQKSALLTVSAIFESNPHITIVFDDSFNAIDCNPEAVTLMGFNTKEELLNGLVDLVYKTLPVTLSXGQQPQTLAERLKTAATEGRVQSETSGF

SEQ ID NO: 849 - DNA, 723 bp, Unknown
  Obtained from environmental sample
  misc_feature (1)..(723): n is a, c, g, or t
atggctggtggcaaattagacacagcaaaaaagcagaaagccgatgaattttacacccaactttctgatattgagaaagaacttaaaaattataaaaagcacttcaaaggcaaagtggttttttgtaattgcgatgatccggcgacttccaatttttattattatttcgtatcaaattatgatgaacttggcctgaaaaaactaatcaccacacattttgaactggataaagcaagctatatgcttgagtacgagggcggggcagatgtcaagggtgataaagaaactgttgtgaaaagagccattaaaataggtaagaaaaagcccttaaagcaaaattttgaacaaggctctcaaagctctttatttgaggatgaacctatccgctcatatagcggtgatttccgttcccctgaatgtatcgaattattaaagcaatccgatattgttgttactaatccgccgttttcgctgttcaaagaatatgtcgctcaattaattgaatacaagaaaaagtttgttattatcggcaataagaattcaatcacttataaagaaatttttaattacatgaaaaataatcttatttggactggttataggtcattttctggcggtatgtggtttatctccgattatattggcaaatatgagaaagtagtagatggtataaagctaataaatgttccagctatttggcttactaatcttgaccatgtttaa

SEQ ID NO: 850 - protein, 240 aa, Unknown
  Obtained from environmental sample
  misc_feature (1)..(240): Xaa is any amino acid
MAGGKLDTAKKQKADEFYTQLSDIEKELKNYKKHFKGKVVFCNCDDPATSNFYYYFVSNYDELGLKKLITTHFELDKASYMLEYEGGADVKGDKETVVKRAIKIGKKKPLKQNFEQGSQSSLFEDEPIRSYSGDFRSPECIELLKQSDIVVTNPPFSLFKEYVAQLIEYKKKFVIIGNKNSITYKEIFNYMKNNLIWTGYRSFSGGMWFISDYIGKYEKVVDGIKLINVPAIWLTNLDHV

SEQ ID NO: 851 - DNA, 465 bp, Unknown
  Obtained from environmental sample
  misc_feature (1)..(465): n is a, c, g, or t
atgtcccaaaatcagcatgaagaaaacgcgaatgaactatggcagtattttatgaaagttataaattgggtgcagaccatattcccggcgtacagaaaagaaatgaaaggcctcccctggggtgaactctataataagtatgaaaagaaaaagttcaacaatgctgaaacagaaaaacgcataaaagaattgatgatggacgatgatgttaccaaaaagtccggcatctacccgtacttgataacaggcgatgaaaaatacctgaacatcagagcctttaccgaaagccaaaagcgatccgcttacgaaaaacagaaaggcgtatgcccgcattgcaaagtgcattttgaaatagaagaaatggaaggcgaccacataaccccctggacagaaggcggtaaaacattgccggataatcttcaaatgctgtgtaagggttgcaataggagaaaggggaaaaaatga

SEQ ID NO: 852 - protein, 154 aa, Unknown
  Obtained from environmental sample
  DOMAIN (107)...(154): HNH endonuclease
  misc_feature (1)..(154): Xaa is any amino acid
MSQNQHEENANELWQYFMKVINWVQTIFPAYRKEMKGLPWGELYNKYEKKKFNNAETEKRIKELMMDDDVTKKSGIYPYLITGDEKYLNIRAFTESQKRSAYEKQKGVCPHCKVHFEIEEMEGDHITPWTEGGKTLPDNLQMLCKGCNRRKGKK

SEQ ID NO: 853 - DNA, 612 bp, Unknown
  Obtained from environmental sample
  misc_feature (1)..(612): n is a, c, g, or t
atgtctgtatcattaaaaggccgatccctgcttacatggctggattattcggatgaggaaattcaatatctgttggatctttcaataaaagttaaagccgagagcaagaaaggcgttgtatcccagcgttttctgggcaaaacgcttgccatgatttttgaaaagcgatccacgcggacgcgctgttcttttgaaacggcttttggcgaagaaggggggcatcccgtcttcctgtctaccgcggacatacagctggggggcaaagaaaccattgaggacacggcgcgggtgcttggcaggatgttcagcgccatacagttcaggggttttaagcagaaaacggttgaaacgctggcccgttattcaggcatacccgtgtacaacggcctcacggacgagttccatcccacccaggctctggcggacattatgactctccatgagaattttggcgcggtaaagggaaagaccctgtgttatgttggagacgggcgcaataatgtggcgaactccctcatggtgattagtgcccaactgggcctgaattttaccgttgtgacgccgcccgagcttaccccgaccccgtactggttggaaagtgcngccctttag

SEQ ID NO: 854 - protein, 203 aa, Unknown
  Obtained from environmental sample
  DOMAIN (8)...(149): Aspartate/ornithine carbamoyltransferase, carbamoyl-P binding domain
  misc_feature (1)..(203): Xaa is any amino acid
MSVSLKGRSLLTWLDYSDEEIQYLLDLSIKVKAESKKGVVSQRFLGKTLAMIFEKRSTRTRCSFETAFGEEGGHPVFLSTADIQLGGKETIEDTARVLGRMFSAIQFRGFKQKTVETLARYSGIPVYNGLTDEFHPTQALADIMTLHENFGAVKGKTLCYVGDGRNNVANSLMVISAQLGLNFTVVTPPELTPTPYWLESAAL

SEQ ID NO: 855 - DNA, 471 bp, Unknown
  Obtained from environmental sample
  misc_feature (1)..(471): n is a, c, g, or t
ttggcattttggtggcttggcggacaaagacctggtcgtgttccagatggggttcgcccccgaagaggaatacatccagaagaaatacggcgacggctggaagagacgggcgatgggcctgcccggcgagggcggatggggcgtggaaggcgacacgccaaacctgccggaacaggccggcgccggcgcggatcagacgggcggggccggaaccgagggggcggacgtgccggcggaagacggggcgccggtgcgagcggcggctggatgagagcatgtcgccgggcgcggccgaatacgtcagaccgccctgcccagagccgcagcaggggttctggagccgcttctttgcctgggggaagaggcggctggcgcccactggcaccaaggacaccacaaggccacctgggcgaacctaggcggcaagaaacggcaaaagcaaagccccggtcccccggggctttgctttga

SEQ ID NO: 856 - protein, 156 aa, Unknown
  Obtained from environmental sample
  misc_feature (1)..(156): Xaa is any amino acid
MAFWWLGGQRPGRVPDGVRPRRGIHPEEIRRRLEETGDGPARRGRMGRGRRHAKPAGTGRRRRGSDGRGRNRGGGRAGGRRGAGASGGWMRACRRARPNTSDRPAQSRSRGSGAASLPGGRGGWRPLAPRTPQGHLGEPRRQETAKAKPRSPGALL

SEQ ID NO: 857 - DNA, 870 bp, Unknown
  Obtained from environmental sample
  misc_feature (1)..(870): n is a, c, g, or t
atggcatactcccctatcgcggcgcagcgtgaggatgacgcgaaaaaatggcgcgaaaaactgatcgattcgctttccggcgtttccgacattattaccgaaaaataccttgcgggcgaagaaattgacgcggcgcttatccgcgctgaacttcgcaaggcggtcattaagcgtgaactgctccccatgttcgcgggcgcgtcaagacgcaatataggtgtccagcctgtaattgacgctgtcgttgattatctgcccgcgcctgacgagataaaaccggcagttgggcatcatattaaaaaagaggaagatatttcaattccctgcgatccaaagggacagcccataggccttgtatttaagattcaaaatgaccgcgaggcgggaagcctttgctatgtaagaatgtactcaggctccataccatcgggcagcgcggtcttcaatcaagggaagaaaaagcgcgaaagagcgaacagaattttacgtatgcattccaataaatcggagcctatggacagcttgagcgcgggcgatataggcgtaattatagggatgaagctggcgcagacgggcgacacaataggcagcgaaggctggccggttttgcttgaaaagatgcagtttcccgagcctgtcatttcaatttccatagagcctaaaacaatttccgaacaggacaaacttaaagacattctggcgattctttccaaagaagacccgacttttacaattagggaaaatgaggaaaccggacagcttataatttcgggcatgggcgagcttcaccttgatgtgcttgttacgcgtatacttaaagaatacaaactcggcgcgaaggtggggaaatcctcaggttacataccgtga

SEQ ID NO: 858 - protein, 289 aa, Unknown
  Obtained from environmental sample
  DOMAIN (129)...(196): Elongation factor Tu domain 2
  misc_feature (1)..(289): Xaa is any amino acid
MAYSPIAAQREDDAKKWREKLIDSLSGVSDIITEKYLAGEEIDAALIRAELRKAVIKRELLPMFAGASRRNIGVQPVIDAVVDYLPAPDEIKPAVGHHIKKEEDISIPCDPKGQPIGLVFKIQNDREAGSLCYVRMYSGSIPSGSAVFNQGKKKRERANRILRMHSNKSEPMDSLSAGDIGVIIGMKLAQTGDTIGSEGWPVLLEKMQFPEPVISISIEPKTISEQDKLKDILAILSKEDPTFTIRENEETGQLIISGMGELHLDVLVTRILKEYKLGAKVGKSSGYIP

SEQ ID NO: 859 - DNA, 360 bp, Unknown
  Obtained from environmental sample
  misc_feature (1)..(360): n is a, c, g, or t
atggcgatnttaggctctatgcaaagcgggctgcggggaaaccatcagatactttttacaaaaaccgtcatggacagttccatgtctattgtcttcggcgcaacattcggaataggcgcggcattctcggcaataccgcttttactctatcaggggggaatagctcttgcctcctcttttatacgcgattttcttgacccggaagtaatccgcgaaatgtccgctgtgggaagccttgtcatcacggctataggctttaactttctttccgtaaaagagataaaagtagctaaccttatccccgccatgtttatcccatggatctacctgacagccgcccaatactttattcatggttaa

SEQ ID NO: 860 - protein, 119 aa, Unknown
  Obtained from environmental sample
  DOMAIN (1)...(116): Protein of unknown function (DUF554)
  misc_feature (1)..(119): Xaa is any amino acid
MAXLGSMQSGLRGNHQILFTKTVMDSSMSIVFGATFGIGAAFSAIPLLLYQGGIALASSFIRDFLDPEVIREMSAVGSLVITAIGFNFLSVKEIKVANLIPAMFIPWIYLTAAQYFIHG

SEQ ID NO: 861 - DNA, 363 bp, Unknown
  Obtained from environmental sample
  misc_feature (1)..(363): n is a, c, g, or t
atgcccgcacagtccccagtccccagtccccagtccccagtccctcccttgatatacaaaatggtcgatacctgcggcggcgaatttgaggcaaaaacgccgtatttctactccattcagaacggaacggaaaacgaggccttgccgttcatccaaaaaagcgtaaaacagcggattgtcgtgctgggcagcgggcctattcgcataggccagggcattgagtttgactacgcctgcgtacattgcgtgtggacgctgaaaagcctgggctacgaagttatcgtgattaataacaatcccgaaaccgtatccaccgactttgacaccgccgacaggctttattttgagccgctgtgccattga

SEQ ID NO: 862 - protein, 120 aa, Unknown
  Obtained from environmental sample
  misc_feature (1)..(120): Xaa is any amino acid
MPAQSPVPSPQSPVPPLIYKMVDTCGGEFEAKTPYFYSIQNGTENEALPFIQKSVKQRIVVLGSGPIRIGQGIEFDYACVHCVWTLKSLGYEVIVINNNPETVSTDFDTADRLYFEPLCH

SEQ ID NO: 863 - DNA, 450 bp, Unknown
  Obtained from environmental sample
  misc_feature (1)..(450): n is a, c, g, or t
ttgatcgcgggcgttcgccttggccatgaaatctatggcatggagcttcaggaagtccgtgaaatcatcatggtcgggctggtgactcccgtccccagggcccccagtttcatccagggggttctgaacctgcgcggcgaagtcatccctgtcattgacctcaggatgcgcttcgggctggagcacgtcgacaacaccgacctctcgcgcatcatcgtcacgcccatagccggcgtgttcactgggctgatcgttgattcagtcaccgaagtgaagaacatcgacaaaaagctcttggaacctccgccgaaggtgacatcggtcggggccaacgcctacatcacgcaggtagccaggaccgccagcggcgtgatattcctgcttgcgctacaacaactgctgacggaatcggaaaaccatcagctcagcgctttccacggcaaacactga

SEQ ID NO: 864 - protein, 149 aa, Unknown
  Obtained from environmental sample
  DOMAIN (1)...(138): CheW-like domain
  misc_feature (1)..(149): Xaa is any amino acid
MIAGVRLGHEIYGMELQEVREIIMVGLVTPVPRAPSFIQGVLNLRGEVIPVIDLRMRFGLEHVDNTDLSRIIVTPIAGVFTGLIVDSVTEVKNIDKKLLEPPPKVTSVGANAYITQVARTASGVIFLLALQQLLTESENHQLSAFHGKH

SEQ ID NO: 865 - DNA, 903 bp, Unknown
  Obtained from environmental sample
  misc_feature (1)..(903): n is a, c, g, or t
ttgaacaaggtctcgaaagagatacaggcctccatcatgagcatccgcatggtgcaggtgaagacggtcttcaacaagttcccccgcatgttgagggacttggctaaggccagcggcaaaaagatcgaactgcagatggtcggcgaggacacagaaatcgacaagagcctcatcgaggagctcggcgatcctatgatccacntgattcgcaactccgcagaccacggcatcgaactgccagatgtgcgccgcgccgctggaaagcccgaaagtggcacggtcgttttgcgtgcgcgccacgaaggcgacagtgtgatagtcgagatagaagacgacggcaagggcatcgatccggcgataatcaaaaagaaggccatcgaaaagggcatcgtcacgcaggaacgtgccgaccagttgaacaacgatgagatcatcaacttcatctttgcccctggcttcagcacggccgaaaaggtgacggacatttcgggtcgcggcgtcggcatggacgtggtccgctccaacgtccgcaggctgaacggcagcgtcgtggtgcagagcgtggtcggcaagggctccgtgttcaccctcaggctgccgctcacactggccatcatagacgccctgttgatgaagtcgaaggaacagatattcgcgctgcctggcacgtccgtcgaagagacgctcctcgtctcacaggaagacctctcctacctgacccgcagaaaggccctcaacctgcgcggcgaagtgctcggcatctcgcgcctcagcgacctgctgaacctcaaagaccagggcaccgcccccaccggggacatgccggtggtcgttgtctccgccggcggccgccgcatgggcctcatcgggatcagtcgctcggccgatctgatccctgtttaa

SEQ ID NO: 866 - protein, 300 aa, Unknown
  Obtained from environmental sample
  DOMAIN (60)...(202): Histidine kinase-, DNA gyrase B-, and HSP90-like ATPase
  misc_feature (1)..(300): Xaa is any amino acid
MNKVSKEIQASIMSIRMVQVKTVFNKFPRMLRDLAKASGKKIELQMVGEDTEIDKSLIEELGDPMIHXIRNSADHGIELPDVRRAAGKPESGTVVLRARHEGDSVIVEIEDDGKGIDPAIIKKKAIEKGIVTQERADQLNNDEIINFIFAPGFSTAEKVTDISGRGVGMDVVRSNVRRLNGSVVVQSVVGKGSVFTLRLPLTLAIIDALLMKSKEQIFALPGTSVEETLLVSQEDLSYLTRRKALNLRGEVLGISRLSDLLNLKDQGTAPTGDMPVVVVSAGGRRMGLIGISRSADLIPV

SEQ ID NO: 867 - DNA, 483 bp, Unknown
  Obtained from environmental sample
  misc_feature (1)..(483): n is a, c, g, or t
atgcagaaagtttatgatgagactaaggataatgttactgttttgggtgaaggaaagtggcagatgaaagaaactcgcccaagagataggattaaagaactgaaagattatttaggtattaaaacagaggaagatcaaaccgaaacaacaaccccagcaacatctacaacaacccccacagaaaacaaacccgacaacacagcactagcagatgaggcttataatcgtggcgtagctgcttttgagcagaaaaactatgacaaggcaatcgctgactacacccaagtgatacagcttgccccaaatgaagcgaaaggctatgcaggaagaggtgttgcgtatgttcaaaaaaaggactatgaccgagcaattactgaccttgaaacagcattgaaaatagatccaaagaatacaactttaaaggagtttctagaagaaatacgttttaagaaaatgatgttagaagctttggacgactattga

SEQ ID NO: 868 - protein, 160 aa, Unknown
  Obtained from environmental sample
  DOMAIN (70)...(103): Tetratricopeptide repeat
  misc_feature (1)..(160): Xaa is any amino acid
MQKVYDETKDNVTVLGEGKWQMKETRPRDRIKELKDYLGIKTEEDQTETTTPATSTTTPTENKPDNTALADEAYNRGVAAFEQKNYDKAIADYTQVIQLAPNEAKGYAGRGVAYVQKKDYDRAITDLETALKIDPKNTTLKEFLEEIRFKKMMLEALDDY

SEQ ID NO: 869 - DNA, 366 bp, Unknown
  Obtained from environmental sample
  misc_feature (1)..(366): n is a, c, g, or t
ttgaaaaaaatttacctttctcctccgggtcttatttgctgcgccggacagaataaagatgaactgtactcatcctgccttaccggtaatcaaagtggattgaaaatgaaagaattacctgacggcaagcaattccctacagggtttgtgataccggaaaaacaaaatgtaccatattcgccggttcaggaaccgttagcttatgcgggcggcacaaaaataatcaggctcattgacacagctttggaacaaatacgggtcgaaattgaaaatgtaatttcaaaatacggtacggatagaataggtgtttgtctcggttcctgcgacaacggctcggaaggttcattattgccccataggcgctga

SEQ ID NO: 870 - protein, 121 aa, Unknown
  Obtained from environmental sample
  misc_feature (1)..(121): Xaa is any amino acid
MKKIYLSPPGLICCAGQNKDELYSSCLTGNQSGLKMKELPDGKQFPTGFVIPEKQNVPYSPVQEPLAYAGGTKIIRLIDTALEQIRVEIENVISKYGTDRIGVCLGSCDNGSEGSLLPHRR

SEQ ID NO: 871 - DNA, 480 bp, Unknown
  Obtained from environmental sample
  misc_feature (1)..(480): n is a, c, g, or t
ttggggcagggtctgtctgtcgcggtcggaatggccctggccttgaggctggataaaagccaggcccgcgtatacgcgattatgggcgacggcgagcagtccgagggtcagatctgggaagcggcaatggcggcggcaaatttcaagattggcaaccttaccgcctttcttgactggaacaaagtacaggctacaggcgcgacaaaggatattttcaatatcccggatttagacaagaaatggtcagcctttggctggaacgttatcagtgccgaaggccacgactttgagaagatccttgaagctatcgaaaaagctgaaacagtgaaagacaggccttcggttattatccttgatactgtaaaaggaaagtgtttctcgtttgccgaaggaaattccgcgtatcacaacgggatattcaccgaagaggtgtatcaacaggcgattcgggagttggatgccataaaggcggggatataa

SEQ ID NO: 872 - protein, 159 aa, Unknown
  Obtained from environmental sample
  DOMAIN (1)...(118): Thiamine pyrophosphate enzyme, C-terminal TPP binding domain
  misc_feature (1)..(159): Xaa is any amino acid
MGQGLSVAVGMALALRLDKSQARVYAIMGDGEQSEGQIWEAAMAAANFKIGNLTAFLDWNKVQATGATKDIFNIPDLDKKWSAFGWNVISAEGHDFEKILEAIEKAETVKDRPSVIILDTVKGKCFSFAEGNSAYHNGIFTEEVYQQAIRELDAIKAGI

SEQ ID NO: 873 - DNA, 699 bp, Unknown
  Obtained from environmental sample
  misc_feature (1)..(699): n is a, c, g, or t
atgctgccaaactcgccccatgtaaaagaagtaattttggggggaggcggcgttattgaaggcggcaaaagcggacagatagttgtggatatgagttccatcgctccggctgtttccgcggaagtcggcgcggctcttaaagccaaaggcatcgcgttcctggacgcccctgtttcaggcggcgaaccaaaagcgattgacggtacgctggcgatcatggccggcggggatcagaaaacctttgacacggtaaagccaatcctggaaaaaatgggagcttcggtgatcctggtaggcgatgtcggcgccggcaatgtggcaaaactggcgaatcagatcgtggtagctctgaacatcgccgctgtttcagaagcctttgttcttgcgactaaagccggggtcgatccggtgaaggtcttcgacgccataaagggcggcctggccggttccacggtgatgaacgccaaagtcccgatgattttagacggcaatttcaaacccggtttcagaatagaattgcacatcaaggatctgcaaaacgccctggataccggccataatctgaacgttccccttccacttacagccaatgtaatggaaacgcttcaggctctaaaaacagacggcatggcggctaacgatcacagcgccattgtccgcttctacgaaaaacttgcgcacgttgaagtgcgaaaatag

SEQ ID NO: 874 - protein, 232 aa, Unknown
  Obtained from environmental sample
  DOMAIN (1)...(100): NAD binding domain of 6-phosphogluconate dehydrogenase
  misc_feature (1)..(232): Xaa is any amino acid
MLPNSPHVKEVILGGGGVIEGGKSGQIVVDMSSIAPAVSAEVGAALKAKGIAFLDAPVSGGEPKAIDGTLAIMAGGDQKTFDTVKPILEKMGASVILVGDVGAGNVAKLANQIVVALNIAAVSEAFVLATKAGVDPVKVFDAIKGGLAGSTVMNAKVPMILDGNFKPGFRIELHIKDLQNALDTGHNLNVPLPLTANVMETLQALKTDGMAANDHSAIVRFYEKLAHVEVRK

SEQ ID NO: 875 - DNA, 846 bp, Unknown
  Obtained from environmental sample
  misc_feature (1)..(846): n is a, c, g, or t
ttgattttaaggggtgtaaaccttgggggagtctcgaaaatcccgtttgggcctccaggctgggggttaagccctgaatcccttgaaaatccggaaaaagcttcttttgtgggaaggcctttcccgctggaggaggcggaaagccattttgagcgtcttggacgggccgggttgaattttttacggctggttgtcacctgggaggctcttgaacactctgggccgggcctatacgacgaggaatttctggcttatctgcggaaaatcctgcttgtcgcggaaaaatggggaatttccgtgtttattgaccctcatcaggatgtgtggagcaggtggaccggaggcgacggagcgccggcctggaccctggaaaaactcggcattgacctggacaaactggacaagacaggggccgccattacccgccagcattacggtgaattacacaaaggcaagcctttcccccgaatgatatggcccagcaactataaccgctacgcggcggcgaccatgttcagcctttttttcggggggaaagcttttgctccggatatccaaatagagggcaaaaatgttcaggactggctgcaggggcattacatcgcggttttccgccactgttaccgccgccttaaaagctgttccgccattaagggatggggcgttttaaatgagcctcacaacggtttcattggatgcaaagaccttggacggaacgataataacatgatgcctataggcccaagaccaagcccctgggacacaatacgcgccgcttcaggatacccggttgcggttccagtatactcaaccggaaacctttggcatgtacagcgcaaagcgtga

SEQ ID NO: 876 - protein, 281 aa, Unknown
  Obtained from environmental sample
  misc_feature (1)..(281): Xaa is any amino acid
MILRGVNLGGVSKIPFGPPGWGLSPESLENPEKASFVGRPFPLEEAESHFERLGRAGLNFLRLVVTWEALEHSGPGLYDEEFLAYLRKILLVAEKWGISVFIDPHQDVWSRWTGGDGAPAWTLEKLGIDLDKLDKTGAAITRQHYGELHKGKPFPRMIWPSNYNRYAAATMFSLFFGGKAFAPDIQIEGKNVQDWLQGHYIAVFRHCYRRLKSCSAIKGWGVLNEPHNGFIGCKDLGRNDNNMMPIGPRPSPWDTIRAASGYPVAVPVYSTGNLWHVQRKA

SEQ ID NO: 877 - DNA, 927 bp, Unknown
  Obtained from environmental sample
  misc_feature (1)..(927): n is a, c, g, or t
atgaaagagcatgtcaacgacatcaattatgagacggcggcaaggatcgaggccgagacgcggcacgatgtcatggctcatatccgcgcctatggcgaacaatgcccaaaggcaaagcccatcatccatctcggcgcaacttccgcctatgtgggcgacaacaccgacatcatcctgcagcgttccgccctcttgcggataaagaaactgctcctgaacgccgcagccagactgtttgatttcgcggacgcctacaaatccctgccttgtcttgcctatacccactttcaggcggcgcagcccacaacaatcggcaagcgcgcgacgctgtggctgcaggatttgctgcttgatcttgaacagctcgagtttacgctgaataacctgaagctgctcggctgcaagggaacgacaggcaccggcgcgagctttctcaagctctttgacggcgaccatgcggcggtcaaggagctggaacggaagatagccgaaaaaatgggctttgacgcggtctatgccgtcagcggccaaacctatacgcgcaaggccgactactacacgctgtcggtgttgtcgggcatcgcgcagagcgcgcacaagttttccaacgacatccggctgctggcgcatttgaaagaagttgacgaaccctttgaggacacgcaggtcggatcgtcggcaatggcctataaaagaaacccgatgcgcagcgaacgcatcgcttctctggccaggcatgtgatggtcggcgcgctcaatcccgcgctgacggccggcgcgcaatggctggagcggacgctggacgattccgcgaacaggcgcattgcgattcctgaagcctttctcgccgtggacgcgatccttctgctgtacagcaacattgcgggcgggcttgtggtctatccccagaggcgcgcgccgcaataa

SEQ ID NO: 878 - protein, 308 aa, Unknown
  Obtained from environmental sample
  DOMAIN (1)...(248): Lyase
  misc_feature (1)..(308): Xaa is any amino acid
MKEHVNDINYETAARIEAETRHDVMAHIRAYGEQCPKAKPIIHLGATSAYVGDNTDIILQRSALLRIKKLLLNAAARLFDFADAYKSLPCLAYTHFQAAQPTTIGKRATLWLQDLLLDLEQLEFTLNNLKLLGCKGTTGTGASFLKLFDGDHAAVKELERKIAEKMGFDAVYAVSGQTYTRKADYYTLSVLSGIAQSAHKFSNDIRLLAHLKEVDEPFEDTQVGSSAMAYKRNPMRSERIASLARHVMVGALNPALTAGAQWLERTLDDSANRRIAIPEAFLAVDAILLLYSNIAGGLVVYPQRRAPQ

SEQ ID NO: 879 - DNA, 747 bp, Unknown
  Obtained from environmental sample
  misc_feature (1)..(747): n is a, c, g, or t
gtgttcagtatattaagaaacgatattcatacccttgccaatcttaaaaatgaagaagttaacgcgttgcagcgtgaacgggataaattaaaagacgcgcttacggacatatcgcatcagcttaaaacgcctctgacttcaatgatgattatggctgatcttctcgaaaatgctctcttgtcggacgccccgccgctcgaaaagcaaactgaatttattacgaatataaaaactggtcttacccgcatggagtggcttgtttcaacgcttcttaaaatggcgaaactcgacgcgggtgcagtggagtttcggagagaaaccgtatcatcaaacgcgctcgcaagccttgcgcaggaaccgctgcaaatattgtttgaaataaaaaatcaacgcgtagaaatttcaggcgttactgaacttttctgcgataaacgctggactgccgaagcgttgacaaacgtattgaaaaacgcttcggagtgttcgcctgagggagggaaaatccgtatagaatccggcatgaaccccatatgcaaatggatttccgttacggacagcggcgaaggtataacgaaagaaaaaatttcctctctgttcaaacgatttgaaggttcgcggagcgataaaggctacggtatcggtttgccgctcgcgctcgccatcatgcgcggacaaaacggggacatagaggtatcaggcggcggtaacggttccggcgcgatatttacgttgaaattttttaagtga

SEQ ID NO: 880 - protein, 248 aa, Unknown
  Obtained from environmental sample
  DOMAIN (29)...(99): His Kinase A (phosphoacceptor) domain
  misc_feature (1)..(248): Xaa is any amino acid
MFSILRNDIHTLANLKNEEVNALQRERDKLKDALTDISHQLKTPLTSMMIMADLLENALLSDAPPLEKQTEFITNIKTGLTRMEWLVSTLLKMAKLDAGAVEFRRETVSSNALASLAQEPLQILFEIKNQRVEISGVTELFCDKRWTAEALTNVLKNASECSPEGGKIRIESGMNPICKWISVTDSGEGITKEKISSLFKRFEGSRSDKGYGIGLPLALAIMRGQNGDIEVSGGGNGSGAIFTLKFFK

SEQ ID NO: 881 - DNA, 474 bp, Unknown
  Obtained from environmental sample
  misc_feature (1)..(474): n is a, c, g, or t
gtggacgccctttgtttcggcgaagatctgggcagccagatttcgaccctcatatcgccggaaacgtggcgggaattgttcaggccccgtcaccagaggatcatcgacaaaatgaaagccctcaacccggacatacttatcatcatgcacagcgacggcgctgtggctcccctgctggatgattttatagaaatggggattcatatttacaatccggttcagcccaatgtggccggatcggatcccagggaactaaaggataaatacggggaaaaaatgtgctttttcggcggactggatcaacaggaactgcttccccgtggagatgtcaaagccatagaggaggaaatgcgccgccgcgcctccattctgggtaaaaacggcggctacctgatggcccctgcccacatcatccaggcggatgtagcccccgaaaccgtagaggccgtgctgaaaatcgccgcagaattgtga

SEQ ID NO: 882 - protein, 157 aa, Unknown
  Obtained from environmental sample
  misc_feature (1)..(157): Xaa is any amino acid
MDALCFGEDLGSQISTLISPETWRELFRPRHQRIIDKMKALNPDILIIMHSDGAVAPLLDDFIEMGIHIYNPVQPNVAGSDPRELKDKYGEKMCFFGGLDQQELLPRGDVKAIEEEMRRRASILGKNGGYLMAPAHIIQADVAPETVEAVLKIAAEL

SEQ ID NO: 883 - DNA, 780 bp, Unknown
  Obtained from environmental sample
  misc_feature (1)..(780): n is a, c, g, or t
gtgttccttatcgacacctacgataccctgaaaagcggaatcgtcagcgcgataagcgtgggcagaaaactcaaaaagaagggaaagaatttcggggtgcgtttggattcgggggatattcaatatctttccacagaagtaaggaagaggctggacggcgcgggacttaatgaggcgacgattaccgcgtccaatgatttggatgaatcgattattgaaactctggtaaattccggcgttccggttgatgtctggggcgtggggacgcggatggttaccggaggcaatgatgccgcttttaccggcgtgtataagatgacggcctgcgaggacgcagacgggcggatgacgcccgtgatgaaagtttccgacaatccggaaaagactaccaaccccggccccaaacaggtatggcggataagggatcatcagggcgcggctcttgccgacgtgctgtctttggacagcggcgctgacgccgaagtaattgaattaggataccggtaccgtttctggcacccttcggcggactaccgccacttttaccatattaccgaatggccgccgcagccgcttctgaaaaaatacattgctgacggcaaaccctgctgcccgcagccctcgttgaatgaaattcgcgtccattccgccgacgactttgaaacttttgattctacctataaacggctgcttaacccccatgtgtacaaggtgtccattaccgagaaacttcgcgaccttaaactggagctgataacaagccatttgggtgagttgtag

SEQ ID NO: 884 - protein, 259 aa, Unknown
  Obtained from environmental sample
  misc_feature (1)..(259): Xaa is any amino acid
MFLIDTYDTLKSGIVSAISVGRKLKKKGKNFGVRLDSGDIQYLSTEVRKRLDGAGLNEATITASNDLDESIIETLVNSGVPVDVWGVGTRMVTGGNDAAFTGVYKMTACEDADGRMTPVMKVSDNPEKTTNPGPKQVWRIRDHQGAALADVLSLDSGADAEVIELGYRYRFWHPSADYRHFYHITEWPPQPLLKKYIADGKPCCPQPSLNEIRVHSADDFETFDSTYKRLLNPHVYKVSITEKLRDLKLELITSHLGEL

SEQ ID NO: 885 - DNA, 486 bp, Unknown
  Obtained from environmental sample
  misc_feature (1)..(486): n is a, c, g, or t
gtgcgtatacagggcggcaatatacatgtttacgcgttgaatgacggcattgactccaataacaatatctttctgaggggaggaactcttcgcatcagcgggccatccagaggaatggatggggccattgactttgacggcgctatgcttatttcaggtggcagccttgttacggcggggagcgctacaagcgtgtccgcccaatcaaagcagccttccctgcttgtagcatacactcaacaacagccagcagacgctctcattgaaataagggactctggcggcaagaccatccttgactatacgtccaaaaattcctttcttatgtcggcttttacctccccggactttgttatcggcaaggtttattcactttatgttaataaacagaaggtacaggacatcactcttaacagcattgttaccactatgggcaacagtaattttatgcgcggctttggaggcagtaactggggcagatggtaa

SEQ ID NO: 886 - protein, 161 aa, Unknown
  Obtained from environmental sample
  misc_feature (1)..(161): Xaa is any amino acid
MRIQGGNIHVYALNDGIDSNNNIFLRGGTLRISGPSRGMDGAIDFDGAMLISGGSLVTAGSATSVSAQSKQPSLLVAYTQQQPADALIEIRDSGGKTILDYTSKNSFLMSAFTSPDFVIGKVYSLYVNKQKVQDITLNSIVTTMGNSNFMRGFGGSNWGRW

SEQ ID NO: 887 - DNA, 462 bp, Unknown
  Obtained from environmental sample
  misc_feature (1)..(462): n is a, c, g, or t
atggccttcgattccggcggcggccagggcgggcggcccggcatgatgagcgagatcaacgtaacgcccctggtggacgttatgctggtcttgctcatcattttcatggtcaccgcccccatgatgacccagggcctggatgtggaactgccgaaagtcgatgcccaggccctgcgcaccgaagagcagcagaccgtgctcaccataaaggcggacggcacggtcttcctggacgagcatgcggtaagcgggtccaacctggccttccaggtggcccaggtcatgagaatcaaggggaaccagacggttttcctgaaggcggaccataacgtggcctacggggcggtggccggggtcatgtcccaattgcggcaggccggcgtcaccagcatcggtttggtcaccgaaccggccgatagatcggcccccggagcgccaccccgggccaggcccggcggttga

SEQ ID NO: 888 - protein, 153 aa, Unknown
  Obtained from environmental sample
  DOMAIN (12)...(138): Biopolymer transport protein ExbD/TolR
  misc_feature (1)..(153): Xaa is any amino acid
MAFDSGGGQGGRPGMMSEINVTPLVDVMLVLLIIFMVTAPMMTQGLDVELPKVDAQALRTEEQQTVLTIKADGTVFLDEHAVSGSNLAFQVAQVMRIKGNQTVFLKADHNVAYGAVAGVMSQLRQAGVTSIGLVTEPADRSAPGAPPRARPGG

SEQ ID NO: 889 - DNA, 846 bp, Unknown
  Obtained from environmental sample
  misc_feature (1)..(846): n is a, c, g, or t
atgaaagacaaggacgccctggcccggctgcgcggcgaactggcccctgtccaccgccgcgtggcggcctggggcgcggcccgaggcttcatgacccccgagggccagctcaccgaagagggtgaagccgcgccccagatggcggaactggcggccctctggccggccctctccgaggccgtgggccaggccggccaggtcctggacgaatacgacctgaagagcgaacaggacgcccggcgcctggccgccgattaccagctggccgtggaccggcccggggaattcgtcgaatgggaccccttcaccgtgcccatcctgaccgaggtttccggctacgtctcctttgaggacatggaagagggcaagaccatgatcgagagggtggaccaggtcaccggcaaatcctcaaaggtcatcatcgaatcaaagcaggccgatgtccggccccgcatcaaggtgctggacgccgccggcaagccccacttgacctccaagggcataccggccgtctaccccctgcccgtcaacgccatcctgatggttgaggagcgggcccaggtccacgccggcgaggctctggccaagatcccccgggaaacgaccaagaccaaggacatcaccggcggtctgccccgggtggccgaactgttcgaggtccgcaagcccaaggaggtggccgtgataagcgaaatcgacggcgccgtctccttcggcaagcagaccaagggcaagcgcaaggtcatcatcaccccggaagtgggcgaggccaaggaatacctgattcccaagggcagcacgtcacggtccacgagggcgattttgtccgggccggcgagccgctga

SEQ ID NO: 890 - protein, 281 aa, Unknown
  Obtained from environmental sample
  misc_feature (1)..(281): Xaa is any amino acid
MKDKDALARLRGELAPVHRRVAAWGAARGFMTPEGQLTEEGEAAPQMAELAALWPALSEAVGQAGQVLDEYDLKSEQDARRLAADYQLAVDRPGEFVEWDPFTVPILTEVSGYVSFEDMEEGKTMIERVDQVTGKSSKVIIESKQADVRPRIKVLDAAGKPHLTSKGIPAVYPLPVNAILMVEERAQVHAGEALAKIPRETTKTKDITGGLPRVAELFEVRKPKEVAVISEIDGAVSFGKQTKGKRKVIITPEVGEAKEYLIPKGSTSRSTRAILSGPASR

SEQ ID NO: 891 - DNA, 336 bp, Unknown
  Obtained from environmental sample
  misc_feature (1)..(336): n is a, c, g, or t
ttgctccttgattacgtggcgtttgtcgaagtggtacgcgaagccacnaaagaagaggggataagccccgaattggcaatggaaaaggccatagaaaactgtataaaaaaaggaatattaacaatttttttaacccgtcataaagaggaggttataaaaatgctcgtcgcagaatgggattacgatttagaccgggaagtcgcaaaagatgaagcccgggctgaagaacggcacaaaattactaaagacgtgtaccggctaggcgttggcattgataccattgctaaagccgttgacctctcggaaaggcaagtcaaagacattttgggcctgtaa

SEQ ID NO: 892 - protein, 111 aa, Unknown
  Obtained from environmental sample
  misc_feature (1)..(111): Xaa is any amino acid
MLLDYVAFVEVVREATKEEGISPELAMEKAIENCIKKGILTIFLTRHKEEVIKMLVAEWDYDLDREVAKDEARAEERHKITKDVYRLGVGIDTIAKAVDLSERQVKDILGL

SEQ ID NO: 893 - DNA, 414 bp, Unknown
  Obtained from environmental sample
  misc_feature (1)..(414): n is a, c, g, or t
atggtctctgttcacgattacaaacgtcttgagaataaacttgtccaaaaggtaaaaaatgacgccaataaagcggcaaattttatcggcgagtgttttgtctccatcggaagattttttacaagacgttacacagttgtttttgtccctcactcagagaaaaaagtttacaatcttcacataacggttttatcagtttgctgttttttacttgtggtttttggagttatcggagcgttcttctggtacggcgcgtcatacagcagcaccatgtacgctatggcgaacaaagacggacgccttaaagatacccaagcctcgcttgatcagttgcgcgacgagacagttcttctgttacgcgaagcccgcaatttgaaagcgctctttccagcgtgctttctgctctcggcatag

SEQ ID NO: 894 - protein, 137 aa, Unknown
  Obtained from environmental sample
  misc_feature (1)..(137): Xaa is any amino acid
MVSVHDYKRLENKLVQKVKNDANKAANFIGECFVSIGRFFTRRYTVVFVPHSEKKVYNLHITVLSVCCFLLVVFGVIGAFFWYGASYSSTMYAMANKDGRLKDTQASLDQLRDETVLLLREARNLKALFPACFLLSA

SEQ ID NO: 895 - DNA, 318 bp, Unknown
  Obtained from environmental sample
  misc_feature (1)..(318): n is a, c, g, or t
atgaactcggattctctgccagtntgcgagaaaattctcaagaaagacggtctaatcgtgataaattcgacccttgtaaaggaaaatccgaccagatcagacctaaaaatcgtaaaaattgacgcttcaggtattgcggaacagataggaaacctgctttttgccaatatggtggctctcggagcgatggcaaagctaacaaaagccctgaatttgaccgatattgaaggtgtactaaagaaattctttccgtccgataagcatcagttcgtaccgatgaatactaaggctatcagggcgggatatgaggcagtttaa

SEQ ID NO: 896 - protein, 105 aa, Unknown
  Obtained from environmental sample
  DOMAIN (3)...(103): Pyruvate ferredoxin/flavodoxin oxidoreductase
  misc_feature (1)..(105): Xaa is any amino acid
MNSDSLPVCEKILKKDGLIVINSTLVKENPTRSDLKIVKIDASGIAEQIGNLLFANMVALGAMAKLTKALNLTDIEGVLKKFFPSDKHQFVPMNTKAIRAGYEAV

SEQ ID NO: 897 - DNA, 810 bp, Unknown
  Obtained from environmental sample
  misc_feature (1)..(810): n is a, c, g, or t
atgtatatccccgttatatttcttaccggcaacaccgacgccgccattgaagcacggggctttgaactcggtgtgatagattttttgacgaaaccgttttccccgccggtactgctcaagcgtattgaaacacatttggaaattgatgcattaatccgcgcgcgggcagtgcggattaagcggctgcaggatggcattattaccgtcatggcggacgtcattgaagaacgcgacaatgagacgggcaggcacaatgagcgaacggaggcctatgtcaaaataatgatagaagcgatgaaagaactcggggtatattctgaagaaataaatggatgggccatggaaaaggtcgttccttcagtccggctgcacgatatggggaaaatccatgttccggacacgattttgaataaacccggcaaattggacaataaagaattcgaaaagattaaatcccatactacagatggggcacggattatagacagaatgatcgagcaaacaggtgaaaaggagtttttgcttaacgcgaaatttttcgccgaataccaccatgaacgatgggatggaacaggttatccgcacgggcttatgggaacagatattccgcttcagggacgtataatggcgattgttgacgtatatgacgcgctcctctccaaaagaagttataaggcagctctcccaaacgaggaagcggttagcatcatcacagcgagcgcgggcaagcattttgacccgaagatcgtggatgtatttcttgaagcgcaaaatcagtttaaagaggcgagggaagctttagggtcctga

SEQ ID NO: 898 - protein, 269 aa, Unknown
  Obtained from environmental sample
  DOMAIN (95)...(218): HD domain
  misc_feature (1)..(269): Xaa is any amino acid
MYIPVIFLTGNTDAAIEARGFELGVIDFLTKPFSPPVLLKRIETHLEIDALIRARAVRIKRLQDGIITVMADVIEERDNETGRHNERTEAYVKIMIEAMKELGVYSEEINGWAMEKVVPSVRLHDMGKIHVPDTILNKPGKLDNKEFEKIKSHTTDGARIIDRMIEQTGEKEFLLNAKFFAEYHHERWDGTGYPHGLMGTDIPLQGRIMAIVDVYDALLSKRSYKAALPNEEAVSIITASAGKHFDPKIVDVFLEAQNQFKEAREALGS

SEQ ID NO: 899 - DNA, 918 bp, Unknown
  Obtained from environmental sample
  misc_feature (1)..(918): n is a, c, g, or t
ttgcgtaccctcttcaataacgcgctgcatatcaaggcgataaaggatggccggaaaggtgtaatnttaattaataaactggacaaagattccgttgacgaagccgtcgcgaactgcattgccatgacctcttccgcgctgcctgatgaggcggaggatattgccgaaaagggcgaaaacaagtcattcgatcaaacttgcggcggcccgaatatggataaactcttttccagaacaaaggagtttgtcgatcaaattggaagcgaattcccgaagatagtccttgaaagcctggttacggattttagcaacggagagaccacctatgtaaacagcaatggagtggaattcaactcttcttccgaatgttatgatatgcataccatgttctcggcgaaagacggtgggaaatcctcttcgtttagcggctgctttgcgagaatttcgtcgctcgacattccctttatggagcttgatatgcagcggcaattactcgacgaatcttcaaagtccctggacccgcgcatggtggacggtaagtttgtcggcaaggtcttgttgacccccgcctgtgacgacatgatctggtacacgcttttcgagaacttcctgtctgacacttcccttgttacaggaacaagccgctggaaagacgcgcttgacacaaaggttgccgattccaaactcacgctccgcacagtcccgcttagtccgcttgttgtctcaggtgagcgctttacgtcagacggctttgaaagccgggatatggatataatccgcgatggcatgctaaagaatttcgcgctgacgctgtacggctcgcgaaagaccggaaagccaagggcgcttaattcagcttttagcaatattgaggttgccgccggtgataagccgctacaggaaatatcaggggaatga

SEQ ID NO: 900 - protein, 305 aa, Unknown
  Obtained from environmental sample
  DOMAIN (1)...(267): Putative modulator of DNA gyrase
  misc_feature (1)..(305): Xaa is any amino acid
MRTLFNNALHIKAIKDGRKGVXLINKLDKDSVDEAVANCIAMTSSALPDEAEDIAEKGENKSFDQTCGGPNMDKLFSRTKEFVDQIGSEFPKIVLESLVTDFSNGETTYVNSNGVEFNSSSECYDMHTMFSAKDGGKSSSFSGCFARISSLDIPFMELDMQRQLLDESSKSLDPRMVDGKFVGKVLLTPACDDMIWYTLFENFLSDTSLVTGTSRWKDALDTKVADSKLTLRTVPLSPLVVSGERFTSDGFESRDMDIIRDGMLKNFALTLYGSRKTGKPRALNSAFSNIEVAAGDKPLQEISGE

SEQ ID NO: 901 - DNA, 492 bp, Unknown
  Obtained from environmental sample
  misc_feature (1)..(492): n is a, c, g, or t
gtgattctttccataaacgggaaaggagtagaagacgcaaatgatttgaggaacacagttgcgatgctccgtcctggagagaaagctgattttgaaattttgagagatggaaaaaatatgaaattgaaggtgaacatagctctgagagatgaaaataatcttgcaggggccgcaccgagctcaaaagaaagcgagaaaaaggctgagagcagcaaaaacgattggggtatcaaagtggcagaccttacaaaagcccagaaaaaagaagccgggctttccgagtcttctgctggagttctgattgtttatgtagatgaaaagtctccggctgcaaaagcaggtgtaagacccggtgatataattttggctgcaaaccataggggactctcaagcgttaaggatttcaattccatcttttccgaaagcgcaaaaacaatgctgttgttgataaggcgcgaaggtggccagtcttatatagttttggaaaaataa

SEQ ID NO: 902 - protein, 163 aa, Unknown
  Obtained from environmental sample
  misc_feature (1)..(163): Xaa is any amino acid
MILSINGKGVEDANDLRNTVAMLRPGEKADFEILRDGKNMKLKVNIALRDENNLAGAAPSSKESEKKAESSKNDWGIKVADLTKAQKKEAGLSESSAGVLIVYVDEKSPAAKAGVRPGDIILAANHRGLSSVKDFNSIFSESAKTMLLLIRREGGQSYIVLEK

SEQ ID NO: 903 - DNA, 420 bp, Unknown
  Obtained from environmental sample
  misc_feature (1)..(420): n is a, c, g, or t
atgatccccgacgcggcggaactggccgggccaaagctcaaagcggtatgccgtaaactcggcattccgcctgtgctgaacttcggtccctgccttgccataggccggctggaaattgtcgccaccgagcttgccgaggcgataggcatcgacatcccgcagctcccgctggtgctttccgccgcacagtggctggaagagcaggcccttgccgacggatgcttcggcctggcgcttgggctgccccttcacctgggccttcccccgtttgtaaccggcagcaaggtcgccactcaggtgctttgccaggacatgatttcccttaccggcggccgggtggttatcaacagcgacgcgaaagaatccgcgaatctgctcgaaactatcatcaaagaaaaacgcgcagccttgaagatatag

SEQ ID NO: 904 - protein, 139 aa, Unknown
  Obtained from environmental sample
  misc_feature (1)..(139): Xaa is any amino acid
MIPDAAELAGPKLKAVCRKLGIPPVLNFGPCLAIGRLEIVATELAEAIGIDIPQLPLVLSAAQWLEEQALADGCFGLALGLPLHLGLPPFVTGSKVATQVLCQDMISLTGGRVVINSDAKESANLLETIIKEKRAALKI

SEQ ID NO: 905 - DNA, 642 bp, Unknown
  Obtained from environmental sample
  misc_feature (1)..(642): n is a, c, g, or t
gtggctggaagagcaggcccttgccgacggatgcttcggcctggcgcttgggctgccccttcacctgggccttcccccgtttgtaaccggcagcaaggtcgccactcaggtgctttgccaggacatgatttcccttaccggcggccgggtggttatcaacagcgacgcgaaagaatccgcgaatctgctcgaaactatcatcaaagaaaaacgcgcagccttgaagatataggggggcacttaatgaagcgcatcattattgaacaagataaatgcgacggctgtaagaattgcagcatcgcctgtatgcaggctcaccgggaaacagaggcgacaggaagccgcgggacggtttacgatctcgaccttcttaaccccaaaaacgaagcccgccatacgattaccaattatcggaaaggcggttatgtcccgattttctgccgccattgcgccgtgccggactgcgtgggcgcgtgtatgtcaggggccttaaagaaagatcccgccaccggtcatgtgcaatacgaccagaagcgctgcggcacttgctttatgtgcgttatgagctgcccctacggaaacatcaagcctgacagcgtaacgcgaacaaagattcttaaatgtgatttctgnncaggatga

SEQ ID NO: 906 - protein, 213 aa, Unknown
  Obtained from environmental sample
  DOMAIN (173)...(196): 4Fe-4S binding domain
  misc_feature (1)..(213): Xaa is any amino acid
MAGRAGPCRRMLRPGAWAAPSPGPSPVCNRQQGRHSGALPGHDFPYRRPGGYQQRRERIRESARNYHQRKTRSLEDIGGHLMKRIIIEQDKCDGCKNCSIACMQAHRETEATGSRGTVYDLDLLNPKNEARHTITNYRKGGYVPIFCRHCAVPDCVGACMSGALKKDPATGHVQYDQKRCGTCFMCVMSCPYGNIKPDSVTRTKILKCDFXXG

SEQ ID NO: 907 - DNA, 627 bp, Unknown
  Obtained from environmental sample
  misc_feature (1)..(627): n is a, c, g, or t
atggtaagcgtaaacaaaggcaagtgggataagagcggcggtttggagacagatgttttgtttcacaacgaatggatattagcctgccgccgcatactaaagcctgaaggcactatatggatttcagggacgtatcacagtatttatctctgcggttatcttctgcaaaaaaataactttcatttcctgaatgacatcgcgtggttcaagccgaacgcatcgcccaatttgagctgtaggttttttacagcatcgcacgaaacccttatttgggcgcgaaaggacaaaaaagcgaaacatacgtttatttacgaacaaatgaagaacgggcaatttccggaagataaattaaaaaaggaaaatacgcaaatgcgatccgtctggtcaataccaacgccaggggcgggagaaaaggaaaaggggaaacatcccactcaaaaaccgctggatcttttaaggcgtattgtgcttgcttcaacaaaagaaaactgcattgtattggaccctttttgcggcagcggaactacaggcattgcatgcaaagatataggtagccgctttttcatcggaattgagatagaagaaaaatactgcgagttggcaaaagaacggttgctacttacctaa

SEQ ID NO: 908 - protein, 208 aa, Unknown
  Obtained from environmental sample
  DOMAIN (4)...(203): DNA methylase
  misc_feature (1)..(208): Xaa is any amino acid
MVSVNKGKWDKSGGLETDVLFHNEWILACRRILKPEGTIWISGTYHSIYLCGYLLQKNNFHFLNDIAWFKPNASPNLSCRFFTASHETLIWARKDKKAKHTFIYEQMKNGQFPEDKLKKENTQMRSVWSIPTPGAGEKEKGKHPTQKPLDLLRRIVLASTKENCIVLDPFCGSGTTGIACKDIGSRFFIGIEIEEKYCELAKERLLLT

SEQ ID NO: 909 - DNA, 834 bp, Unknown
  Obtained from environmental sample
  misc_feature (1)..(834): n is a, c, g, or t
gtggacggaaatagagccggagcattacgcgctggtgaacgcaaagatcatggcgcttgtggatcgaggcccgcaatgaacgtgaagtttatcatcaggcgattactgtacacctgcttcctgttctttttcgtagtaacgttcaatttcattcttttccgcctaatgccgggcgacccgcttgcgatggtatcaagggagttaaaggcatcgcctgagtcccgcgcttcaatactgcaattatacggcctggataaaccaatcgaagtgcaatacgtgaactatatcaaatccatgctgacttttgattttgggatgtccttcaattaccggatacccgtaaaggacgttctgtttccaaaaataaaggcatcgctaatcctggcggcattgtcactgccgttaggaataatcatcggtattgttatgggaatagtggcctccgctttcagggggaaaaaaacagacacggttattaccaccacatccatgctgatttacgctctaccttcattctggctaggcatgattctgctgtcgttattcgcggtaaaactgaagcttgttcctgtaaacggaatgattacgcccggcatgagttatgggacatatttttcatatgtagcggacttggcccggcacattattataccgatgctttcctattcccttgccattttcggaagctacttcctgatcatgcgcagctccatgatcgatgttttttctgaggattttgtgctaaccgcccgcgccaaaggactcccgcgaagaaaggtcattacccggcacgtggttcccaacgcccttctgccgattaccaccatcgtgtaa

SEQ ID NO: 910 - protein, 277 aa, Unknown
  Obtained from environmental sample
  DOMAIN (118)...(277): Binding-protein-dependent transport system inner membrane component
  misc_feature (1)..(277): Xaa is any amino acid
MDGNRAGALRAGERKDHGACGSRPAMNVKFIIRRLLYTCFLFFFVVTFNFILFRLMPGDPLAMVSRELKASPESRASILQLYGLDKPIEVQYVNYIKSMLTFDFGMSFNYRIPVKDVLFPKIKASLILAALSLPLGIIIGIVMGIVASAFRGKKTDTVITTTSMLIYALPSFWLGMILLSLFAVKLKLVPVNGMITPGMSYGTYFSYVADLARHIIIPMLSYSLAIFGSYFLIMRSSMIDVFSEDFVLTARAKGLPRRKVITRHVVPNALLPITTIV

SEQ ID NO: 911 - DNA, 786 bp, Unknown
  Obtained from environmental sample
  misc_feature (1)..(786): n is a, c, g, or t
ttggaaaattatcgaaaatattgctggaaagacgaccgctttgtgcgcggtatcaccgaacatgatgttacggtaggaaagaaggacgaccccgaagcgaacctctggcttaacccgcagagctgggcggtaatcagcggctacgcggatgaaaagcgcggcaaacagatacttgatttagtccgcaaaaaactcaacacaaagtacggcgcgcgccttatgtcccctccgtaccgcaagcacgcttttgacggggcgcttgccctgctgttcaaccctggcacaaaagagaacgcgggtattttcctgcaaacgcagggctggataatccttgccgaggctctgctcgggcgcggcaaccgcgctgttgagtactatctggaaagctgccctgcggcgcaaaacgaaattgccgacacgcgccttatggagccgtatgtttactcgcaatttacagaaagctcagacagcccctttgaagggcgcagtcacgttcactggctgacaggcacggccagcacggtaatggtcggcagcgtggaagggattttggggttaaggccggacattgacggactgtgcctgtctccggcgattccctcatcgtggaaatcctttacaatggaaaaagttttccggggcaaaaaactttacataaaagtgaataaccccgacgggcatgaaagcggctgtaaaaaactcactgtcaacggaaaacaggttacaggcaattatattcccgctgcgatactgaaagcgcagaacgagattattctggatatgtga

SEQ ID NO: 912 - protein, 261 aa, Unknown
  Obtained from environmental sample
  misc_feature (1)..(261): Xaa is any amino acid
MENYRKYCWKDDRFVRGITEHDVTVGKKDDPEANLWLNPQSWAVISGYADEKRGKQILDLVRKKLNTKYGARLMSPPYRKHAFDGALALLFNPGTKENAGIFLQTQGWIILAEALLGRGNRAVEYYLESCPAAQNEIADTRLMEPYVYSQFTESSDSPFEGRSHVHWLTGTASTVMVGSVEGILGLRPDIDGLCLSPAIPSSWKSFTMEKVFRGKKLYIKVNNPDGHESGCKKLTVNGKQVTGNYIPAAILKAQNEIILDM

SEQ ID NO: 913 - DNA, 483 bp, Unknown
  Obtained from environmental sample
  misc_feature (1)..(483): n is a, c, g, or t
ttggccgagttgtcaaaagccgatattgtgatggtcgaggtcattgtaagaaacgtggggccgccggaggggttttcaaaaaaatacggcgttcccgaaggctcggaacttaaaaatatcgtcttggagttttgcttgaagagcgacgaactcggcgaccctatgataaacgaaagccagatcaccgccatcgggcttgccacaaacgaggaacttggctacatggccgggcaggctctgaaaatcaacgatcttctgagcaccctatttaaaaaagccggtatcaggctgatagacttcaaacttgagttcggcagaagcggaggggggatcatcctttgcgacgagatctcgccggattcttgccggttatgggatgcggagacgaacaaaaaaatggacaaagaccgctttcgccgtgacttgggggatgtgctggaggggtatagggacgttttggcgcggctgaaaagcgtgatgtaa

SEQ ID NO: 914 - protein, 160 aa, Unknown
  Obtained from environmental sample
  DOMAIN (1)...(160): SAICAR synthetase
  misc_feature (1)..(160): Xaa is any amino acid
MAELSKADIVMVEVIVRNVGPPEGFSKKYGVPEGSELKNIVLEFCLKSDELGDPMINESQITAIGLATNEELGYMAGQALKINDLLSTLFKKAGIRLIDFKLEFGRSGGGIILCDEISPDSCRLWDAETNKKMDKDRFRRDLGDVLEGYRDVLARLKSVM

SEQ ID NO: 915 - DNA, 495 bp, Unknown
  Obtained from environmental sample
  misc_feature (1)..(495): n is a, c, g, or t
ttggaaggagtaagcagcttgctcaataataactttccaataaaccaggaagaacttaaaactcttataccgcacaggggtaaaatgctccttcttgacagaatcaccgaatacgattctgaaggaagcattaaagcggaatatggtattacagaagcctgtttgttttacagtactgaattaaaaggagtacccggctgggttggttttgaatttatggcgcagaccatttccgctttttcaggattacgcagcaggcttacaggcgttaaaccgaaaataggttttatccttagcgtcccgctaatgcaaatttatatttccgtctttaaaacaggcggcgttgccgatatccgtatgaaagaactcgaccgcacagatcaaatatatacttttgaaggtgaaatatttatagatggtaaaaaagcaatggaaggtaaattaatggttatggaaattcttgatgaanaacagtttanaacagaaaatctttaa

SEQ ID NO: 916 - protein, 164 aa, Unknown
  Obtained from environmental sample
  DOMAIN (23)...(147): FabA-like domain
  misc_feature (1)..(164): Xaa is any amino acid
MEGVSSLLNNNFPINQEELKTLIPHRGKMLLLDRITEYDSEGSIKAEYGITEACLFYSTELKGVPGWVGFEFMAQTISAFSGLRSRLTGVKPKIGFILSVPLMQIYISVFKTGGVADIRMKELDRTDQIYTFEGEIFIDGKKAMEGKLMVMEILDEXQFXTENL

SEQ ID NO: 917 - DNA, 864 bp, Unknown
  Obtained from environmental sample
  misc_feature (1)..(864): n is a, c, g, or t
ttggcaataacccagcacgcaaaacaagctcaagactttctagggcaaatcagcgaagtcccagcggacttagcaaaagccataaaagagcaaagccaagcagacgaagcaggcattgccgctcagagaaaaaatgttgagaaactaaaggaaattttgaaaggcgtaaaaagccctgttgctgcaaaacttatatccattgcggattacctagtgcataagagcgtgtggataatgggtggcgatggctgggcttatgatattggctatggcggcttagaccacgttcttgcaagcggcgagaatgtgaatatactcgttctggataccgaggtttattccaatacgggtgggcaggcgagcaaaagcactaacttagcagctgtggcgcagtttgcggcgagtggcaaacgcgctccaaaaaaggatttgggtttaatagccatgagctacagaaacgtttacgtgggcagggttgctatgggttcaaacgatgtccataccataaaggtattccgcgaggcagaagcccacaacgggccgtctctgatactcgcctactccccttgcatatcgcacggcataaaggatatgcgccatatgcttaaccagcagaaaatggctgtggatagcggttactggcccttattccgctacattccggcaaacatggaagagggcaaaaatccctttgtcttggattcaaaagccccttcaataaaagtcaaggattatatctacaccgagaaccgttataaaatgctaaccgcttccaaccctgccgcagcagaggagcttgcaaataggttgcaaacctttgtggacgaaaagtggaagcagtatgaagatttagcgaagctgtaa

SEQ ID NO: 918 - protein, 287 aa, Unknown
  Obtained from environmental sample
  DOMAIN (36)...(186): Thiamine pyrophosphate enzyme, C-terminal TPP binding domain
  misc_feature (1)..(287): Xaa is any amino acid
MAITQHAKQAQDFLGQISEVPADLAKAIKEQSQADEAGIAAQRKNVEKLKEILKGVKSPVAAKLISIADYLVHKSVWIMGGDGWAYDIGYGGLDHVLASGENVNILVLDTEVYSNTGGQASKSTNLAAVAQFAASGKRAPKKDLGLIAMSYRNVYVGRVAMGSNDVHTIKVFREAEAHNGPSLILAYSPCISHGIKDMRHMLNQQKMAVDSGYWPLFRYIPANMEEGKNPFVLDSKAPSIKVKDYIYTENRYKMLTASNPAAAEELANRLQTFVDEKWKQYEDLAKL

SEQ ID NO: 919 - DNA, 396 bp, Unknown
  Obtained from environmental sample
  misc_feature (1)..(396): n is a, c, g, or t
ttgattcttcacgttaacgagcctgtcggacacgattacatcgggaagaacgacatcccgcttaaaaagatagaaaagtttgttaataacagccagaatcttaagataattcttgcccactttggcggcggtattttcttttacgaaaccatgaaagaaataaaggaaaaattccgtaatgtgtactacgatacagccgccgccccgtttctttacgattcgcgaatttacagcgccgtaaaagcgcttggcctttgtgaaaaaattatttttggcagcgattttccccttctgccgccctcgcgctacctgcccgctctggaaaaaagcgggctttctcccgaagaaatacaacttatacttggcgcaaacgctgaaaaactgttaaaatgttag

SEQ ID NO: 920 - protein, 131 aa, Unknown
  Obtained from environmental sample
  DOMAIN (1)...(131): Amidohydrolase
  misc_feature (1)..(131): Xaa is any amino acid
MILHVNEPVGHDYIGKNDIPLKKIEKFVNNSQNLKIILAHFGGGIFFYETMKEIKEKFRNVYYDTAAAPFLYDSRIYSAVKALGLCEKIIFGSDFPLLPPSRYLPALEKSGLSPEEIQLILGANAEKLLKC

SEQ ID NO: 921 - DNA, 852 bp, Unknown
  Obtained from environmental sample
  misc_feature (1)..(852): n is a, c, g, or t
gtgctagagcatttcggcaaagaaaagtttacttacatcaacgagcagatcggcaagaagtacatgtccaaactgatctccaaatggtttgactcttacggcgcgaccgtgactgccgagttgtgcgaccgcttgaaaaatctgggtttctattacgccatgcgttcgggtatttccattgccatggacgatatggtggtgccggacagcgaaaaagccaagattatcgagcgcggcgagaaagagcaggcgcgcatcgacaagcaattggagtccgaggaattgactgaccgcgaagccaaggaaaaatcgcatgatctctggcgccgggttaccgctagcgtgacggacgacatgaagtccaaactcggcacttacaacagcgtctggatcatggctaattccggcgcgcgcggtaatatcgatcaggtgcgtcagctttcggctatgcgcggactgatggcggacgcgcaaggtaatacggtggatattccgatcaagaccaatttctacgagggtttgagtttgacggagtactttatttcggcttacggcgcgcgtaaaggcttggtcgacaccgctctgcgtactgcggactccggttatctgacccgccgtctggtcgatattgcgcaggacgtgattatcacggaggaagactgcggcactaccgatggcacgatgctcggcccggttaaggacggcctcaatgaattgctagctctggaagaccgcctgatcgggcggaacgcggcggaaacggtcaaagacccggtaagcggcgacgaactggtcaagaaaaatcaggaaattaccgcagaaattgcccgcaatatgccgatgccggaatga

SEQ ID NO: 922 - protein, 283 aa, Unknown
  Obtained from environmental sample
  DOMAIN (95)...(171): RNA polymerase Rpb1, domain 4
  misc_feature (1)..(283): Xaa is any amino acid
MLEHFGKEKFTYINEQIGKKYMSKLISKWFDSYGATVTAELCDRLKNLGFYYAMRSGISIAMDDMVVPDSEKAKIIERGEKEQARIDKQLESEELTDREAKEKSHDLWRRVTASVTDDMKSKLGTYNSVWIMANSGARGNIDQVRQLSAMRGLMADAQGNTVDIPIKTNFYEGLSLTEYFISAYGARKGLVDTALRTADSGYLTRRLVDIAQDVIITEEDCGTTDGTMLGPVKDGLNELLALEDRLIGRNAAETVKDPVSGDELVKKNQEITAEIARNMPMPE

SEQ ID NO: 923 - DNA, 894 bp, Unknown
  Obtained from environmental sample
  misc_feature (1)..(894): n is a, c, g, or t
ttgagaaagaggatttttcaggattccccggcgaagcctatattacccggttttataagaaattacggctcgtatcttgatcttgacgtgcaggaactcctctccctttactacgcgctgaaaattcaggaacagccgataccggaacagcttttaaaaaaaaccccgaaagctttgcctaaaatcataatcggcattttattggggttaattatcgcgggcgcgggcggcagtacggtttattattttatcaaccgccccagacagccaagagttacggcgccggttgtcagggcgcccgtagaatatgtcatggatggggacagttttgagcgccgtttttataaaggcgattcaattctggttcccgccgggacggaccagtttaagctggaattgctgggcctgggagaagaggtgacaatccatacgcctaacggtgagatcacggttagtttaagccaggaagcgaatgtggaactgggaaaaggcgcgccggaactcaaaataagcgcgatggactataccatgaataacgcggatatgggcgtgcttctgcgtctggagttggacaacgcgcaaattccgaatgtttccgcgattagcggcgttacaggccaatccccttccaccatgattttttcgtcgcctaacccctatccctttacccttcaattaaattggcagggctactgcatgttccgttgggaaatactgatggaacgggaccgccgcgacaganacgagcgttacttccagcgcggcgatcctgaactcaatatccaggcgcagaacggaattcgcctgtgggtttccaatgcccaggccgcgaaattccaggttatcggcggcggcaggaacgtttccgtggaaattggcatccccggagagtag

SEQ ID NO: 924 - protein, 297 aa, Unknown
  Obtained from environmental sample
  misc_feature (1)..(297): Xaa is any amino acid
MRKRIFQDSPAKPILPGFIRNYGSYLDLDVQELLSLYYALKIQEQPIPEQLLKKTPKALPKIIIGILLGLIIAGAGGSTVYYFINRPRQPRVTAPVVRAPVEYVMDGDSFERRFYKGDSILVPAGTDQFKLELLGLGEEVTIHTPNGEITVSLSQEANVELGKGAPELKISAMDYTMNNADMGVLLRLELDNAQIPNVSAISGVTGQSPSTMIFSSPNPYPFTLQLNWQGYCMFRWEILMERDRRDRXERYFQRGDPELNIQAQNGIRLWVSNAQAAKFQVIGGGRNVSVEIGIPGE

SEQ ID NO: 925 - DNA, 825 bp, Unknown
  Obtained from environmental sample
  misc_feature (1)..(825): n is a, c, g, or t
atgatagttttaatgtggcggagaacaacaagcgtttggataaactggagtctgtttttaaataaaactgggaggtgctgtatggcattacaagtaaagattgatgacgacaagggttcaccgtcggtgacagggctggcggcgacggggtcgcggtcaacgggcgcgttggctactaccacgacgtacacgctgaccgccacgtctgacgcgggacagaccgctacggcgcagaggaccgttcaggtcggggcgttgccgacgattaatttcaccgtcaacggaggggcttcggcggcggtgcttgccggaggtacggcgcaggttacattggcttgggacgtgacgggagcggcttcggtgaagatcgaagcggtggcaggcacacccgccgttgtgaacccgaacaatgtcagcggcaccgcgccggttacgccgacaggaactgccggggcaaccactacgtacacgctgacggcgacgtcgtcgcttgggttggaggcaaccgctacagtgacagtgtatacggacgctgtgccgacagtgacgtcgtttacgacgaataggacggttatcgcccctgcggcggcggataccggcaataagaacgcgacgttgacatgggtagtgtcgaatgcagcgagcgtgtcgatagtgagcagcccgacaggccaaggcggcggatctggtctaggcttgtcgagtaataccgttgtggctccgacagttgagacgacgtacacgctgcaagcgattacttcgcacggagcggtatacacgtatccgactacccgtaccatatcggtggagtctctgtggagataa

SEQ ID NO: 926 - protein, 274 aa, Unknown
  Obtained from environmental sample
  misc_feature (1)..(274): Xaa is any amino acid
MIVLMWRRTTSVWINWSLFLNKTGRCCMALQVKIDDDKGSPSVTGLAATGSRSTGALATTTTYTLTATSDAGQTATAQRTVQVGALPTINFTVNGGASAAVLAGGTAQVTLAWDVTGAASVKIEAVAGTPAVVNPNNVSGTAPVTPTGTAGATTTYTLTATSSLGLEATATVTVYTDAVPTVTSFTTNRTVIAPAAADTGNKNATLTWVVSNAASVSIVSSPTGQGGGSGLGLSSNTVVAPTVETTYTLQAITSHGAVYTYPTTRTISVESLWR

SEQ ID NO: 927 - DNA, 621 bp, Unknown
  Obtained from environmental sample
  misc_feature (1)..(621): n is a, c, g, or t
atggcagatgacatggaaactccccaagatgcgaatagtggggaaacgctgaaaaccctcctattggcggaggacgacccagcgacccaaacccttttcagggcaggcctacgcaaattggcgggataccaagtgatcatcgttggcaacggcctagaagcccttgaagtgctaaagctccaagtggtaaacgtgatcgtcaccgacttgtacatgccagagatggacggctaccaattgatttccattgtcaatgaacgctatcccaacatcccgatactggtgatgaccgggctggcagagaccacccaccaaaacgcgcccctctttttgggggcactggggataatccccaagccagtcaagatgtcctccctgatcgaacaaatcagggaagccggcaaccgaaagccagacggcgtgatcaaaggcatacagttgaacggcctcctccaattgatgcagtgggagcggaaaacctgcacgataactatccaatttgcagatggcatcggaatgctttacgtgcaggaaggcgacctgatccacgccctattcaaggatttggaagggttggacgccgcataccgaatattggccatgccaagcacccacgtttga

SEQ ID NO: 928 - protein, 206 aa, Unknown
  Obtained from environmental sample
  DOMAIN (18)...(131): Response regulator receiver domain
  misc_feature (1)..(206): Xaa is any amino acid
MADDMETPQDANSGETLKTLLLAEDDPATQTLFRAGLRKLAGYQVIIVGNGLEALEVLKLQVVNVIVTDLYMPEMDGYQLISIVNERYPNIPILVMTGLAETTHQNAPLFLGALGIIPKPVKMSSLIEQIREAGNRKPDGVIKGIQLNGLLQLMQWERKTCTITIQFADGIGMLYVQEGDLIHALFKDLEGLDAAYRILAMPSTHV

SEQ ID NO: 929 - DNA, 882 bp, Unknown
  Obtained from environmental sample
  misc_feature (1)..(882): n is a, c, g, or t
ttggaggggaacaaaatgaatgttttttcagtacgtgaaaacacacgggtgacagagtcacaaatttcacagccgaacgtgatccagtttaaacagcaggaagcggagaaacctgctgaaaacagcgtttcacaggctcagcgcagcttagcatccgtgagcagagagaacgtgccggctgttatcaaggtaatttctgcaggaggcggaggcgctaacgcgataaaccgcatgattgagaacggacttggcggagtagagtttatttcagttaacactgatgttcaggacctttacagtaaaagcagggccgatttaaaagtacagattggagcgaaagtaacaggcggcagaggcgccggaggagtgccgggcaaaggagaaaaagccgctattgaagatgcggatgccatagccgaggctttgataggagccgatatggtttttattacggcaggtatgggcggaggaacgggaacaggttctgtccccgtaatcgccaagatcgcaagggaacagggagcgttaaccgtagctgttgttacaactccgtttgaattcgaaggccgttacaagatgaggcttgccgaagagggaattgccaaattacgccaggaagttgacactcttattgttataccaaatcagtatctatttaaaattattgacaataccacgccgtacagcagcgcgtatttgcttgccgacaaagtgctgtgccacggagtgcagggcatttccgatgttataacanagattgngcttattaacatagatnttgcggatgttgagactgtcatgaaaggcaaaggagacgcgttgatggggcttggtttcggctcgggagaaaccgctcattggacgccgnttacaaacgcatag

SEQ ID NO: 930 - protein, 293 aa, Unknown
  Obtained from environmental sample
  DOMAIN (60)...(254): Tubulin/FtsZ family, GTPase domain
  misc_feature (1)..(293): Xaa is any amino acid
MEGNKMNVFSVRENTRVTESQISQPNVIQFKQQEAEKPAENSVSQAQRSLASVSRENVPAVIKVISAGGGGANAINRMIENGLGGVEFISVNTDVQDLYSKSRADLKVQIGAKVTGGRGAGGVPGKGEKAAIEDADAIAEALIGADMVFITAGMGGGTGTGSVPVIAKIAREQGALTVAVVTTPFEFEGRYKMRLAEEGIAKLRQEVDTLIVIPNQYLFKIIDNTTPYSSAYLLADKVLCHGVQGISDVITXIXLINIDXADVETVMKGKGDALMGLGFGSGETAHWTPXTNA

SEQ ID NO: 931 - DNA, 465 bp, Unknown
  Obtained from environmental sample
  misc_feature (1)..(465): n is a, c, g, or t
atgaaacagtttaaagaaattgtgcttggtatttttgtaattctcgtttttggatatgcaataacctatatctaccgttatgaaagcaaaaaaacaaacagagaattggcaaaacgcattgccgaattaagtccgaaaggcggaccgcctgaaaccatagaaggtcttaggcaggcaattgagttatacgaagatcaaattgaaagaaacgtaaaggaaggagcgcagacgggcgtttactggaaaatactcggcgtaaggcttgcggacaggggaatgcacaatgacgcgctcgatgcgctggaaagggcgatttactataactcgcaggaccccgtactttattatttaacaggagtttccgcagcaaatgtcgcaaaatcaaaggtaggattttcatctaacgtagaggtgaaaggaatttttactatgttctttctgaaaattcatactcggccgatctga

SEQ ID NO: 932 - protein, 154 aa, Unknown
  Obtained from environmental sample
  SIGNAL (1)...(22)
  misc_feature (1)..(154): Xaa is any amino acid
MKQFKEIVLGIFVILVFGYAITYIYRYESKKTNRELAKRIAELSPKGGPPETIEGLRQAIELYEDQIERNVKEGAQTGVYWKILGVRLADRGMHNDALDALERAIYYNSQDPVLYYLTGVSAANVAKSKVGFSSNVEVKGIFTMFFLKIHTRPI

SEQ ID NO: 933 - DNA, 732 bp, Unknown
  Obtained from environmental sample
  misc_feature (1)..(732): n is a, c, g, or t
gtgcctaatcaatacgagtgtttcggggcgtacgcgctcgactccgtcaataaaaaaatctccgccgtcggcgcgaaggtgacctgcctcgcgagcggcggggcggggcgcgtctacctgcactccaccaatccggcgatagccacaggcgacggcgtggcgatggcctatagggcgggggccagcaccgccaatatggagtttatacagttccaccccaccaccctgttccacgagaagggcgaatcgttcctgatatccgaggcgttgcggggtcacggcgcggtgctgcgcaacgcggcgggggaagacttcatgccgagataccacccgcaagggtcgctcgccccgcgagacatcgtggctagagcgatagacaacgagatgaaagtttcagggctgccgtgcgtttatctcgacatcaggcacaaggactcgcgggcgaccgtcgaaaactttccgcagatatacaataagtgcctgagtttcgggatagacatcacgaaggatttgatccccgtagtgccggccgcccactatacgtgcggcggcgtgttggttgattataacgggaatacggatatagagaatctctacgcctgcggtgagactgcctgcacgggcgttcacggcgcgaacaggctagcgtcgaactcgctcttagaggcgttagtattctcccaccgagcggcggcggacgcggcggcgcggttgaacagtgccgcgccataa

SEQ ID NO: 934 - protein, 243 aa, Unknown
  Obtained from environmental sample
  DOMAIN (1)...(220): FAD binding domain
  misc_feature (1)..(243): Xaa is any amino acid
MPNQYECFGAYALDSVNKKISAVGAKVTCLASGGAGRVYLHSTNPAIATGDGVAMAYRAGASTANMEFIQFHPTTLFHEKGESFLISEALRGHGAVLRNAAGEDFMPRYHPQGSLAPRDIVARAIDNEMKVSGLPCVYLDIRHKDSRATVENFPQIYNKCLSFGIDITKDLIPVVPAAHYTCGGVLVDYNGNTDIENLYACGETACTGVHGANRLASNSLLEALVFSHRAAADAAARLNSAAP

SEQ ID NO: 935 - DNA, 918 bp, Unknown
  Obtained from environmental sample
  misc_feature (1)..(918): n is a, c, g, or t
ttggacaaccggaacaaggctctcgccgtgtacaacatggtcaaagaaattaacaaacaaaatcccaacgtgggcggcaggccccttattgacggtattggcatgcaggggcattaccggacaaaaacaaatgttgaaaatgtcgccgcctgtctggaacgctttgcttctcttggcgtggaggtaagcataaccgaactggatgtgcaggccggggttaattcatctcttacgccagagcaggcccttgaacagggcgttgcgtatgcgcggctctttgcccttttcaggagaaatgccgccgttttgggcagagtgacgatctgggggcttgatgacggctcaagctggagaagggataccagccctaccctgtttgatcgtaatttacagacaaaaccggctttctttggagcgctggaccccgcggcctttctggcggaaaacgaaggccgtctggcggcattcaaaaaagagccgctgcaggcgcaggcgcgctacggctccccggctctggacttatctgaccccttgtggcaatccgcgccgcagatacccattaaccagtaccttatggcatggcagggcgcacagggaaccgcgcgggttctctgggatgaacggtacctctacgtgttgatagccgttaccaacgcggaattgaacaaaactaaccgctctcctcatgaacaggactcggtcgagattttttttgatgaaggcaaccacaaggcggggtatatgcaggaagatgacggtcagtaccgggtaaattttgacaacgagcagagttttaatcctgcgtcgattgccgcaggttttgagtcgcgggcttttgtttccggcaagtcgtatactgttgccgtaaaaattctttcagaaccgttaagccccaagaaatacgcttgttggttttga

SEQ ID NO: 936 - protein, 305 aa, Unknown
  Obtained from environmental sample
  DOMAIN (2)...(143): Glycosyl hydrolase family 10
  misc_feature (1)..(305): Xaa is any amino acid
MDNRNKALAVYNMVKEINKQNPNVGGRPLIDGIGMQGHYRTKTNVENVAACLERFASLGVEVSITELDVQAGVNSSLTPEQALEQGVAYARLFALFRRNAAVLGRVTIWGLDDGSSWRRDTSPTLFDRNLQTKPAFFGALDPAAFLAENEGRLAAFKKEPLQAQARYGSPALDLSDPLWQSAPQIPINQYLMAWQGAQGTARVLWDERYLYVLIAVTNAELNKTNRSPHEQDSVEIFFDEGNHKAGYMQEDDGQYRVNFDNEQSFNPASIAAGFESRAFVSGKSYTVAVKILSEPLSPKKYACWF

SEQ ID NO: 937 - DNA, 306 bp, Unknown
  Obtained from environmental sample
  misc_feature (1)..(306): n is a, c, g, or t
atgatcgatgaaataagacaggagatcgcgagccgccttcaccttatccgtattcaggtagcggaaggcggaccgcgaaggcctgtaagccgttctgtcggcgcggttcaatcggcgagccacagcagtatgggcgcttttgacaattccttgggcgcaaaacaggcgtcgtccgccgagcgttccgtaaatgcggcaagccgtcctgagggggcgactgttgttcggggccagcctaaggtcggcagaaacgatccttgcccgtgcgggagcggcaagaagtataaacattgccacggacgctga

SEQ ID NO: 938 - protein, 101 aa, Unknown
  Obtained from environmental sample
  DOMAIN (83)...(101): SEC-C motif
  misc_feature (1)..(101): Xaa is any amino acid
MIDEIRQEIASRLHLIRIQVAEGGPRRPVSRSVGAVQSASHSSMGAFDNSLGAKQASSAERSVNAASRPEGATVVRGQPKVGRNDPCPCGSGKKYKHCHGR

SEQ ID NO: 939 - DNA, 333 bp, Unknown
  Obtained from environmental sample
  misc_feature (1)..(333): n is a, c, g, or t
ttgctaaaagctttgctaccttcaagctgggcggcggcggcagttggaccaaaaatttgcattccctgttttttgaattcgtcaacaacgcctgccacaagcggaatttccggacctataacggtgaagtctgctttttcgttttttgctatttctgctatggctttgggatttgcaacatcaacgggcaagcattttccaagatttgccatgcccggattccccggtgcgcaaacgagttccgtgcaaagcggagatttttttaagctaagcgcaatggcgtgttcccttccgccgctgcctatcaaaagaattttcattttggaaatttag

SEQ ID NO: 940 - protein, 110 aa, Unknown
  Obtained from environmental sample
  SIGNAL (1)...(32)
  misc_feature (1)..(110): Xaa is any amino acid
MLKALLPSSWAAAAVGPKICIPCFLNSSTTPATSGISGPITVKSAFSFFAISAMALGFATSTGKHFPRFAMPGFPGAQTSSVQSGDFFKLSAMACSLPPLPIKRIFILEI

SEQ ID NO: 941 - DNA, 807 bp, Unknown
  Obtained from environmental sample
  misc_feature (1)..(807): n is a, c, g, or t
ttgccgcctccaccgcttattgaaaacgaagaagaaaaagacgaaatccttgccgaatggcgttataatcgcatagagagcatagttgcaaaatccgttgcaaaaggaatttctccatacaaggcaggcgataaaatagacaggttcattatgaacaaatatataggcttgcctctctttttatttgcaatgtatttgctcttttggttagccgttcatgtgggcggagtgttcatagatttttttgatatagcctttggtgcaatttttgtggatggactaaggtatgttttaacaaacataaacgcgccggagtctgtgatttccattttggcagacggagtgggttctggtattcaagctctctccacattttttcccattatattttcattgttcttttttatggggctgcttgaaaactctggctatatatcgcgagctgcttttgttgtggatagaataatgcgctctatggggttgcctggcaaggcttttattccaatgctcataggctttggctgttcggttcccgccattatggccacaaggagtttggaaaataaaagggataaaattttaagcgtgtttatggttccttttatgagctgcggcgcaaggcttccagtatatatagttatcacctcggcgttttttccacataacgctcaaaatatgatttttgcgctttacatgattggcattttcctagctctggtaaccggacttttgctgaagggcactgtgtacaaagggaatttagctcccttcgtgatggaacttccacatacccataggcaaaaatag

SEQ ID NO: 942 - protein, 268 aa, Unknown
  Obtained from environmental sample
  DOMAIN (226)...(267): Ferrous iron transport protein B C terminus
  misc_feature (1)..(268): Xaa is any amino acid
MPPPPLIENEEEKDEILAEWRYNRIESIVAKSVAKGISPYKAGDKIDRFIMNKYIGLPLFLFAMYLLFWLAVHVGGVFIDFFDIAFGAIFVDGLRYVLTNINAPESVISILADGVGSGIQALSTFFPIIFSLFFFMGLLENSGYISRAAFVVDRIMRSMGLPGKAFIPMLIGFGCSVPAIMATRSLENKRDKILSVFMVPFMSCGARLPVYIVITSAFFPHNAQNMIFALYMIGIFLALVTGLLLKGTVYKGNLAPFVMELPHTHRQK

SEQ ID NO: 943 - DNA, 492 bp, Unknown
  Obtained from environmental sample
  misc_feature (1)..(492): n is a, c, g, or t
gtgtacaaactggccaaggaagggcattggggaggggagccgaaagaaaaagagtttagcaaacatgccgcactaattggcaagccgatgccaaagctagacctgtcaggctgggtgaatgggcaggtgggcagcgaggacatgaaaggcaagatagtcgtcattgatttttgggccacatggtgccgcccctgcatagcggcaatcccgcacaacatcgagatggcaaaaaaatacgccgacaagggcgtactggtcttgggcatctgcggcagcggccaaggcgaagaaaaaatgggcgatgtggtcaaaacgaagggggtagcctatcccaatgcccgcccaactccagccacagaaaaggcctggcgggtttcttggtatccaatgtacgcagtcgttgacagaaatggcacactgagagcccttggcataaatccggactacgttgaaaaagtggttgacgcgctattggaagaacagccgaaatag

SEQ ID NO: 944 - protein, 163 aa, Unknown
  Obtained from environmental sample
  DOMAIN (25)...(162): Redoxin
  misc_feature (1)..(163): Xaa is any amino acid
MYKLAKEGHWGGEPKEKEFSKHAALIGKPMPKLDLSGWVNGQVGSEDMKGKIVVIDFWATWCRPCIAAIPHNIEMAKKYADKGVLVLGICGSGQGEEKMGDVVKTKGVAYPNARPTPATEKAWRVSWYPMYAVVDRNGTLRALGINPDYVEKVVDALLEEQPK

SEQ ID NO: 945 - DNA, 690 bp, Unknown
  Obtained from environmental sample
  misc_feature (1)..(690): n is a, c, g, or t
atgcgaggacgtgnttatcgaaaatgcaaggtctctgtgggggacgacggcattgtgctcaagtcgggagcgggcgaggacggcattcgcgtgggcaggccgtgcagaagaataactgtgcgtaactgcgaaataaaagacggccacggcggaatcgttatcggcagcgagaccgcggcgggcatttatgaagtgcttgccgaggattgccttttcaggggaaccgaccgcggaataaggataaaaacccggcgcggcagagggggggaaattcgcgatttggaattccgcaatcttgttatggaaaaaaacctttgccctttcgccattaatatgttttaccgccccggcgcggtcatggaggacggttttttcagccagaacgcccttcccgtgaacgccgcgacgccctcgattaaaaatatccgcgtctcggatatcaaggcttcagactgcaaggcgtccgccggttttatcgccggcttgcctgagtcgcctgtggaaaacgtcgtaatcagccgctgtgaattttccacggatgaagaatccggggtcagccccgatgaatcggacatgtttttgggaattccggcggttacggaaaaaagcatacgtcttcttaatgttaaaaatattcagtttaacgaggtaaaggtaaaagggccgctcgaggcttttatttatcgttaa

SEQ ID NO: 946 - protein, 229 aa, Unknown
  Obtained from environmental sample
  misc_feature (1)..(229): Xaa is any amino acid
MRGRXYRKCKVSVGDDGIVLKSGAGEDGIRVGRPCRRITVRNCEIKDGHGGIVIGSETAAGIYEVLAEDCLFRGTDRGIRIKTRRGRGGEIRDLEFRNLVMEKNLCPFAINMFYRPGAVMEDGFFSQNALPVNAATPSIKNIRVSDIKASDCKASAGFIAGLPESPVENVVISRCEFSTDEESGVSPDESDMFLGIPAVTEKSIRLLNVKNIQFNEVKVKGPLEAFIYR

SEQ ID NO: 947 - DNA, 831 bp, Unknown
  Obtained from environmental sample
  misc_feature (1)..(831): n is a, c, g, or t
ttggtagccgacgcgatacacgatctttctccgcgaaaagatcaaccccttgtcaaagtacattgcgccgcccttgccccctcgttactcgaaagtgaactcttcggccatgagaaaggggcgtttacaggcgctgtaacacaacgcaagggcaggtttgaacttgcctcaggtggaaccctgtttttggacgagataggtgaaattgatcaaaacattcagattaaattactgcgcgttttgcaggagaaaaaatttgaaagggtagggggggagcataccgtagaaattgacgtgcggattatcaccgccaccaataaagatttaaaggctgaaatagagaagggaaattttcgtgaagacttatacttccgtttaaatgtggtaaacataaacgtcccaccattacgcgaaagaaaagacgatattcccctattagccgccgcctttttaaaagagttcgcccttgaaaacggcaaaaaaattgaaggaataaacgaaaaagcccgcgcccgcctgtacggttacgactggcccggcaatatccgcgaattacgcaactgcatggaaagcgctgtcgttatgtgccaatcaaacgcgattaacgtaggtgatctcccgccagccttccgcaacgccgaagacgacggctggattaacattaagctgggctctaacatggaagagtgcgaaaaaattattattcgcgatactctttcacattgtaaagggaataaaagcaagacagcggagactttggagattggcaggaagacgctgcttcgtaagcttgcggattatgggcttggcgggcaggaagagggggagtag

SEQ ID NO: 948 - protein, 276 aa, Unknown
  Obtained from environmental sample
  DOMAIN (227)...(267): Bacterial regulatory protein, Fis family
  misc_feature (1)..(276): Xaa is any amino acid
MVADAIHDLSPRKDQPLVKVHCAALAPSLLESELFGHEKGAFTGAVTQRKGRFELASGGTLFLDEIGEIDQNIQIKLLRVLQEKKFERVGGEHTVEIDVRIITATNKDLKAEIEKGNFREDLYFRLNVVNINVPPLRERKDDIPLLAAAFLKEFALENGKKIEGINEKARARLYGYDWPGNIRELRNCMESAVVMCQSNAINVGDLPPAFRNAEDDGWINIKLGSNMEECEKIIIRDTLSHCKGNKSKTAETLEIGRKTLLRKLADYGLGGQEEGE

SEQ ID NO: 949 - DNA, 753 bp, Unknown
  Obtained from environmental sample
  misc_feature (1)..(753): n is a, c, g, or t
gtgggacggctttttgagcttccctataacgagcaactttcatttgtgcaaaacctttggggacaggttgacgtaagaacccgtgtcagaaccatgactattgctttttcaaacagctttctaagctttctggcgtccgctttaatggttgccatttttataacttttcttttgatggaggcggcatttttcagggaaaagctggacagggcgttcgagggaaccagagtggttcaaatcaaaaacataatttcagatattatggtacagatcgcccattatctttccaccaaattttttattgcggtagttaacggaattttgattggttcctttctgagaatcatcgggctggaattcgccatgatctggggagtgttccagtttaccgcgaattttatcccgaacataggaagtattgcgataggtcttgcagccactgttttcagcgtaattcagttttggcctaatcctacgccaatggttgcagttggtattgtcatgctggtcgttaatattatttttggttttattttggagcctaaaattatgggcgacagacttggactctccccgctggtcgtgcttatctcccttcttgtatgggggtggatttggggctttgtcggccttatccttgccgtacccatgatggcaattactaaaatcatttgtaaaaacatccccgcattggaaccgatttcaatacttttgggatcgcacaaggctttagtatcaaggagcgaggattga

SEQ ID NO: 950 - protein, 250 aa, Unknown
  Obtained from environmental sample
  DOMAIN (1)...(229): Domain of unknown function DUF20
  misc_feature (1)..(250): Xaa is any amino acid
MGRLFELPYNEQLSFVQNLWGQVDVRTRVRTMTIAFSNSFLSFLASALMVAIFITFLLMEAAFFREKLDRAFEGTRVVQIKNIISDIMVQIAHYLSTKFFIAVVNGILIGSFLRIIGLEFAMIWGVFQFTANFIPNIGSIAIGLAATVFSVIQFWPNPTPMVAVGIVMLVVNIIFGFILEPKIMGDRLGLSPLVVLISLLVWGWIWGFVGLILAVPMMAITKIICKNIPALEPISILLGSHKALVSRSED

SEQ ID NO: 951 - DNA, 336 bp, Unknown
  Obtained from environmental sample
  misc_feature (1)..(336): n is a, c, g, or t
atgaagttgaaagaaaaccaataccgaaggatagaaaaactcctgcccaagcaaagagggaatgtaaaaatagacaacagggtatttctggatgcgattatatatcggtgcaaaaacgggtgttcctggcgcgacctacccaaggactttggaaattggcatgtcatatatatgcggttttcccgttggacgcaaaacggggtgtttgatcgggtatacgcagcgctctctgaagagggattgcggaacgcaacggaatatgggcttgactcaacatcagtaaaagtacatccggacgcgtttggctgtttaaaaaaagcggcaagcaggcaatag

SEQ ID NO: 952 - protein, 111 aa, Unknown
  Obtained from environmental sample
  misc_feature (1)..(111): Xaa is any amino acid
MKLKENQYRRIEKLLPKQRGNVKIDNRVFLDAIIYRCKNGCSWRDLPKDFGNWHVIYMRFSRWTQNGVFDRVYAALSEEGLRNATEYGLDSTSVKVHPDAFGCLKKAASRQ

SEQ ID NO: 953 - DNA, 663 bp, Unknown
  Obtained from environmental sample
  misc_feature (1)..(663): n is a, c, g, or t
gtgcataccgcgcccggtttcggcgaagatgacgcgagagtgcttaaaggaaccggcgtgccggttatttgtccggtagacgccgaatgtaaattcaccgcagaagtttccgattacgcgggactgtttgttaaagacgccgacaaggcaatcatggatcggcttaaggccgaaggcaaattggtcaaacgggaacaagtgttgcacgcctacccccattgctggagatgcggccacccgctcatttaccgcgccgtcggctcgtggtttgtcagcgtggaaaaaataaaacaggatatgttagacgcaaacagccaaatctactgggttcccgaacatatcaaagaaggcagatttggcaaatggctggaaggggcgcgggactgggccatcagccgtaaccgttattggggcaaccccctgccgatatggcgatgccccgattgcggcaaaaccatctgcgtcggcagccgcgccgaattacaagaactttccggcgtatacccccaggacctccacaaacattttgttgatgacattaccattccctgtgataataaagactgtaaaggcactatgcggcggatacccgaagtattggactgctggtttgaatccggcgccatgacctacgcccagaatcattatccctttgagaaataa

SEQ ID NO: 954 - protein, 220 aa, Unknown
  Obtained from environmental sample
  DOMAIN (1)...(220): tRNA synthetases class I (I, L, M and V)
  misc_feature (1)..(220): Xaa is any amino acid
MHTAPGFGEDDARVLKGTGVPVICPVDAECKFTAEVSDYAGLFVKDADKAIMDRLKAEGKLVKREQVLHAYPHCWRCGHPLIYRAVGSWFVSVEKIKQDMLDANSQIYWVPEHIKEGRFGKWLEGARDWAISRNRYWGNPLPIWRCPDCGKTICVGSRAELQELSGVYPQDLHKHFVDDITIPCDNKDCKGTMRRIPEVLDCWFESGAMTYAQNHYPFEK

SEQ ID NO: 955 - DNA, 918 bp, Unknown
  Obtained from environmental sample
  misc_feature (1)..(918): n is a, c, g, or t
ttgagggcgcagctcgccgagtactttcaggcgccgttttgctcattagtaaactccggctcgtcggccaacctcttggcttacatggcgctgacctccccgctccttggcggccgcgcggtggggcgcggcgacgaggtgatcaccgtggccgccggcttccccaccaccgtcgcgccgatagtgcaattcggcgccgtgccggtattcgtggacgtcgccattccgcagtacaacatagacgtagcgcaactcgaaagcgccctctcccccaaaacgaaggcggtgatgctggcgcataccctgggaaacccgtttgaccttaaagcggtgagggatttctgccgcgcccataaactttggcttgtagaggataactgcgacgcgttgggttccgtctataacatagacggggccgcaaaattcaccggcaccgtcggcgacatcggaacctccagcttctacccgccgcaccatcttaccatgggcgaaggcggggcggtctacacctccgacccgttgctgcacaaaatcatccgctccctacgcgactggggccgggactgcgtctgcccgtccggcaaagacaacgtctgcggacgccgcttcgacaggcagtgcggctcactgcccgtagggtatgaccacaaatacgtctacagccatttcgggtacaatctgaaagccacggacatgcaagcggccatcggttgcgcacagttagagaagtttccgtcgtttgtagaaaagcgcaagcataactggcggcgtttgtacgacgggttaaaggatttgtcgaataaactaatcctaccggaagccgcgccggattcagacccttcctggttcggttttctaatcacctgccgagagggggtccgccgcaacgaattactcgtgccgctcggccgaatctga

SEQ ID NO: 956 - protein, 305 aa, Unknown
  Obtained from environmental sample
  DOMAIN (1)...(304): DegT/DnrJ/EryC1/StrS aminotransferase family
  misc_feature (1)..(305): Xaa is any amino acid
MRAQLAEYFQAPFCSLVNSGSSANLLAYMALTSPLLGGRAVGRGDEVITVAAGFPTTVAPIVQFGAVPVFVDVAIPQYNIDVAQLESALSPKTKAVMLAHTLGNPFDLKAVRDFCRAHKLWLVEDNCDALGSVYNIDGAAKFTGTVGDIGTSSFYPPHHLTMGEGGAVYTSDPLLHKIIRSLRDWGRDCVCPSGKDNVCGRRFDRQCGSLPVGYDHKYVYSHFGYNLKATDMQAAIGCAQLEKFPSFVEKRKHNWRRLYDGLKDLSNKLILPEAAPDSDPSWFGFLITCREGVRRNELLVPLGRI

SEQ ID NO: 957 - DNA, 795 bp, Unknown
  Obtained from environmental sample
  misc_feature (1)..(795): n is a, c, g, or t
gtgggcgggcttctccgtcgtgttaatcatctggctaaagggattggaaaaatcgcggaaggaaatttggacgcgaagatagaaggcagttacaatgacgaatttgacataatcaaggacgcggtaaactccatggcggcggatataaaaacatatatggaagaaaaattaaaaacagaacgtaaacttatggaaagccgtatctccatcatgctttcccagatacagccgcattttttatacaacgcccttgccgtcatatcaaggctctgcgataaagatccggcaaaggcaaaaaaagcgacaataagtttttccagttatttaagggcaaatatgaatctgctggaatgcgcggaaccaatcctttttgagaatgaactaaaccataccatatgctttttaaatttggaaaaagccatatacggcgaagcgttaaatataatatatgacatacagacaaaatatttcactcttcccgctcttactttacagcccgttgttgaaaatgctataaaacacggtatcgggaaaagagaaggcggcggtactgttactatttctacgaaaaagacggaagacaattatctggtcattattaaagatgacggcgtgnggtttaatcctgaaaatattgacaatgacggacaacagcacatcggaatcaacaatgtccgcctgaggctgtccgtgcaatgcggcggttcgctggtaataaagagtgagccgggcgtggggacaaccgccccacataatattcccaaaaccggcagtcaggaggcgcggtcaaaatga

SEQ ID NO: 958 - protein, 264 aa, Unknown
  Obtained from environmental sample
  DOMAIN (155)...(256): Histidine kinase-, DNA gyrase B-, and HSP90-like ATPase
  misc_feature (1)..(264): Xaa is any amino acid
MGGLLRRVNHLAKGIGKIAEGNLDAKIEGSYNDEFDIIKDAVNSMAADIKTYMEEKLKTERKLMESRISIMLSQIQPHFLYNALAVISRLCDKDPAKAKKATISFSSYLRANMNLLECAEPILFENELNHTICFLNLEKAIYGEALNIIYDIQTKYFTLPALTLQPVVENAIKHGIGKREGGGTVTISTKKTEDNYLVIIKDDGVXFNPENIDNDGQQHIGINNVRLRLSVQCGGSLVIKSEPGVGTTAPHNIPKTGSQEARSK

SEQ ID NO: 959 - DNA, 903 bp, Unknown
  Obtained from environmental sample
  misc_feature (1)..(903): n is a, c, g, or t
ttgaaccgctggcacatagaatggagccgccgcacagaagcaatgctcgcaaataacaatcgcgactgtcgctttcaacggctttggctaatagattttttcaatgggcttttaggcgaaacaccagaaaggcaaggctctttaaccgcagcttggggtgaaaatcaagagatttgcgagcaacaaggctatgaccccgaacttatggaatattcggctctctaccccatttccgcaacaaaatacacctccaaaaaaacagcaaatatacgcaaaatccaaatttcccccgtgcttcccggcaacgaaagaatgagcagtttgccagttagcgcaactatttttgaattggaaaacccaactaacaaaacacgcgaaataaccattgtgcaaatgcaagacaatctttgcggctacaatgttctaaaagataggcacggggttcaagactcatcttttgttttgcagccaaatgcaaaattccaagaagcccaaagttacgggcaagttcaatctgacggtcgcaacaccattggaattgaattctacacaaaaaaattccaagcagaatcagactgtgcaggcaaaatggcaatggctgccacttggaaccccggaaccattgcgcaagcaagcacaaaaccgatgttctacaaacaagacgatgccgcagttttaaaaggtgcattgctctcaggcagggttagcaaaagttgggtaaaaaatgtttatagcggtcgcgaaacaatggcaggcgtgctttgcgtaaccgttgaacttcccccaaacacaagcgcaagaattcaattctcgctcgctcttgattttccgcttataagaatgaacggcttaaccagcgtaaaaaatacacagaattttacccagacccagacactcgcgtaa

SEQ ID NO: 960 - protein, 300 aa, Unknown
  Obtained from environmental sample
  misc_feature (1)..(300): Xaa is any amino acid
MNRWHIEWSRRTEAMLANNNRDCRFQRLWLIDFFNGLLGETPERQGSLTAAWGENQEICEQQGYDPELMEYSALYPISATKYTSKKTANIRKIQISPVLPGNERMSSLPVSATIFELENPTNKTREITIVQMQDNLCGYNVLKDRHGVQDSSFVLQPNAKFQEAQSYGQVQSDGRNTIGIEFYTKKFQAESDCAGKMAMAATWNPGTIAQASTKPMFYKQDDAAVLKGALLSGRVSKSWVKNVYSGRETMAGVLCVTVELPPNTSARIQFSLALDFPLIRMNGLTSVKNTQNFTQTQTLA

SEQ ID NO: 961 - DNA, 621 bp, Unknown
  Obtained from environmental sample
  misc_feature (1)..(621): n is a, c, g, or t
gtgtacangcggggcatgcttgacgctttgtacngcatgtacattgatcgcttcatgcagcccatggccgagaccgccgcggagccgcgcaagaacggcaaaacgctcgatccggatcagcttgccgatatgtaccgcctgtatgcgggacggctgcggtctttgtccggcgccatgaacggcgtggccgcgcttgaggatctgcgcccacgcgtcggccatatccaggaggcgtcgcaaaaagccgtggccgccaatatgaagtacatggaagaagtgttcaagtttgaccaggcccgcgaaggcaacgaccaggcgctgatcgcaaaaacgcgcgcgtccatggaagccgccgccgatgtctaccaccacgccgcccaggaacatgaccagttgcgcgatgccttgatcgccgccatccgcaaccatcccggcgcccgcagcattggtgaggacaatctgctctatgtggccctgtggatcaaccgccgcctgcaacaatcgccccaagcgcgggaggcctcgctccagggcgcggccctgttccttgatcttgcccagcgctttgagcgcgccgcaaccgcgaagccaactccggcagcatctccggcagcgccttag

SEQ ID NO: 962 - protein, 206 aa, Unknown
  Obtained from environmental sample
  misc_feature (1)..(206): Xaa is any amino acid
MYXRGMLDALYXMYIDRFMQPMAETAAEPRKNGKTLDPDQLADMYRLYAGRLRSLSGAMNGVAALEDLRPRVGHIQEASQKAVAANMKYMEEVFKFDQAREGNDQALIAKTRASMEAAADVYHHAAQEHDQLRDALIAAIRNHPGARSIGEDNLLYVALWINRRLQQSPQAREASLQGAALFLDLAQRFERAATAKPTPAASPAAP

SEQ ID NO: 963 - DNA, 684 bp, Unknown
  Obtained from environmental sample
  misc_feature (1)..(684): n is a, c, g, or t
atggttacagttatttctttaggcggctccatagtcgcgccggataaggttgatgttcaattcttgaaagattttaccgcgcttatccgtacattcctggaagcggattcagacaggcgctttatntttgtcgtaggcggcggcggtcccgcgcgtcactggataaacgcctaccgcgaaataaacgcgcaaagcaaagatgatgaagccgactggattggaataatggcgacgcggcttaacgcgcagttagtaaaggcggcgatgggagagttgtgcgttcaggatgttgttacaaacccgggccatgttgatcctttaacgggccgcgtacttgtcgccgccggctggaaacccggcttttcaacagactacgacgctgttctgctcgccgagcgtttccgggcagacgccgttatcaacctttccaacattgaaaaagtgtacaccgccgatccaaaagccgaccccaacgcccgccccatcgacaaaataacgtgggctgatttccgcgccatggtaggcgacgactggattcccggcaaaaacgtcccatttgatcctgtcgcaagccgccactcggaaaaaatcgggttaaaggttatttgcgcttccgggaaaaatttggaaaatttgaaaaaaatactttccgggaatgaatttgttggcacagtaattttttaa

SEQ ID NO: 964 - protein, 227 aa, Unknown
  Obtained from environmental sample
  DOMAIN (1)...(205): Amino acid kinase family
  misc_feature (1)..(227): Xaa is any amino acid
MVTVISLGGSIVAPDKVDVQFLKDFTALIRTFLEADSDRRFXFVVGGGGPARHWINAYREINAQSKDDEADWIGIMATRLNAQLVKAAMGELCVQDVVTNPGHVDPLTGRVLVAAGWKPGFSTDYDAVLLAERFRADAVINLSNIEKVYTADPKADPNARPIDKITWADFRAMVGDDWIPGKNVPFDPVASRHSEKIGLKVICASGKNLENLKKILSGNEFVGTVIF

SEQ ID NO: 965 - DNA, 555 bp, Unknown
  Obtained from environmental sample
  misc_feature (1)..(555): n is a, c, g, or t
atgattaatgaacagaaactaatctggaaagaagaaagccggaagaaaatatttgactgccgggtgttttctgtccatgaaagcgtctgcagagcgcctaacgatcaaaccgggaaattttcaattatcgaagccgcggactgggccattgtggtgccggtgctggaaacgccgtcgggaaaggaattcctgatggtttggcagtggcggcacggcttgcgtggtttaagccttgagtttcccggcggggtttttgagccgggtgaacagcctgaggaagcggcaggcagggagcttcttgaggagacaggctacagggccgggaaaatccgcaagctgggcgagttcagccccaacccggcgattatgtcaaacaaggtgcatttttttctcgccgaggatcttgtcaacacgggcaggcagggccttgacgcggatgaatttgtggaagtggaactggctgctgttgacgcggtatgcaagggtatgggaaaaccgccttatgtccacgcgcttatgggaacggccctggcgatgtatttaactggggagtag

SEQ ID NO: 966 - protein, 184 aa, Unknown
  Obtained from environmental sample
  DOMAIN (48)...(175): NUDIX domain
  misc_feature (1)..(184): Xaa is any amino acid
MINEQKLIWKEESRKKIFDCRVFSVHESVCRAPNDQTGKFSIIEAADWAIVVPVLETPSGKEFLMVWQWRHGLRGLSLEFPGGVFEPGEQPEEAAGRELLEETGYRAGKIRKLGEFSPNPAIMSNKVHFFLAEDLVNTGRQGLDADEFVEVELAAVDAVCKGMGKPPYVHALMGTALAMYLTGE

SEQ ID NO: 967 - DNA, 603 bp, Unknown
  Obtained from environmental sample
  misc_feature (1)..(603): n is a, c, g, or t
atgggaaagaagagcgcggcttcggccgaagataaggatgtcaaagacagcaaggatagcaaagacggcggcagcaaacagcgcaacgccgccatagagcaagcgctaagccaaatagagaagcagcacggcaagggctcgatcatgcgtttgggcaccgccgcgcaacatacggacattcaggcgatcccgaccggctctatctccctagacacggcgctcggcgtgggcggcttccccaaggggcgaatagtcgagatatacgggccggagtcctccggcaagaccaccgtggcgctccacgctatagccaatgtccagaagcagggcggggtggccgtgctcatagacgccgagtacgctttcgacgccacctacgccaagggcttgggcgtggacgtagacaacctcctagtttcccagcccgacaccggcgagcaggcgctggagatcgccgacacgctggtgcgcagcggcgcgattgacctcatagtcatagacagcgtggccgccctcgtgcccgccgcgagatcgagggcgacatgggcgacaaccacgtgggcctgcaagcccgcctcatgtcgcaagccctgcgcaaactga

SEQ ID NO: 968 - protein, 200 aa, Unknown
  Obtained from environmental sample
  DOMAIN (30)...(200): recA bacterial DNA recombination protein
  misc_feature (1)..(200): Xaa is any amino acid
MGKKSAASAEDKDVKDSKDSKDGGSKQRNAAIEQALSQIEKQHGKGSIMRLGTAAQHTDIQAIPTGSISLDTALGVGGFPKGRIVEIYGPESSGKTTVALHAIANVQKQGGVAVLIDAEYAFDATYAKGLGVDVDNLLVSQPDTGEQALEIADTLVRSGAIDLIVIDSVAALVPAARSRATWATTTWACKPASCRKPCAN

SEQ ID NO: 969 - DNA, 867 bp, Unknown
  Obtained from environmental sample
  misc_feature (1)..(867): n is a, c, g, or t
ttgcccgagaaatttgtcaaagatcgaatcagggatcccagcatgtataaagagtcggcgttaaggctgttgcaaagtcttccgaatagtcctgagaaaagcggttgtgaggagatccagactctgttgaccgaactcggattcgccgtttcaaccgttaagagagataatccgaatcagagcccggctatttttaccgttggcgtcattccgagtcggaagaacgccgagaggtataaacatcccgttgccgaaatgggaaccaatatgggcgacacgcttcgtgttgtggaactattcggcagaatggagccgcgttccatcatagacgccgtgccgaaatcgggttcgcgtcggatgtcgattgtgttgttgaacggttgcctcacccttgcccaacggcggcaactcgcgagattgttcttgaaggacgggaacgcgcaaacaccgttcgtgttggtggattggattcttctgctccatctcgcgcaaaagtataaagacgacaggctcagcgtcatgcttgcctgcgctatgccctataccggttgccagcaactcttttccgcaaacagcgtgatgccggtagcggacgagatgtacataggcaggatggaggagattaggcagattaccgataagaacggtccggtttttgtttacggcggacggcagttgggaaaaacggcggtgctgttgagagccaaaaatgtgtttcacgctccgaaagacggcgcttatggcgtgtatgtggatgtaaaagattgccgcgacgaggtttcgtttgtcaccgcgttgaccgataagattagagaggttgacgccaatttcgtatctgtcaagaccacaataaagcgatggcgataa

SEQ ID NO: 970 - protein, 288 aa, Unknown
  Obtained from environmental sample
  misc_feature (1)..(288): Xaa is any amino acid
MPEKFVKDRIRDPSMYKESALRLLQSLPNSPEKSGCEEIQTLLTELGFAVSTVKRDNPNQSPAIFTVGVIPSRKNAERYKHPVAEMGTNMGDTLRVVELFGRMEPRSIIDAVPKSGSRRMSIVLLNGCLTLAQRRQLARLFLKDGNAQTPFVLVDWILLLHLAQKYKDDRLSVMLACAMPYTGCQQLFSANSVMPVADEMYIGRMEEIRQITDKNGPVFVYGGRQLGKTAVLLRAKNVFHAPKDGAYGVYVDVKDCRDEVSFVTALTDKIREVDANFVSVKTTIKRWR

SEQ ID NO: 971 - DNA, 426 bp, Unknown
  Obtained from environmental sample
  misc_feature (1)..(426): n is a, c, g, or t
gtgtatctccccgacctcagagccgtactgaaccagcctgttgcctcaacccgccggacaagtggcgtggctggcgcttcaatggcctccgcacagggcttgcagctccttcgccgtggttatgtgccatccttcgtgtccgggcccgaaccggttccccttgacgagagagaaagggaaaccgtcgttaagctcaggctgacccgccgtcttgcttcggaaggatacagggaaatcattttaagcataaaccccgatacacttcttataaggcggattgaaggcagaaccatcgcggatgtccttgtacggtttgattttcttaatgttaggactaacgttggcattcctgaactgaggttcgcttacgattcaccggcttcggcaaatctttacaacaattttctttttcgtgaaacagattag

SEQ ID NO: 972 - protein, 141 aa, Unknown
  Obtained from environmental sample
  misc_feature (1)..(141): Xaa is any amino acid
MYLPDLRAVLNQPVASTRRTSGVAGASMASAQGLQLLRRGYVPSFVSGPEPVPLDERERETVVKLRLTRRLASEGYREIILSINPDTLLIRRIEGRTIADVLVRFDFLNVRTNVGIPELRFAYDSPASANLYNNFLFRETD

SEQ ID NO: 973 - DNA, 477 bp, Unknown
  Obtained from environmental sample
  misc_feature (1)..(477): n is a, c, g, or t
gtggaatctctgggtaataagctgaaagaagcaagggaagctaaaggcttaacgttcgactatatcagccgtgatacaaacattacctccaaataccttgaggcccttgaaagggaagattatacgccgtttccaggcgaaccttatgtactgggttttatcagaaactacggtgaataccttggcctggatcccgatgagcttatgtcgctttaccgttccataaaactaagggaacagcccgtaccggtggaacagttgcttaaaaaatcttcttcgcttccaaaaattctcaaggggtttgcaatatgccttgccgcgctggcccttgtgggcggggcaggctattatatttaccgtttgcccaaaaaaaccaatgccccccaacagacggtaaggacagccgctgagtacgtgctgaacaacgattcttttgaacgcaggatgtatccggggggactcaattctggtttttga

SEQ ID NO: 974 - protein, 158 aa, Unknown
  Obtained from environmental sample
  misc_feature (1)..(158): Xaa is any amino acid
MESLGNKLKEAREAKGLTFDYISRDTNITSKYLEALEREDYTPFPGEPYVLGFIRNYGEYLGLDPDELMSLYRSIKLREQPVPVEQLLKKSSSLPKILKGFAICLAALALVGGAGYYIYRLPKKTNAPQQTVRTAAEYVLNNDSFERRMYPGGLNSGF

SEQ ID NO: 975 - DNA, 540 bp, Unknown
  Obtained from environmental sample
  misc_feature (1)..(540): n is a, c, g, or t
atggtcaacgccgcctggatggcttcggtttacgctgccatgctccccagaaacgaaagccccgaagctaccgacggatattacggctattattgccccctttcaattcaagggaatatggaaaatgcggagctggaagtgtttatccgcgactttgacaaaaaggaaggcgaaagaaaaatcgccgcgctggacgccttcgcccgtgcggtggaagcccagtttccaggcggaaaaatcgaggtaaatagcaaagtccagtatttgaacatgaaggaaaaaatctgctcgcacgctgaggtgatagaaaaactgcgccaggcgtttttaaacacccatgttgaaataaaagaaaaacccatccgcggcggcaccgacggctccaggctcaccgagatgggcatacccaccccgaatattttcacaggcggtcgcaactatcacagccgccttgagtggctttctgtcccggaaatggttacctcatgccgccttgtggtggagttaatcaggctttggggcgagcgaggttttaaatag

SEQ ID NO: 976 - protein, 179 aa, Unknown
  Obtained from environmental sample
  misc_feature (1)..(179): Xaa is any amino acid
MVNAAWMASVYAAMLPRNESPEATDGYYGYYCPLSIQGNMENAELEVFIRDFDKKEGERKIAALDAFARAVEAQFPGGKIEVNSKVQYLNMKEKICSHAEVIEKLRQAFLNTHVEIKEKPIRGGTDGSRLTEMGIPTPNIFTGGRNYHSRLEWLSVPEMVTSCRLVVELIRLWGERGFK

SEQ ID NO: 977 - DNA, 735 bp, Unknown
  Obtained from environmental sample
  misc_feature (1)..(735): n is a, c, g, or t
ttggcggaagcgtcgccatacagaaggtttccggcctcttattcaggcttccggtgtaaaatgctgcttcgttccataaacgatccgttaactgcaatccgcggcatcggttctgaaacaataaagggaaacgcctcaaaattcgcgcgtcttggcatacggaatgccgccgatcttttatgccattacccgcgtgactgggaggatcgcagggttaccgtcccaatagccgaattccagcgggcaaatgtatgcacggaagtcaccgtactcgcccatgactggattggttttggctacaaacggagtcccaaagtgtatatcgaagatgaaagcggcagggccgttctgatggggtttaaccgcccctggctcgcgaaaaaaatgccggtcggcggtcgttaccgggtttggggcaaatttgaatataaacgcggtgaattacaatccggcaattttgtttttgaaccttcttccgaagcggggaatttcaacataatgatgccggtttatcccctttgcgccggactcaaacaaactgcgcttcgccgttttacagctaacgctattaaacagtacgccgccatgctggagaacgagcttcccgatgaaatcataatcagggacaaactgctttcaaaagccgaagccgtcagggcctatcattatccgtcttcacccgaagagctagaacaagcaagaaaaacgctgatatatgaggaattgtttatctga

SEQ ID NO: 978 - protein, 244 aa, Unknown
  Obtained from environmental sample
  misc_feature (1)..(244): Xaa is any amino acid
MAEASPYRRFPASYSGFRCKMLLRSINDPLTAIRGIGSETIKGNASKFARLGIRNAADLLCHYPRDWEDRRVTVPIAEFQRANVCTEVTVLAHDWIGFGYKRSPKVYIEDESGRAVLMGFNRPWLAKKMPVGGRYRVWGKFEYKRGELQSGNFVFEPSSEAGNFNIMMPVYPLCAGLKQTALRRFTANAIKQYAAMLENELPDEIIIRDKLLSKAEAVRAYHYPSSPEELEQARKTLIYEELFI

SEQ ID NO: 979 - DNA, 699 bp, Unknown
  Obtained from environmental sample
  misc_feature (1)..(699): n is a, c, g, or t
ttgaataccccgtgcttgaaggaaacaatacctgttcccgaatggaaaaattcgaggattaccgcgatattccccccgtggattgaggccccttcctttacaatcagaaaaccgcctgaaaaaatttatacgcttgaggattatacggcgaatgggcagttaagccgggagcgttatgagattattgtcaataatattaaagaaaataaaaacattatcgtctccggcggcacgggcagcggaaaaacgactcttgttaacgccattatcaaaaaaaaatgcgaattttatcccagacaccgttattacattgtccaggacgtttcggaactgcaatgcgagggcgaatacgccgacatgccgattatccgcagcgaacaggccacccttgccgttttactgtcactgcgttacactcccaatttcatcattttcggcgaagtcaggaaaggcgcggttatggcagaacttctcgatgcgtggaataccgggcatcccggcggggtaacgacgattcacgcgaattcttctgccgcgacaattacgcggataaaaaaactgttactggatcattatacgaacgaatcgagcctgcccgatctgaacgagtatattgacataattatttacatcaaaaaagacagggaaacaggaatcgttgtcgatgaaattctggaaatgaaaaaaagagaacagtga

SEQ ID NO: 980 - protein, 232 aa, Unknown
  Obtained from environmental sample
  DOMAIN (2)...(215): Type II/IV secretion system protein
  misc_feature (1)..(232): Xaa is any amino acid
MNTPCLKETIPVPEWKNSRITAIFPPWIEAPSFTIRKPPEKIYTLEDYTANGQLSRERYEIIVNNIKENKNIIVSGGTGSGKTTLVNAIIKKKCEFYPRHRYYIVQDVSELQCEGEYADMPIIRSEQATLAVLLSLRYTPNFIIFGEVRKGAVMAELLDAWNTGHPGGVTTIHANSSAATITRIKKLLLDHYTNESSLPDLNEYIDIIIYIKKDRETGIVVDEILEMKKREQ

SEQ ID NO: 981 - DNA, 675 bp, Unknown
  Obtained from environmental sample
  misc_feature (1)..(675): n is a, c, g, or t
gtgaagagcatggctgcgaattctatcggtaattgttatatctgtggtgctgcgattagtaagcccgcggcgaaaaaacattttctaaaacattatgaggaaaagaagggcggaatagggtgttctctgattaaagtcgaaggtatgttcgacaaaaaatattggttgtacattgatgtcccggtagaggaaacattggcggaggttgatagctttcttcgacaaatttggctggaatgttgcgggcatatgagcgcgtttttcatccctacacgtcttgaattggatatggaccggagattaagaacctttgaagttggaaccaagtttttccatcattacgatttcgggaccactacagaaacagcccttaccatcatgggaactatgaggcggaaaccgcaaaaagagtcggtcatcctcctggcgcgtaatgtccctccgatttttaaatgcgcggactgcggaaagacggcggcatatattaatcaagaattaatgtatcaatcagataatatgttttattgcgcagaatgtcgtaaaaaatataataacggcatgatactcccgataaccaactcaccccgtatgggtgaatgtgggtattccggtgagtatgatacgtttgcgtttgatccacattcattacttccgacaaaaaaatttttcttataa

SEQ ID NO: 982 - protein, 224 aa, Unknown
  Obtained from environmental sample
  misc_feature (1)..(224): Xaa is any amino acid
MKSMAANSIGNCYICGAAISKPAAKKHFLKHYEEKKGGIGCSLIKVEGMFDKKYWLYIDVPVEETLAEVDSFLRQIWLECCGHMSAFFIPTRLELDMDRRLRTFEVGTKFFHHYDFGTTTETALTIMGTMRRKPQKESVILLARNVPPIFKCADCGKTAAYINQELMYQSDNMFYCAECRKKYNNGMILPITNSPRMGECGYSGEYDTFAFDPHSLLPTKKFFL

SEQ ID NO: 983 - DNA, 807 bp, Unknown
  Obtained from environmental sample
  misc_feature (1)..(807): n is a, c, g, or t
gtgcccgtaacggtggcttattttgaacggctgaaatntcaggcgtccctttcctcgccggcggcggcgataataaacggcgatgacattaacctgagattgcaggcgacttacctttcaggcggaagtctgtccggcgcttcatgggagagcgcgtggtacgatgaaatgtcggtctttcagccaaaatcgcccgagaccaaaggctatatatttgggcccaaccgcgtctgggacagcaagcgcaacatcgcttcagataaaggagtcctaagcggacagggaaccgcgactctcagccaaaaaacaggcggcggcaaaataaccggcgccgcgtatctttatcaggcggaagccagagtaaccgacatcagcaatcagatggtaagcgcctaccgttcggtgatggttcatcctgcggttttttacataggcctgcgccggccggccggcggttttgcgcggaaaggacaggaattatcctacgattatattaccgttaataccgccggtgaaaaaacagcgaataacgggctttttctgcaaaccggagaaaacgcgggtaagttcaaggtggaacttatccgggaagaatggcgccgcgtccagcagcggggagtgaacggttatatttatgacgaatattcaccggaacatgtaatcgagagcgttcagaatatagcgattagaaacggcggcggctcaatcaagataaccccgggcggcgcgggatattataccctgcgggtttccgcgcaggaccgggaaggcagaactgccctgacggaagtactcgtgccgatctga

SEQ ID NO: 984 - protein, 268 aa, Unknown
  Obtained from environmental sample
  misc_feature (1)..(268): Xaa is any amino acid
MPVTVAYFERLKXQASLSSPAAAIINGDDINLRLQATYLSGGSLSGASWESAWYDEMSVFQPKSPETKGYIFGPNRVWDSKRNIASDKGVLSGQGTATLSQKTGGGKITGAAYLYQAEARVTDISNQMVSAYRSVMVHPAVFYIGLRRPAGGFARKGQELSYDYITVNTAGEKTANNGLFLQTGENAGKFKVELIREEWRRVQQRGVNGYIYDEYSPEHVIESVQNIAIRNGGGSIKITPGGAGYYTLRVSAQDREGRTALTEVLVPI

SEQ ID NO: 985 - DNA, 588 bp, Unknown
  Obtained from environmental sample
  misc_feature (1)..(588): n is a, c, g, or t
ttggagaagaaagcttttttctttcaggggtcatcgctattactacctgaagagctgcctttctgcgggatggactgggaaatacccctgaaccatgccgctcattttctgccgtcggaatctgaagtcgagcaagcgactttcacagacggcggattttacagcgtgtcaatcaaaccggaaattccgctgccgccctgctggcaggcgatccctgtacgtcaggccatctccctgctattaggaaatacggcaaacggatatattcaaagcagccgattgttacgggcctttcatataacccaatggcggcaggaatcccgtttctgcggaagctgcggggccaggaacacttgggctcctgacgagctggcccgtctctgccctgcctgcgggcggcgggaatacacgcgcatagccccggcggtcatcactcttattaccatgacgaagataaaatattgcttgcccacacagcaaatccactctagagtatacagctttatgccggattgtcgaaccggagaaaaccttgaggggctgtaccccccaaatctaccaagaggtgagcatagaggtccccaataa

SEQ ID NO: 986 - protein, 195 aa, Unknown
  Obtained from environmental sample
  misc_feature (1)..(195): Xaa is any amino acid
MEKKAFFFQGSSLLLPEELPFCGMDWEIPLNHAAHFLPSESEVEQATFTDGGFYSVSIKPEIPLPPCWQAIPVRQAISLLLGNTANGYIQSSRLLRAFHITQWRQESRFCGSCGARNTWAPDELARLCPACGRREYTRIAPAVITLITMTKIKYCLPTQQIHSRVYSFMPDCRTGENLEGLYPPNLPRGEHRGPQ

SEQ ID NO: 987 - DNA, 924 bp, Unknown
  Obtained from environmental sample
  misc_feature (1)..(924): n is a, c, g, or t
atggccgcttaccttgcggccatgtcggtcaagggtgaaaccattgatgagatcaccgcctcagccgcggggatgcgtaaacattgcattagaatcctgcacgacatggatgtgctggaaattgtcggcaccggcggcgaccggtccaattccttcaatatatccacaacttcggcgatagttgtctccgcggcgggaatcccggtcgcaaagcacggcaacagggccgcttccagtaaaagcggcgcggcggatgtgcttgaaagcctgggggttgacatcatcgtacctccgggaaaaagccttcagttgctgaaaacgattaacctttgttttcttttcgcgcagaattaccatatctcaatgaagtacgtggggccggtgcgaaaggaactggggatcaggacaatttttaatattcttggccccctggtaaatccggcaggcgcgaacatggaactgctgggcgtgtatgacgccgaccttattgaacctatggcaaaggtgctctgtaacctcggggtaaaaagcggcatggtggtgtacggtcaggacgggttagatgaaatttccctcagttctcctacaagcgtctgtgaattgcgcgacggtaatttcaaaagttatacgctggagccggaacagttcggctttaacaggtgcaaaaaagaagaattacagggcggaaccccggcggagaacgcgcagattacccgcgacatacttgcgggcgcaaaagggccgaagcgcgacgcggtattgctcaattccgcggcggccattcacattgcccggcctgaccttgcaatgcaggacgctctcgctcttgccgcgcagacagttgattcaggaaaggcgcaggctcagcttgaacagtttatcaaattgtccccagcccccggaacgatgcatgagtatacttga

SEQ ID NO: 988 - protein, 307 aa, Unknown
  Obtained from environmental sample
  DOMAIN (35)...(287): Glycosyl transferase family, a/b domain
  misc_feature (1)..(307): Xaa is any amino acid
MAAYLAAMSVKGETIDEITASAAGMRKHCIRILHDMDVLEIVGTGGDRSNSFNISTTSAIVVSAAGIPVAKHGNRAASSKSGAADVLESLGVDIIVPPGKSLQLLKTINLCFLFAQNYHISMKYVGPVRKELGIRTIFNILGPLVNPAGANMELLGVYDADLIEPMAKVLCNLGVKSGMVVYGQDGLDEISLSSPTSVCELRDGNFKSYTLEPEQFGFNRCKKEELQGGTPAENAQITRDILAGAKGPKRDAVLLNSAAAIHIARPDLAMQDALALAAQTVDSGKAQAQLEQFIKLSPAPGTMHEYT

SEQ ID NO: 989 - DNA, 375 bp, Unknown
  Obtained from environmental sample
  misc_feature (1)..(375): n is a, c, g, or t
ttgctgatctgcgcccttcttgacgcgcaaacgctggccgaatatatcaaaaccgcggatgaacttaatttgtcatcgttagttgaaattcacaacgaggccgaggcggaacaggctgtccgctccggagctaaaattatcgggattaataaccgcgacctcaaaaatttcaaggttgatcttgccgttaccgcccgtctgcgatccctcattccctcggacattcttaccgtggctgaaagcgggattaagtctcctgaagacatccgcgccataagcggcatcggtattgacgccgtattgataggcgaaagcctgatgcgcgccgcggacaagaagcggttcctggcggagttaaaagccggtgaaaattaa

SEQ ID NO: 990 - protein, 124 aa, Unknown
  Obtained from environmental sample
  DOMAIN (1)...(119): Indole-3-glycerol phosphate synthase
  misc_feature (1)..(124): Xaa is any amino acid
MLICALLDAQTLAEYIKTADELNLSSLVEIHNEAEAEQAVRSGAKIIGINNRDLKNFKVDLAVTARLRSLIPSDILTVAESGIKSPEDIRAISGIGIDAVLIGESLMRAADKKRFLAELKAGEN

SEQ ID NO: 991 - DNA, 603 bp, Unknown
  Obtained from environmental sample
  misc_feature (1)..(603): n is a, c, g, or t
gtggtacttaccaatccccnattcggcggcaaagaaggaaaagaggcgcagaccgcctttgcctataagaccggatcgacgcaggttttattcctacagcacgtcatagacagcctaaaaaagggagggcgttgcggcatcgttttagacgagggtgtcctattccgcacaaacgaaattgctttcgtgcaaaccaagcgaaaactgctcgacgattgcaacgtctacgcgattatcagcctccccggcggcgtattctccgcagccggcgcgggcgttaagacaaacatcctgctgttcgaaaaaggcaagcggacggaacgtatttggtactacgacctatcagacataaaagtaggcaagcgtaccccgttcaccatagacaaattcgacgatttcttccgcctgctacccgaccgcgccgacagcgagcgcagttggtcggtggacaggcaaaccatagagaaaaacggcttcgatatcaaggcggtaaaccccaaccgcaaagtcgaacacgacactagaacaccgtctgagcttatcgcgttgattgaggaaaaacagggcgagattatggcggcacttgctgaattgaagtggtag

SEQ ID NO: 992 - protein, 200 aa, Unknown
  Obtained from environmental sample
  DOMAIN (3)...(173): N-6 DNA Methylase
  misc_feature (1)..(200): Xaa is any amino acid
MVLTNPXFGGKEGKEAQTAFAYKTGSTQVLFLQHVIDSLKKGGRCGIVLDEGVLFRTNEIAFVQTKRKLLDDCNVYAIISLPGGVFSAAGAGVKTNILLFEKGKRTERIWYYDLSDIKVGKRTPFTIDKFDDFFRLLPDRADSERSWSVDRQTIEKNGFDIKAVNPNRKVEHDTRTPSELIALIEEKQGEIMAALAELKW

SEQ ID NO: 993 - DNA, 813 bp, Unknown
  Obtained from environmental sample
  misc_feature (1)..(813): n is a, c, g, or t
ttgaagctggaactgcataaaatcgccgtaaaacgcntaagcttcggcgaggccacccgggtggaaaacggcctgctgaccgtcaaccgggaagaactaaaagccctcataatggaagacccgggcttggccgaggtggaattggacctggcccaccccggcgaagaggtgaggatcatgccggtcaaggacgccctggaaccccgggccaaaatctccggcccggggcaggtctttcccggcttcatcggccccctggatacgaccgtgggcgaaggccaaaccctggtcttggaaggcgcggccgtgctcaccaccggccgcctggtcgccgcccaggagggcattgtcgatatgagcggcccgggagccgactacacgcctttttccaaaaccgccaacctggtcttggtgctgaccccgcgggcgggggtcaagctccatgaggccgaagagtgctgccgcttggccgggctgaaaacagcccactacctggcggccaaatgccaggccgccggggcccgggccgaccgggtggccgtctatgattttccgcccttgagcgaaaccctggcccgccacccgaacctgccccgggtggcctatatctatatgctccagtcccagggcctgctccatgacacctgggtttacggcgtggacgccaaaagaatcctgcccaccctactgagccccacggagatcatggacggggccatagtctcgggcaactgcgtctccgcctgcgacaagaacaacaccttttcccaccagaacaaccccgtcattgaagccctctctcggccgatctga

SEQ ID NO: 994 - protein, 270 aa, Unknown
  Obtained from environmental sample
  misc_feature (1)..(270): Xaa is any amino acid
MKLELHKIAVKRXSFGEATRVENGLLTVNREELKALIMEDPGLAEVELDLAHPGEEVRIMPVKDALEPRAKISGPGQVFPGFIGPLDTTVGEGQTLVLEGAAVLTTGRLVAAQEGIVDMSGPGADYTPFSKTANLVLVLTPRAGVKLHEAEECCRLAGLKTAHYLAAKCQAAGARADRVAVYDFPPLSETLARHPNLPRVAYIYMLQSQGLLHDTWVYGVDAKRILPTLLSPTEIMDGAIVSGNCVSACDKNNTFSHQNNPVIEALSRPI

SEQ ID NO: 995 - DNA, 633 bp, Unknown
  Obtained from environmental sample
  misc_feature (1)..(633): n is a, c, g, or t
atggaagcagcggctgttatctgcgccgcgggcgcgtccgcgcggatgggcggaattaaaaaagaataccaaaagttaaaatcaggccttagcgttcttggttccgcggttttggcgttttcttccgttccgtctatagagttaataataatcgccgtttgcgcggactcgcaagaaacggcgcaggatgcggcgcgggccgctcttccgcctgaaactttatccgcgcaaaggccgaaagtgttatttgtaaacgggggggaaagcaggcgcgcttccgtgtttaacgctcttacgtttctttcgcaattcaacccttgttatgtgctaatccacgacggggcgaggccgtgggtaaccgcggaacttattaacaccgcgttagacggcgtaaaaaaacacggcgccgttattcccctgcttccgctgacggacactccgaaggaatatgattcaagctttattacaagacaccttaaacgcgcgaatacgggaatcgcgcagacgccgcagggcttcaggtttcctgaaattctttacgcccatcaaaaagccgcagaagttaaagatgaggattttaccgacgaccccgaaattttggggaagattttgcgggcctgtggcaataattaa

SEQ ID NO: 996 - protein, 210 aa, Unknown
  Obtained from environmental sample
  DOMAIN (3)...(206): Uncharacterized protein family UPF0007
  misc_feature (1)..(210): Xaa is any amino acid
MEAAAVICAAGASARMGGIKKEYQKLKSGLSVLGSAVLAFSSVPSIELIIIAVCADSQETAQDAARAALPPETLSAQRPKVLFVNGGESRRASVFNALTFLSQFNPCYVLIHDGARPWVTAELINTALDGVKKHGAVIPLLPLTDTPKEYDSSFITRHLKRANTGIAQTPQGFRFPEILYAHQKAAEVKDEDFTDDPEILGKILRACGNN

SEQ ID NO: 997 - DNA, 651 bp, Unknown
  Obtained from environmental sample
  misc_feature (1)..(651): n is a, c, g, or t
ttggaaagcaagggcgcgagcatgttcggcggcaacagggacgatatcatcttgttgccgatggacacggtaatgacgaggcttgccaattcccggaatattgacacgattttaatgagcgtaatcagcaaggagtacatggatgcggcgcagaaagagacggagttgatcctgcgcgaatcacgcaatatccgcgatggggcggacagcgatttcagcattatgaatcaggctgatatgatcgaaatggcgtccgcgacatcaaaaacgctgactacgctgttagccgcaatagcgggcgtttcgcttttggtgggcggcatcggcattatgaacattatgctggtttccgtaaccgaacggacccgcgaaatcggcatccgcatggccgtgggcggacgcaaacgtgacattctttttcaatttctctcggagtcggtcattttaagccttataggcggctttctcggaatcggcgtggcttttctcgcgtgcaggataatgtccgctatggggattcctacgtctataaacccgctgatagtattatcttcggcgttgttcgccgcgttaattggcatagtgtttgggtactaccccgcgctgaaagcggcaaaactgtacccgatagacgcattgagatacgaatga

SEQ ID NO: 998 - protein, 216 aa, Unknown
  Obtained from environmental sample
  DOMAIN (34)...(209): Predicted permease
  misc_feature (1)..(216): Xaa is any amino acid
MESKGASMFGGNRDDIILLPMDTVMTRLANSRNIDTILMSVISKEYMDAAQKETELILRESRNIRDGADSDFSIMNQADMIEMASATSKTLTTLLAAIAGVSLLVGGIGIMNIMLVSVTERTREIGIRMAVGGRKRDILFQFLSESVILSLIGGFLGIGVAFLACRIMSAMGIPTSINPLIVLSSALFAALIGIVFGYYPALKAAKLYPIDALRYE

SEQ ID NO: 999 - DNA, 906 bp, Unknown
  Obtained from environmental sample
  misc_feature (1)..(906): n is a, c, g, or t
atgcagctcgccgcntcattcaaagacatgatagagctcaaccgcgaacaaggacgcctcatagagggcgtggcccacggcgatatatcgcacgacatagtgcccaagagcgacaaagacaaactcagctacgccatagaacacatgcttgagaattccaaaacccaagtatcggtgatggagcgcttagcggacaacgacctgaccgccaccgtcgtccccaggtcggatttggactccatgaacatagcgataaagaagatgctcggcaacctgaacgccgccatgggcgagataaacgacgccgccgccagattcaaagacgtggcccatcaaatttcaagcggctcccaaagcctggccgaacagtctaacgaacaggcgagttccctcgaggaggtgtcgtcgagcctcgaggagacctcctccatgaccaagcagaacgccgaaggttccgacaaggcgaaaggcttggtcgaccaagtgacgtacgatctaagcgaagtgtctatcgccatggaccgcatggccgaggccatacggcagatcaaacggtcgtgcgacaacacagccatgatcgtgaagaccatcgacggcatagccttccaaaccaacctcctcgccctgaacgccgccgtggaggccgcccgcgccggagatgccggcaagggattcgccgtggtggccggcgaggtgcgcaacctcgcgaaacgaagcgcggacgccgccaaaaacaccgccgacctcatagaaacgtcggtaatgcacgccgagagcggcgtggccatcaccaaagaggtggagagagcgctgagccaaagcgtggaacacgccggaaaagtcggcggcctgataaccgaaatcgcgaaagcgtgcaacgaccgaggcgctctcggccgattctga

SEQ ID NO: 1000 - protein, 301 aa, Unknown
  Obtained from environmental sample
  DOMAIN (125)...(301): Methyl-accepting chemotaxis protein (MCP) signaling domain
  misc_feature (1)..(301): Xaa is any amino acid
MQLAASFKDMIELNREQGRLIEGVAHGDISHDIVPKSDKDKLSYAIEHMLENSKTQVSVMERLADNDLTATVVPRSDLDSMNIAIKKMLGNLNAAMGEINDAAARFKDVAHQISSGSQSLAEQSNEQASSLEEVSSSLEETSSMTKQNAEGSDKAKGLVDQVTYDLSEVSIAMDRMAEAIRQIKRSCDNTAMIVKTIDGIAFQTNLLALNAAVEAARAGDAGKGFAVVAGEVRNLAKRSADAAKNTADLIETSVMHAESGVAITKEVERALSQSVEHAGKVGGLITEIAKACNDRGALGRF

SEQ ID NO: 1001 - DNA, 546 bp, Unknown
  Obtained from environmental sample
  misc_feature (1)..(546): n is a, c, g, or t
ttgcacgctttcgcgatttcggttatcaggccgccgacttttccggcgtgttccacgctttggctcagcgctctctccacctctttggtgatggccacgccgctctcggcgtgcattaccgacgtttctatgaggtcggcggtgtttttggcggcgtccgcgcttcgtttcgcgaggttgcgcacctcgccggccaccacggcgaatcccttgccggcatctccggcgcgggcggcctccacggcggcgttcagggcgaggaggttggtttggaaggctatgccgtcgatggtcttcacgatcatggctgtgttgtcgcacgaccgtttgatctgccgtatggcctcggccatgcggtccatggcgatagacacttcgcttagatcgtacgtcacttggtcgaccaagcctttcgccttgtcggaaccttcggcgttctgcttggtcatggaggaggtctcctcgaggctcgacgacacctcctcgagggaactcgcctgttcgttagactgttcggccaggctttgggagccgcttgaaatttga

SEQ ID NO: 1002 - protein, 181 aa, Unknown
  Obtained from environmental sample
  SIGNAL (1)...(32)
  misc_feature (1)..(181): Xaa is any amino acid
MHAFAISVIRPPTFPACSTLWLSALSTSLVMATPLSACITDVSMRSAVFLAASALRFARLRTSPATTANPLPASPARAASTAAFRARRLVWKAMPSMVFTIMAVLSHDRLICRMASAMRSMAIDTSLRSYVTWSTKPFALSEPSAFCLVMEEVSSRLDDTSSRELACSLDCSARLWEPLEI

SEQ ID NO: 1003 - DNA, 534 bp, Unknown
  Obtained from environmental sample
  misc_feature (1)..(534): n is a, c, g, or t
atgagaaataattccattaatgatgtagccattgagccagtcagaggttcgcttacggatcactacgatccacgcgccaaaaaattgcgcctttcagagcctgtatacgcccagacttcaatcgcggcagttggggtagccgcccacgaaaccggccacgctatccagcacgcaaaacattacggccccttagtgctacgaagcaccctggttccggtagcaaacatcggttcctctcttgggccatggctcgccattgcaggattagctatgtcttttgacatcttgctaaacctcggcatccttcttttcgggggcgctgtccttttctacgtaatcaccctgccggtggaattcaacgcctctgccagggctctggcccagctccgaagcggcaacgtgctcacccaggaagaactcagcggcgtaagaaaggttcttaccgccgcagcactaacttacgttgcatcggcactttcggcgattatgaaccttctcaggttggttcttctttcgcgaagccggaaacggtaa

SEQ ID NO: 1004 - protein, 177 aa, Unknown
  Obtained from environmental sample
  DOMAIN (3)...(176): Putative neutral zinc metallopeptidase
  misc_feature (1)..(177): Xaa is any amino acid
MRNNSINDVAIEPVRGSLTDHYDPRAKKLRLSEPVYAQTSIAAVGVAAHETGHAIQHAKHYGPLVLRSTLVPVANIGSSLGPWLAIAGLAMSFDILLNLGILLFGGAVLFYVITLPVEFNASARALAQLRSGNVLTQEELSGVRKVLTAAALTYVASALSAIMNLLRLVLLSRSRKR

SEQ ID NO: 1005 - DNA, 483 bp, Unknown
  Obtained from environmental sample
  misc_feature (1)..(483): n is a, c, g, or t
atgccgataccgatgaggcaaattccggctaaccttttggttcccgggcagtaccaggaaatcgacaactcccttgcgggggcgcagagcgatattaaaaaggcgttgatgataggctacaagcttccgtcctcggaagccgaaagcgggaagccgatcaacgtgcttgaagggtttaaggcccaccagcttttcggctacggcagccctgccgccataatggcggaaaccttcctggcgcttaacaaggtagaggagctgtacgtgctccccatcccggagccggaagcggggaccgcgtggaaaaagcggttcactgtcagcgcgagcaatgccgagccgggagcaatcagcatcaaaataaacggccggctctttgaagcggcggtcgccgccggcgcggacgcgcaggccgttgccgcagccattgccgcccgcgtcaactcagagcttacccttccggttatgcctcggccgatctga

SEQ ID NO: 1006 - protein, 160 aa, Unknown
  Obtained from environmental sample
  misc_feature (1)..(160): Xaa is any amino acid
MPIPMRQIPANLLVPGQYQEIDNSLAGAQSDIKKALMIGYKLPSSEAESGKPINVLEGFKAHQLFGYGSPAAIMAETFLALNKVEELYVLPIPEPEAGTAWKKRFTVSASNAEPGAISIKINGRLFEAAVAAGADAQAVAAAIAARVNSELTLPVMPRPI

SEQ ID NO: 1007 - DNA, 789 bp, Unknown
  Obtained from environmental sample
  misc_feature (1)..(789): n is a, c, g, or t
atgcaggtgctttccggggaacaaaccatatcgcctgttgtcgtcccgcctgtagagatacaggaactgcgcgggctattcacaacctaccgcctttacaggaaacaggccacgcaagccaagaaccgcatacactctttgcttaaggaaaggctgtacggctttacccaggaagagatttttacccaaaggcagcggaaggcgataagggcgcttgagaagggcagcgttatgtctttccagataaaccagctttttgacgggcttgaatttattgaatcccagattgaatcattgcggggcaagataatggagcaagccgagccttttatgaaggagatagagatactgaccagcatgaaggggatcagcgtgttcatagcgatagcgataattgcagacataatcaatgtagggcggtttaggaactccaaggcgtttacctcgtatctgcgctctgcgccaaaggtagcaaattccaatacgtcggtgaatattgggaggactaacaagaaagggcgaaaactgtcgtcaacccttataacccagtcgttaaaccatgtgcttgatgccagcgagaaactgagcgggtggtacatcaggctaagcgaatataaaaaggcagggctggtgaggtgcggcttgcggagaagggtttttgccgagatatatcaaatgcttaagaaaggggaataccattatgggagggaggcagagaagcatgaggccaagatgcgccagtacaagaaatttctcgaaaaaagaaaaaatcttgtgaaagcagcttga

SEQ ID NO: 1008 - protein, 262 aa, Unknown
  Obtained from environmental sample
  DOMAIN (89)...(198): Transposase IS116/IS110/IS902 family
  misc_feature (1)..(262): Xaa is any amino acid
MQVLSGEQTISPVVVPPVEIQELRGLFTTYRLYRKQATQAKNRIHSLLKERLYGFTQEEIFTQRQRKAIRALEKGSVMSFQINQLFDGLEFIESQIESLRGKIMEQAEPFMKEIEILTSMKGISVFIAIAIIADIINVGRFRNSKAFTSYLRSAPKVANSNTSVNIGRTNKKGRKLSSTLITQSLNHVLDASEKLSGWYIRLSEYKKAGLVRCGLRRRVFAEIYQMLKKGEYHYGREAEKHEAKMRQYKKFLEKRKNLVKAA

SEQ ID NO: 1009 - DNA, 528 bp, Unknown
  Obtained from environmental sample
  misc_feature (1)..(528): n is a, c, g, or t
ttgaaaaaagaagcaatcgcggccggggtaaagcggtttatgcccaagcctattttcccgtccaccctgataaacaccattaacagctgttttgaaacagaaccgaaaaaagattccggcaagcagggcggaagcggcgttaatttcaaggggcataccatattggttgcggaagatatggagtttaaccgggaaatcctttccaaatacctggaaaagacaggaatttccatcgactttgccgaaaacggcaaaatcgctttatcaaagtttatcgccaattcacgcaagtacagtctgattctgatggatgttcatatgccggaaatggacggacttgaaactacaagggctattcgcaaacttgatatgccgcgcgcaaagaatatccacatcatcgcgctaaccgcggacgcattcaaggaagatatcgatagattgatgaactccggcatggacgactatctggcaaaaccgattttcccgaaagacatctacgaaaagctaaaaaagcacctgtccaaatga

SEQ ID NO: 1010 - protein, 175 aa, Unknown
  Obtained from environmental sample
  DOMAIN (52)...(170): Response regulator receiver domain
  misc_feature (1)..(175): Xaa is any amino acid
MKKEAIAAGVKRFMPKPIFPSTLINTINSCFETEPKKDSGKQGGSGVNFKGHTILVAEDMEFNREILSKYLEKTGISIDFAENGKIALSKFIANSRKYSLILMDVHMPEMDGLETTRAIRKLDMPRAKNIHIIALTADAFKEDIDRLMNSGMDDYLAKPIFPKDIYEKLKKHLSK

SEQ ID NO: 1011 - DNA, 726 bp, Unknown
  Obtained from environmental sample
  misc_feature (1)..(726): n is a, c, g, or t
atgctttacgatcagaaaattataatcgcggtggatgataaccccgatactctgaccgccatcaaaaacaccctgaaagatatatacggggtatatccatgcccctccgcgtcaaggatgttcgagcttttaaagcacattgagccggatttaatccttttagacgtagaaatgcctgccataaacgggtatgacgcggcaagacaactgaaaaacagcgatgaataccttcatatacccatcatgtttctgacttccctaagcgatccgaaaagtgaaataattggtttaaaccttggcgccgttgattatatccacaaaccttttgtcgccccgctgctccttcagcggataaaaacgcatttgtcccttgcggaacagcaaagagaaattgaaaaactgcttgaggcaaggacacaagaagtcatcctgcgccaggcggcggaactggaagctcggaatgcttcacacgccaagggcgaattcctgtcccacatgagccatgaaatacgttccccgctaaacgccgttatcggtatgataaacatcgcgacagactcagacaatattcaaatgataaagcactaccttgaaagagcggaaaacgcctcanagcatgtactgngcattattaacgatattcttgatatgtccaaaattgaagcgaacaaacttgagctttcatttggtgaatttgattttgaaaaatgcttatgggtattataa

SEQ ID NO: 1012 - protein, 241 aa, Unknown
  Obtained from environmental sample
  DOMAIN (158)...(223): His Kinase A (phosphoacceptor) domain
  misc_feature (1)..(241): Xaa is any amino acid
MLYDQKIIIAVDDNPDTLTAIKNTLKDIYGVYPCPSASRMFELLKHIEPDLILLDVEMPAINGYDAARQLKNSDEYLHIPIMFLTSLSDPKSEIIGLNLGAVDYIHKPFVAPLLLQRIKTHLSLAEQQREIEKLLEARTQEVILRQAAELEARNASHAKGEFLSHMSHEIRSPLNAVIGMINIATDSDNIQMIKHYLERAENASXHVLXIINDILDMSKIEANKLELSFGEFDFEKCLWVL

SEQ ID NO: 1013 - DNA, 630 bp, Unknown
  Obtained from environmental sample
  misc_feature (1)..(630): n is a, c, g, or t
atgggtgtgagaggcgaaatattttcaaatagggtaatcctgcctaataggacatatttttttaacataaaagagaatcgcatgggggatctataccttaacattgtagagagtaaaaaccgcgacaatggcggttttgagcgccagtctgtaattttatttgccgatgatttacaggaattcctgaaaggttttgatgagtcacttaaggtgcttgaaaagacagtgcgtgataaacggcatccaaagccaaagcgcggcgaggaagacactggcaatgacatgcggcgttcaccaaggcgcggagcggaagattccggtaacgtgcggcattcaccaaggcgcggagcggaagattccggtaacatgcggtattcaacaaagcgtggtgcggaagacgccggtaacacaaggcacaatgacgcgagatacggcggaaagaaccggcaaggaaaaagacgagaagacggggataatcggcggaaaaaagaccgaccggactattcttcttccggagataaatacgccaaaagacaaaggccgcagcgtgaattcgaccgtaaacctgattttggacagaacgacaagcctggcggaaacaagagaatagtggttaaaaagaaatggtag

SEQ ID NO: 1014 - protein, 209 aa, Unknown
  Obtained from environmental sample
  misc_feature (1)..(209): Xaa is any amino acid
MGVRGEIFSNRVILPNRTYFFNIKENRMGDLYLNIVESKNRDNGGFERQSVILFADDLQEFLKGFDESLKVLEKTVRDKRHPKPKRGEEDTGNDMRRSPRRGAEDSGNVRHSPRRGAEDSGNMRYSTKRGAEDAGNTRHNDARYGGKNRQGKRREDGDNRRKKDRPDYSSSGDKYAKRQRPQREFDRKPDFGQNDKPGGNKRIVVKKKW

SEQ ID NO: 1015 - DNA, 558 bp, Unknown
  Obtained from environmental sample
  misc_feature (1)..(558): n is a, c, g, or t
ttgggcggcttcaaggcgcttcctttcccgtacatcagtcaggaagtggaaatgcagggaaaagtaaccgacggtttcgcaggttccatgcagttgcgcaaatgcatgagaccccgcactctttccactaaacccggccgtcatcaagggcttggacttgacacctacacgcaagttacaagccctctgcgccgttataccgatttactcgcccacattcaaataagaaattttctgcgcggcggcaaacctctttcttccgacgatgtttcggcgaggctgggtttcagcgaagccgcggcgtccgcttccgttcatgcggagagggcgagcgacaaccactggaagatggtttatttatccgacaaaaaagactccgtatgggacgccgtagcattggaaaacaaaggaagccgctgggcggtaattatcccctcgctcgcccttgaagcgcaagttcccctgcaaagagaagtgtcgcctaacgacaacgttaaattgatattgaaatccgtaaacattcccagaggcgaagccgtgtttgtacagcgcgggtga

SEQ ID NO: 1016 - protein, 185 aa, Unknown
  Obtained from environmental sample
  misc_feature (1)..(185): Xaa is any amino acid
MGGFKALPFPYISQEVEMQGKVTDGFAGSMQLRKCMRPRTLSTKPGRHQGLGLDTYTQVTSPLRRYTDLLAHIQIRNFLRGGKPLSSDDVSARLGFSEAAASASVHAERASDNHWKMVYLSDKKDSVWDAVALENKGSRWAVIIPSLALEAQVPLQREVSPNDNVKLILKSVNIPRGEAVFVQRG

SEQ ID NO: 1017 - DNA, 474 bp, Unknown
  Obtained from environmental sample
  misc_feature (1)..(474): n is a, c, g, or t
gtgtctctttcgcttcctgaagaagatatttacagccattcaaaaagctggatagaggatcgcatcgccctcatgtacggcggttggctggcggaaaaacttttctacggcgagactactaccggaacgaaaaatgacattcaacaggcgactgaaatggcgcgtaacatggtttgcgaatggggcatggcagaaggtatagggcctgtcgcctatgggcaggaagatgaacctatatttctgggcaaagaaatcgcaaggcacaaggattactccgaagatactgctcagcgtatagacagggcggtgatggatattcttgaacgcgccagaaataacgcatcgcaaattttggaaggtcataaaacagaagtggaaaaacttgccgacgctctgcttgcacgcgaaacattggtagacgacgaagtaagggaaatcttaggtcttggtcctaaagggagtcctgaattatga

SEQ ID NO: 1018 - protein, 157 aa, Unknown
  Obtained from environmental sample
  DOMAIN (2)...(146): Peptidase family M41
  misc_feature (1)..(157): Xaa is any amino acid
MSLSLPEEDIYSHSKSWIEDRIALMYGGWLAEKLFYGETTTGTKNDIQQATEMARNMVCEWGMAEGIGPVAYGQEDEPIFLGKEIARHKDYSEDTAQRIDRAVMDILERARNNASQILEGHKTEVEKLADALLARETLVDDEVREILGLGPKGSPEL

SEQ ID NO: 1019 - DNA, 738 bp, Unknown
  Obtained from environmental sample
  misc_feature (1)..(738): n is a, c, g, or t
ttgctgcacatccccacgcgtgtagtggctgcacggagttatctggtcgcaaagtatcaggctttttccntgctgcacatactggccagcggcgagaaggaattcatcaccccccttcgcaagattattttaacgataatccatacccttatggccgaagaagtatatttttcctgccttgatgatcccgaattttcacaggacataaaactaaatctggcaaatgatcttatcatgctttgggacagcggcacggatccccgtacagtaaggcacttgcctgcccttaataccctttggactgcccgtgactcctctccccccgcttttgggacaatgaacgctacaagcgagcttttgcggctttccatagacatgggagaagactggcatgatttcctaatcgcaaatgtttcaataaaagaaacccgttgggctcttgaggaatttcttttcggcctttcttacgaagaaataaattcggtacgatcgcgcctcttgaaattcggcattaatgccgtcagccgcgacgagataccttcctttctcggaagccgtccagcttacggaataataaacagctcagattaccgcgcgatgtatgatttttacgttgaccgccgcgatgcggcgcggctgcgccagaaactttccgttcaaggccctgaccgcacccttgaagagatatacatcaaataccgcatagccatggaaaataattctcttgctattgattaa

SEQ ID NO: 1020 - protein, 245 aa, Unknown
  Obtained from environmental sample
  misc_feature (1)..(245): Xaa is any amino acid
MLHIPTRVVAARSYLVAKYQAFSXLHILASGEKEFITPLRKIILTIIHTLMAEEVYFSCLDDPEFSQDIKLNLANDLIMLWDSGTDPRTVRHLPALNTLWTARDSSPPAFGTMNATSELLRLSIDMGEDWHDFLIANVSIKETRWALEEFLFGLSYEEINSVRSRLLKFGINAVSRDEIPSFLGSRPAYGIINSSDYRAMYDFYVDRRDAARLRQKLSVQGPDRTLEEIYIKYRIAMENNSLAID

SEQ ID NO: 1021 - DNA, 858 bp, Unknown
  Obtained from environmental sample
  misc_feature (1)..(858): n is a, c, g, or t
atggcgggtagttttttatctaaagatatcagcgtccccgattctctgttccatatcggcaatatttccataaatattcttcccattgtaatgacgctgattaattgcgcggcgggagccgtttatacccaaaacctttccgcccgcgataaaatacaggtatacggaatggcggctgtttttttaatattgctttataattcacccgcggcgcttgttttttactggacgcttaacaatgttttttcgcttgttaaaaatattttttataaaataaaagacccgttaagagttttatatataattatgtgcgctgctttttcgctgtttattttatatgtattatttgtcataaggaaacgtcaatttagcctcaggcttctgattgtatttattgtatcgcttttttattttctgccgttatttcttaaaggttttgattacctgtataaacatattctttttaaattatttcaaaacagaaaaaatatgattatccttttattgctttcatgcttttcgctgttcctgcttgcggggttttttatcccatcatccgttatcgcgtcttcgcctgatgaattctgttatatcgaaaatcacgcttctccctttacctatatcattcatgctcatttattcttttttgggctttttgttctttggcctgtaagtatcttttttctgttttcagataaagtaaaatcatgtttggtttctatgcttgcttctcttgcgttgatattttcagtttatacggttgttttcagcggaaattacggtacaatcaataatatttttacatttaatacaaccggcgtattaaaacaggctctattcaggctgttttttcaataa

SEQ ID NO: 1022 - protein, 285 aa, Unknown
  Obtained from environmental sample
  misc_feature (1)..(285): Xaa is any amino acid
MAGSFLSKDISVPDSLFHIGNISINILPIVMTLINCAAGAVYTQNLSARDKIQVYGMAAVFLILLYNSPAALVFYWTLNNVFSLVKNIFYKIKDPLRVLYIIMCAAFSLFILYVLFVIRKRQFSLRLLIVFIVSLFYFLPLFLKGFDYLYKHILFKLFQNRKNMIILLLLSCFSLFLLAGFFIPSSVIASSPDEFCYIENHASPFTYIIHAHLFFFGLFVLWPVSIFFLFSDKVKSCLVSMLASLALIFSVYTVVFSGNYGTINNIFTFNTTGVLKQALFRLFFQ

SEQ ID NO: 1023 - DNA, 558 bp, Unknown
  Obtained from environmental sample
  misc_feature (1)..(558): n is a, c, g, or t
atgttggcggaacgcttaaaaaatacggaaaaacctgtattttaccccacttttgagcctacggatgggcaaattggtaaattaattcgttccgcattgaaaaaagaattgattctgaagcctcagaccctcgccatgcttttcgccgcagatagaaatgaacatttaaatagtcaggacggcattctagcacgtgtaaaccgaggtgaattggttgtaagcgacaggtttgttctgtcttctcttgtttatcagggtatagagtgcggcaatgaattacctagcgtccttaattccctctttaccgccccagaattgacaattttccttgatgttgacccaaaaatagccataaacagaatgagtaagcgcggctctttggaaatatacgaataccttgagtttcaggaaaaagtacgacaaaaatacaaatctgccattgaagattatagaaaaaatggggcaagggttgaggtaatagattcgtcaaaaaccattgaggaagttgccgatcaggtatggagcatacttcttgggttgccgatattcaatatatag

SEQ ID NO: 1024 - protein, 185 aa, Unknown
  Obtained from environmental sample
  DOMAIN (2)...(173): Thymidylate kinase
  misc_feature (1)..(185): Xaa is any amino acid
MLAERLKNTEKPVFYPTFEPTDGQIGKLIRSALKKELILKPQTLAMLFAADRNEHLNSQDGILARVNRGELVVSDRFVLSSLVYQGIECGNELPSVLNSLFTAPELTIFLDVDPKIAINRMSKRGSLEIYEYLEFQEKVRQKYKSAIEDYRKNGARVEVIDSSKTIEEVADQVWSILLGLPIFNI

SEQ ID NO: 1025 - DNA, 396 bp, Unknown
  Obtained from environmental sample
  misc_feature (1)..(396): n is a, c, g, or t
atggagcatacttcttgggttgccgatattcaatatatagtgaaaacgatctttaaaataacggccgtcctcgttttgctaactgccgcgattcccgtaaacgggtattttgtaacctacaaggagcaatattacaggcttttccatctgcattatattcaatatcccgacgacactatggaaaatatctactggcttgaacaggcggtaaaagctgattttgccaatccgttatatgcccttgccctaatcgaaaatgaaacccaatgggaaaaataccgttacctttttttcatgcatcttaacataaaattgatagagcaatatttattattgggcataaatggaacaacgaagagcctatttttancacgcccctggcgggatcaaacatag

SEQ ID NO: 1026 - protein, 131 aa, Unknown
  Obtained from environmental sample
  misc_feature (1)..(131): Xaa is any amino acid
MEHTSWVADIQYIVKTIFKITAVLVLLTAAIPVNGYFVTYKEQYYRLFHLHYIQYPDDTMENIYWLEQAVKADFANPLYALALIENETQWEKYRYLFFMHLNIKLIEQYLLLGINGTTKSLFLXRPWRDQT

SEQ ID NO: 1027 - DNA, 690 bp, Unknown
  Obtained from environmental sample
  misc_feature (1)..(690): n is a, c, g, or t
ttggagcttgagattttgaaaaagaaaatcggcaaaaacaggcaactgacgcttgacattatgtggaatttgctccgcgttaatgttgagcaattttgcggcattgagcacgaggaatttccctgcgagattgcgaaagtcggtatgtggcttatagaccaccagatgaatttggaagcatcggacttgttcggttgctattacgcccgtctgccgcttacgcaaagtgcgaagattgtgtgtgggaacgccttgcgagttgattgggagagcgttgtaccgaaaggcgaattgagctatatacttggcaatccgccgtttgtgggcgcaaggcttatgtcttctgaacaaaaggaagatatgctgaatatatttgggacaaaattcaacggggttggaaatttagattatgttactgcttggtataaaagagccgctggttatgcttttggcacagatataaaatgtgcttttgtttccacgaattctatttgccaaggcgagcaggctgctttgctgtggaagccgctttttgaggaatgcaatgtgaggataaattttgcttataagtcttttatttggaataatgaggctaaaggcaaggcggcggttcattgcgtgattgtgggatttaacgctccgccctggcggcggcacacccccgtcagcttcgctgccacccccgcctag

SEQ ID NO: 1028 - protein, 229 aa, Unknown
  Obtained from environmental sample
  misc_feature (1)..(229): Xaa is any amino acid
MELEILKKKIGKNRQLTLDIMWNLLRVNVEQFCGIEHEEFPCEIAKVGMWLIDHQMNLEASDLFGCYYARLPLTQSAKIVCGNALRVDWESVVPKGELSYILGNPPFVGARLMSSEQKEDMLNIFGTKFNGVGNLDYVTAWYKRAAGYAFGTDIKCAFVSTNSICQGEQAALLWKPLFEECNVRINFAYKSFIWNNEAKGKAAVHCVIVGFNAPPWRRHTPVSFAATPA

SEQ ID NO: 1029 - DNA, 570 bp, Unknown
  Obtained from environmental sample
  misc_feature (1)..(570): n is a, c, g, or t
gtgggcataggccccggctcaatctgtacaacccgcgttgtcgccggcgcggggatgccccagttcaccgctgtctgggactgcgcggaggaagcggcaaaggacgggataccggtcatcgccgacgggggcatcaagttctccggggacatccccaaggccataggcgccggggccgacgtggtgatgataggcaatcttttcgccgggctaaaggaagcgccgggcgaggaaatcctttttgacggcaggatatacaaggagtaccgaggcatgggcagcctcggtgctatccacgacggctctgcggatcgctaccaggccagcaaagacgaatcaccagtgcctgaaggcattgaagggcggcttccttatagaggcgagttaagggaattcgtttatcagctaatttcaggactcagaaaaggcatgggttactgcggttgcaaaagcatcgcggagctgaagcaatatcgcaagtttgtcagaataacctcgtcgggcatcagagaaagccacccgcatgacatcgtcattacccaggatgcgccaaactattccagggcttaa

SEQ ID NO: 1030 - protein, 189 aa, Unknown
  Obtained from environmental sample
  DOMAIN (1)...(175): IMP dehydrogenase / GMP reductase domain
  misc_feature (1)..(189): Xaa is any amino acid
MGIGPGSICTTRVVAGAGMPQFTAVWDCAEEAAKDGIPVIADGGIKFSGDIPKAIGAGADVVMIGNLFAGLKEAPGEEILFDGRIYKEYRGMGSLGAIHDGSADRYQASKDESPVPEGIEGRLPYRGELREFVYQLISGLRKGMGYCGCKSIAELKQYRKFVRITSSGIRESHPHDIVITQDAPNYSRA

SEQ ID NO: 1031 - DNA, 474 bp, Unknown
  Obtained from environmental sample
  misc_feature (1)..(474): n is a, c, g, or t
atgaaaaacgcggttagaaccagctctgaaaaacaggaagatatacttcaaatttactttaaccagataaaggcatatccgcttttggaacctgaagaggagcttgtgcttgcccgtcttatccagcagggaaatcagaatgctctgcataaattgataagggccaatttgcggctggtgattaaaattgcccgcccttatgtagcgccggacattccttttatggacattatccaggaaggaaacatgggcctgatgcacgccgctgaaaaattcgaccctgaaaaaagactccgtttttgtacctatgcgggctggtgggttcgccaattcattattcgttacctgaccaacaagcgccgtgtcgtccggttgccccaccgtaaagaagagattctccgcagaattcagcacacataccataccctcagtcaaaccctatgcaccaccccggacagcggaacatgccagtga

SEQ ID NO: 1032 - protein, 157 aa, Unknown
  Obtained from environmental sample
  DOMAIN (13)...(50): Sigma-70 factor, region 1.2
  misc_feature (1)..(157): Xaa is any amino acid
MKNAVRTSSEKQEDILQIYFNQIKAYPLLEPEEELVLARLIQQGNQNALHKLIRANLRLVIKIARPYVAPDIPFMDIIQEGNMGLMHAAEKFDPEKRLRFCTYAGWWVRQFIIRYLTNKRRVVRLPHRKEEILRRIQHTYHTLSQTLCTTPDSGTCQ

SEQ ID NO: 1033 - DNA, 672 bp, Unknown
  Obtained from environmental sample
  misc_feature (1)..(672): n is a, c, g, or t
atggttctctgcatgacaagccgccaatcgcccccgttcaggccccgttttcttgaccgcgttctgctgcaggccgactccgcggggataacggcactcattgtctgcaataaaattgatcttgacacagatggttacactgacgacaggctggatgccgacgaacgcctggaagatttcaggcgtatcggttttgaagttatttttatttccacaaaaacaggggaggggattgatgatctgcgccgccgccttgaggggaagcgttccgttttgattggacagtcgggcgttggaaagtcgagccttattaacgcgctgttgccggagataaaccttagaaccggggcgattaacgagaaatatgaccgcggcaaccacacaaccacgttatctgccatggtggagattaacaacgacacatggataatcgacacgccgggcatacgccgctttattccgaacgggatcaacgcggatgaactgatcctgcacatgagggaatttgcccctcttgccggaaagtgcagttttggcctttcctgctcccaccgcagcgaaccgggatgcaagataatggaagccgtccacgccggcgtaatccacgaggatcgctacaacagcttcctgcgtatccacgatgaactatcaggcaagaacaatgatgactga

SEQ ID NO: 1034 - protein, 223 aa, Unknown
  Obtained from environmental sample
  DOMAIN (88)...(194): GTPase of unknown function
  misc_feature (1)..(223): Xaa is any amino acid
MVLCMTSRQSPPFRPRFLDRVLLQADSAGITALIVCNKIDLDTDGYTDDRLDADERLEDFRRIGFEVIFISTKTGEGIDDLRRRLEGKRSVLIGQSGVGKSSLINALLPEINLRTGAINEKYDRGNHTTTLSAMVEINNDTWIIDTPGIRRFIPNGINADELILHMREFAPLAGKCSFGLSCSHRSEPGCKIMEAVHAGVIHEDRYNSFLRIHDELSGKNNDD

SEQ ID NO: 1035 - DNA, 360 bp, Unknown
  Obtained from environmental sample
  misc_feature (1)..(360): n is a, c, g, or t
ttggtgaacttggaactcccttgccgccccgactccctgatgggcgggcattttgtgatggggcatatagatagcacggcggtggtaaaggaaattgcaaaaagagaaaccggcatggaagtggatttggaaattccagaaaatctctccaaatatgttatccacagaggctcaatagcgctgaacggaataagcctaaccgtagccgagttacctaaaaaaaatacaatcagagtagccattattccagagacaataaaggttacaaacatcggcagctggcaacccggcagcttggtaaatgtagaagtggatatgatggctaagtatattgaaaatttgatttctgcgagacaataa

SEQ ID NO: 1036 - protein, 119 aa, Unknown
  Obtained from environmental sample
  DOMAIN (20)...(105): Lumazine binding domain
  misc_feature (1)..(119): Xaa is any amino acid
MVNLELPCRPDSLMGGHFVMGHIDSTAVVKEIAKRETGMEVDLEIPENLSKYVIHRGSIALNGISLTVAELPKKNTIRVAIIPETIKVTNIGSWQPGSLVNVEVDMMAKYIENLISARQ

SEQ ID NO: 1037 - DNA, 732 bp, Unknown
  Obtained from environmental sample
  misc_feature (1)..(732): n is a, c, g, or t
gtgaaatttttaaccccangcctttttaccgccgcccatccatccctgccattcgggactattttaacgatcaccaacaagcaaaatatgaaacaagttgcggtcagggtaaatgaccgtgggccttttgtctccgccagaattatcgatttatcaatggcggcggcggaagccttggacatgataagtaccgggactgccccagtgatcgttgaaaaagctctgaatatcgctttggggcctgtattggggccggcttcgactattgcggcggctgcggcaaataatgatttagaggttcccgtcgaatctgaaacagaagagctcataaagcaaaagccaagagctcaacctgcccaggagcccttaaccaagctggaaattataaacgtcccgcctgattcaccaatggttcaggaatccttcaatacgactgcgccgatggcgcaggaattttacaacgcgcccgcagcaaaaattgtaggcggcattcctccggcaggaagctccaaatcttaccgcttacaggtaggggccttcacagttccgcgaaatgcgcttaacgcgttcgacaagttgaaaaaagcaggtttaaatcccgcttacgagcaaaacggtgaattctaccgtgttgtgcttgcgggactaaaagctagtgagatacaggcaatagcgcaaatacttgcaaataacggttttccggaagcaataatcagggaagaagccaattaa

SEQ ID NO: 1038 - protein, 243 aa, Unknown
  Obtained from environmental sample
  DOMAIN (169)...(239): Sporulation related domain
  misc_feature (1)..(243): Xaa is any amino acid
MKFLTPXLFTAAHPSLPFGTILTITNKQNMKQVAVRVNDRGPFVSARIIDLSMAAAEALDMISTGTAPVIVEKALNIALGPVLGPASTIAAAAANNDLEVPVESETEELIKQKPRAQPAQEPLTKLEIINVPPDSPMVQESFNTTAPMAQEFYNAPAAKIVGGIPPAGSSKSYRLQVGAFTVPRNALNAFDKLKKAGLNPAYEQNGEFYRVVLAGLKASEIQAIAQILANNGFPEAIIREEAN

SEQ ID NO: 1039 - DNA, 324 bp, Unknown
  Obtained from environmental sample
  misc_feature (1)..(324): n is a, c, g, or t
gtgtcaggcgaagtagcttgcagcaggcctgggcaaaccagtacagaagttntaggacaaattgaactagccagattcataaatccagctggtttaatagcagaaggcggcagcgttttccgccagagcgacgccagcggcgcaccgatagtaggcattccaggcgaggaaaattttggcaacctaagaaaccaattcttagaaagctcaaacgttcaaatggtagaagaaatggtaaacatgatagtagcccagcgagcctacgaaataagttctaaagccataaccaccagcgatgagatgctgcaaacggcgaatagttga

SEQ ID NO: 1040 - protein, 107 aa, Unknown
  Obtained from environmental sample
  DOMAIN (70)...(107): Domain of unknown function (DUF1078)
  misc_feature (1)..(107): Xaa is any amino acid
MSGEVACSRPGQTSTEVXGQIELARFINPAGLIAEGGSVFRQSDASGAPIVGIPGEENFGNLRNQFLESSNVQMVEEMVNMIVAQRAYEISSKAITTSDEMLQTANS

SEQ ID NO: 1041 - DNA, 810 bp, Unknown
  Obtained from environmental sample
  misc_feature (1)..(810): n is a, c, g, or t
ttgacgcaatgcgaaaaacgcttctcggcgtccggggattcctcggaaattagtaccgtcaatgcacggacatcaaactctctaccggtatcaacgcaactgggagagatgttgcggacggggctcgattacggcgatacgctcggcggatcgtttgacatcaccgtgctatccctaaaggagctctgggacctctgcgagcaatgcaacagcgacgccccgatacccgattcctcggcggtgtccgccgcgctcaaatcggtcaactacaaaaaggtcaggataaatgacgccggcgacagcctcttcttcgaatccccggagacccgtatcgacgtcggcgggatcgcgaaggggtttgttatagagtggcttggcgcgttgatgagggataacggcgtggacggctttctgatctcggccggcggcgacatcatctcctccggctgcaagcccgacggctcaccttggcgcgtaggcgtccgacacccgcgcaatccggcggaactggtcgccacgataccgcttcagtccggcgttgtgttcactagcggcgactacgaacgcgtacgggtaacggacgacggccgccgctaccaccacatctttgacccggcaagcggctttccgtgcggcaagaaccagagcataacgataagggcggcggatccggtaagggcggacatactctccacggggctattctgccgggaggctgaggagataatgcgtttcgtgaacacgcggacggacctggaatgcctcgtcgttgattcggcgggtgggatatttcggtcttccgggtggtga

SEQ ID NO: 1042 - protein, 269 aa, Unknown
  Obtained from environmental sample
  DOMAIN (1)...(260): ApbE family
  misc_feature (1)..(269): Xaa is any amino acid
MTQCEKRFSASGDSSEISTVNARTSNSLPVSTQLGEMLRTGLDYGDTLGGSFDITVLSLKELWDLCEQCNSDAPIPDSSAVSAALKSVNYKKVRINDAGDSLFFESPETRIDVGGIAKGFVIEWLGALMRDNGVDGFLISAGGDIISSGCKPDGSPWRVGVRHPRNPAELVATIPLQSGVVFTSGDYERVRVTDDGRRYHHIFDPASGFPCGKNQSITIRAADPVRADILSTGLFCREAEEIMRFVNTRTDLECLVVDSAGGIFRSSGW

SEQ ID NO: 1043 - DNA, 531 bp, Unknown
  Obtained from environmental sample
  misc_feature (1)..(531): n is a, c, g, or t
atggaggactccgttttccacaaaccggaacctctaaaaacggcggaattcttcggcaaaaaattcttcaaacgcgaaatcgacacgaaacgcgggctcctgaccatcagcgtaaagagccgcgactcgctcttcacgtcaaaggtcatagagggttgcttagaacacctcaaccgatacatccaaacttccgtccagaaagacgcgaaagacaacgtggacttcttggaaaagcaactgataaccattgccgacccgctgctgcgcgaaaagttgcaggggatgatcgctctggagatcgagaaggctatgatcatcagcaaagaggcctttaaggtgatcgacaaaccactgtgcgtcaagcggtacagggaacggttgacatacccgctgattgcggcgtccgggatgttcatgttgtctgtgacggcaatcttattcctatattatatattcgggctggggaacgtaaccggagagagtaagaagtgggtggaattgatacgtaaggagattttcaagattgtgtga

SEQ ID NO: 1044 - protein, 176 aa, Unknown
  Obtained from environmental sample
  misc_feature (1)..(176): Xaa is any amino acid
MEDSVFHKPEPLKTAEFFGKKFFKREIDTKRGLLTISVKSRDSLFTSKVIEGCLEHLNRYIQTSVQKDAKDNVDFLEKQLITIADPLLREKLQGMIALEIEKAMIISKEAFKVIDKPLCVKRYRERLTYPLIAASGMFMLSVTAILFLYYIFGLGNVTGESKKWVELIRKEIFKIV

SEQ ID NO: 1045 - DNA, 804 bp, Unknown
  Obtained from environmental sample
  misc_feature (1)..(804): n is a, c, g, or t
gtggatacttcccgcattgtccggggcggcaacagggtaggaatttactttcttgaaaagggagcgtcgcagaggccatccaaagtgatctatgaccgcgcccattctgcaatagccgaagccgaacaaaaagactttgactggaagcgcatttttgagggggcctcgtggttccactttaccggcatcagcccggcaatttctgacaacgcagccgccattaccgccgatgcctgcaaagccgccaaagaagcaggacttacggtgtcctgcgatcttaactaccggaaaaatctctggccgcgcgaaaaagcgggaaaggtgatgtcaggcttgatgcagtatgtggatctctgtatcgccaacgaggaagacgcctcggatgttttcgggattcgcgccgaagacacggatgtttcgtccggaaaaattagtgccgccggttacgagaatgtagccagggcattgacggagcgattcaaatttaagcaggttgcaatcaccctgcgtgaatccatttccgccgacgataacaactgggccgcaatgctctattcggacggcaaagcgtatttttcaaaaaaatacgcagttcacatcgtagaccgtgtcggaggcggcgacagttttagcgcaggtcttatttacggactgatgcagaaacagcctctacaagaaagcctggaattcgccgtggccgcaagctgcttaaaacattccatcgaaggngattttaaccaggtttcgacagacgaggtaaaaaagctcgcctcaggcgatgcctcagggagagtgcagcgctaa

SEQ ID NO: 1046 - protein, 267 aa, Unknown
  Obtained from environmental sample
  misc_feature (1)..(267): Xaa is any amino acid
MDTSRIVRGGNRVGIYFLEKGASQRPSKVIYDRAHSAIAEAEQKDFDWKRIFEGASWFHFTGISPAISDNAAAITADACKAAKEAGLTVSCDLNYRKNLWPREKAGKVMSGLMQYVDLCIANEEDASDVFGIRAEDTDVSSGKISAAGYENVARALTERFKFKQVAITLRESISADDNNWAAMLYSDGKAYFSKKYAVHIVDRVGGGDSFSAGLIYGLMQKQPLQESLEFAVAASCLKHSIEGDFNQVSTDEVKKLASGDASGRVQR

SEQ ID NO: 1047 - DNA, 636 bp, Unknown
  Obtained from environmental sample
  misc_feature (1)..(636): n is a, c, g, or t
gtgggtcaggatcggccgagcggcgcaggaacgccacgatcccaggatagttttaacgccgcgtttgagcttgaatatttccgctggggttttcgcacggcggatgaatggctgcacaggctgggggaacaaaagcgctacggggaatttgcggaaaaattgtgccttccgactgttaaagacggagtttacctagcgcatgaaaattgtcccgacactttcagcaagctgcctttttacaccgaccacccttcaatgcttgggatgtacggtgttttaaacagcgacaaaactgacagcggcgttatatccgccactctggataaagtgctttccgtatgggacaaaaaaactttctacggctgggacttcccgatgatggcaatgaccgcctgccgccttggcagatacaaggacgccattgatctgcttttaatggaaagcccgaaaaacacttggctggaaaacggacacaacaaaatgacgggcgatgccgcgcttcccctataccttccgggcaacggcggccttcttattgccgccgctatgctcgccgccggttacggcgagaaaaagggctcgtcttttccggaaggctttgtggttaatactgaaggcattcttccgtatatttaa

SEQ ID NO: 1048 - protein, 211 aa, Unknown
  Obtained from environmental sample
  misc_feature (1)..(211): Xaa is any amino acid
MGQDRPSGAGTPRSQDSFNAAFELEYFRWGFRTADEWLHRLGEQKRYGEFAEKLCLPTVKDGVYLAHENCPDTFSKLPFYTDHPSMLGMYGVLNSDKTDSGVISATLDKVLSVWDKKTFYGWDFPMMAMTACRLGRYKDAIDLLLMESPKNTWLENGHNKMTGDAALPLYLPGNGGLLIAAAMLAAGYGEKKGSSFPEGFVVNTEGILPYI

SEQ ID NO: 1049 - DNA, 879 bp, Unknown
  Obtained from environmental sample
  misc_feature (1)..(879): n is a, c, g, or t
gtgctgggagacccattcgcccgccttgccgctggggagctgccggccagaagcgcgttcccattcctgccactggaaaagggggcggagcaatttcaattgcccgatgctatgttcaacgtcattcatggggcgggcggggaagatgggcagatagcggggtacttggagctattgaaggtgccatgcacaggagctggccgcctgtcgctgtccgttgcgatggacaagtggatggccaagcgcgtctgggaatccgaggggcttcccgttacgccctataaggctatctctgaagaagaatggaacaaggactccaatgacttcattgatcgctgcctaagtttgggaatgcccatctttgtaaagcccgcaaacaatggctccagcattggcatccagaaggtcaaaaacgccgatgaccttagatctgctattgccgatgcgtttcgctatgaccgcagggttttggtagaaaaagggctttgcgccagagagatagaaattgcggtgctgggcagcggagacccaattgtgagcagccctggcgaggtgcttgtcgctggcgagttttacgactttgccgacaagtatgtggacggcaaaagcaaaaccaaggtgccggcagaccttccccaagaaacggagttgtcattgagggaaatggcgcgaagggcctttgtttgtttggacgggtacggtttggctagggttgattttttcctggaagtggattcggggtgcatctatctgaacgagataaacgcaatcccaggcttcactagcatcagcatgttcccaaagctcatagaacattcgggtgtgcgatatagaaacccagttgacgatgctggtcgagctggctcgtgccgattctga

SEQ ID NO: 1050 - protein, 292 aa, Unknown
  Obtained from environmental sample
  DOMAIN (74)...(273): RimK-like ATP-grasp domain
  misc_feature (1)..(292): Xaa is any amino acid
MLGDPFARLAAGELPARSAFPFLPLEKGAEQFQLPDAMFNVIHGAGGEDGQIAGYLELLKVPCTGAGRLSLSVAMDKWMAKRVWESEGLPVTPYKAISEEEWNKDSNDFIDRCLSLGMPIFVKPANNGSSIGIQKVKNADDLRSAIADAFRYDRRVLVEKGLCAREIEIAVLGSGDPIVSSPGEVLVAGEFYDFADKYVDGKSKTKVPADLPQETELSLREMARRAFVCLDGYGLARVDFFLEVDSGCIYLNEINAIPGFTSISMFPKLIEHSGVRYRNPVDDAGRAGSCRF

SEQ ID NO: 1051 - DNA, 687 bp, Unknown
  Obtained from environmental sample
  misc_feature (1)..(687): n is a, c, g, or t
atgaggaatggctttacctgcctgttcattggcgggccgggaaccggaaaaaccgagactgcttatcagattgcccgccagaccggacgtaacataatggcggtggacatagctgaaacaaaaagtatgtggtttggcgaaagcgaagggaagattaaaggaatattcgacacttatcgggaggccgtagataattctaaaatgacccctatattgctgttaaacgaggcagacgggttaatcagtaagcggttggaacttaattcttcaagccgggctgtcgatcaggctggaaatggcattcagaatattattttacaggaaattgaaaacctatctgggattctgatcgccacaactaatttagcacagaacatggacaaggcctttgagcgccgtttcctgtacagaatcaattttgacagacccggcgaacagggacgtaaaagcatctggaacaccttactgccggaattgccggtagaattggtcatggatctgtccggcaaatttgacctttcaggcggccaaattgaaaacatagcccgcaagatcaatatcgactcgatattaaccgggtgcgttacaaaggataccatgatgcagtattgcaaggatgaaatacagagcagttttattgccccaaaaagaatagggtttgaagcggaagcatatttgagttcctaa

SEQ ID NO: 1052 - protein, 228 aa, Unknown
  Obtained from environmental sample
  DOMAIN (6)...(191): ATPase family associated with various cellular activities (AAA)
  misc_feature (1)..(228): Xaa is any amino acid
MRNGFTCLFIGGPGTGKTETAYQIARQTGRNIMAVDIAETKSMWFGESEGKIKGIFDTYREAVDNSKMTPILLLNEADGLISKRLELNSSSRAVDQAGNGIQNIILQEIENLSGILIATTNLAQNMDKAFERRFLYRINFDRPGEQGRKSIWNTLLPELPVELVMDLSGKFDLSGGQIENIARKINIDSILTGCVTKDTMMQYCKDEIQSSFIAPKRIGFEAEAYLSS

SEQ ID NO: 1053 - DNA, 516 bp, Unknown
  Obtained from environmental sample
  misc_feature (1)..(516): n is a, c, g, or t
gtgaacggaaatttttacctgtatttccggcagattactggttataaacgcgcggatatcgcggtagaagcctgtgtaatgatgggaagaaaactggttgtcgcgggttcaggagccaataaaaaagatattaaaaagaatgagaaaagcggcttagtgcgctatatgggaaaagtaaccaatgaagaagtcatcctcctgttttctcaggcaagagccctgctcttcccgggaattgaggattttgggattattcccgtagaagccaacgcggcgggctgtcccgtaatcgcttaccgcgacggcggcgcgttggaaacggtaaaagaaaacgtgacaggcgtatttttcaacgaacagactccggaatcgttaataggcgcaatttataattttgaaaaaaatgaggtaacatttaataaccgtgaagtgtttaataatcatgtgcagcagttttcaaagaaaacattcactgaaagcatataccaccttcttgaagacaaaaaacggagataa

SEQ ID NO: 1054 - protein, 171 aa, Unknown
  Obtained from environmental sample
  DOMAIN (1)...(152): Glycosyl transferases group 1
  misc_feature (1)..(171): Xaa is any amino acid
MNGNFYLYFRQITGYKRADIAVEACVMMGRKLVVAGSGANKKDIKKNEKSGLVRYMGKVTNEEVILLFSQARALLFPGIEDFGIIPVEANAAGCPVIAYRDGGALETVKENVTGVFFNEQTPESLIGAIYNFEKNEVTFNNREVFNNHVQQFSKKTFTESIYHLLEDKKRR

SEQ ID NO: 1055 - DNA, 558 bp, Unknown
  Obtained from environmental sample
  misc_feature (1)..(558): n is a, c, g, or t
atgcctcccgtatttggtctgtctctattattacagaattacttgacaatgaaaagaagctgtcatagaagaaaatatatgaatttagctggggacagacgatcgcgagttttgttatttgtataccgggtcttaataggttttttagtattactagggttgagtctcatcagcggcacaatatatggtgtgttttttcataagaacactccaagcaaagagcaatctgttatttttcagaaagccggagaggaacagatctttactggtattggtacgatcagagttcccactactgatgcccagccggggatggtgattatttttatttcattcatttactatccggatgacggagccttttctgaggaattggctctccgcgtaaaggatttcagacaaataatcattgattattttggttctttttcagtatctgagcttcgcgagctggatgaagacggcattaagtcagaattattacttcgtttcaattcaatcctgcggctcggacaaattgagacaatatattttggtgatttcatgattattgggtaa

SEQ ID NO: 1056 - protein, 185 aa, Unknown
  Obtained from environmental sample
  DOMAIN (34)...(184): Flagellar basal body-associated protein FliL
  misc_feature (1)..(185): Xaa is any amino acid
MPPVFGLSLLLQNYLTMKRSCHRRKYMNLAGDRRSRVLLFVYRVLIGFLVLLGLSLISGTIYGVFFHKNTPSKEQSVIFQKAGEEQIFTGIGTIRVPTTDAQPGMVIIFISFIYYPDDGAFSEELALRVKDFRQIIIDYFGSFSVSELRELDEDGIKSELLLRFNSILRLGQIETIYFGDFMIIG

SEQ ID NO: 1057 - DNA, 312 bp, Unknown
  Obtained from environmental sample
  misc_feature (1)..(312): n is a, c, g, or t
atgaaaggcagtgaaaacaacgacataccttgcaaagacggcaatggcaaatttgcgaccaacaactgcggcggcatacttggaggcatttcctcaggacaggacattgtttttagagcggcattcaaaccaacgccttcaatcagcaagccgcaaaaagttttagacagggatggcggcatgaaggaaatagcgattaaaggcagacatgatgtctgcatagtcccaagagccgttgtagtagtggaagcaatgaccgctctggtactcgccgactttttacttttatcgcgatgtgccaagattttctaa

SEQ ID NO: 1058 - protein, 103 aa, Unknown
  Obtained from environmental sample
  DOMAIN (1)...(98): Chorismate synthase
  misc_feature (1)..(103): Xaa is any amino acid
MKGSENNDIPCKDGNGKFATNNCGGILGGISSGQDIVFRAAFKPTPSISKPQKVLDRDGGMKEIAIKGRHDVCIVPRAVVVVEAMTALVLADFLLLSRCAKIF

SEQ ID NO: 1059 - DNA, 681 bp, Unknown
  Obtained from environmental sample
  misc_feature (1)..(681): n is a, c, g, or t
ttgggcgtttcttgcggagcgttacgggcaaaaaaaccatgtgcttttgaaacgcttaatgagcctgtagctcctgcgcctgagatttggaataacgtaaaagacaggctctgccgcgaaatacgaaagtatgctccaaaatcaacaataataacaggttcaaatatgtggaactggcccagcactttcaatttacttacgccgtttgaggatgataatgtaatttacagcgttcatttttacgaaccgctgctttttacccaccagaatgcgccgtggataaaaaaccctgaaatcaaggcggcaaggacatatccttccgattacggaccgggttttgtccgcaagtacggtcttacaatgtcggccggcgtatgggacagacagcggcttgcaaaagagttcgagcctgttaacgagttcaggaaaaagcacaatgcgcaggtgatttgcaacgagttcggcgtttatacgccggtagaactgcaagcccagttacgctggtatgacgaccttctttcagtcctcaaggaaatggagattggtttttcttattggaactataaaaacctcgactttggaataatttctgcaggggagaaactgcatgaaaatcttccccagtacaataacagcgaaaggattaattatccggtacttgatgttttaagaaaatattag

SEQ ID NO: 1060 - protein, 226 aa, Unknown
  Obtained from environmental sample
  misc_feature (1)..(226): Xaa is any amino acid
MGVSCGALRAKKPCAFETLNEPVAPAPEIWNNVKDRLCREIRKYAPKSTIITGSNMWNWPSTFNLLTPFEDDNVIYSVHFYEPLLFTHQNAPWIKNPEIKAARTYPSDYGPGFVRKYGLTMSAGVWDRQRLAKEFEPVNEFRKKHNAQVICNEFGVYTPVELQAQLRWYDDLLSVLKEMEIGFSYWNYKNLDFGIISAGEKLHENLPQYNNSERINYPVLDVLRKY

SEQ ID NO: 1061 - DNA, 426 bp, Unknown
  Obtained from environmental sample
  misc_feature (1)..(426): n is a, c, g, or t
atgaaagaaatattgatgcagcttatacgtaattccgccctgcatggagtagaaacaccggatgaaagaaaggccaagggtaaaaacgaaacgggtattataaaactttccattaagatgacggaagaccgaaagaatattcaaataaaacttaccgacgatggaaaaggtcttgattataaaaagatagctgaaagggcgttagccaagaacttaattaagaaggaagacgcgaaaaatcctgacatattaacgaaagtaatattcttgcccggctttagcaccgcggaaacagaaactgttcacggcggaaggggcattggtttaaatcttgtgcgcgaccgtataaaagaagtaaaaggcgccataaaacttaaatcggaacccggcaagggaacactattctttatttccctccctgtttga

SEQ ID NO: 1062 - protein, 141 aa, Unknown
  Obtained from environmental sample
  DOMAIN (1)...(141): Histidine kinase-, DNA gyrase B-, and HSP90-like ATPase
  misc_feature (1)..(141): Xaa is any amino acid
MKEILMQLIRNSALHGVETPDERKAKGKNETGIIKLSIKMTEDRKNIQIKLTDDGKGLDYKKIAERALAKNLIKKEDAKNPDILTKVIFLPGFSTAETETVHGGRGIGLNLVRDRIKEVKGAIKLKSEPGKGTLFFISLPV

SEQ ID NO: 1063 - DNA, 384 bp, Unknown
  Obtained from environmental sample
  misc_feature (1)..(384): n is a, c, g, or t
atggaactggcaaaaaacggaaaattaaaccaggttgatctcttgttaggtgacatcacagatacgaatttaagttttttaaacggcgaatgtacggcttctaactttgggaaaatgcttgataccgccaatcagagtgatattgcttttgcgattattaacatggtgtatcaggtaataggggttctttccgtttntgcggcaagggcgaaaaattatagtcgtgttgttgttacgggtaacggcagtaaaaacccgatagggcggaaagtgctcgccgatgttacctcaatgtacggaattgaatttgtctaccctgaacacgccgaatatactacggcgattggcgcgggattatcaaacagggagggaaataaagaatag

SEQ ID NO: 1064 - protein, 127 aa, Unknown
  Obtained from environmental sample
  misc_feature (1)..(127): Xaa is any amino acid
MELAKNGKLNQVDLLLGDITDTNLSFLNGECTASNFGKMLDTANQSDIAFAIINMVYQVIGVLSVXAARAKNYSRVVVTGNGSKNPIGRKVLADVTSMYGIEFVYPEHAEYTTAIGAGLSNREGNKE

SEQ ID NO: 1065 - DNA, 720 bp, Unknown
  Obtained from environmental sample
  misc_feature (1)..(720): n is a, c, g, or t
ttgatcttggaggaatatatggcggaaaatcaacaggttgatgttgttaaattattcaatgaaggaaatgccgcaggaatgttaaataattttgcggaggcttttgactgttaccgcaaagcggcggatttgggatatgctccggctcagtgtaatttggcttattgttacgagaaagggcatggcgttccgtttaatttcgccaaaatgcttgattattatcagaaatcggtaaatcaaggatatgctcccgccatgtgtaatttgggatggtgttatgagagcggcatcggagtagaaatggatttagacaaagcggtcgcgtattatagcaaggcggcggaattaggatatgcgcccgctcaaggtaatttgggtttttgttatgaaaatggcaatggtataactaaagatataggactggccattagatggtataagcaggctgctgctcaaggtaatgtttttgcccagtacaatttgggcgtgtgctatgagtttggcaaaggaacggcagtggatatggcaaaagcagttgaattgtaccgaaaatccgcagaacatggatacgcgcccgctcagaattgtcttgggatgtgttatgagaatggtaatggcgtaccaaagaatcctattatggctcacgaatggtacaattatgcagcatcacaggggcatttaaccgcaaagaaaaatctagataatctcaagaagaaataa

SEQ ID NO: 1066 - protein, 239 aa, Unknown
  Obtained from environmental sample
  DOMAIN (47)...(82): Sel1 repeat
  misc_feature (1)..(239): Xaa is any amino acid
MILEEYMAENQQVDVVKLFNEGNAAGMLNNFAEAFDCYRKAADLGYAPAQCNLAYCYEKGHGVPFNFAKMLDYYQKSVNQGYAPAMCNLGWCYESGIGVEMDLDKAVAYYSKAAELGYAPAQGNLGFCYENGNGITKDIGLAIRWYKQAAAQGNVFAQYNLGVCYEFGKGTAVDMAKAVELYRKSAEHGYAPAQNCLGMCYENGNGVPKNPIMAHEWYNYAASQGHLTAKKNLDNLKKK

SEQ ID NO: 1067 - DNA, 636 bp, Unknown
  Obtained from environmental sample
  misc_feature (1)..(636): n is a, c, g, or t
ttggccttttcccattaccactctcccggttgcgatggcgattcacgtaaccccgattcggttcctttttcagcggatcggtttatggcaacatgggaacaaatggaagaaatatacaacaagggacttacccgccatttgggtatgtcaaatatgactatccctaaattggaaacgatacttcctcgctgtaaaattaagccggaacttatcgaaatggagcaacacccttcctttcaacaacagaccttgtttgattactgcaaaaatgccgatataaccgtaataggttactgccctatcggttcacccaacagaccggaacgggataaagctcctggagatgttgtggacacagaattgccggaagttgtttccgttgccaaagcgcacaatatccatccggcgcttgtctgccttaagtgggcggttcagcggggcagtattccaattccgttttcgatacacgcaaaaaattacgaatctaacctccgcgcggttacagaagatccgctttcatattcggaaatggagcttctaaaaaaagccgaacgtaattgtctgcctggtaaaaggacaagtgtttctctggccctggcgcggaaagctgggaggaactctgggactgggatgtaa

SEQ ID NO: 1068 - protein, 211 aa, Unknown
  Obtained from environmental sample
  DOMAIN (3)...(185): Aldo/keto reductase family
  misc_feature (1)..(211): Xaa is any amino acid
MAFSHYHSPGCDGDSRNPDSVPFSADRFMATWEQMEEIYNKGLTRHLGMSNMTIPKLETILPRCKIKPELIEMEQHPSFQQQTLFDYCKNADITVIGYCPIGSPNRPERDKAPGDVVDTELPEVVSVAKAHNIHPALVCLKWAVQRGSIPIPFSIHAKNYESNLRAVTEDPLSYSEMELLKKAERNCLPGKRTSVSLALARKAGRNSGTGM

SEQ ID NO: 1069 - DNA, 543 bp, Unknown
  Obtained from environmental sample
  misc_feature (1)..(543): n is a, c, g, or t
atgaaggttgattctttcaaagatacgccggttacagcaatggggctgacggtgacattacaggaagcggttttgttgccgtcaacggtagtaacggtaatggtcgcggttccagcgctaacaccggtaactacgccgcccgctgatactgtggctacagtggtgtcgctgctactccatgttacatcttggtttgtcgcgtttgtgggcattattgccgcactgagtgtttctattgcgcccaccaaaatgttggcggatgttttattaagtgaaatgccggttacgacaacggcggctttaccgacagtaactgtacataatgccgttttgccgccatcaacggtggtaacgataatatttgttgttcctacattttttgcggttacaacgccgccttctgataccgtggctacagcggtgtcactgctgttccatcttacgtttttatttgtcgcgtcggagggatttattgccgcggtgagggttatcgtattgcctattataatgccggcggttgtcctatcagctcggccgatctga

SEQ ID NO: 1070 - protein, 180 aa, Unknown
  Obtained from environmental sample
  misc_feature (1)..(180): Xaa is any amino acid
MKVDSFKDTPVTAMGLTVTLQEAVLLPSTVVTVMVAVPALTPVTTPPADTVATVVSLLLHVTSWFVAFVGIIAALSVSIAPTKMLADVLLSEMPVTTTAALPTVTVHNAVLPPSTVVTIIFVVPTFFAVTTPPSDTVATAVSLLFHLTFLFVASEGFIAAVRVIVLPIIMPAVVLSARPI

SEQ ID NO: 1071 - DNA, 777 bp, Unknown
  Obtained from environmental sample
  misc_feature (1)..(777): n is a, c, g, or t
atggataatgagaatgccacaacaaaacgcaaaaccatatatcttgttgatgacaacatcacaaatttgactatgggcagaaatgtgcttgcgggtcactataatgtagccactgtggatagcggagaacgtatgctgaaaatgcttgaaaaaaacattccagatatgattcttttagatgttgaaatgccggagatgaacggctacgatgcgataaaaataatgaaagccaaaaaagaaaccaaagatataccgattatttttttaacggcgaaaagcgatagtgatagcgaacttgaaggtttatctttgggtgctatagattacataacaaagcccttttccccaccgcttttgctaaaacgcatagaaacgcatttgcttgttgaatcgcaaaaagaagaacttttgaaatataataaaaatcttcagagtttggtagaagcaaaaaccaaaactgttttggagcttcaaaatgccattttaagagctatggcagagcttgtggaaaaccgcgatgatattaccggcaagcatttggaaagaacgcagagctatttgggtttattgattaatgcgatatcagatcaccctttgtatgcagaagagatacgtggttggaatatagatttggtattgctatcttcgcagttgcacgatgtgggcaaaattgtggtgaaggatgatattctcagaaaaccgggtaaattgctagatgcggaatttgccgaaataaaaaaacatactactttcggagaaaaaattattgataaataa

SEQ ID NO: 1072 - protein, 258 aa, Unknown
  Obtained from environmental sample
  DOMAIN (11)...(124): Response regulator receiver domain
  misc_feature (1)..(258): Xaa is any amino acid
MDNENATTKRKTIYLVDDNITNLTMGRNVLAGHYNVATVDSGERMLKMLEKNIPDMILLDVEMPEMNGYDAIKIMKAKKETKDIPIIFLTAKSDSDSELEGLSLGAIDYITKPFSPPLLLKRIETHLLVESQKEELLKYNKNLQSLVEAKTKTVLELQNAILRAMAELVENRDDITGKHLERTQSYLGLLINAISDHPLYAEEIRGWNIDLVLLSSQLHDVGKIVVKDDILRKPGKLLDAEFAEIKKHTTFGEKIIDK

SEQ ID NO: 1073 - DNA, 606 bp, Unknown
  Obtained from environmental sample
  misc_feature (1)..(606): n is a, c, g, or t
gtgtccggcgtgattgaaggaactaacatccgtcttggggcgcagaattgcgcgagcgaagagcagggggcgcataccggggaagtatcggtattgcagttaaaagacctcggcgtacagacaattattcttgggcatagcgaaaggcgccatatttacaaggaagacgacgctcttatcaacaagaaagtaaagctcgcgctcaagcacgggtttgaagttattctttgcatcggcgaacttttagaagaacgcgaaaaaggcaaagttgaagaagtttgtgaaaggcagacggttaagggactggaaggagtaagcgcgtcggatttgggaaatgtcgtcatcgcttatgagcctgtttgggcaatcggaacgggaaagacggctacgccgcaggacgcggaagcggttcattccttcgtgcgcaaggtaatcgcccgtctgtacggacaggatgccgccacgaagatcattattcaatacggcggttccgtaaaagcggataacgcggcgcagttgatggctatggaaaacatagacggcgcccttgtaggcggcgcatcgcttaaaacggacacgtttattcctatagcaaaattttcctga

SEQ ID NO: 1074 - protein, 201 aa, Unknown
  Obtained from environmental sample
  DOMAIN (1)...(198): Triosephosphate isomerase
  misc_feature (1)..(201): Xaa is any amino acid
MSGVIEGTNIRLGAQNCASEEQGAHTGEVSVLQLKDLGVQTIILGHSERRHIYKEDDALINKKVKLALKHGFEVILCIGELLEEREKGKVEEVCERQTVKGLEGVSASDLGNVVIAYEPVWAIGTGKTATPQDAEAVHSFVRKVIARLYGQDAATKIIIQYGGSVKADNAAQLMAMENIDGALVGGASLKTDTFIPIAKFS

SEQ ID NO: 1075 - DNA, 474 bp, Unknown
  Obtained from environmental sample
  misc_feature (1)..(474): n is a, c, g, or t
ttgcttaactggaggctctgccaaaacatggagggtatcaacgctgaaatactggtcgccgaaaccaaagagatgtacccgcaagcgaccagcccgcggctgataagcgacaacggcagccagttcatatcaaaagattttgaagagctgcttgcgcttttagaagtcgggcatacgcttacatccgcgaaccacccgcagagcaacggcaaactggagcggttccaccgcaccttgaaaactgaacacgtaaggaggacatcgtatttagaatatcaagacgcctgcataaggctggcgggctggattgcgtattacaacggcgagaggcttcacagcgcgatctggtatttaacgccgaatgacgtttttaacggcagggcggcggaacggcttgcagaacgcaaagaaaaattgcatactgcatgtatcaagagacgggaatactggcggacgcaaaatgccggttcctga

SEQ ID NO: 1076 - protein, 157 aa, Unknown
  Obtained from environmental sample
  DOMAIN (1)...(125): Integrase core domain
  misc_feature (1)..(157): Xaa is any amino acid
MLNWRLCQNMEGINAEILVAETKEMYPQATSPRLISDNGSQFISKDFEELLALLEVGHTLTSANHPQSNGKLERFHRTLKTEHVRRTSYLEYQDACIRLAGWIAYYNGERLHSAIWYLTPNDVFNGRAAERLAERKEKLHTACIKRREYWRTQNAGS

SEQ ID NO: 1077 - DNA, 834 bp, Unknown
  Obtained from environmental sample
  misc_feature (1)..(834): n is a, c, g, or t
gtggtgaaagatccgcagaagcgcgcgcagtacgacaaattcggccatgcggcgtttgagagtcctcagggcggcggcgccgggtatgacggcgggtacggcggcggcagcttcgacctctccgacgctctgcgggcgttcatgaacgatttcggcggtgactctgtcttcggcgatctattcggcttcggttcgcgcacgcggcgcggcggcggccacggggggacgcggggcaacgatcttcaggtcaagttaggcctcacgcttgaggagatatccgccggtgtgaaaaagactataaaggtcaggcgtctggacagatgttccgagtgcggcggcagcggttcaaagaccggtaagcgcattacttgcgctaagtgcggcggcagcggccgtgtgcgacacattaccaactctttcttcggccagatggttcaagagacggattgccccatctgccgcggcgacgggcagaccgtctccgacccgtgcgccgcgtgcggcggcagcggtctgcggcagtccgagtcgaccgtctccgtagacattccccccggtgttgaggagggtaactacatccgcgtacccggcaggggcgacgccggcagaggagggggggagtcgggcgaccttatcgttgttttgcacgagaagccgcacgatgtattcacacgtcacggcatagacttgagctgcaaactcgacatcaccttctccgaggcggcgctggggtgctctaagaccatcaaaacgcttgaggacaaagtcagcctgaagatcccgggcggtactcagtcggaaaaagtctcaaacaaaatccaagctcggcgataa

SEQ ID NO: 1078 - protein, 277 aa, Unknown
  Obtained from environmental sample
  DOMAIN (191)...(277): DnaJ C terminal region
  misc_feature (1)..(277): Xaa is any amino acid
MVKDPQKRAQYDKFGHAAFESPQGGGAGYDGGYGGGSFDLSDALRAFMNDFGGDSVFGDLFGFGSRTRRGGGHGGTRGNDLQVKLGLTLEEISAGVKKTIKVRRLDRCSECGGSGSKTGKRITCAKCGGSGRVRHITNSFFGQMVQETDCPICRGDGQTVSDPCAACGGSGLRQSESTVSVDIPPGVEEGNYIRVPGRGDAGRGGGESGDLIVVLHEKPHDVFTRHGIDLSCKLDITFSEAALGCSKTIKTLEDKVSLKIPGGTQSEKVSNKIQARR

SEQ ID NO: 1079 - DNA, 840 bp, Unknown
  Obtained from environmental sample
  misc_feature (1)..(840): n is a, c, g, or t
gtgaggatgccgttgtttcggctttcgccctttatgaaagaggtggggccgcgcggcataagccatgacgatgttgaacacctgctgcgtattcccatccgccggatttcattatacgacattaacaaggcccgtgatgaaatggaacagatacaggcaaggatcaaggagatcaacgcccacctgaaaaatatcgttgcgtactcaataagttacctgaaggggattatcgcccggatacaggccaatgaagaactggggaaaggactacggaaaaccaaagtcggcgcctttgacaaaattgacgtgaaggaagtggttaaaagagacgtagagcttaaatacgaccggaaaaccggctatctgggaaccaatgtcgccggggggaaagttgccgaagtttcgccttttgaccgcatactggcaatccgcaaaaacggaatgtactcggtgatggacctgccggacaaagcctttgtcggcgccgacgcgtggtggataggcgttgccgacaaggaagaattatcaaaaactatttttaccattatttataaggaaaaagaaaccggctgcgcctttatcaaacgttgtattattgaaggctggattatgaacaaggattattttctggtgccggacggggcggcggttcttcatattgataccaggcccaaatttacgtttgccctgaaatatacgcccaaaccccggctcaaggttctcatggaagaatttaaggcccatgattacagcgtacgggggcttaaagccggagggatcaggctggcgaacaaggaagtatcanaggttgagatagggaggaataaaaatgacgaataa

SEQ ID NO: 1080 - protein, 279 aa, Unknown
  Obtained from environmental sample
  misc_feature (1)..(279): Xaa is any amino acid
MRMPLFRLSPFMKEVGPRGISHDDVEHLLRIPIRRISLYDINKARDEMEQIQARIKEINAHLKNIVAYSISYLKGIIARIQANEELGKGLRKTKVGAFDKIDVKEVVKRDVELKYDRKTGYLGTNVAGGKVAEVSPFDRILAIRKNGMYSVMDLPDKAFVGADAWWIGVADKEELSKTIFTIIYKEKETGCAFIKRCIIEGWIMNKDYFLVPDGAAVLHIDTRPKFTFALKYTPKPRLKVLMEEFKAHDYSVRGLKAGGIRLANKEVSXVEIGRNKNDE

SEQ ID NO: 1081 - DNA, 513 bp, Unknown
  Obtained from environmental sample
  misc_feature (1)..(513): n is a, c, g, or t
atgaaagagtatacgctttttttcgcctgctgtttggtttcgctcattgcggcggcaaccgtttccgcacagggttttacaggccctggcgctaatccgccgccgccctctggctccggttattatccacccccaccgcctcctcccggccacggtcattatccgccgccccctcctccccacggcggccccggtcattatccgccgccgcctcttgaaggatatgcagaccggtatggattaacaggtcttgcatggaatgttaccatagaacaggcaaaaaattatccccatgattcatgggtagttataagcggaaatatcgtcagcgtattaccgggcggcaggcattttatgttccgtgattcctccggtgaaattcccattgacatcggcccgaaagagtggcgcggtttatcggtcggagcatccgacagagttgagatttcaggcgaagtaaaaagagagcgagggcagattttcattaaagtacacgccataagaaagatataa

SEQ ID NO: 1082 - protein, 170 aa, Unknown
  Obtained from environmental sample
  SIGNAL (1)...(23)
  DOMAIN (1)...(169): Domain unknown function (DUF388)
  misc_feature (1)..(170): Xaa is any amino acid
MKEYTLFFACCLVSLIAAATVSAQGFTGPGANPPPPSGSGYYPPPPPPPGHGHYPPPPPPHGGPGHYPPPPLEGYADRYGLTGLAWNVTIEQAKNYPHDSWVVISGNIVSVLPGGRHFMFRDSSGEIPIDIGPKEWRGLSVGASDRVEISGEVKRERGQIFIKVHAIRKI

SEQ ID NO: 1083 - DNA, 492 bp, Unknown
  Obtained from environmental sample
  misc_feature (1)..(492): n is a, c, g, or t
atgcagccaatccatctggcgataggtattgtagaaggtatagttaccgccgccattttgtgttttatccacaaggcgcgtccggaaataatggagagcgtgcaaaacaagacagtaatcaaaaacggcgttcctatgtggagaacgcttatcatattggcggctgtcgcaatattcgccggaggcgctctctcgttgttcgcttcttcctatccggacggtcttgagtgggcgatagaaaaaacagtaggaactaataaacttgaaacgatgaatccgacaattaaaaaaagcaaacaaattcaaaacgcggccgccattatgcctgactataattttaaacattcagaaaataatgattctaaagtaggaacggcggcggccggagtgataggcgcggcgctaacttttttaattgccggatctatggcgataattatctctatagtcaaaaaaagacgaaaaaacgaaccggctcaaacaaacgcgtaa

SEQ ID NO: 1084 - protein, 163 aa, Unknown
  Obtained from environmental sample
  misc_feature (1)..(163): Xaa is any amino acid
MQPIHLAIGIVEGIVTAAILCFIHKARPEIMESVQNKTVIKNGVPMWRTLIILAAVAIFAGGALSLFASSYPDGLEWAIEKTVGTNKLETMNPTIKKSKQIQNAAAIMPDYNFKHSENNDSKVGTAAAGVIGAALTFLIAGSMAIIISIVKKRRKNEPAQTNA

SEQ ID NO: 1085 - DNA, 312 bp, Unknown
  Obtained from environmental sample
  misc_feature (1)..(312): n is a, c, g, or t
ttgcgcgaccggtcgccgataaaactctccgccggagaaaagcggatggcggccatagccgctgtgctggcgatgaacccgtctatcttaatgttggacgagcccaccgccttcctcgaccccaaagccaaacgggcgctctccgaaaccctgaacaccctacagcaccctaaaatcattgccacgcacgacatcgccttcgccaaagaggtctgcaatcgggtgatagtattgaaaaacggccggatcgcggccgacggcccgccgtcgctgctggacgacgcggtttttttgcgggagtgcggtctttga

SEQ ID NO: 1086 - protein, 103 aa, Unknown
  Obtained from environmental sample
  DOMAIN (1)...(81): ABC transporter
  misc_feature (1)..(103): Xaa is any amino acid
MRDRSPIKLSAGEKRMAAIAAVLAMNPSILMLDEPTAFLDPKAKRALSETLNTLQHPKIIATHDIAFAKEVCNRVIVLKNGRIAADGPPSLLDDAVFLRECGL

SEQ ID NO: 1087 - DNA, 558 bp, Unknown
  Obtained from environmental sample
  misc_feature (1)..(558): n is a, c, g, or t
gtgagggtgataataggcggcggtgtaacgtatgaaatggcggttactgacctcattcttaattctcaactcatatcaatttttgtttccgtgtttatcgtgttcctcatcgtggcgctttccaacaaatcgctgattgccggagtcattggcgctgttcccttaacgctggcgattctgtgcaatttcgcggtgatgggttttctgggaattaagctcaacctcgggaccgccctgatttcaagccttgcggtcggcatcggcattgattataccattcattttattgaatttttcaggcgtgaatataaatcgggagaaccggcttttcttcaccggactttcatcggctgcggaaaagccattatgattaacgccttgtccgtgggcgcggggttcggggtgcttgcgttctcccaatttaaaatcatagcggaactcggcgcgcttatcgctttgagtatgctgataaccgccctggtcagtcttaccgtaataccggcgctgcttaccgccataaaaccaaaattcacttaccgactgccttctccagattaa

SEQ ID NO: 1088 - protein, 185 aa, Unknown
  Obtained from environmental sample
  misc_feature (1)..(185): Xaa is any amino acid
MRVIIGGGVTYEMAVTDLILNSQLISIFVSVFIVFLIVALSNKSLIAGVIGAVPLTLAILCNFAVMGFLGIKLNLGTALISSLAVGIGIDYTIHFIEFFRREYKSGEPAFLHRTFIGCGKAIMINALSVGAGFGVLAFSQFKIIAELGALIALSMLITALVSLTVIPALLTAIKPKFTYRLPSPD

SEQ ID NO: 1089 - DNA, 819 bp, Unknown
  Obtained from environmental sample
  misc_feature (1)..(819): n is a, c, g, or t
ttgagagccggttcaaaaggaacgataacggtttttttccccgaagacaacgctttaaggctaagggaattcgggcgtggggcttgtgtttttgccgaaggcgcgttacgcgcaacagatacgggattgatattttcggcggtctcggcgcacattgttaaacccgcggcgccaattgaacggatgcgtacgggcatcaggttgaaattaatcgacaggttcagcgggaaggcgtggggcggcctcgcgcttgccctgctgctgggaatcagggacaatcttgatacgaacctggccgttatgtacagggacgcgggctgttcctacattctcgcgttatcgggaatgcatcttgccgtgttagccgcattaatcgccatccttcttaaaaagccgctgggttttaagggcgcggctcttgccggcgcggtaattatttgcctttactgttttattgtaggaccaatgccgtcccttaaccgcgccgcgattatgtacctgttgggagttgtaacgctcctcggcgcttttcccaaagaaccgctttcaatactcgcgctgtctttccttctgcaaattattgtctcgccctctcagggaaactcaatctctttcattctgtcgtattccgcgcttgccggaatcctgttaataggacagcctctttattccctgctttcgggaaaagcgccggattttcttttacagccgcttaccgcctcctgcggcgcttttctcgccacggcgggcattacgagttttactttcggcgttctcgctccagcgggaattattaccggcctcgctcttgttcgttaa

SEQ ID NO: 1090 - protein, 272 aa, Unknown
  Obtained from environmental sample
  DOMAIN (86)...(271): Competence protein
  misc_feature (1)..(272): Xaa is any amino acid
MRAGSKGTITVFFPEDNALRLREFGRGACVFAEGALRATDTGLIFSAVSAHIVKPAAPIERMRTGIRLKLIDRFSGKAWGGLALALLLGIRDNLDTNLAVMYRDAGCSYILALSGMHLAVLAALIAILLKKPLGFKGAALAGAVIICLYCFIVGPMPSLNRAAIMYLLGVVTLLGAFPKEPLSILALSFLLQIIVSPSQGNSISFILSYSALAGILLIGQPLYSLLSGKAPDFLLQPLTASCGAFLATAGITSFTFGVLAPAGIITGLALVR

SEQ ID NO: 1091 - DNA, 498 bp, Unknown
  Obtained from environmental sample
  misc_feature (1)..(498): n is a, c, g, or t
ttgtgccgtcatattgagaaatatagaaaatgtttgccactaagaacccaatcccccccaacccatcaggggcgtatgcaaatacgccccgttcccctgctcgtgtgccaaatgccaattcacattcagggcaaccgcaagggtgcccctacaaacgtatcattgtgttattttgcgtataggattgttgtgccaaattgcggaattgggagacagccttttttctatatttatcgcaagaggtattttatgacatctacaacggttatgaatttcaagcaaaaatgctcggattattttgagcaagcggttcagctcaaagagcctgtaatcgtcacaactgaatgtggcaatgctattgttttgagcgaagagttatatagaggtttaatagcaactttggaactctcggcagacccaaagttttatgaggaattaaaatctgccataaatgaaccactagaagaatgtatagatgccagcgaggtcggttggtaa

SEQ ID NO: 1092 - protein, 165 aa, Unknown
  Obtained from environmental sample
  DOMAIN (84)...(156): Phd_YefM
  misc_feature (1)..(165): Xaa is any amino acid
MCRHIEKYRKCLPLRTQSPPTHQGRMQIRPVPLLVCQMPIHIQGNRKGAPTNVSLCYFAYRIVVPNCGIGRQPFFYIYRKRYFMTSTTVMNFKQKCSDYFEQAVQLKEPVIVTTECGNAIVLSEELYRGLIATLELSADPKFYEELKSAINEPLEECIDASEVGW

SEQ ID NO: 1093 - DNA, 309 bp, Unknown
  Obtained from environmental sample
  misc_feature (1)..(309): n is a, c, g, or t
gtgttggacaaaacgctgaaaaagcccgatatggacagttgggtagcgggcatgagttggagggacggcttggcggtgacagacgaggtgggctacgccaacttagaggacaaaaccgaagttggcattgaaattcactcggggcgcaaccgcattgtgcgccgtatgttcgaggcgttgggctacgaggtgaaaaaacttgaccgcgtgtactttgcaggtttaaccaaaaagtcgttggagcgcggtaagtggcgcatactctcgcccaaagaggtgagcatgctcaaaatgggagcgtatgagtag

SEQ ID NO: 1094 - protein, 102 aa, Unknown
  Obtained from environmental sample
  misc_feature (1)..(102): Xaa is any amino acid
MLDKTLKKPDMDSWVAGMSWRDGLAVTDEVGYANLEDKTEVGIEIHSGRNRIVRRMFEALGYEVKKLDRVYFAGLTKKSLERGKWRILSPKEVSMLKMGAYE

SEQ ID NO: 1095 - DNA, 318 bp, Unknown
  Obtained from environmental sample
  misc_feature (1)..(318): n is a, c, g, or t
atgatgatgaaaaagttattatccgaatatttaaaagaagatgttgatctgaataaaatcattgatttacactataattttgaaaagatacatccctttcaggacggaaatggcagagtcggcagattaataatgtttaaggaatgtcttaaacataatatagttccatttattattgaagacgaaaacaagcaattctattatatgggattaaaagaatatcctaattctaaaacacggttaattgaaacttgccttacttcacaagatgtatataaagacgctttgaaatactttaatgtagaatatgatgcctag

SEQ ID NO: 1096 - protein, 105 aa, Unknown
  Obtained from environmental sample
  DOMAIN (1)...(77): Fic protein family
  misc_feature (1)..(105): Xaa is any amino acid
MMMKKLLSEYLKEDVDLNKIIDLHYNFEKIHPFQDGNGRVGRLIMFKECLKHNIVPFIIEDENKQFYYMGLKEYPNSKTRLIETCLTSQDVYKDALKYFNVEYDA

SEQ ID NO: 1097 - DNA, 726 bp, Unknown
  Obtained from environmental sample
  misc_feature (1)..(726): n is a, c, g, or t
ttgaaatcatttggcggtgttgattgcgaagatgacgaaattagtacggaaagaatcttgttctacagcgcaatctatgggctgttcccctatgatttattaaagttttccccgtcaaggaagagtcaaaccgccacactggaagccggagagtataataaggcgtattttgatatgatcagccgcattgggccaaacccgcttgacacgcctgtaatcacgcctcacctccataagcactggcaccttatttccgagatgcctgatcttaacaatgaattgcaagaggaacaggaaaagcgcatattcaaagcccttgtgcttggtatcctttataaacggattcggtatgaaaaagccggagaaatttacaaatacagcctgtggctgaaagacagcattaaagaaatccagcttgtggtttcaaatggatcaccatgcgatgctttctatgaaattatcgatgccttgaccatcaatccggtggttgttaagaaaatagaggatgccatcaacaatgaactggaaaccgcgcgtaagaaaaataaaattaattttgagcagagtgcgctggctgaaggaataaataccctcacccttcgtgaactttcaggcgacggccgcagtatgagcatcttcggcattgcggcggcgttcaaggcgaccatgccgccggacgagtttatcgtcgaccagggacttatgttaatggaaacccatgcttga

SEQ ID NO: 1098 - protein, 241 aa, Unknown
  Obtained from environmental sample
  misc_feature (1)..(241): Xaa is any amino acid
MKSFGGVDCEDDEISTERILFYSAIYGLFPYDLLKFSPSRKSQTATLEAGEYNKAYFDMISRIGPNPLDTPVITPHLHKHWHLISEMPDLNNELQEEQEKRIFKALVLGILYKRIRYEKAGEIYKYSLWLKDSIKEIQLVVSNGSPCDAFYEIIDALTINPVVVKKIEDAINNELETARKKNKINFEQSALAEGINTLTLRELSGDGRSMSIFGIAAAFKATMPPDEFIVDQGLMLMETHA

SEQ ID NO: 1099 - DNA, 927 bp, Unknown
  Obtained from environmental sample
  misc_feature (1)..(927): n is a, c, g, or t
atgaacacccgcagcaattcatccgaagacaatgttatccgaaccctggtatcagggcagagccgcaaccgctacgccggtgcgggcgcgtcggagcttaattatccgtccgaccatatactccattacatagcgctcaaatgggcagcgcagaccgtgtctgatcactggacattattcgacaaggcttactataaaaagagcatagaaaacaaccgggcaaggctaaaggggcaaaatgtgtccgaaatagacacggcggcggaatatatcaacacagtcgatacggctgccgagaacagcaacgctttcgctatgttcacccggaacgcctcgtatggttttgacaaggacggttttacggagactacaaagaagtgggacggatatatcaacgcccttgagaattttgtccagaacagagccagaagcggtcagagcgagatagactccagccgtgaatcggcgcaaagcgcggtggaaaaattgacatccggcgacaaagaaaaaaccgacatggacagctttagaaacgcctataactttctggtgacatataaagaacaggttaaacggcgcgtcggcgacataggccggggaattgcatacggactttttaagtttaatgatgaagaagacgctacaatcggcgaacttccgactcaggttgaaacatatctgcgggacaacaataaagaatttatgcatcccaacgccgcccgttatttcctctatcagaccttacatgcattagacaaaaaactcaaggaagctgagaagaaaaaggctgtcgatgaaaatgctttcacgcgttttgatacgttgtttgacgatccggacaccgccgaaacaactgagactatcggcaactttcacagcaaggntgaaagaagcgggcttctgggcgcgtataatgaagaaatatga

SEQ ID NO: 1100 - protein, 308 aa, Unknown
  Obtained from environmental sample
  misc_feature (1)..(308): Xaa is any amino acid
MNTRSNSSEDNVIRTLVSGQSRNRYAGAGASELNYPSDHILHYIALKWAAQTVSDHWTLFDKAYYKKSIENNRARLKGQNVSEIDTAAEYINTVDTAAENSNAFAMFTRNASYGFDKDGFTETTKKWDGYINALENFVQNRARSGQSEIDSSRESAQSAVEKLTSGDKEKTDMDSFRNAYNFLVTYKEQVKRRVGDIGRGIAYGLFKFNDEEDATIGELPTQVETYLRDNNKEFMHPNAARYFLYQTLHALDKKLKEAEKKKAVDENAFTRFDTLFDDPDTAETTETIGNFHSKXERSGLLGAYNEEI

SEQ ID NO: 1101 - DNA, 435 bp, Unknown
  Obtained from environmental sample
  misc_feature (1)..(435): n is a, c, g, or t
atggccgagcggcttgtaagctcgatccaagtacagggcgtggaaaacagaagatcgcctcttaccaccgtaaacggaagaacggttatcatcgttaataacagaatattcgctatagccggagaaaacaggggcagtggtgcaatccggcttgttgaaattaacccggatactctggaaatggtaaaacagggggatgatgacataacagccgacagcctgctctggattaacggacaggatctttacgcgattacaggtacgccagacaattgcaatctttcaaggtttaatcttgatctggtaaagcaggcaacttctgctattgccgttaacccccacgcgtcggttcttttctccgacggcaatcttataacgcaaaaaacagacgggggcgcggtgctgcttaatccgggtgacttaagcgcaagataa

SEQ ID NO: 1102 - protein, 144 aa, Unknown
  Obtained from environmental sample
  misc_feature (1)..(144): Xaa is any amino acid
MAERLVSSIQVQGVENRRSPLTTVNGRTVIIVNNRIFAIAGENRGSGAIRLVEINPDTLEMVKQGDDDITADSLLWINGQDLYAITGTPDNCNLSRFNLDLVKQATSAIAVNPHASVLFSDGNLITQKTDGGAVLLNPGDLSAR

SEQ ID NO: 1103 - DNA, 477 bp, Unknown
  Obtained from environmental sample
  misc_feature (1)..(477): n is a, c, g, or t
atgcagcgaccagatgcttatgcttttaaaataaaatacgatgtcattactgaggttcgctggaaaacctacggatgcgccagcgctattgcttctaccagtatgctttcggaaattatcaaggggatgagcatcaaggacgcttattgcatccggccagaggatctggttgaaaaacttggcggccttcccgattacaagatccattgttccgttctgggagacaaggccctgagggccgcgattgacgattatctcgcaaagcagggcagggcaggggagttaaaggaaacgtccacggaaatctgccactgccttggcataagcgacaaggacatagaaaacgctttcagaagcggagccaatacctgggagaagctgcaacaggctaccaaaatcggcacggtctgcggtcaatgcaaagaaaaggccatggagtatctccacggccttgcccatatttacggaatgtcttag

SEQ ID NO: 1104 - protein, 158 aa, Unknown
  Obtained from environmental sample
  DOMAIN (100)...(152): BFD-like [2Fe-2S] binding domain
  misc_feature (1)..(158): Xaa is any amino acid
MQRPDAYAFKIKYDVITEVRWKTYGCASAIASTSMLSEIIKGMSIKDAYCIRPEDLVEKLGGLPDYKIHCSVLGDKALRAAIDDYLAKQGRAGELKETSTEICHCLGISDKDIENAFRSGANTWEKLQQATKIGTVCGQCKEKAMEYLHGLAHIYGMS

SEQ ID NO: 1105 - DNA, 426 bp, Unknown
  Obtained from environmental sample
  misc_feature (1)..(426): n is a, c, g, or t
atgagaaaatttaatttcaggcttcagaaaatccttaggcttaggaaattcagggaagagcaatgtaaaatagagcttgaacaggccataggcagccttaacattatagaaaacgatattaaagctaccgctgttaagcgccataatgctgttacgcaaaggttttcagacgtaaatgaggccggaatgtgggataattatgttttaaggctggatcaggaaacagaacggctgatggaaaaggcggcccaagctgaaattattgtcgaggaaaagcgagccaagtatcttgaagcgtcaagagcccttaaggcgcttgaaaaaataaaagaaaaaaaagaaaaagaataccgcanagaagccgcggattaccagatgttggaaatagacgagcattccgcggcaagatacgcggccggcgtttaa

SEQ ID NO: 1106 - protein, 141 aa, Unknown
  Obtained from environmental sample
  misc_feature (1)..(141): Xaa is any amino acid
MRKFNFRLQKILRLRKFREEQCKIELEQAIGSLNIIENDIKATAVKRHNAVTQRFSDVNEAGMWDNYVLRLDQETERLMEKAAQAEIIVEEKRAKYLEASRALKALEKIKEKKEKEYRXEAADYQMLEIDEHSAARYAAGV

SEQ ID NO: 1107 - DNA, 840 bp, Unknown
  Obtained from environmental sample
  misc_feature (1)..(840): n is a, c, g, or t
ttgacctcttcgccggggcgttcattcggtttcgcgatgaaggatacggaaactgttgaacagtcgcctcagtcaagtttaggctctccgcgtatgcctcgcatcccgcgttctctgcgggatcgctggcgggacggggcgccggtatcgggcaggtggttttcgatagttcttgacgaaaatactgcgcagggccagtggttggacgattcgcttaatgaagaaagccgaaacagggacagggtacgcctgctgctggcgcactggggcattctctgctgtccgctcctggaaaaaatttccaaaggaagctcggcttccggcgatccctcgccttttacctggtcggggcttttgccgaccatacgccgtatggaactttcaggcgagcttgtcgcgggccgttttttcgcgggaatcaattccctgcaatttgccctcccatcaattgcgcgtgagcttgagaacgccgaggctgttgacggcatctactggatgaacgccgttgatccggcaagcccggcgggtcttgatatcgaaggattagatccccgtctccctgaccggcaacagtccagccggctctatttccgcggagcgcagttgatcgccgtatcaaaccgaaacggcaaagaacagcatattttcattgcgcccgatgattccggtatttccgctttgatcgatctcattaaagtaccccgtacaaggaaatgccttcctgaaaataaaattgttgttgatactattaacaataaaccagcggggcagagcgaatacgcgcatgtttttcagaattgcggatttatccctgaccgcggcaggctgtgcttttggtaa

SEQ ID NO: 1108 - protein, 279 aa, Unknown
  Obtained from environmental sample
  misc_feature (1)..(279): Xaa is any amino acid
MTSSPGRSFGFAMKDTETVEQSPQSSLGSPRMPRIPRSLRDRWRDGAPVSGRWFSIVLDENTAQGQWLDDSLNEESRNRDRVRLLLAHWGILCCPLLEKISKGSSASGDPSPFTWSGLLPTIRRMELSGELVAGRFFAGINSLQFALPSIARELENAEAVDGIYWMNAVDPASPAGLDIEGLDPRLPDRQQSSRLYFRGAQLIAVSNRNGKEQHIFIAPDDSGISALIDLIKVPRTRKCLPENKIVVDTINNKPAGQSEYAHVFQNCGFIPDRGRLCFW

SEQ ID NO: 1109 - DNA, 828 bp, Unknown
  Obtained from environmental sample
  misc_feature (1)..(828): n is a, c, g, or t
atgatcttaacgcggttttttgaacggatacacgccaaagccatcgaagtttacaatcataaattatgggattacctgaaaatcgatggcgaaaaaattgtttacaccaaaaagccaagtaaagaggctgctttcccattaaacgaagtgctgataaactatggaaacgcaatactcaaagaaggtttttctgcgattgcgtatcctgatgaaccggaaaaggccactgtagaatttattttgttttttatttactcgtatgtaaaatcaatgaaacaagatgagaatttgacagcgcttttaccacctgaattaattcctcctgctattgaccctattgtgggccgtttagttgaccatgaagaaggtatacctgattttgataccctgaacattaacttaatattggatattctaagccttaacaaccgcctgaaccagggatataatttggcggggctatatgataagccaccgctcaatgtaatatggagaaaaagaactaaaaatatgaaagttgggttaataatgctggatggggataaatttaaatcggtaaatgacaaatgcggtcatgatgtcggcgacgaagtgctggaaatatatcgggatagcatactgagagcaattgggtcgtctatagagttaaaagccagggtgttcccttcaaggtggggcggagaggaattttgcgttttagttttcgaaaccgatgaaaatgaaataacaagcatatcagaagaaattatgactaaattgaaattacacgaaaaatggaaagaaattgatgaaaattatggggaaaagctcanatttcgcggacattag

SEQ ID NO: 1110 - protein, 275 aa, Unknown
  Obtained from environmental sample
  DOMAIN (141)...(275): GGDEF domain
  misc_feature (1)..(275): Xaa is any amino acid
MILTRFFERIHAKAIEVYNHKLWDYLKIDGEKIVYTKKPSKEAAFPLNEVLINYGNAILKEGFSAIAYPDEPEKATVEFILFFIYSYVKSMKQDENLTALLPPELIPPAIDPIVGRLVDHEEGIPDFDTLNINLILDILSLNNRLNQGYNLAGLYDKPPLNVIWRKRTKNMKVGLIMLDGDKFKSVNDKCGHDVGDEVLEIYRDSILRAIGSSIELKARVFPSRWGGEEFCVLVFETDENEITSISEEIMTKLKLHEKWKEIDENYGEKLXFRGH

SEQ ID NO: 1111 - DNA, 978 bp, Unknown
  Obtained from environmental sample
  misc_feature (1)..(978): n is a, c, g, or t
atggccgagattccgctgttacgcttcccaaagcttccgcccgcgcatttacaattggactggacaagtaaaagctggaatttgctgtggtcaggcggcgcggcttttgggccggtcgattccctcctggcagagagaaattatcttacattcatgcgggataacggggtttatgagctggaactgaactcagggtataatactgtccgctaccggctggatttaacggaagccattgactctatccccggaaaagtaaactgcgccgcttttaaccagggtgaaaggttctgcctttcagaactatggcttttgacagagcgaagcgccgccgaaggccgcctgccgggccttagcacagcttttcctgaggcaatcggtaaagagggcctttacctgccggtaaatcacgccatggatcagggaagccttaggccataccttcaaactatagaaaatagcaagctcaacatggtggtcatcgacatgaaagatgactatggcagactgcgttttacgcccagtaacccttctatgttaaatttgggacgggttttccggcctgtggatatcgacacctttataaaaacgatgaaggaacgcagcatttacacagtcgcgcgaattgtggtttttaaagacccggaggctgcaaataaggagagcggaaggtacgctgtttgggacgcggtaaccaacaaagcctgggaaggctactacgacacccgccgaaaaaagaccaatgtgcctgatgagccggatcccaatcatgtaaccgcgattttaccggctaacgacccggaatatgaaatattaagaacctggtacgacgagaaatgggtagacccatattctgaagttatttgggattactacgtttcgatagcggaagaactttgccgcagggggtttgacgaaattcagttcgactacatccgattccccacggacggcataaatctggacaacgcccgttaa

SEQ ID NO: 1112 - protein, 325 aa, Unknown
  Obtained from environmental sample
  misc_feature (1)..(325): Xaa is any amino acid
MAEIPLLRFPKLPPAHLQLDWTSKSWNLLWSGGAAFGPVDSLLAERNYLTFMRDNGVYELELNSGYNTVRYRLDLTEAIDSIPGKVNCAAFNQGERFCLSELWLLTERSAAEGRLPGLSTAFPEAIGKEGLYLPVNHAMDQGSLRPYLQTIENSKLNMVVIDMKDDYGRLRFTPSNPSMLNLGRVFRPVDIDTFIKTMKERSIYTVARIVVFKDPEAANKESGRYAVWDAVTNKAWEGYYDTRRKKTNVPDEPDPNHVTAILPANDPEYEILRTWYDEKWVDPYSEVIWDYYVSIAEELCRRGFDEIQFDYIRFPTDGINLDNAR

SEQ ID NO: 1113 - DNA, 375 bp, Unknown
  Obtained from environmental sample
  misc_feature (1)..(375): n is a, c, g, or t
atggctcgttatgaagaatggattgaacgggcaaagagcagccttgaatttgcgcaattaaaaagcgacaaacacatttattatgaggatttttgttttcagttacagcaagccgttgagaaggcaataaagggatttctcatttattttaaagttgagcctgattttacgcacaatattgaaaaattgttagaacaattgaaaccgcttaccgatattcccgaaaatattataaaagcaacagctttgacaaagtatgcggtttttacaaggtatcctggtgaatttgatgcggtaaccaaagatgaatatgaggcaagcgtaaaaatagctaatgaatgtgtggaatgggtagaaaatagaattaaaaaatag

SEQ ID NO: 1114 - protein, 124 aa, Unknown
  Obtained from environmental sample
  DOMAIN (4)...(121): HEPN domain
  misc_feature (1)..(124): Xaa is any amino acid
MARYEEWIERAKSSLEFAQLKSDKHIYYEDFCFQLQQAVEKAIKGFLIYFKVEPDFTHNIEKLLEQLKPLTDIPENIIKATALTKYAVFTRYPGEFDAVTKDEYEASVKIANECVEWVENRIKK

SEQ ID NO: 1115 - DNA, 648 bp, Unknown
  Obtained from environmental sample
  misc_feature (1)..(648): n is a, c, g, or t
gtgcatcatgaagacagggctcttacaggttnttcaaaaacccaggacgaaggaaaagcagaaaacagcatccttgcggaaactatcgtaagcatagagaatgatgcccgcgcctgtcttgactccgagagattcatgcacagtagaaatactgccctgttatcgtgggagctctgccgtcgtttcggatttgatcctaaaaagggatatttggcaggaatagcccatgacatctgcaaggagcttgaagaaagcgagcttacgcgcctcgcccgccaggatagcggcggcatttcaaagctggaacaaaaacggccaggcttgctccacgcgcgggcggcggcagtgtatgtcaacagaaaatacggcgtcaaggataaggacattcttgaggcaatcaggtatcataccaccggggttcgcgacatggggcccattgcaaaagtcgtttatatagcggacaagattgaggtgtccagaaccggggtggatcctgttttgaggaaaatgagccaggaaagcgatttggatactctttttacggaggtcttaagcgataccgtgaactaccttaaatcccgccacctggatatttcctatggtacaagaaggctgatgacggcaatgcgtaaaaagaacaagccatga

SEQ ID NO: 1116 - protein, 215 aa, Unknown
  Obtained from environmental sample
  DOMAIN (44)...(159): HD domain
  misc_feature (1)..(215): Xaa is any amino acid
MHHEDRALTGXSKTQDEGKAENSILAETIVSIENDARACLDSERFMHSRNTALLSWELCRRFGFDPKKGYLAGIAHDICKELEESELTRLARQDSGGISKLEQKRPGLLHARAAAVYVNRKYGVKDKDILEAIRYHTTGVRDMGPIAKVVYIADKIEVSRTGVDPVLRKMSQESDLDTLFTEVLSDTVNYLKSRHLDISYGTRRLMTAMRKKNKP

SEQ ID NO: 1117 - DNA, 801 bp, Unknown
  Obtained from environmental sample
  misc_feature (1)..(801): n is a, c, g, or t
atggaactatgcgctttggctgccggaagggatggcatggcgctgaagtatgttccccctgaaatgagaagccgggaagtatgcaagcgggcggtatataatcattggtacgcgcttgcatacgtaggcgaaaatgaaaagaccgaagagctgtgccaaatggcggtagaatacgaggcgaaggcccttaaatatgtgcccgagaaattcaaaaccccgaagctctgccttaaagcggtaaaaggcaatggatacacgctggagtttgtaccggaaaaactgaaaacccctgagctatgcaccgaagcggtaaaaagacaatccagagcgctgaaatttgttcctgaggccatgaaaacaaaagagctgtgccttctggcgttgtccccaggaaaaacatggcttaagggattctctgaaaacgaagaaataaattgcgctcttgcctatgtgccacaggagtttgttacaagggaactgtgccttgacgcggtttcatgcgttcctgattccctcaaattcctgcctgataaattcaaaactcaggaaatatataatgcggcaataacaaaaaacggatgggcgctggaatatgtgccggaagaattcaagacttatgagctatgccttgaggcggtaaaggaatacgggcacgcgttggaatatgtcccgagaaaaaacaaaacagcggaactgcttgatgccgcccttaaaatgacggaagcgccctacagtttgtccccgaagaatacaaaagcccgaaaggtctgccttgacgcgataaaggataagccgtactga

SEQ ID NO: 1118 - protein, 266 aa, Unknown
  Obtained from environmental sample
  misc_feature (1)..(266): Xaa is any amino acid
MELCALAAGRDGMALKYVPPEMRSREVCKRAVYNHWYALAYVGENEKTEELCQMAVEYEAKALKYVPEKFKTPKLCLKAVKGNGYTLEFVPEKLKTPELCTEAVKRQSRALKFVPEAMKTKELCLLALSPGKTWLKGFSENEEINCALAYVPQEFVTRELCLDAVSCVPDSLKFLPDKFKTQEIYNAAITKNGWALEYVPEEFKTYELCLEAVKEYGHALEYVPRKNKTAELLDAALKMTEAPYSLSPKNTKARKVCLDAIKDKPY

SEQ ID NO: 1119 - DNA, 387 bp, Unknown
  Obtained from environmental sample
  misc_feature (1)..(387): n is a, c, g, or t
atggccgagaacccgccggatcttaagtactctaaaacccatgaatgggtaaggctggaaaacgacaccgttaccaccggcattaccgaccacgcccaagacacgctaggcgacataactttcgtagagctgcccaaagtaggcgcgcagctcaaacaaggcggcgaatccggcgtcatcgagtccgtaaaagcggcaagcgacctaatgtcgcccgtatccggcgtcgtggcaactatcaacagcgccttagactccgcgccggagaccataaacagcgacccgtacggcgccggctggctttacacggtcaagctcgcggacgcttcggaaatcaacggcttgatggacgccgcggcttacgagaagtttttggaaagcgagtag

SEQ ID NO: 1120 - protein, 128 aa, Unknown
  Obtained from environmental sample
  DOMAIN (8)...(128): Glycine cleavage H-protein
  misc_feature (1)..(128): Xaa is any amino acid
MAENPPDLKYSKTHEWVRLENDTVTTGITDHAQDTLGDITFVELPKVGAQLKQGGESGVIESVKAASDLMSPVSGVVATINSALDSAPETINSDPYGAGWLYTVKLADASEINGLMDAAAYEKFLESE

SEQ ID NO: 1121 - DNA, 351 bp, Unknown
  Obtained from environmental sample
  misc_feature (1)..(351): n is a, c, g, or t
atgggtaaggctggaaaacgacaccgttaccaccggcattaccgaccacgcccaagacacgctaggcgacataactttcgtagagctgcccaaagtaggcgcgcagctcaaacaaggcggcgaatccggcgtcatcgagtccgtaaaagcggcaagcgacctaatgtcgcccgtatccggcgtcgtggcaactatcaacagcgccttagactccgcgccggagaccataaacagcgacccgtacggcgccggctggctttacacggtcaagctcgcggacgcttcggaaatcaacggcttgatggacgccgcggcttacgagaagtttttggaaagcgagtagatctataa

SEQ ID NO: 1122 - protein, 116 aa, Unknown
  Obtained from environmental sample
  misc_feature (1)..(116): Xaa is any amino acid
MGKAGKRHRYHRHYRPRPRHARRHNFRRAAQSRRAAQTRRRIRRHRVRKSGKRPNVARIRRRGNYQQRLRLRAGDHKQRPVRRRLALHGQARGRFGNQRLDGRRGLREVFGKRVDL

SEQ ID NO: 1123 - DNA, 804 bp, Unknown
  Obtained from environmental sample
  misc_feature (1)..(804): n is a, c, g, or t
atgcttattacaggtacagcgccggtaataattgagaaaatcccgccaaaccacccattgtatgcgtcggctccttctataccgccgcctttccagatgccgcccgcttatttaccgccaccgcagcagcagcctggctattatccgcagcaacctgcgcctcagcaggctccgcagccgcctttaccgccgcaagttttaccaccgcctggttattttcctccgcaggttttagcgccgccgcctggttatttaccgccgcagggtttaccgccacagtctttcctgccgccgcctggctatttaccggttcagccaactcctccgacggtcattacgcagcctatgctgcccccgtcccagcggctgccctccctgcctccgcaaccggtccagacgccgatactggtcccgacacctccgcctgggccgcctcctgaaacaccaccgccgccgtctgccgccgcggctccctcaattaatgtaacagtatacccgcccccggcgccgccaaccgcaacgtctacccaagacttgccggggccaagagcaaggctgaacccggcgataaacccgcatcctgacagaatatacaaactccaggttggttcatataagatcgccggtaacgcggttgacgcttatgtaaaattgaaagcggtaggactagtaccaagctatgaacgaaatggagattttttccgcatagtattagccggaatttgcggaactgatgtaatatctgtcacggaaaaacttgcaacagcgggtttcagggaagcggttatcagagaagagagatag

SEQ ID NO: 1124 - protein, 267 aa, Unknown
  Obtained from environmental sample
  misc_feature (1)..(267): Xaa is any amino acid
MLITGTAPVIIEKIPPNHPLYASAPSIPPPFQMPPAYLPPPQQQPGYYPQQPAPQQAPQPPLPPQVLPPPGYFPPQVLAPPPGYLPPQGLPPQSFLPPPGYLPVQPTPPTVITQPMLPPSQRLPSLPPQPVQTPILVPTPPPGPPPETPPPPSAAAAPSINVTVYPPPAPPTATSTQDLPGPRARLNPAINPHPDRIYKLQVGSYKIAGNAVDAYVKLKAVGLVPSYERNGDFFRIVLAGICGTDVISVTEKLATAGFREAVIREER

SEQ ID NO: 1125 - DNA, 834 bp, Unknown
  Obtained from environmental sample
  misc_feature (1)..(834): n is a, c, g, or t
gtgcggccttcgcttatggcggggaggatcaggtggcttttgtcggggtttaggatgtattcggcgacggcggcgtggtttatcaggatttcgcaggcggggatgcggcctctgccgtccagcctggggagcaggcgcagcgatatgatggccaccagtacgttcgacagtaccagtcttatctggtcgtgctggtgtggcgggaagaacgagattatgcgcgttatggtctctgtggtgttcatcgtgtgcagggtgctcatcaccaaatggccggtatcggcggcgctcatggcggtttctatggtttcgcagtcgcgcatctcgcctatcagtattatatcggggtcttggcggaagcaggcgcgtaaggcgttgttgaaggagggggcgtcggagcctatctccctttgggctatgatgctgcgtttgtcgcggtggaggaactctatggggtcttctatggtgacgatgttgactgaggtacttgcgtttatgtggtctatcatagacgccaaaagagttgatttgccgcttcctgtggttccggtgaccaggatcatgccgcgttttttcatcgctatgtccattatgacgctggggagggctagttcggagaagctgggcacctccaccttgattgatcggacggccatagcgggggtgccgcgttggcggaaggcgtttattctgaagcgtcctacgcccggcagttttgcggcgaagtctatttcggagtcgcgctggaacttgntgtactngttcgttgtgaggagcgtgcggagcatggcctccatattatcgaacgatatggcttccgaaaccattttgtag

SEQ ID NO: 1126 - protein, 277 aa, Unknown
  Obtained from environmental sample
  misc_feature (1)..(277): Xaa is any amino acid
MRPSLMAGRIRWLLSGFRMYSATAAWFIRISQAGMRPLPSSLGSRRSDMMATSTFDSTSLIWSCWCGGKNEIMRVMVSVVFIVCRVLITKWPVSAALMAVSMVSQSRISPISIISGSWRKQARKALLKEGASEPISLWAMMLRLSRWRNSMGSSMVTMLTEVLAFMWSIIDAKRVDLPLPVVPVTRIMPRFFIAMSIMTLGRASSEKLGTSTLIDRTAIAGVPRWRKAFILKRPTPGSFAAKSISESRWNLXYXFVVRSVRSMASILSNDMASETIL

SEQ ID NO: 1127 - DNA, 825 bp, Unknown
  Obtained from environmental sample
  misc_feature (1)..(825): n is a, c, g, or t
atgaataaaaaattaatttcaattaacaaaatcatctgtttgttnttcgttgctctttgtttcttgtttataacatgtaatggacccgacaataacaacgacgacgacaataataataataacaacaacaataataataacaataataataacaacaacaataacgatgatgacgactatgaaaatccaaacgccggaattgtaagagaacttactttctctaatgacagcgggctttattccacgcaattcagtcttacaataacggctgagggaagcgaaatttattacacgacggacggaagcgtcccttcaccggggaaagccggcacaattaagtacaccgctcccattaccgtaaaaaaccgtaacggcgaagcgaatgttttggcaactgaggaaaactcaagaaatttttatggagaaccaggtgatcgtaataacaatatgccggaagcttatataccgacccaagatcaagtgcctaaagccactgtaattcgcgtaatagcggttgattcaagcggcaaaaaaagcggtgttgcgactaaaacgtattttatcggtaataatttatacggaaatacccgcattatctctttagtttctgaccctgaaaatctggtaagtgaagacaagggcatcatggttagaggaaaatccactaacagatgggaagttggtgaaccatataattttcagaggaagggagccgactgggaacgtcccgcgtatttggaactttttgaagggaataacagaaataaagcggcgctttctacaggagtgggcatcagagtccgaggcggatgtcaagagcaatag

SEQ ID NO: 1128 - protein, 274 aa, Unknown
  Obtained from environmental sample
  SIGNAL (1)...(28)
  misc_feature (1)..(274): Xaa is any amino acid
MNKKLISINKIICLXFVALCFLFITCNGPDNNNDDDNNNNNNNNNNNNNNNNNNNDDDDYENPNAGIVRELTFSNDSGLYSTQFSLTITAEGSEIYYTTDGSVPSPGKAGTIKYTAPITVKNRNGEANVLATEENSRNFYGEPGDRNNNMPEAYIPTQDQVPKATVIRVIAVDSSGKKSGVATKTYFIGNNLYGNTRIISLVSDPENLVSEDKGIMVRGKSTNRWEVGEPYNFQRKGADWERPAYLELFEGNNRNKAALSTGVGIRVRGGCQEQ

SEQ ID NO: 1129 - DNA, 603 bp, Unknown
  Obtained from environmental sample
  misc_feature (1)..(603): n is a, c, g, or t
ttgtttgacataacgctctttcgcagcgcgcctaatatgactctcctctgccccgcaagcgataacgaaatgaggcttatgctggattacggaataaaccaagaaacaggtcccgtcatcattcgttacccgaaagcgttatgcccgcaggagaccgaagcgttttcacagccgcttgagagagggaagggaacatgggtctcaaagagcggaaacgagcgagtttgccttgcgttcacgggaagcctctacagggaagctgtttcagctgcgaatttattgaaagaacagggaatagaagcggatttgtataacttgcggtttttaagaccgattgacgaagactatttggcggaaattatgaataagtataaacttgtaacatttattgaagagggaatgagagagggcggctttggcgagtacgcggcggctcttgcgcacaggcgcggttgtacggcaaaaacggctgttatagctgtagaaagcgtctttttggaagaagatctgtctttaggcagccgtgaagaactgcttgctatcaaccggcttaacggcaaaggaatagcggaaacaataaaaataatatataatactatctaa

SEQ ID NO: 1130 - protein, 200 aa, Unknown
  Obtained from environmental sample
  DOMAIN (64)...(178): Transketolase, C-terminal domain
  misc_feature (1)..(200): Xaa is any amino acid
MFDITLFRSAPNMTLLCPASDNEMRLMLDYGINQETGPVIIRYPKALCPQETEAFSQPLERGKGTWVSKSGNERVCLAFTGSLYREAVSAANLLKEQGIEADLYNLRFLRPIDEDYLAEIMNKYKLVTFIEEGMREGGFGEYAAALAHRRGCTAKTAVIAVESVFLEEDLSLGSREELLAINRLNGKGIAETIKIIYNTI

SEQ ID NO: 1131 - DNA, 954 bp, Unknown
  Obtained from environmental sample
  misc_feature (1)..(954): n is a, c, g, or t
atgcgatacatttccgaacatataagaaccgccgatttttacgctgaatacatgataacttctaaaagttattcatcatatcatcctgtaattccgccggaaccactgaacgagaaaatttacagaaaagcagtcagaaataacgccgacgcgcttgcgtccgttccggaagaacagaggacttatgaactatgtgttgaagctctgctaagcagactgtccttaggttcaacgcttaattttgtcccggataaattcaaaactcctgaattctgccttaactgtgtccgcattaacggtacatatcttgaaggcgttcctgaggcgctcaagacatacgagctgtgccttgaagctgtcaggaaaaacggttacgcgcttaaagatgtgcctcctcatcttttgaccaaagaaattatccttgccgccgtgtgcggccacagcgacgcccttcaatatgtgcctgccgcgtttcaaacagaagaaatatatatcgaagctcttaaaaataacattttcggttttgctgtgggttatgtcccggaagaatatctcacaagagaaatctgtcttgccatgttaagcaatcttggctggaatccttctatgtctttgggaagaataccaaaatccgttatgacagaagactttctccttgccgccgcccgtttgaacggcaggatgcttgaatttgtgccgaaaaaactgcgtacacaggaactttgttttgacgctgttaaaaacaacggggctgctctcgaatttacaccgcctgaattcataacggataccctctgcagtgccgccattgaaagcaatgcctgcgcgctcaagtttattccagccaaattgaagaccagggaaatctgccatttggcagtacaaaaggacggaatagctgtcaattatgtaccgccaaaatttataacaggcgatttggccggcaagcgatga

SEQ ID NO: 1132 - protein, 317 aa, Unknown
  Obtained from environmental sample
  misc_feature (1)..(317): Xaa is any amino acid
MRYISEHIRTADFYAEYMITSKSYSSYHPVIPPEPLNEKIYRKAVRNNADALASVPEEQRTYELCVEALLSRLSLGSTLNFVPDKFKTPEFCLNCVRINGTYLEGVPEALKTYELCLEAVRKNGYALKDVPPHLLTKEIILAAVCGHSDALQYVPAAFQTEEIYIEALKNNIFGFAVGYVPEEYLTREICLAMLSNLGWNPSMSLGRIPKSVMTEDFLLAAARLNGRMLEFVPKKLRTQELCFDAVKNNGAALEFTPPEFITDTLCSAAIESNACALKFIPAKLKTREICHLAVQKDGIAVNYVPPKFITGDLAGKR

SEQ ID NO: 1133 - DNA, 717 bp, Unknown
  Obtained from environmental sample
  misc_feature (1)..(717): n is a, c, g, or t
atgaaagtggtaaaaaatacccatttacatcccgaagaaattcaggcgttttctgataaattcatagtggcgtcaaaaaaaataaaacgttatataaaagaacaggaacgccttgaaaagcaccttaaagtaaattccttaaaagaacttcgcacgatgggaaggtatcttaccattaaggaagaacgtgaaaaacttgaaaaagacctcggcctgtcatcggatgaaataaaggaaaaaatcaggcttatacaggttactgataagaaattaaggactctggaagcggaatttgaagagccgatagagagtattaatcaaatggcttctgaaatttatcatgggcgtataatgatgaaaaacgccaaagacaggctaataaaggcaaatttaaggctggttgtttctatcgctaaaaaatacactaacaggggactgccgttttttgatcttgtgcaggaagggaatatcggtcttatcaaagccgtagaaaaatttgaataccagaagggctttaaattttctacttatgcgacatggtggatcaggcaggctattacccgttccatctctgatcaggcaaggacaatccgcgtgcccgtgcacatgatagagcagataaataaagtggtgcgcgaatcaaggcagcttttacagacgcttggcagggagccgacggacgaggaaatagcggaaaaactggttggtctgcgataa

SEQ ID NO: 1134 - protein, 238 aa, Unknown
  Obtained from environmental sample
  DOMAIN (126)...(196): Sigma-70 region 2
  misc_feature (1)..(238): Xaa is any amino acid
MKVVKNTHLHPEEIQAFSDKFIVASKKIKRYIKEQERLEKHLKVNSLKELRTMGRYLTIKEEREKLEKDLGLSSDEIKEKIRLIQVTDKKLRTLEAEFEEPIESINQMASEIYHGRIMMKNAKDRLIKANLRLVVSIAKKYTNRGLPFFDLVQEGNIGLIKAVEKFEYQKGFKFSTYATWWIRQAITRSISDQARTIRVPVHMIEQINKVVRESRQLLQTLGREPTDEEIAEKLVGLR

SEQ ID NO: 1135 - DNA, 381 bp, Unknown
  Obtained from environmental sample
  misc_feature (1)..(381): n is a, c, g, or t
atggctaccaatctcaatttaaaacattccgaaacgcgggaacatcgcttggattcaactgtttgctggactggaaatttgcaggagatgtccgaatgcaattcctcttgcggtggtgtgagaaagagaaacaaggaaagaaggttctcgcaagcgggtatgtgtcccaacggatgcgcggcgggcatactccttggcattcgcgatattgctgttattttgcacggccctgcgggatgttctcaactcggcgcacccacgttcaggcatcaagcggcttcaagaattaacgcaagctacgaatcttactcctacggtgacgatatgaatgaaaacgacacgattttcggcgcgattggtgctctgaaaaaacgtggctga

SEQ ID NO: 1136 - protein, 126 aa, Unknown
  Obtained from environmental sample
  misc_feature (1)..(126): Xaa is any amino acid
MATNLNLKHSETREHRLDSTVCWTGNLQEMSECNSSCGGVRKRNKERRFSQAGMCPNGCAAGILLGIRDIAVILHGPAGCSQLGAPTFRHQAASRINASYESYSYGDDMNENDTIFGAIGALKKRG

SEQ ID NO: 1137 - DNA, 450 bp, Unknown
  Obtained from environmental sample
  misc_feature (1)..(450): n is a, c, g, or t
atgattttctttatctctgtgcaggaaaccggtggaacattgctcggcacaggcaagtatctgcgtgagaagaatccgaacatcaaaattgtagcgtatcaggcaggtataaattcgcgcnccttagagagtggaaaccccgaacaaccggaaatgcacggtgttcacgtaattgaaggcggacctttcatcataccgcttttgaaaggcgtgaaaaatctctgggacgaaatcatagacgttgaagcaccgacaggttgggaaatagccagagtcgtggcaaaaaacgaaggcatactaattggcgagtcggcaggagcagcggtatataccgcaatacaagtcgcgaaacgccctgaaaacaaaggcaagcgtatagttgcgatggtaccggactccggttcgcactatctgaccacaggactgtttgaactaccagaaataaaatag

SEQ ID NO: 1138 - protein, 149 aa, Unknown
  Obtained from environmental sample
  misc_feature (1)..(149): Xaa is any amino acid
MIFFISVQETGGTLLGTGKYLREKNPNIKIVAYQAGINSRXLESGNPEQPEMHGVHVIEGGPFIIPLLKGVKNLWDEIIDVEAPTGWEIARVVAKNEGILIGESAGAAVYTAIQVAKRPENKGKRIVAMVPDSGSHYLTTGLFELPEIK

SEQ ID NO: 1139 - DNA, 399 bp, Unknown
  Obtained from environmental sample
  misc_feature (1)..(399): n is a, c, g, or t
atgatcagatggccgagggctggcgcagccacctaccccaatgaatgttgcggaatccttttaggtgaaattaaagacgatggaaccaaaaacgccaaacgcactgtagatatagataactccagcgaaaacgacgagcaatatcacagatttctcataacaccagaggagatgttcaaagcggagaaaattgcaagagcggaaaaattggaaattatcggcttttaccactcgcaccccgaccatccctcaaaaccctccggctatgataaagaccacgccctgcctttttattcttatattattgtatcggtggacaagggcaaagcccaaattctcaccagttgggaactcaccgataatagagatgattttgtgcaggaaaaaattgtggagtag

SEQ ID NO: 1140 - protein, 132 aa, Unknown
  Obtained from environmental sample
  misc_feature (1)..(132): Xaa is any amino acid
MIRWPRAGAATYPNECCGILLGEIKDDGTKNAKRTVDIDNSSENDEQYHRFLITPEEMFKAEKIARAEKLEIIGFYHSHPDHPSKPSGYDKDHALPFYSYIIVSVDKGKAQILTSWELTDNRDDFVQEKIVE

SEQ ID NO: 1141 - DNA, 894 bp, Unknown
  Obtained from environmental sample
  misc_feature (1)..(894): n is a, c, g, or t
atgcggctgcgggaaatatgccgcgcaaagcgggaacttcagattgtgtccggcgaatggggaatattggatcccggttcagataaaaaaacgctgtacattttggcaaaagagatggccgattccggaaagtatgccgtcaggataagcagcgtgttgcagtacctggaaaaataccccggtggaaagaacattcagatcagccggatcaacaaaaaatgggttgaaaattttcaggactatttgttgaagcatctgtcccggaacactgcacgcaattatatccttgggatttgccaggtacttaacaaggcggttcatgaaaatatcatattgaaaaatcccggccatgatgttgaaattatcaaaaaacaggaatcggaaagggtttttcttaatattgaggaaatgcaaaagctcgccaacatcgaggcaaagacggatctggaaaaggatattaaaagggcgtttatctttgcctgttataccggcttgagggtgtcggatctgattacaattacatggggaaatatcgagcacaacccgccgcagattgtaaaaagccaaaaaaaaaccggggtaagggtctacatccccctgcacaagaccgccaggacagttattgacgacaatgctttgcacgataatggcgagttaatttttccctggcttaaggttattaagaacaacaggaacctttaccttaccaagtgggcggatcgcgccggcataggcaaggctataggatggcacactgcccggcacacattcgcagtaaaatcccttgaatccggagcggacatttacacggtctcaaaattgctcggccacacggatataaccgcaactcaggtttacgccaaggcaacagacaaaatgaagcgcgaagcgtaa

SEQ ID NO: 1142 - protein, 297 aa, Unknown
  Obtained from environmental sample
  DOMAIN (121)...(296): Phage integrase family
  misc_feature (1)..(297): Xaa is any amino acid
MRLREICRAKRELQIVSGEWGILDPGSDKKTLYILAKEMADSGKYAVRISSVLQYLEKYPGGKNIQISRINKKWVENFQDYLLKHLSRNTARNYILGICQVLNKAVHENIILKNPGHDVEIIKKQESERVFLNIEEMQKLANIEAKTDLEKDIKRAFIFACYTGLRVSDLITITWGNIEHNPPQIVKSQKKTGVRVYIPLHKTARTVIDDNALHDNGELIFPWLKVIKNNRNLYLTKWADRAGIGKAIGWHTARHTFAVKSLESGADIYTVSKLLGHTDITATQVYAKATDKMKREA

SEQ ID NO: 1143 - DNA, 933 bp, Unknown
  Obtained from environmental sample
  misc_feature (1)..(933): n is a, c, g, or t
ttgattgaactttttaacctgcttaaaaaagaagaacccggcagcgacggcgaatttgccgtaacaagggaaatcgccacaagtttcgcgcggttaaacgactatgaaagacttatacattttttaagcgcaaaaacgattaataacccgaccgacccttataacggctactatttcctgatgattgcctacgcctatatccaaagggaatccagacccattgcttccctttatttcgatttaatcattaaaaattaccctgatttcatcataaacgacgaatcactccaccttatctgcctgcgtaaccttgtcaatgagaatgtcaaagtagaccgaaaggtttggtattacaacgaacttatctccagattttccgataaaatcgacttaggagtcagttattttatgcttgggcaggcctgcgaacaatccggcgactggaacggcgcggttgcggcatatacaaattatctgccgtattcggggactgtaataccgggatttccctattccgcccaacacgcgaaacatcaggtagacttcagccgttcccagaaagactggacttttgaaagccttgcctcgttaagggcggctatagaagccgctcttgatgacagcaacgccagcgctcttatgagataccagacaaaagtaaattttttcgcccgttcatgggagcaagtagaaaccgatgatataggtatgaacaaatttaatcttgcccaatttatgtacggaaaccgaattaaatactcaccaactctggacgattcctcaaattcaaccgaggcattcttaaaaacgaccggttggtctctgtctcttaatacatggtatctgtactttagaaagatctatttccccgcagacccggaaattcacggaagatgggaatgggctgggatttactacggagagaaattttga

SEQ ID NO: 1144 - protein, 310 aa, Unknown
  Obtained from environmental sample
  misc_feature (1)..(310): Xaa is any amino acid
MIELFNLLKKEEPGSDGEFAVTREIATSFARLNDYERLIHFLSAKTINNPTDPYNGYYFLMIAYAYIQRESRPIASLYFDLIIKNYPDFIINDESLHLICLRNLVNENVKVDRKVWYYNELISRFSDKIDLGVSYFMLGQACEQSGDWNGAVAAYTNYLPYSGTVIPGFPYSAQHAKHQVDFSRSQKDWTFESLASLRAAIEAALDDSNASALMRYQTKVNFFARSWEQVETDDIGMNKFNLAQFMYGNRIKYSPTLDDSSNSTEAFLKTTGWSLSLNTWYLYFRKIYFPADPEIHGRWEWAGIYYGEKF

SEQ ID NO: 1145 - DNA, 375 bp, Unknown
  Obtained from environmental sample
  misc_feature (1)..(375): n is a, c, g, or t
ttgatccgctaccattaccatgtagttaaaaccggcgacacattatggtcgatgtctaggagttacgggatagccgtaaatgtaattgaacagcacaatccggggattgccggcagatatttaaaaataggggaaacgatcattattccggcgttcggcaacgcccccctgcccaaaattgagtctgtaagcgttcccgtaaccgcgccgcctaactttacaggctcttatgtggtacaaaaaggcgaaactttttggtctttgagcaggaaatacggggtggatcctcaggttctggctgaggcaaacgggcttaaaataaccgatattctgcgtgaaggaagaacgattagagtgccgataatattaccataa

SEQ ID NO: 1146 - protein, 124 aa, Unknown
  Obtained from environmental sample
  DOMAIN (7)...(50): LysM domain
  misc_feature (1)..(124): Xaa is any amino acid
MIRYHYHVVKTGDTLWSMSRSYGIAVNVIEQHNPGIAGRYLKIGETIIIPAFGNAPLPKIESVSVPVTAPPNFTGSYVVQKGETFWSLSRKYGVDPQVLAEANGLKITDILREGRTIRVPIILP

SEQ ID NO: 1147 - DNA, 870 bp, Unknown
  Obtained from environmental sample
  misc_feature (1)..(870): n is a, c, g, or t
atgatgcagcaactgatgaacagcgccgaggcaaaaggcggcatggacaaccggaatttcagcgcggagcagtttgccgcttaccgcgccgaattcgggcttgaccagccgttttatgtgcagtacttccgctggctaaaccgcgttattgttcaccacgatctgggggtgagccttatctcccgcgctccggtttcatttttaatagcgtcgcgcctgctcaactcgctgttgttaaacgtcatttcgctggtgctgatcacggtgttttcattcgcgctgggggtgtacttttccaccaaggcgggaacaaaaaccgatcttgcggtaacctttatcgccctggctttgcacgcctttccgggcctgctgctcctgattctgttacagttattcgcttcggtaacggggctgtttccggtaaccgcctaccccccctttccgttctccgaagcgccggtaaagtttattttttcctacgcccatcacatctttttgcccttgctggcagcgtttttgggcggcatcggcggcacgctgcggatgatacgagcgacgatgctcgaccagcttggccagccctacatcaccagtctgcgggcgcggggtatcgccgaatggcggatttattttgcccacgccttccgcaatacgctgaacccctacattaccggcagcgccaacctccttgccggccttttttccggctcccttatccttgaaattatttttgcatatccgggaataggcaggcttatgtacgaggcggttatccagcaggacatcaatctggtgcttgccaatatcatgtttatttcattcctggtgctggtgggcatggcgttagccgatattttctcgctctggtga

SEQ ID NO: 1148 - protein, 289 aa, Unknown
  Obtained from environmental sample
  DOMAIN (73)...(288): Binding-protein-dependent transport system inner membrane component
  misc_feature (1)..(289): Xaa is any amino acid
MMQQLMNSAEAKGGMDNRNFSAEQFAAYRAEFGLDQPFYVQYFRWLNRVIVHHDLGVSLISRAPVSFLIASRLLNSLLLNVISLVLITVFSFALGVYFSTKAGTKTDLAVTFIALALHAFPGLLLLILLQLFASVTGLFPVTAYPPFPFSEAPVKFIFSYAHHIFLPLLAAFLGGIGGTLRMIRATMLDQLGQPYITSLRARGIAEWRIYFAHAFRNTLNPYITGSANLLAGLFSGSLILEIIFAYPGIGRLMYEAVIQQDINLVLANIMFISFLVLVGMALADIFSLW

SEQ ID NO: 1149 - DNA, 885 bp, Unknown
  Obtained from environmental sample
  misc_feature (1)..(885): n is a, c, g, or t
gtgttggaattggcgggtcctcgtgaaatgatctatttttcaccagctcatgtccacgtgggaattgtaagctgcggcggtctttgccctggaattaacgatgttatccgcgccattgtccgctgtttgtggtaccggtacggagttaccagaatttccggtattcgttacgggtataggggttttttaccggagtctcagtttggggtaaaagagcttgatcctgacagcgtagacgacattcataaaatcggcggcacatatttagggagcgccagaggcggcggcaggcaagtagtggaaattgttgacgcgatggaaaaactcaatttgaatgtgctttttacaatcggcggagacggcactcagcgcggaatgcttgatattgcccaggaagttgacaaaagaaaattaaaaatagcgataatcggaataccaaaaacagttgacaatgactttgccctgatagaccgttcttttggttttaatactgcggtacagaaagctgtggaagttgtgtccgcggcgcacatggaagcgtcgtccgcgattaacgggattggtcttgtaaaactgatgggaagagattccggttttattgcggcgcataccgcgctggcaagccacgaggtaaactttgtgcttatccctgaagtgccgtttaaccttgaaggctacaacggatttttatatcacctggaagaacgggttttaaaacgcaaacacgcggttatcattgtcgccgaaggagcgatgcaggaacagcttataaaagataaaaaaaccgacgcgggcggaaatacaaaatttgaagacgtgggcgtttatcttaaaggaaggataaagcaaacatttttaaggaaaagggaattgagatccacttaa

SEQ ID NO: 1150 - protein, 294 aa, Unknown
  Obtained from environmental sample
  DOMAIN (19)...(278): Phosphofructokinase
  misc_feature (1)..(294): Xaa is any amino acid
MLELAGPREMIYFSPAHVHVGIVSCGGLCPGINDVIRAIVRCLWYRYGVTRISGIRYGYRGFLPESQFGVKELDPDSVDDIHKIGGTYLGSARGGGRQVVEIVDAMEKLNLNVLFTIGGDGTQRGMLDIAQEVDKRKLKIAIIGIPKTVDNDFALIDRSFGFNTAVQKAVEVVSAAHMEASSAINGIGLVKLMGRDSGFIAAHTALASHEVNFVLIPEVPFNLEGYNGFLYHLEERVLKRKHAVIIVAEGAMQEQLIKDKKTDAGGNTKFEDVGVYLKGRIKQTFLRKRELRST

SEQ ID NO: 1151 - DNA, 630 bp, Unknown
  Obtained from environmental sample
  misc_feature (1)..(630): n is a, c, g, or t
atggccgagcatgcgccgcgattctttttgactagattcccgctttaccaaatccagaatacgcccngctctcaaatagatctccctattgaaaaactcgcccgtatgcggggaattacttttgaccggatgaacgatgaaatgaaccaatacagggatgactgggttaaagcgcataacgggcaggggataagccatgggaatatttttaaagcctttggcgtcagcatcggcgaaagcgtgaaatggcgggaagaactctgccagccagagcagtacctctcacgggacacgcggcttcgttcggcgcttgaacggctcaagtcggcgtttaccctgggggtggttaccaacaacccggtttccatcgccaaaagaacccttcgcgtcctgggggtggaggatctgttccatgccattatcggccttgacacatgcggcgtctccaaaccccacaaagagcccttcacacgggccgcggacctttgcggcgcggcgcccgaagcctgcgtcgccgtgggggatcgttatgaaattgacatcgcccttcccctggaactgggcatgggcggcatccttgttgacggagtggaggatgtatacaaactgcccgaaattcttgtaaagtag

SEQ ID NO: 1152 - protein, 209 aa, Unknown
  Obtained from environmental sample
  DOMAIN (36)...(197): haloacid dehalogenase-like hydrolase
  misc_feature (1)..(209): Xaa is any amino acid
MAEHAPRFFLTRFPLYQIQNTPXSQIDLPIEKLARMRGITFDRMNDEMNQYRDDWVKAHNGQGISHGNIFKAFGVSIGESVKWREELCQPEQYLSRDTRLRSALERLKSAFTLGVVTNNPVSIAKRTLRVLGVEDLFHAIIGLDTCGVSKPHKEPFTRAADLCGAAPEACVAVGDRYEIDIALPLELGMGGILVDGVEDVYKLPEILVK

SEQ ID NO: 1153 - DNA, 423 bp, Unknown
  Obtained from environmental sample
  misc_feature (1)..(423): n is a, c, g, or t
gtgctgggccacgaaatttcccacgccctgcttaaccacggccaacagcggatgagtgccgatttgcttcaacaaattggggcgctcggagttgcggtgggatcacagatggcgggcctgtctgcggatatgcaatccggtttgatgactgcttatggccttggcactgcggttggcgccactttgccattcagccggagccacgaaagcgaagcggaccactacggccttatccttatggctatcgctggctacaacccggacgaagcagtcccattctgggagcggatggcagccatgggcggtagcggcacaccggaatttctcagcacacacccctccgacgccaccagaataaagcagttacaggcttggacacctgaagcaaagaaaaaagctgccgagttcggggttaacttctga

SEQ ID NO: 1154 - protein, 140 aa, Unknown
  Obtained from environmental sample
  DOMAIN (2)...(127): Peptidase family M48
  misc_feature (1)..(140): Xaa is any amino acid
MLGHEISHALLNHGQQRMSADLLQQIGALGVAVGSQMAGLSADMQSGLMTAYGLGTAVGATLPFSRSHESEADHYGLILMAIAGYNPDEAVPFWERMAAMGGSGTPEFLSTHPSDATRIKQLQAWTPEAKKKAAEFGVNF

SEQ ID NO: 1155 - DNA, 375 bp, Unknown
  Obtained from environmental sample
  misc_feature (1)..(375): n is a, c, g, or t
atgggccgtgtttttaacggaaataattttgcccccctttcagaggccactgtagagcttctgtgggcaggggaacttgtagcaatgagggacggaaactggcagaatccatgccctattgttcaccacatcgagggcaactatagtttttggcccgctccagtaccggcatcaagggtgaataaccacaagatcttcgagtatattctacgcgtgtcggcgcctgaatttgagaccctcactcacacttttaaaatacctgtggcaagcgaaatccaggcgtccatgtcatttagcccggacagaacattcaagctacctgacctttacatgttcccgccgggcgaggccgaaaaaaacgggtatttggactaa

SEQ ID NO: 1156 - protein, 124 aa, Unknown
  Obtained from environmental sample
  misc_feature (1)..(124): Xaa is any amino acid
MGRVFNGNNFAPLSEATVELLWAGELVAMRDGNWQNPCPIVHHIEGNYSFWPAPVPASRVNNHKIFEYILRVSAPEFETLTHTFKIPVASEIQASMSFSPDRTFKLPDLYMFPPGEAEKNGYLD

SEQ ID NO: 1157 - DNA, 741 bp, Unknown
  Obtained from environmental sample
  misc_feature (1)..(741): n is a, c, g, or t
atgaaaaagataataatcggacttggttcctgcggtatcgcttccggcggtttaaaagtaaaagaaactttaaaaactcttatcgaagaatcaaaacttgatattgaattaagcgaaaccggttgtatgggaatgtgttacaaagagcccatgatagaaattgccgaggactccacaagaacaatttatggtgatgttgacgtgaaaacggcaaagaaaatttttgaaagccatatcatcaacaacacgcctgtagtggaaaacatcgttttagattccaatggcggcggttctgaaaaggactttatgtcccgtcaggaaagaattgttttggtacgctgcggagaaataaatccggaatcgatagacgactatttaaaaacggacggttacaagggactggaaaaagcgattaagacaatgaccccggcgcaggtaattgaagaagtgcaaaaagcgggaataaagggcagaggcggcgcaggcttcccgaccggcacaaaatggaaatttgcggctgatagtaaagccgatcaaaaatacattatctgcaatgcggacgagggagacccgggagcgttcatggacaggagtgtccttgaaggtgatccgcacagtgtgatagaagaggttgattatcggcggttatgcgattggcgcgacagagggttatatctatgcccgcgccgaatatcccattgccattcgcagactaaaaatcgccataagcgcgcgccataa

SEQ ID NO: 1158 - protein, 246 aa, Unknown
  Obtained from environmental sample
  SIGNAL (1)...(20)
  DOMAIN (129)...(246): Respiratory-chain NADH dehydrogenase 51 Kd subunit
  misc_feature (1)..(246): Xaa is any amino acid
MKKIIIGLGSCGIASGGLKVKETLKTLIEESKLDIELSETGCMGMCYKEPMIEIAEDSTRTIYGDVDVKTAKKIFESHIINNTPVVENIVLDSNGGGSEKDFMSRQERIVLVRCGEINPESIDDYLKTDGYKGLEKAIKTMTPAQVIEEVQKAGIKGRGGAGFPTGTKWKFAADSKADQKYIICNADEGDPGAFMDRSVLEGDPHSVIEEVDYRRLCDWRDRGLYLCPRRISHCHSQTKNRHKRAP

SEQ ID NO: 1159 - DNA, 981 bp, Unknown
  Obtained from environmental sample
  misc_feature (1)..(981): n is a, c, g, or t
ttgnnnnngggattatggccgagcggccgaggtttcagagaaaaggaaaatgtgataaaaaagagcggttttttggagtactatcaccccaaggaagaaataaaagacgttggcgggctggataatttaaaaaattggcttgaaaaaagaggccgcggcttcgataaaggcgcgaaagagttcggactgacgactccgagaggtattctgctccttggcataccgggaaccggaaaatcactgaccgcaaaggccatcggcaatttatggcactttccgctattgcgcttggatatgggcaagattttcggcgggatagtggggcagtcggagagcaatatccgcggggcgctgaacatcgcggaggccatcgccccatgtatcctttggatagatgaaatagaaaaagccatgagcggaataagctcaagcggcagtacggacggcggaacgacatcgagggtgctgggaacatttttaacctggatgcaggagaaaacaaagccggtcttcgtggtcgcgacggcaaacaatatttcacaacttccgccggagcttctgcgcaagggtagggtagatgagatctttttcgtggatttaccgacccaaaaagaaagagaagaaataatttctattcacttgacacgcaaatatagagatccgaacaattttgacgttgtgaaatttgccaaggatagcagaggtttttccggggccgaacttgaggaaacgataaaagacgcgttgtttagcgcgtttgacaaaggacgagaaatcaaggatgaagatatctcagaagcaataaagaagacgtttccattgtccagaacaatgcacgaaactatagataagatgcgcgtatgggccaaaagcagagcggttcccgcttccgcagaggaacctgaaaaattggacactggaaaaagtaaagacgttccgaaactganacaagaaggatataataacccgtttatttcttaa

SEQ ID NO: 1160 - protein, 326 aa, Unknown
  Obtained from environmental sample
  DOMAIN (67)...(195): ATPase family associated with various cellular activities (AAA)
  misc_feature (1)..(326): Xaa is any amino acid
MXXGLWPSGRGFREKENVIKKSGFLEYYHPKEEIKDVGGLDNLKNWLEKRGRGFDKGAKEFGLTTPRGILLLGIPGTGKSLTAKAIGNLWHFPLLRLDMGKIFGGIVGQSESNIRGALNIAEAIAPCILWIDEIEKAMSGISSSGSTDGGTTSRVLGTFLTWMQEKTKPVFVVATANNISQLPPELLRKGRVDEIFFVDLPTQKEREEIISIHLTRKYRDPNNFDVVKFAKDSRGFSGAELEETIKDALFSAFDKGREIKDEDISEAIKKTFPLSRTMHETIDKMRVWAKSRAVPASAEEPEKLDTGKSKDVPKLXQEGYNNPFIS

SEQ ID NO: 1161 - DNA, 543 bp, Unknown
  Obtained from environmental sample
  misc_feature (1)..(543): n is a, c, g, or t
atgaaatgggaaaaaaaagacatcccgccggaaaaagtcaaggagatcagcgcaaaatacggttgcgatctgcttaccgcttccatactgacccgccggggaatcacaaacggcggatcaatcaaattttttcttgaagaagacgaaaggtttctgcacagcccctttgaactccccggcatggaagacgcggtagaacggattctcgcggcaaaggaagaaggtgaaaaggttctggtcttcggggacagcgacgtggacgggataaccggcaccgtcctgcttaccgagtaccttgaaggcatgggcattgacgtaagctggcggatcccgggcgccgacgatccttacgggctttcactggaggcggttaaggaattcgccgccgcctacggaacccttnatatcaccgttgactgcggcatttcccggctggacgagatcaaactggcgaatgagcttttcattcatggtattgtcaccgatcatcatgagccctcagacgaactgcccgacgctttggtcatcatcaaccccaactga

SEQ ID NO: 1162 - protein, 180 aa, Unknown
  Obtained from environmental sample
  DOMAIN (71)...(177): DHH family
  misc_feature (1)..(180): Xaa is any amino acid
MKWEKKDIPPEKVKEISAKYGCDLLTASILTRRGITNGGSIKFFLEEDERFLHSPFELPGMEDAVERILAAKEEGEKVLVFGDSDVDGITGTVLLTEYLEGMGIDVSWRIPGADDPYGLSLEAVKEFAAAYGTLXITVDCGISRLDEIKLANELFIHGIVTDHHEPSDELPDALVIINPN

SEQ ID NO: 1163 - DNA, 558 bp, Unknown
  Obtained from environmental sample
  misc_feature (1)..(558): n is a, c, g, or t
gtggcgctgctgacgggggggaagcggctggcgagatcgctttttttcagcgtgcccgcgatagaggagcagccgtcgtttctgcaggcggtgctgccggtgccttcaacggcaaagccgggcatggtaacggtagtttttgaggccgcgaacgggatactcggtgaaatccaactggaaatcgtcggcagggattttgtttccgaggtgatagaacttaatcctgttctgaccggcgtaaggaccgatcccgatcctcaaaaaaccagcgaagccgcgcgtttgcaggcgatcatcaaccgtaccggaaacgaaattttttgttacggcagttttgtccccccggtgacggccacgcggcgcaccagtttttttggggaccgcagggtgtacaaatactcgaacggcggcagcgacgtgtcaatccacgcgggcatagattacggcgtgccaaagggaaccgttgtcagttcctgcgggcccgggaaggtagttttggcccgtcccaggatcgttacggggaattcgatgtcatcgaacacctctcggccgatctga

SEQ ID NO: 1164 - protein, 185 aa, Unknown
  Obtained from environmental sample
  misc_feature (1)..(185): Xaa is any amino acid
MALLTGGKRLARSLFFSVPAIEEQPSFLQAVLPVPSTAKPGMVTVVFEAANGILGEIQLEIVGRDFVSEVIELNPVLTGVRTDPDPQKTSEAARLQAIINRTGNEIFCYGSFVPPVTATRRTSFFGDRRVYKYSNGGSDVSIHAGIDYGVPKGTVVSSCGPGKVVLARPRIVTGNSMSSNTSRPI

SEQ ID NO: 1165 - DNA, 945 bp, Unknown
  Obtained from environmental sample
  misc_feature (1)..(945): n is a, c, g, or t
atgggaaatatttccaccgagtacatgggagccgccattcgcagtttgggcattaacgcggaagcgatgcctgtggcgacggcaaaaacaattcaggcggcgagagcgcatgcgtcgggcaaggaatgcgtgcccagccatttggttttgggcagcgcattggaattctttttcagcgacaaataccgcaaagatgagttgtatcttctctttgtgccgataacgacaggtccctgccgtacggggcagtattatgtctactacgataatcttttccgtgatttgcgtcttgaaaacgtagtggtctttatcctctccgcggataattcatacacggagcttggtccaagtttcgcaaaagagatgtggaaaggtttggtgttatccgactacttaaaagacattcaatgttctctcttggctgcggcggttgatcccgtaaaagccgaaaaagattttgaacattcatggcgcaaagttatgcacgccgtagaacacaaccccaaagcgctgtggaaagaattaaaacatgtcgcgacagatgtaaaaaaaataccgctaaaacgaaaaataacggattgcccccgcgtattaattgtaggcgagatttatgtgcgccgcgatgattttgcagtcggagaattaatcgaacttatgagcgagaggggcattgttgtaaaagtcgccggcataagcgagtggatacattaccttgattttgttcgcgagtacgctcttaaaaaacttattaaactgcaaaagccgggtacaagacttttctccaaaccgtctaaagaccttaaaaaacttcagattgaagaatggtggaaacatcatatcgagaaaaaagtcctcgccattttggaaccgacaggacttatccctgaaactccgcacgatatgcgccatatcatgaaatacacgcaggagcatttgtcaacctga

SEQ ID NO: 1166 - protein, 314 aa, Unknown
  Obtained from environmental sample
  misc_feature (1)..(314): Xaa is any amino acid
MGNISTEYMGAAIRSLGINAEAMPVATAKTIQAARAHASGKECVPSHLVLGSALEFFFSDKYRKDELYLLFVPITTGPCRTGQYYVYYDNLFRDLRLENVVVFILSADNSYTELGPSFAKEMWKGLVLSDYLKDIQCSLLAAAVDPVKAEKDFEHSWRKVMHAVEHNPKALWKELKHVATDVKKIPLKRKITDCPRVLIVGEIYVRRDDFAVGELIELMSERGIVVKVAGISEWIHYLDFVREYALKKLIKLQKPGTRLFSKPSKDLKKLQIEEWWKHHIEKKVLAILEPTGLIPETPHDMRHIMKYTQEHLST

SEQ ID NO: 1167 - DNA, 792 bp, Unknown
  Obtained from environmental sample
  misc_feature (1)..(792): n is a, c, g, or t
atggcagttaaaaattacggcattgcccttgatgttgaaaacaaggccgcattgcagttgatgaaaaatatccaaaaacttactgaagaagaacttgctaaaaaatcagaaagtatagcgcggatagacgagcaaattcaggcttttgaatcttctcttgatgaactgaacggaatgacaaacagagttcaggaaaatctcagtctcataagggatgaatctgtttttgtagaaaacacgggaagaaaagtaagcgaagccaaagaaaaatttgaacaggtagaaagggcgattattgccgccgaaaaaaaccttgaagaaaccgaaaagcgtctggaaaataaaaatgccgaagcgcttgaactggctgcaaaggaagtaatatcttctgcaaagtcaaaaatttcagattttgaaacaaccgcgcaggttattgagcgcaaggtagaagaacaccgcgaagcggtaacaaaagcggaacgtgaacgggaaacaattatcacccgtgatctggagatggtaaaaaaaacattcaacgatgtgcttgaaaatgccggaaaaaaagcagacaaactggaagaagctgcgcttgtaaagttacgcgaacaggcgaatgaacgcgttgcacagataaaaactttttttgaagaaaaaataaaggttgttcaggaaacattaaaaaccgaacaggtaacgattaacgataaattaaaaactattcacgataaatgtaattcggaaattctcgacataaacacaaagcaaaagaatttcatcaggaatgggttatag

SEQ ID NO: 1168 - protein, 263 aa, Unknown
  Obtained from environmental sample
  misc_feature (1)..(263): Xaa is any amino acid
MAVKNYGIALDVENKAALQLMKNIQKLTEEELAKKSESIARIDEQIQAFESSLDELNGMTNRVQENLSLIRDESVFVENTGRKVSEAKEKFEQVERAIIAAEKNLEETEKRLENKNAEALELAAKEVISSAKSKISDFETTAQVIERKVEEHREAVTKAERERETIITRDLEMVKKTFNDVLENAGKKADKLEEAALVKLREQANERVAQIKTFFEEKIKVVQETLKTEQVTINDKLKTIHDKCNSEILDINTKQKNFIRNGL

SEQ ID NO: 1169 - DNA, 723 bp, Unknown
  Obtained from environmental sample
  misc_feature (1)..(723): n is a, c, g, or t
atggcggcagtaataaaggatttagaacaggtaaacgccgatttacaggaacaaaaagagcgggtagacaacgtagactttaaaatggtcactttctccctggccggaaaggactacggcgttgatatcatgagtgtaaaggaaatcgcgaaagccgataaattcacttatgtgcctaatgcggcatcgtttgtccggggcgtatataacctgcgcggcgatattattccaataattgatttaaggctgttctttcatttgccggtggaaaagaaagaagagaatttggaaaatatgctcatcctccatattaatgatcaggtatatggaacaattgtagataaaattgataaagttgtcgggatcacaaaagatacgatacagccaccgcatccgatttttggggacattaacattaagttcataagcggtgttgtggaaaaacagggtgatctttatatcattctggatgttgtacgcatcttttccattgaagatgaaaaaagcaaggcccgtaccggtggggcggcagatggcgaattttttgttccacctcctccggcggcggattcggccgcggcgcaaaggattgccgcggattcggctatcggttttgtccaggaaagccttgcggcattgcggcactttaccactacaggcgtaaatggcagatggcttcacaaacgtttaccgaaggagtcaaaacgcctcggccgattctga

SEQ ID NO: 1170 - protein, 240 aa, Unknown
  Obtained from environmental sample
  DOMAIN (28)...(166): CheW-like domain
  misc_feature (1)..(240): Xaa is any amino acid
MAAVIKDLEQVNADLQEQKERVDNVDFKMVTFSLAGKDYGVDIMSVKEIAKADKFTYVPNAASFVRGVYNLRGDIIPIIDLRLFFHLPVEKKEENLENMLILHINDQVYGTIVDKIDKVVGITKDTIQPPHPIFGDINIKFISGVVEKQGDLYIILDVVRIFSIEDEKSKARTGGAADGEFFVPPPPAADSAAAQRIAADSAIGFVQESLAALRHFTTTGVNGRWLHKRLPKESKRLGRF

SEQ ID NO: 1171 - DNA, 819 bp, Unknown
  Obtained from environmental sample
  misc_feature (1)..(819): n is a, c, g, or t
atgagacaggtagctatttacggaaaaggcggtattggaaagtccactaccacgcagaatttgacagcaggtttgggcgaaatgggcaaaaaaattatgatcgttggttgtgaccccaaagcggattccacccggttggttctgggcgggttggtgcaaaaaacagttcttgacaccctccgcgaagagggcgatgacatagagcttgaagcggtattgaaaaaaggttatgcgggtataaaaggcgtcgaatcaggcggtcccgaaccgggagtaggctgcgcgggacgcggtattattacatcaatcggtctgctggaaaaattgggcgcgtataccgaagatttggattatgtattctatgatgttctcggcgacgttgtttgcggcggattcgctatgcctatccgtgaaggaaaagcgcaggaaatctacattgtctgctcaggcgaaatgatggcgctgtatgcagcgaataacataacaaaaggtatttccaaatacgccaacacgggcggcgttcgtctcggcggtcttatttgcaattcacgcaaagtagacggagaagcggaacttgtttctgcggtagcaaaagaactcggcacgcagatgatccactttgtaccccgtgataacgcagtacataaggcggaaattaacaagaagactgttattgactattcacccaatgagccgcaggcggacgaataccgccagttggcgaaaaaaattgacggcaacgatatgtttgtagtaccgaagccgatgtccatagatcgccttgaagcgattttgatggaacacggtatcttggattaa

SEQ ID NO: 1172 - protein, 272 aa, Unknown
  Obtained from environmental sample
  DOMAIN (2)...(272): 4Fe-4S iron sulfur cluster binding proteins, NifH/frxC family
  misc_feature (1)..(272): Xaa is any amino acid
MRQVAIYGKGGIGKSTTTQNLTAGLGEMGKKIMIVGCDPKADSTRLVLGGLVQKTVLDTLREEGDDIELEAVLKKGYAGIKGVESGGPEPGVGCAGRGIITSIGLLEKLGAYTEDLDYVFYDVLGDVVCGGFAMPIREGKAQEIYIVCSGEMMALYAANNITKGISKYANTGGVRLGGLICNSRKVDGEAELVSAVAKELGTQMIHFVPRDNAVHKAEINKKTVIDYSPNEPQADEYRQLAKKIDGNDMFVVPKPMSIDRLEAILMEHGILD

SEQ ID NO: 1173 - DNA, 729 bp, Unknown
  Obtained from environmental sample
  misc_feature (1)..(729): n is a, c, g, or t
atggtcagattggccgaganaaacgcccctccggggcatctggaaaaattctatatcaacagcgaagacataatttccacgaatacccgttttgacggccttattatcacgggcgcgcctgtggagaccctgccctttgaagaagttgattactgggacgaacttgccagagtaattgactattcggaaaaaaatgttttttccactttgcatatttgctggggagctcaggctgggctgtaccgccgctataatattcccaaaaagccgctggataaaaaacttttcggcgtgtttccgcacgcggttaacgagcaataccatgttctgttccggggctttgacgatgaattccttgccccgcagtcccggcacacaacctgcgaccgggcggcaatcaccgcggagccgcgtcttacgattcaatccgaaacagccgagacaggagttttcattgtaaccgcccgcgatgcccgcgaggtgtatgtcaccggccacctggagtacgatccccttaccctggacggtgaataccgccgcgatcttgccaaggggcttcccatagagccgccgaagaattactatcctgataatgatccctcaaaagaaccggtagtccgctggcgggcccatgccaacctgttctttgacaactggctgaactatgtataccaggaaaccccttttgatctcaataaattaggaggagatatagaatggataatataa

SEQ ID NO: 1174 - protein, 242 aa, Unknown
  Obtained from environmental sample
  DOMAIN (1)...(229): Homoserine O-succinyltransferase
  misc_feature (1)..(242): Xaa is any amino acid
MVRLAEXNAPPGHLEKFYINSEDIISTNTRFDGLIITGAPVETLPFEEVDYWDELARVIDYSEKNVFSTLHICWGAQAGLYRRYNIPKKPLDKKLFGVFPHAVNEQYHVLFRGFDDEFLAPQSRHTTCDRAAITAEPRLTIQSETAETGVFIVTARDAREVYVTGHLEYDPLTLDGEYRRDLAKGLPIEPPKNYYPDNDPSKEPVVRWRAHANLFFDNWLNYVYQETPFDLNKLGGDIEWII

SEQ ID NO: 1175 - DNA, 606 bp, Unknown
  Obtained from environmental sample
  misc_feature (1)..(606): n is a, c, g, or t
gtgctggcctgcaatacggccaccatcgcggcgcttgccgaactgcgggaatgttttcccgatcttccctttgtgggaacagtgccggcggtaaaacccgctgcccttgcgtcaaaaaccgggaaaataggcgtacttggcacagagctgacaatcaaacagccgtatatcagggagctggcctcaaagtttggcaatggtgaaatccacggtattgcggccccggaacttgttgaatttgtcgaaggccggttcaattccgcttcagccggtgaaaagaaagacattgtgatgggttatctgaaccgcttccgcgccgcgggcgtggacacccttgtccttggctgtacgcactttcttttcctgttagacgaatttcaacgtgaagccgctccggacattaccgtctttgattcaatcacgggaatttcacatcgtattgaatcattgctggcggaacaaaaagacaaaagcgtcggagaaacaccctgcgggcaaaaccggattctgcttaccggtccggccgctcccgaaccttcgtggatctctttggcgcagcggcttggtttcagcctgtcgctgctggaagtttctcatgggcaatga

SEQ ID NO: 1176 - protein, 201 aa, Unknown
  Obtained from environmental sample
  DOMAIN (1)...(152): Asp/Glu/Hydantoin racemase
  misc_feature (1)..(201): Xaa is any amino acid
MLACNTATIAALAELRECFPDLPFVGTVPAVKPAALASKTGKIGVLGTELTIKQPYIRELASKFGNGEIHGIAAPELVEFVEGRFNSASAGEKKDIVMGYLNRFRAAGVDTLVLGCTHFLFLLDEFQREAAPDITVFDSITGISHRIESLLAEQKDKSVGETPCGQNRILLTGPAAPEPSWISLAQRLGFSLSLLEVSHGQ

SEQ ID NO: 1177 - DNA, 420 bp, Unknown
  Obtained from environmental sample
  misc_feature (1)..(420): n is a, c, g, or t
ttgacctttaaattcctcaaaaagtatcttaaaattgaattcgaaggagatttttctatgagcagcggcggaataaaggattcgtacaaccagtgggaagagactcaggtaaagaaaaccctttctaaattccctgaacaaaaacagaaatacgaatttgacaccggagttgaggtaaaaaggctttacacgccgcttgacctgccggacttcgactatgaaaccagcctgggctacccggggcagtatccgtttacgcgcggcgtccagcccactatgtaccgtggcaagcattggacaatgcggatgtacgccggctttgctaccgccgaggaatccaacaagcggtacaagtaccttatagagcagggttccatgggcctctcggtggcctttacctctaccaatggtacggcataa

SEQ ID NO: 1178 - protein, 139 aa, Unknown
  Obtained from environmental sample
  misc_feature (1)..(139): Xaa is any amino acid
MTFKFLKKYLKIEFEGDFSMSSGGIKDSYNQWEETQVKKTLSKFPEQKQKYEFDTGVEVKRLYTPLDLPDFDYETSLGYPGQYPFTRGVQPTMYRGKHWTMRMYAGFATAEESNKRYKYLIEQGSMGLSVAFTSTNGTA

SEQ ID NO: 1179 - DNA, 444 bp, Unknown
  Obtained from environmental sample
  misc_feature (1)..(444): n is a, c, g, or t
gtgctgggacaagggaacgaggccttcgggcactatagaaagatcgccccggcgtatcgcgaggagataagcgatttgcataggatggaaccatacgtatactcccaaatgatagccggcaaggacgccaagcgccacggcgaggccaaaaattcatggctgaccggcacggcggcgtggaacttcgtggccgtatcgcagtggatactgggcatccgccccgactacaacgggttaacgatcgacccgtgcataccgtcggattggcaggggttcacggcgacgcggaagttcaggggggctacgctcaagataacggttaagaacgagagccgttcttgcaagggggtcaaggcgctgacggtggacgggaaggcgatcgcggggaatgtggtgccggtgtttacggacgggggggagcatgaggttgtggcggtgatgtga

SEQ ID NO: 1180 - protein, 147 aa, Unknown
  Obtained from environmental sample
  misc_feature (1)..(147): Xaa is any amino acid
MLGQGNEAFGHYRKIAPAYREEISDLHRMEPYVYSQMIAGKDAKRHGEAKNSWLTGTAAWNFVAVSQWILGIRPDYNGLTIDPCIPSDWQGFTATRKFRGATLKITVKNESRSCKGVKALTVDGKAIAGNVVPVFTDGGEHEVVAVM

SEQ ID NO: 1181 - DNA, 585 bp, Unknown
  Obtained from environmental sample
  misc_feature (1)..(585): n is a, c, g, or t
gtggcggccggcggcggaagcccattgaagcccaaagcggcgcccccggggatcatcgcggcctacccccgcctggcccgggcggccgtggccagagccctggccggacaaaagcccccggaccccgaaaccatcaatccggacccggccctctggcggccgtgccgggcctgcttcgtctcccttaaaaacccggacctgcgcggctgcataggcaccattcacccggcccaaaaaagcctggggcgggaaataatcgccaacgccgtgtccgcggccacccgcgacccccgtttcccgccgctctcgccttcggaactgcccggggtgcttttttccgtcgatgtgctgggtgagcctgagccggtctcggattggagcgagttggacccggcccgctggggggtcatagtcagccgggacggccggcgggggctccttttgccggacctcccgggggtggacagcgtggcccggcaagtgagcatcgccgccttgaaagccgggatccaggatttggagaacctgaccctccagcgcttcagcgtggaccgccaccccgagccggaggaggaccggggttga

SEQ ID NO: 1182 - protein, 194 aa, Unknown
  Obtained from environmental sample
  DOMAIN (19)...(190): AMMECR1
  misc_feature (1)..(194): Xaa is any amino acid
MAAGGGSPLKPKAAPPGIIAAYPRLARAAVARALAGQKPPDPETINPDPALWRPCRACFVSLKNPDLRGCIGTIHPAQKSLGREIIANAVSAATRDPRFPPLSPSELPGVLFSVDVLGEPEPVSDWSELDPARWGVIVSRDGRRGLLLPDLPGVDSVARQVSIAALKAGIQDLENLTLQRFSVDRHPEPEEDRG

SEQ ID NO: 1183 - DNA, 492 bp, Unknown
  Obtained from environmental sample
  misc_feature (1)..(492): n is a, c, g, or t
atggccgggggtttgaccatgttcctgtatgatatttttccgcctgagttaattaagatcgggcttgaagcggaagataaagatgaagtctttgaggaaatggcgaatttattctgccagacgatgaataccagcagccggaatgaaatcctggaagccctttgggaacgcgagtccaaaatgtcaaccggaatacaaaagggcatcgcgattccccacggtaaagtcaaaagccttgagaatgtttacggagttctcggagtttcaaaaaacggcatagaatacgacgcccttgacgatcagccggtttaccttctttttatggttcttgcccccagcacggactcagaactgcctctgcgcctattaaagcgactttcggaactgttggataatcctcagttttatacagagctgttggcgcaaaacgatccgctgaatgctggcaggatcattaaaaaatacgaggacatttacatcgcgtccgaatga

SEQ ID NO: 1184 - protein, 163 aa, Unknown
  Obtained from environmental sample
  DOMAIN (12)...(155): Phosphoenolpyruvate-dependent sugar phosphotransferase system, EIIA 2
  misc_feature (1)..(163): Xaa is any amino acid
MAGGLTMFLYDIFPPELIKIGLEAEDKDEVFEEMANLFCQTMNTSSRNEILEALWERESKMSTGIQKGIAIPHGKVKSLENVYGVLGVSKNGIEYDALDDQPVYLLFMVLAPSTDSELPLRLLKRLSELLDNPQFYTELLAQNDPLNAGRIIKKYEDIYIASE

SEQ ID NO: 1185 - DNA, 768 bp, Unknown
  Obtained from environmental sample
  misc_feature (1)..(768): n is a, c, g, or t
ttgtcctttagcttgccggcgagcttggccagttcgtccgctgtgctggccacctgggaggtggtgctggacatctcggttgccgaggaggctatggacgccgcctcgtggacgctctggtcaacctgcttggccacttccgtgcctgccttggcctgctccgccgtggccgtcacggaggccttggtgcggacggcgaactggtccaggttttcctttatcttgctgaggaggctcaccgtcaagttcaccatctccccgccgcgctggacggaatcgcgcgcctctatgttgtgctgggcgatctccttggcggaggtgccgctgcgctcggccagcttcctgacctcttccgccaccaccgcgaagcccttgccctgctcgccagccttggccgcctcgatggcggcgttcagcgacagcaggttggtctggttggctatctcctgtatcacgccgatggccgcggctatcttggccgtggtctgcgtgatgccgttcatcgcctcctttgtttgctggcccgcatcgttgccgtgctgcgtggcctccagggcgacgtccatctgggccaggctgtcctggctgtcatggctcacttcgtcaatcgaggccgacagctcggtcatggcggcggccatgctctctgcggcgctcttctggtactccgcgcttctggctatctcgtgggtggtgttggccatctcctcggccgtggcggaaagctccatcgagccgcggacgcgcctccacgctgcctcgcgataa

SEQ ID NO: 1186 - protein, 255 aa, Unknown
  Obtained from environmental sample
  SIGNAL (1)...(17)
  misc_feature (1)..(255): Xaa is any amino acid
MSFSLPASLASSSAVLATWEVVLDISVAEEAMDAASWTLWSTCLATSVPALACSAVAVTEALVRTANWSRFSFILLRRLTVKFTISPPRWTESRASMLCWAISLAEVPLRSASFLTSSATTAKPLPCSPALAASMAAFSDSRLVWLAISCITPMAAAILAVVCVMPFIASFVCWPASLPCCVASRATSIWARLSWLSWLTSSIEADSSVMAAAMLSAALFWYSALLAISWVVLAISSAVAESSIEPRTRLHAASR

SEQ ID NO: 1187 - DNA, 765 bp, Unknown
  Obtained from environmental sample
  misc_feature (1)..(765): n is a, c, g, or t
atggagctttccgccacggccgaggagatggccaacaccacccacgagatagccagaagcgcggagtaccagaagagcgccgcagagagcatggccgccgccatgaccgagctgtcggcctcgattgacgaagtgagccatgacagccaggacagcctggcccagatggacgtcgccctggaggccacgcagcacggcaacgatgcgggccagcaaacaaaggaggcgatgaacggcatcacgcagaccacggccaagatagccgcggccatcggcgtgatacaggagatagccaaccagaccaacctgctgtcgctgaacgccgccatcgaggcggccaaggctggcgagcagggcaagggcttcgcggtggtggcggaagaggtcaggaagctggccgagcgcagcggcacctccgccaaggagatcgcccagcacaacatagaggcgcgcgattccgtccagcgcggcggggagatggtgaacttgacggtgagcctcctcagcaagataaaggaaaacctggaccagttcgccgtccgcaccaaggcctccgtgacggccacggcggagcaggccaaggcaggcacggaagtggccaagcaggttgaccagagcgtccacgaggcggcgtccatagcctcctcggcaaccgagatgtccagcaccacctcccaggtggccagcacagcggacgaactggccaagctcgccggcaagctaaaggacaaactggagatggtcagggcagaccttggggtatag

SEQ ID NO: 1188 - protein, 254 aa, Unknown
  Obtained from environmental sample
  DOMAIN (8)...(251): Methyl-accepting chemotaxis protein (MCP) signaling domain
  misc_feature (1)..(254): Xaa is any amino acid
MELSATAEEMANTTHEIARSAEYQKSAAESMAAAMTELSASIDEVSHDSQDSLAQMDVALEATQHGNDAGQQTKEAMNGITQTTAKIAAAIGVIQEIANQTNLLSLNAAIEAAKAGEQGKGFAVVAEEVRKLAERSGTSAKEIAQHNIEARDSVQRGGEMVNLTVSLLSKIKENLDQFAVRTKASVTATAEQAKAGTEVAKQVDQSVHEAASIASSATEMSSTTSQVASTADELAKLAGKLKDKLEMVRADLGV

SEQ ID NO: 1189 - DNA, 945 bp, Unknown
  Obtained from environmental sample
  misc_feature (1)..(945): n is a, c, g, or t
gtgcgcgacagccgcgaatcaataatcgatcaggtggcggacgacgcgccggttgttaatctgcttaacagcatttttttggaggcaatttccaaaagggcttcggatatacatatcgaatccggcgcgagtgaaagcgcagtccggcttcgtattgacggcttgctcgttacagcaaaaaaaataagccaggaacgggcgatagcggtttcagcgcggcttaaaatcctcgctaacctgaacgtgcttgaaaaccggaggccccaggacggccacatcgatgtcaaaaccgattcctattcgcttgatgtcagaatatccacgatacccactgtctggggcgaatcaatcgtgttgcggctcttaaaccgctccgattcgcctttcagccttgattctctgggcttttccgccgggtattccggctatctgcaaaacatcctcgccgtaacgtcggggcttattctcgtaaccggcccaaccggttccggtaagacaaccaccctcgcggcattgctaaaagaactcgacatcaaaagcacaaagataatttcaatcgaggacccggttgaataccgcattcctgggatcattcaaatacaggtgaacgaggaattgggattgggctttgacgctttgcttcgccggattttcagacaagaccccgatgtaatcatgattggcgaaatacgtgacatcgagaccgccgaactcgcaatcagggccgctttgaccgggcacttggtttttgcgacgctgcatacaaacaattccattgaagcagtgtaccgcttgcaaaacatgggaattccgtcatacatggtggcggcggttctaaaagcggtaattgcccagcggttaatcagaaaagttttgcaagagtgcatggcaaagggctgtgccctctgntcaacacaggttacatgggaggacagctatcgctga

SEQ ID NO: 1190 - protein, 314 aa, Unknown
  Obtained from environmental sample
  DOMAIN (13)...(291): Type II/IV secretion system protein
  misc_feature (1)..(314): Xaa is any amino acid
MRDSRESIIDQVADDAPVVNLLNSIFLEAISKRASDIHIESGASESAVRLRIDGLLVTAKKISQERAIAVSARLKILANLNVLENRRPQDGHIDVKTDSYSLDVRISTIPTVWGESIVLRLLNRSDSPFSLDSLGFSAGYSGYLQNILAVTSGLILVTGPTGSGKTTTLAALLKELDIKSTKIISIEDPVEYRIPGIIQIQVNEELGLGFDALLRRIFRQDPDVIMIGEIRDIETAELAIRAALTGHLVFATLHTNNSIEAVYRLQNMGIPSYMVAAVLKAVIAQRLIRKVLQECMAKGCALXSTQVTWEDSYR

SEQ ID NO: 1191 - DNA, 324 bp, Unknown
  Obtained from environmental sample
  misc_feature (1)..(324): n is a, c, g, or t
gtgnaaaagaccaaaatagccgcctgccgaaaccaaattgaaactttcaggcttgccctgcaatcgtattttttggactgcggccactaccctacagaaattcaaagcctgggagcattgtgggaaaagccgactttatctccggttccgtcaaactggaacgggccttacgtggacaggcagataccgaaagatccctggggcaatgattttgtttacaagaaccccggcgaaaagaatttgccctttaccattatgtcatacggcgcagacggaaagaccggaggagaagatgcaaatgccgaaattcattcgtgggactga

SEQ ID NO: 1192 - protein, 107 aa, Unknown
  Obtained from environmental sample
  DOMAIN (3)...(106): Bacterial type II secretion system protein G
  misc_feature (1)..(107): Xaa is any amino acid
MXKTKIAACRNQIETFRLALQSYFLDCGHYPTEIQSLGALWEKPTLSPVPSNWNGPYVDRQIPKDPWGNDFVYKNPGEKNLPFTIMSYGADGKTGGEDANAEIHSWD

SEQ ID NO: 1193 - DNA, 825 bp, Unknown
  Obtained from environmental sample
  misc_feature (1)..(825): n is a, c, g, or t
atgaaaagatacgctgcgttaattgtcatatttctttcatttagcgccgtttactcgcagtcctcgcagtcctcgcagtacagcggcggcggcggcggcggcggaactatacttatcccaagaattgtttatgtgggagaccccgcggttcttgttctgcccttaccgcccgcaatcataaattcagacgacattataatgacggaactgtcgccgaatcttccgaaagacgacaatattgactttcaccgcgtaatacttgaaaggcgcgtaacgggaagcaggcttttgattgaatttacggcgtttgtcccgggttatctgaaatttcctgaaatagaaattgacggcgaatatttcggcggcctgtccgtaacaatcaattcagttattgatacgcgcaaatcctttcagctttccggctacgcttcatcgctggcaatgccgggaaccgcagtccttctttacggatttctggcaatggttgttctttttcttcttttactgttttggtttatttttaaggggaaaaaatttgtaaagatattttttgaaaaatggaaacgccttcgtctttttacttttataaggaacgtggtaagacgcctgcaaaaattactgatgaggggaggcgacaagcgggatattctggacaaaatttccgacacattcagggagttcctttccgttttaacaaaagcgaactgccgttacatgaccgcccgcgaatttaccggtatgccggaagaaataattcatcacagcgattttttaggagattttttctcccgctgcgacaaatacgtttctccggcgaggatgtaa

SEQ ID NO: 1194 - protein, 274 aa, Unknown
  Obtained from environmental sample
  SIGNAL (1)...(19)
  misc_feature (1)..(274): Xaa is any amino acid
MKRYAALIVIFLSFSAVYSQSSQSSQYSGGGGGGGTILIPRIVYVGDPAVLVLPLPPAIINSDDIIMTELSPNLPKDDNIDFHRVILERRVTGSRLLIEFTAFVPGYLKFPEIEIDGEYFGGLSVTINSVIDTRKSFQLSGYASSLAMPGTAVLLYGFLAMVVLFLLLLFWFIFKGKKFVKIFFEKWKRLRLFTFIRNVVRRLQKLLMRGGDKRDILDKISDTFREFLSVLTKANCRYMTAREFTGMPEEIIHHSDFLGDFFSRCDKYVSPARM

SEQ ID NO: 1195 - DNA, 771 bp, Unknown
  Obtained from environmental sample
  misc_feature (1)..(771): n is a, c, g, or t
atgggcgacggaaccgcgcttggaatgggtcttgccgccgccgcgtaccatcttgataaatcaaacgcgaaacgcaaaatagcggttcttattacggacggcgaaaacaacgccggcgcgattcacccggaaaccgccgctgctatgttacacgaaataggcataacgctgtgggtaataggtattggatcggcgggagaagtgcctatagattaccttgatcctttcacaaaagtccgcagaaccggccgattcgattcgcgctttaacatagaaagcctgcgccgcatgagcattgcggggggcgggacatttatttacgcgcctacagccggcagttttgcctccgccttttcaaaattggacgaaggcgaaataaccgtgcaaatatcacgcttgataaaccgaaaacgttcggtatcaatttattatttaattcccgctatcattcttacggcggcggtttggctgatcaggcggtttctttacaagaacaacataagcgaggcgctcgggaaaaaaatgagatcgtccgcggcttttttctttttattcgccgtattcgcgcttttcgccgttttaaatccaaagtggggaacgcaattaaccgtttccgaattccgcaggggactggacgcggtctttgccattgatgtttcgcgcagcatggatatcaacgacgcgaaagaggaagcgcagggcggcgcgcaaggcggcggcgaattgtcgcgcctgaacgcggcgttaaatcgcgaagctcggccgatctga

SEQ ID NO: 1196 - protein, 256 aa, Unknown
  Obtained from environmental sample
  misc_feature (1)..(256): Xaa is any amino acid
MGDGTALGMGLAAAAYHLDKSNAKRKIAVLITDGENNAGAIHPETAAAMLHEIGITLWVIGIGSAGEVPIDYLDPFTKVRRTGRFDSRFNIESLRRMSIAGGGTFIYAPTAGSFASAFSKLDEGEITVQISRLINRKRSVSIYYLIPAIILTAAVWLIRRFLYKNNISEALGKKMRSSAAFFFLFAVFALFAVLNPKWGTQLTVSEFRRGLDAVFAIDVSRSMDINDAKEEAQGGAQGGGELSRLNAALNREARPI

SEQ ID NO: 1197 - DNA, 708 bp, Unknown
  Obtained from environmental sample
  misc_feature (1)..(708): n is a, c, g, or t
atggacttgccggcggttatctcgcagttctactcccgcgccgggttcgtctacctgaacaacggcaagacgggttccatcaccttcatagggacggtcagccccgccggcggtaacttgaaggagccggtcaccgagtccacgaagaaggcggcgcgctgcttctacgcgctcggtcagggacgcgccgactctaagcgctatccggcggtcgatcctattgacagctattcgaagtaccttgagtacgacgaggtgatcgagtatctcgacaaggagatagagccgggttgggtgaaaaaagtcgaagttctcaagaatacgctgttgcgcggaaaggaagcccgcgaccagatcaacatcttgggtgacgacggcgtgccgcttgactaccatatcattttcaacaagtctgaggtcatcgacttcgtgattttgcagcaggacgctttcgacaaaatcgactcgtgttcgccgctcaatcgccagcagtatatggtcaacaaggtgctgggtatcgttgacgcgaagtttaacttcgagggttttgaggagataggcaattactttaagaaggcgattaacttgatgcgccagatgaactatctggagtttcagagcgataaatttaacggactcgaaaaagagctcgacagcctgttggctgaacgggtatcggaacccaaggccggcgcggcgcacgcgtag

SEQ ID NO: 1198 - protein, 235 aa, Unknown
  Obtained from environmental sample
  misc_feature (1)..(235): Xaa is any amino acid
MDLPAVISQFYSRAGFVYLNNGKTGSITFIGTVSPAGGNLKEPVTESTKKAARCFYALGQGRADSKRYPAVDPIDSYSKYLEYDEVIEYLDKEIEPGWVKKVEVLKNTLLRGKEARDQINILGDDGVPLDYHIIFNKSEVIDFVILQQDAFDKIDSCSPLNRQQYMVNKVLGIVDAKFNFEGFEEIGNYFKKAINLMRQMNYLEFQSDKFNGLEKELDSLLAERVSEPKAGAAHA

SEQ ID NO: 1199 - DNA, 660 bp, Unknown
  Obtained from environmental sample
  misc_feature (1)..(660): n is a, c, g, or t
gtggaagcgaggggtgacaagacgtaccagagcgagtcccggtacgaagcggacgggcagcggcggttgaagtacacggtaagcgggacggaccgatgcgaggtgaggtactacaaccggatgttccaggtgtcggcgctgaacgggtatgcggcggagagcaaacacatctacgtgggggagacgcggatagtaacgaagcggaaggacgcggggaacactgggagcgtgagccaggaatcgcgtctgatgtattattaccacggggatcatttggggagcgcgcagctggtgacggactttgaagggaagatatacgagcacctggagtacacgccgtacggggagctgtgggtggatcacgcggtgggggatgtggcgttaagcccgacggagttccgttttacgggcaaggagtttgacaaagaaaccggtttgtactactacggagcccgctacctggaccccaaaacaagcaggtggatttcgggtgatcccgccatgggggaatatataccgcaagctccgataaatgacgaagcaaagaaacacaaccagaacctgccgggcatgggtggaatattcaacattgttaatatgcacacataccactatgcggggaataatcgcggtaaanctcgtgccactcggccgatctga

SEQ ID NO: 1200 - protein, 219 aa, Unknown
  Obtained from environmental sample
  misc_feature (1)..(219): Xaa is any amino acid
MEARGDKTYQSESRYEADGQRRLKYTVSGTDRCEVRYYNRMFQVSALNGYAAESKHIYVGETRIVTKRKDAGNTGSVSQESRLMYYYHGDHLGSAQLVTDFEGKIYEHLEYTPYGELWVDHAVGDVALSPTEFRFTGKEFDKETGLYYYGARYLDPKTSRWISGDPAMGEYIPQAPINDEAKKHNQNLPGMGGIFNIVNMHTYHYAGNNRGKXRATRPI

SEQ ID NO: 1201 - DNA, 798 bp, Unknown
  Obtained from environmental sample
  misc_feature (1)..(798): n is a, c, g, or t
atggaagtggatgttgtgcccgtttatgagttcagccattttgacgccctaaaacaactaaccaacgcggactgggttcctcaaaccatgacactcgaagcccacaaagaaagcagcggtcatgttatattggaacaatacgcatatatgaaaaagcaatatgcggttaattattttaccgcgagcaaaccagccgatagctttgacggagaccgcaaagcattcttggggctgaacgaaatcacaggctgggcttgcccatacacgcttcacaaaggcaaactcaccaacagcaccgctttgagaggtgataacatcgcagcccaaatgttcaaattcaaactcgctcgcaacaaatctgggcgagttgcaacccagttgggacaagagaagagcatagctgcggcaaaatcttcaataaaaaaatatcgcgatttgagaaacgtggataaagcgtttgcggaactcgcgaatttctggagcaactatttaaccgcattgcaggtcacaactccagatgccagcttcaactcaatggtgaatgtgcataacccacgccagtgccacacaacaaagtattggagccgctaccttagcctttaccaattgggttttggaagcgaccgtggaataggctaccgcgattcaagccaggatttgctcggcgttatgggacatatgcccgaagaagcccgcttgctcgcagagaatttgctctccgttcagttggaagacggcaacgctatgcaccagtattttccaagcactatggaagcaaacgaangctactcccgatga

SEQ ID NO: 1202 - protein, 265 aa, Unknown
  Obtained from environmental sample
  DOMAIN (45)...(135): Glycosyltransferase 36 associated family
  misc_feature (1)..(265): Xaa is any amino acid
MEVDVVPVYEFSHFDALKQLTNADWVPQTMTLEAHKESSGHVILEQYAYMKKQYAVNYFTASKPADSFDGDRKAFLGLNEITGWACPYTLHKGKLTNSTALRGDNIAAQMFKFKLARNKSGRVATQLGQEKSIAAAKSSIKKYRDLRNVDKAFAELANFWSNYLTALQVTTPDASFNSMVNVHNPRQCHTTKYWSRYLSLYQLGFGSDRGIGYRDSSQDLLGVMGHMPEEARLLAENLLSVQLEDGNAMHQYFPSTMEANEXYSR

SEQ ID NO: 1203 - DNA, 438 bp, Unknown
  Obtained from environmental sample
  misc_feature (1)..(438): n is a, c, g, or t
ttgaaaatgcggaggaactgcattatggggattgttcatgcggaaattactttgagaaacgccggagatataatcagtgtacagcgcggttatattaaagagcatgaaatccgtcaaacaacggtcacggctatggttgacaccggatcggcgacgttagttatcaatgaagctattcgcagccaattagggcttacggtggaagacggttttacagcggaacttgccgacggaacggcgcaggcttacggtttaaccgaatcggttcaggttcaatggaaagaccgtaaaattgcctgccaggcggtggtggtcccccatgcgcatgacgtgctgcttggggcaattccgcttgaagctatggacttaattattaacccgtcaaaacaggaattaatcggcgcacacggcgataaagtggtttacatgataaaatga

SEQ ID NO: 1204 - protein, 145 aa, Unknown
  Obtained from environmental sample
  misc_feature (1)..(145): Xaa is any amino acid
MKMRRNCIMGIVHAEITLRNAGDIISVQRGYIKEHEIRQTTVTAMVDTGSATLVINEAIRSQLGLTVEDGFTAELADGTAQAYGLTESVQVQWKDRKIACQAVVVPHAHDVLLGAIPLEAMDLIINPSKQELIGAHGDKVVYMIK

SEQ ID NO: 1205 - DNA, 354 bp, Unknown
  Obtained from environmental sample
  misc_feature (1)..(354): n is a, c, g, or t
atgcaccgcgagacatactccattgatgatgaaaccgccgcaaagatcgaagcggcaaaggcaagcggaaggaaaattgtcgcggtcggcactacaagcgccagaacccttgagagcgcatggtctgatggaaagctgcggcgaggggagggcagtaccgccatctttatctaccccggctacaggttctacgtgacggacgcgctgttcaccaattttcacacgcccgaatcaacgttgttaatgatggtatcagcttttgcgggaagggaatttattctggaaagctacgccgaggcaatcaggcaaaagtaccgttttttcagttacggcgacgcaatgttgatagcgtaa

SEQ ID NO: 1206 - protein, 117 aa, Unknown
  Obtained from environmental sample
  misc_feature (1)..(117): Xaa is any amino acid
MHRETYSIDDETAAKIEAAKASGRKIVAVGTTSARTLESAWSDGKLRRGEGSTAIFIYPGYRFYVTDALFTNFHTPESTLLMMVSAFAGREFILESYAEAIRQKYRFFSYGDAMLIA

SEQ ID NO: 1207 - DNA, 594 bp, Unknown
  Obtained from environmental sample
  misc_feature (1)..(594): n is a, c, g, or t
atgtccgacgattttcaatatgattccggccgcttcaagtcgatttacttcttcctcctgcccgcgggcatcgtcttgttggccctggcggccatcctggccgggcgccgccatccccagcccatgtccatgccgccccaggtcgtcgtcctggccgaggtccaggcccggagcctcctggaaacctgggaatacgcggcccagttggaggccgaccggatcgtggacctaaaggcccgggtcagcggttttctgctccacaagaatttcaccgccggggaccaggtgaaaaaagaccaggtcctctttcaaatagagccggacaactaccaggccctcctggacatggccaaggccgaggtgctttcggccaaggcccagttcgaccgggccaccctggatttcaaccgcatcaacgatctctaccgcaagaacacctccaccaagagcgatttcgacagttccaaggccgcctatgaagtggccgcggcccagcttgagagcgccgaggcccgggccacccaggcccggctgaacctggactacgcctccataaaggcccccttcgacggccgcatcagcgacacgccctaa

SEQ ID NO: 1208 - protein, 197 aa, Unknown
  Obtained from environmental sample
  misc_feature (1)..(197): Xaa is any amino acid
MSDDFQYDSGRFKSIYFFLLPAGIVLLALAAILAGRRHPQPMSMPPQVVVLAEVQARSLLETWEYAAQLEADRIVDLKARVSGFLLHKNFTAGDQVKKDQVLFQIEPDNYQALLDMAKAEVLSAKAQFDRATLDFNRINDLYRKNTSTKSDFDSSKAAYEVAAAQLESAEARATQARLNLDYASIKAPFDGRISDTP

SEQ ID NO: 1209 - DNA, 624 bp, Unknown
  Obtained from environmental sample
  misc_feature (1)..(624): n is a, c, g, or t
atgatttcccggattttcatcgcccggccgcgcttcgcggtggtggtctccctgatcatcaccatagccggcttgatcgccctcttgaacattccggtgacccaattcccggacatagtgcccccccaggtcaacgtgcaggccacctaccccggggccagcgccgaaaccctggaaaacgcggtggcccagcccatcgaggaggccatgaacggcgtggaccggatgatgtacatgtccagccagtcctcgggcaacggcagctacttcctctccgtgacctttcagatcggctccgacccgaacatgaacatggtcaatgtccagaaccgccttaaaagagtcgaatcgtccctgccggccgaagtcacccgcataggcgtgagcgtggacaaaagcaactccggcatgctcaagggcttctccttcttctcccccgacggcagcctcgaccagcggaccctgaccaactgggtcacctccaacgtggtggacgccgtcacccgcatccccggggtcggcagcgtccagaatttcggcagcccctacagcatgcgggtctggctggacgccgcgcgcatggccaagctgggcctgaccccgggcgatgtcatcaatgcctga

SEQ ID NO: 1210 - protein, 207 aa, Unknown
  Obtained from environmental sample
  SIGNAL (1)...(29)
  misc_feature (1)..(207): Xaa is any amino acid
MISRIFIARPRFAVVVSLIITIAGLIALLNIPVTQFPDIVPPQVNVQATYPGASAETLENAVAQPIEEAMNGVDRMMYMSSQSSGNGSYFLSVTFQIGSDPNMNMVNVQNRLKRVESSLPAEVTRIGVSVDKSNSGMLKGFSFFSPDGSLDQRTLTNWVTSNVVDAVTRIPGVGSVQNFGSPYSMRVWLDAARMAKLGLTPGDVINA

SEQ ID NO: 1211 - DNA, 828 bp, Unknown
  Obtained from environmental sample
  misc_feature (1)..(828): n is a, c, g, or t
ttgaaaggaagtgatgttgtaatcaaggatataagcaaattctttggtgattttagggctcttaataatgtaagtctggaaataaaaaaaggagaatttttctccttgctgggtccctccgggtgcggaaaaaccacccttttgcgtataattgccggttttgaaaatcccgacaagggggaacttacccttgacggtgacgatgtgctttcagcgcctcctaaccgccgtcatacaaatacggtatttcaaaattattcgctttttccccatcttactgtttttgaaaatgtcgctttttcgcttaggcttaaaagagcgtcttctacagaagttaaaaacaaagtcaacgagtaccttcatctggtacagcttgtggatcacgcgcacaaaaaaccaaaccagctttccggcggacagaaacagcgggtagccattgcgcgcgctcttattaacgaaccgcgcgtgcttcttttggacgaacctctctcggcgttagacgcaaaactgcgccagcatatgttaattgagcttgacaccattcatgataaaatcggcataacgtttatttatgttacccacgatcaacaggaagccctttccgtatcggacaggcttgccgttatgaatcagggagacattttacaaataggcacgcctcaggaaatttacgaaagccccgcttctgattttgtcgcgcgctttatcggcgagacaaatttgtttgacgcgtctgttatcagcgtggaaaaactgaataaagagtgggatgaatttatggtggagcttgatattcccgaacttgggcgcattaagttatcatcgtag

SEQ ID NO: 1212 - protein, 275 aa, Unknown
  Obtained from environmental sample
  DOMAIN (31)...(212): ABC transporter
  misc_feature (1)..(275): Xaa is any amino acid
MKGSDVVIKDISKFFGDFRALNNVSLEIKKGEFFSLLGPSGCGKTTLLRIIAGFENPDKGELTLDGDDVLSAPPNRRHTNTVFQNYSLFPHLTVFENVAFSLRLKRASSTEVKNKVNEYLHLVQLVDHAHKKPNQLSGGQKQRVAIARALINEPRVLLLDEPLSALDAKLRQHMLIELDTIHDKIGITFIYVTHDQQEALSVSDRLAVMNQGDILQIGTPQEIYESPASDFVARFIGETNLFDASVISVEKLNKEWDEFMVELDIPELGRIKLSS

SEQ ID NO: 1213 - DNA, 843 bp, Unknown
  Obtained from environmental sample
  misc_feature (1)..(843): n is a, c, g, or t
gtgatagagctgcaagatgtcggggtcaggtattacaccttcctttccacattgcggaacttgttcaagaccctaaaaaaagaaaacatcccccttccggtgtgggttgttgatcgcgaaaaccccgcgggcccctgggtagaaggttctccgctaaaaccggagtacggatcctttatcggcattgagggcattcctcaccgccacggcctaaccatcggggaggtggccgcttattttcacgctgaacttgaagcggatttccccctttatattgtttcctggaaggcaggccttcgctgctttccatggacaatcgctccctcacctggttttccgggtttttttacagcggctttttattcgggccaatgcctctgggaaggaaccaatgtaagcgagggccggggaaccaccaggccttttgaagtattcggagcgccctggatggaggaaagcctgacaagctacaaccaaaaggcgggttatgaaggctggaatgatcccggacatccgctatttgataccaacgccgccctgcgctggcaccgtttcatccccatctatgccaagtacaagaacgagtgctgctttggctttcaacttattctccggaatcccgatgcaggctaccatgcccttttgcatgccctgcgaataattcggtttattggaacccactgcgaagctttctctttcagacctggaaaatacgaggccggaaacgataaaacagcgatagaacttttggcaggcgatcctctgatactggcttatattaagcgcgaagggccggaagaaacggacattaaagaatatttcagaaaaaatgaagaagcgtga

SEQ ID NO: 1214 - protein, 280 aa, Unknown
  Obtained from environmental sample
  DOMAIN (1)...(280): Protein of unknown function (DUF1343)
  misc_feature (1)..(280): Xaa is any amino acid
MIELQDVGVRYYTFLSTLRNLFKTLKKENIPLPVWVVDRENPAGPWVEGSPLKPEYGSFIGIEGIPHRHGLTIGEVAAYFHAELEADFPLYIVSWKAGLRCFPWTIAPSPGFPGFFTAAFYSGQCLWEGTNVSEGRGTTRPFEVFGAPWMEESLTSYNQKAGYEGWNDPGHPLFDTNAALRWHRFIPIYAKYKNECCFGFQLILRNPDAGYHALLHALRIIRFIGTHCEAFSFRPGKYEAGNDKTAIELLAGDPLILAYIKREGPEETDIKEYFRKNEEA

SEQ ID NO: 1215 - DNA, 714 bp, Unknown
  Obtained from environmental sample
  misc_feature (1)..(714): n is a, c, g, or t
atgctctctctttcaagcatacttaagccaggttcctttatttactttgttggcatcaaagggacgggagtctgcgcgctggcggaacttatacatggcatgggggtcaaaaccggcggttcggacacaaacgaagtcttttatacggacataatattgaaggaattgaacatccctttccatgaaacctttgagccggcccatatcaccgctgatattgacctggttatacattctgccgcttacagcccggagaataacccggaacttgccgagacccagcggaaaaacatccccctgttaacataccctcaagccttgggagcgttttcggaagattttgattcaacgggcattgccggcgtccacggcaaaaccacgaccaccgccatgacgggctgccttgtaaaaggcctgggccttcccggccgagtcctggtcggcagcgccgcggcgaatttcgggggaaggtcgacgctgtcgcaagggagtaaattcttcatcgcggaaacctgcgagtaccgcaggcatttcctcctgttccgcccaaagcgcatagtcttaaccgccgtcgaaagcgaccatcaggactatttccccacgtatgaatcgatccgcgacgcctttgtcgaatactgccgccttatccccccgggaggggaattgatctactgcgtcgatgactcaggcgcgagcgaggtggcaaagatataa

SEQ ID NO: 1216 - protein, 237 aa, Unknown
  Obtained from environmental sample
  DOMAIN (13)...(115): Mur ligase family, catalytic domain
  misc_feature (1)..(237): Xaa is any amino acid
MLSLSSILKPGSFIYFVGIKGTGVCALAELIHGMGVKTGGSDTNEVFYTDIILKELNIPFHETFEPAHITADIDLVIHSAAYSPENNPELAETQRKNIPLLTYPQALGAFSEDFDSTGIAGVHGKTTTTAMTGCLVKGLGLPGRVLVGSAAANFGGRSTLSQGSKFFIAETCEYRRHFLLFRPKRIVLTAVESDHQDYFPTYESIRDAFVEYCRLIPPGGELIYCVDDSGASEVAKI

SEQ ID NO: 1217 - DNA, 798 bp, Unknown
  Obtained from environmental sample
  misc_feature (1)..(798): n is a, c, g, or t
atgacaagcatgacgggcctcgcctataaagaatgggcaaacgaggatatttcattttcagttgagataaagggctacaacaaccgcttccttgagatttatgtgaacacgccgccctggcttccgaggctggaacagagggttcgtgacattatcaacaacgtatgctgcaggggaaaagttgaaatcgccatccgagtaagggaaacaaacacccccatgaccgtttgcgttaacgttaacgcggcaaacgcgtatatgcaggcaatcaacagccttaaatcaagccttggccttgatgaaaaattaaatctgtcaacgctaatcaatatggaaggcgtgcttaatatcgaaaaaaaccgcgacgacgagcgctactggaatttgattgaacctgtcctgatagaggccggcgccgtttttcaagctgaacgaatcagggagggaatgcacaccgaagaagacatcctcaattcaataagcaaaatcgaatcgaccctgcaaacggtgacggcgcatctacccgccctggaatcttctattaaagaaaacatcaaagcgcgtttcagggaagtttccgccggtgaaatcgacgagaaccgcatcctcgccgaaaccgccatactgcttatgaagtacactgtttccgaggagctttcccggctgtcttcccaccttggcgaattcagggcggaaacggcaaaaaacgagcgccccggaaaaaaacttgattttttatgccaggaaataaacagggaaattaacacaataggctcaaaaagcgttatcctgaagtaa

SEQ ID NO: 1218 - protein, 265 aa, Unknown
  Obtained from environmental sample
  DOMAIN (201)...(265): Domain of unknown function (DUF1732)
  misc_feature (1)..(265): Xaa is any amino acid
MTSMTGLAYKEWANEDISFSVEIKGYNNRFLEIYVNTPPWLPRLEQRVRDIINNVCCRGKVEIAIRVRETNTPMTVCVNVNAANAYMQAINSLKSSLGLDEKLNLSTLINMEGVLNIEKNRDDERYWNLIEPVLIEAGAVFQAERIREGMHTEEDILNSISKIESTLQTVTAHLPALESSIKENIKARFREVSAGEIDENRILAETAILLMKYTVSEELSRLSSHLGEFRAETAKNERPGKKLDFLCQEINREINTIGSKSVILK

SEQ ID NO: 1219 - DNA, 738 bp, Unknown
  Obtained from environmental sample
  misc_feature (1)..(738): n is a, c, g, or t
ttgagaataagcaataaagattcttacgccgtaatacgttcttttttacggcatctgtatgagaacggcactttgaacaatgacttgtcaggaataatccccaaataccgcaggcctataccgttgccgacaacatacacagatgatgaaataaggcgcctggaaggggttataaataaaacaacaagaacagggaagcgggactatgccattattcttcttgcgtcacggttagggatgaggtcgggagatatcgcggggataacttttgacgctgttgattttaattgcggcagtattaactttctgcaaaaaaagaccggcataccgctgtctctgcctttgctgcccgaggtacgcgcagccatcttggattataaacagtatgcaaggccgaatgttgaaaataattatctgttcatcaaagcaaacgctccttttgaaaagatttcaacttctgtaataagttatgcgcttagaaactattttaaagccgccgggattgacatctcaaacaagaaacacgggccccatacgctccgttcttctatggccagttctatggtaaatagcggcgtcccttatgatgtcgtacgaaaagcgctcgggcatactgacccgcaggcaatcaagcactatgccaaagtagacatcgaaaatttacgttttcatgcagttgatgttcccgtcccgaccggagcgtttgaaatgattcttcaagggagggggcagttatga

SEQ ID NO: 1220 - protein, 245 aa, Unknown
  Obtained from environmental sample
  DOMAIN (58)...(223): Phage integrase family
  misc_feature (1)..(245): Xaa is any amino acid
MRISNKDSYAVIRSFLRHLYENGTLNNDLSGIIPKYRRPIPLPTTYTDDEIRRLEGVINKTTRTGKRDYAIILLASRLGMRSGDIAGITFDAVDFNCGSINFLQKKTGIPLSLPLLPEVRAAILDYKQYARPNVENNYLFIKANAPFEKISTSVISYALRNYFKAAGIDISNKKHGPHTLRSSMASSMVNSGVPYDVVRKALGHTDPQAIKHYAKVDIENLRFHAVDVPVPTGAFEMILQGRGQL

SEQ ID NO: 1221 - DNA, 891 bp, Unknown
  Obtained from environmental sample
  misc_feature (1)..(891): n is a, c, g, or t
atgccgacaaggtatcttttaccgacctggattacaaaaccatgcttgatttctttcttggctgaaacaaaacgatgctgcggcatttcaaccagaaaccagagactgtccgcgttatcatcattcgcacagtatgctcaaaacagaagttttgacgcggcaacaatattccggcgtgatacaaaaaagctgccttccaaaaaatgcccgaacagagcacgcgcaatctttacgctggaggagacggcgttttttctgaatcttcctaaaggcgacggcgcgacaggatttagaaataaaacccttttaagcgtcatgtatgccagcggggcacgggcgcaggaaatgtgcgatcttacagtttgcgatttccggttcaataacgataccgcgtctctgacattaaccggtaagggcggcaagagccgaagagtcggaataccaaaagcatgcgccgcattgcttgcacaatacatcgacaaacaggggctcgcggggaagaacgaacgccatgtattctccagccaaactcatgagcatatgacggtttcctgtgtggaggaaatatttaaaaagtatgtaaacctggctaaaaaagaatatcccgcgcttttccgtgagaaatgctatactccccattctatgagacattcaaccgcgacgcatatgctcgaagccggcatcccaattgttgttattaagaattttcttggacacgtctcccttcaatccacccaaatttatgcggaagtaacccagagcactcttgataagcacataaaaacatggaatgaaaagtgggggcctaaaccggattataatgcggataaatccgggtcgcgctctgcaatcccggatttcttatcaaccagagtgaaaaaccatatataa

SEQ ID NO: 1222 - protein, 296 aa, Unknown
  Obtained from environmental sample
  DOMAIN (85)...(258): Phage integrase family
  misc_feature (1)..(296): Xaa is any amino acid
MPTRYLLPTWITKPCLISFLAETKRCCGISTRNQRLSALSSFAQYAQNRSFDAATIFRRDTKKLPSKKCPNRARAIFTLEETAFFLNLPKGDGATGFRNKTLLSVMYASGARAQEMCDLTVCDFRFNNDTASLTLTGKGGKSRRVGIPKACAALLAQYIDKQGLAGKNERHVFSSQTHEHMTVSCVEEIFKKYVNLAKKEYPALFREKCYTPHSMRHSTATHMLEAGIPIVVIKNFLGHVSLQSTQIYAEVTQSTLDKHIKTWNEKWGPKPDYNADKSGSRSAIPDFLSTRVKNHI

SEQ ID NO: 1223 - DNA, 402 bp, Unknown
  Obtained from environmental sample
  misc_feature (1)..(402): n is a, c, g, or t
gtgcttgttatgcccggtcaaaaaatggtatttatagacgcttgtcattcggcgggaacaagcggcggacttactcgcagggttaatagtgaccgcctcatcaacgacctgaacagcgattcctcaataaaatcaagttcagttatttttacttcgagtaagggagatcaaccatctcttgaattggatcaatacaagcagggcttattcacctatgcaatcttgcagggtttaaaaggggaagctgatctcttgaaaaaaggtgtagtaacaacaaccgcgcttgagttgtatctaaaaaacaaaatacctgaattggcaaaactggcaaattttcaacaggagccaagaattttcaaagctgacggcctggatgattttgaaatggtaattttgaagtaa

SEQ ID NO: 1224 - protein, 133 aa, Unknown
  Obtained from environmental sample
  misc_feature (1)..(133): Xaa is any amino acid
MLVMPGQKMVFIDACHSAGTSGGLTRRVNSDRLINDLNSDSSIKSSSVIFTSSKGDQPSLELDQYKQGLFTYAILQGLKGEADLLKKGVVTTTALELYLKNKIPELAKLANFQQEPRIFKADGLDDFEMVILK

SEQ ID NO: 1225 - DNA, 831 bp, Unknown
  Obtained from environmental sample
  misc_feature (1)..(831): n is a, c, g, or t
gtgcaggcaactacggaaaaaacggcgcagcgccccggaaacgaaacaagcccggcggcggcggctgattcggctttgggtaacgggttatttgcccgtataagcaccgaccggggtgatattgttgtccagcttgaattccagaaaacgccgctgacggtgtgtaattttgtcgctcttgcggaaggcaaaatgaaggtgaccggcggcaagcatttttatgacggccttacctttcaccgggttatcgcggattttatgatccagggcggcgacccgcaggggacaggctccggcggtcccggttacaaatttcctgatgagatagttccctcgctcaagcatgacggccccggaatactttccatggcaaacgccgggccgggaaccaacggcagtcaattttttatcacccatgtcgcgactccctggctggacggtaaacacaccgtctttggcagagtggttgaagggcagaatgtggtcaatgccatccagcaaggcgataaaatgaagacgattaccattatccgcaacggcgcgctggcaaaccagttcaaggcggatcagactgcgtttgacgctctgttaaaagaggcgagcgcaagcgcatccgataaatcaaaagcgcagcgtgatgccgatattgcccaaattaataccaaatatcccggcgctgttcaaaccgcttcgggcgttaaatatgttattcaaaagaaaggaaacggcnataaaccaaccgccggaaagacggtacaggtaaattaccggggttcgttcctttccggccaggtttttgacagttcagatacgcggggcccgccctcttga

SEQ ID NO: 1226 - protein, 276 aa, Unknown
  Obtained from environmental sample
  DOMAIN (29)...(182): Cyclophilin type peptidyl-prolyl cis-trans isomerase/CLD
  misc_feature (1)..(276): Xaa is any amino acid
MQATTEKTAQRPGNETSPAAAADSALGNGLFARISTDRGDIVVQLEFQKTPLTVCNFVALAEGKMKVTGGKHFYDGLTFHRVIADFMIQGGDPQGTGSGGPGYKFPDEIVPSLKHDGPGILSMANAGPGTNGSQFFITHVATPWLDGKHTVFGRVVEGQNVVNAIQQGDKMKTITIIRNGALANQFKADQTAFDALLKEASASASDKSKAQRDADIAQINTKYPGAVQTASGVKYVIQKKGNGXKPTAGKTVQVNYRGSFLSGQVFDSSDTRGPPS

SEQ ID NO: 1227 - DNA, 414 bp, Unknown
  Obtained from environmental sample
  misc_feature (1)..(414): n is a, c, g, or t
ttgctggatggcattgaccacattctgcccttcaaccactctgccaaagacggtgtgtttaccgtccagccagggagtcgcgacatgggtgataaaaaattgactgccgttggttcccggcccggcgtttgccatggaaagtattccggggccgtcatgcttgagcgagggaactatctcatcaggaaatttgtaaccgggaccgccggagcctgtcccctgcgggtcgccgccctggatcataaaatccgcgataacccggtgaaaggtaaggccgtcataaaaatgcttgccgccggtcaccttcattttgccttccgcaagagcgacaaaattacacaccgtcagcggcgttttctggaattcaagctggacaacaatatcaccccggtcggtgcttatacgggcaaataa

SEQ ID NO: 1228 - protein, 137 aa, Unknown
  Obtained from environmental sample
  misc_feature (1)..(137): Xaa is any amino acid
MLDGIDHILPFNHSAKDGVFTVQPGSRDMGDKKLTAVGSRPGVCHGKYSGAVMLERGNYLIRKFVTGTAGACPLRVAALDHKIRDNPVKGKAVIKMLAAGHLHFAFRKSDKITHRQRRFLEFKLDNNITPVGAYTGK

SEQ ID NO: 1229 - DNA, 783 bp, Unknown
  Obtained from environmental sample
  misc_feature (1)..(783): n is a, c, g, or t
atgataatcaatcacaacttaagtgcgatgtttgccgacaggtccctcaaagttacccagttgtacctggataaaaacatggaaaaactgtcaagcggcatgcgcatcaaccgcgccggtgatgacgcttcgggactcgctgtttctgagaagatgcgcgctcaaatccgtggcctgaatatggcggcatttaatgcccagaatggtatttcattcattcaggtttcggaaggctatctccaggaatccgaagatgtcgtccaacgtctccgtgaattggcagtgcaggcctcaaacggtatttattccgatgaggatcgtatgtacatccagattgaagtttcggctttggtctcggaaatagacagaattgcctcgcacgcacaatttaacggaatgaacatgttgaccggacgttttgcccgcggtgcgggtcaaaacgtggttaccgcttctatgtggtttcacgtcggagccaacatggatcagcggacagaagtgtatatcggcactatgactgcgaagggtcttgggatccggaacgtcagtgacgatacctttatttcgttgtccgaccctgaaaattccaaccgtgccattggaaccctcgatgtagcgctcaagagaatcaacaaacaaagagctgatctcggcgcctaccagaatcgtctggaacatacagtccgcggccttaacattggggccgaaaatctgcaagcctctgaatcatacatcagaagatgcaacatggccaatgaaaccgtcaattacaccaaaacatga

SEQ ID NO: 1230 - protein, 260 aa, Unknown
  Obtained from environmental sample
  DOMAIN (193)...(260): Bacterial flagellin C-terminus
  misc_feature (1)..(260): Xaa is any amino acid
MIINHNLSAMFADRSLKVTQLYLDKNMEKLSSGMRINRAGDDASGLAVSEKMRAQIRGLNMAAFNAQNGISFIQVSEGYLQESEDVVQRLRELAVQASNGIYSDEDRMYIQIEVSALVSEIDRIASHAQFNGMNMLTGRFARGAGQNVVTASMWFHVGANMDQRTEVYIGTMTAKGLGIRNVSDDTFISLSDPENSNRAIGTLDVALKRINKQRADLGAYQNRLEHTVRGLNIGAENLQASESYIRRCNMANETVNYTKT

SEQ ID NO: 1231 - DNA, 507 bp, Unknown
  Obtained from environmental sample
  misc_feature (1)..(507): n is a, c, g, or t
ttggatattcgcagtaacaggggcggggatatatacgcaatggaatatattgccacccgttttgcgtccgagacaaaagattatatgaaggcaagaatcaaaaggggtccgggaccaaatgacttatccaagcctataatttatacggtaaaaagcataaaaaaactttctgataacaggtatggttatacaaaaccaattgtacttttaacaaataaaaacacggtttccgccgcggaatggtttactatagcgttacggacgcagagtcatgtaacgcatgtgggaatgccgacatgcggagcgttctccgcgcgtaacgatcgttttatgataaacggatgggtttattcaatatcgcctgaaagagttacggatatgaacgacaaaatttatgaaggaatcggaatatttcctgataaaataatagaaaatacgtcgaatcaggaagattatcagcttttatgcgctgtagaaatagcggcgtccgaaatatcgggagaataa

SEQ ID NO: 1232 - protein, 168 aa, Unknown
  Obtained from environmental sample
  DOMAIN (1)...(143): Peptidase family S41
  misc_feature (1)..(168): Xaa is any amino acid
MDIRSNRGGDIYAMEYIATRFASETKDYMKARIKRGPGPNDLSKPIIYTVKSIKKLSDNRYGYTKPIVLLTNKNTVSAAEWFTIALRTQSHVTHVGMPTCGAFSARNDRFMINGWVYSISPERVTDMNDKIYEGIGIFPDKIIENTSNQEDYQLLCAVEIAASEISGE

SEQ ID NO: 1233 - DNA, 765 bp, Unknown
  Obtained from environmental sample
  misc_feature (1)..(765): n is a, c, g, or t
atgacaatcgaggaaattggaaatctcggaacaggtcatatcggaggagccatgtcaatcgttgaccttctggctctgttatactttcacaaaatgaaagttgatccgaaaaatccccgctgggaagaaagggatcagcttgtagtttccaaggggcactcaggtcccgccgtttacgcgactttggcgctcaagggatttttccccaaggactggcttactaccctgaacaagggcggaacaagcctccccagccactgcgatcgcaacaagacccccggcatcgacatgaccacaggctctcttggacagggtttttcagccgccatcggcatagctctcggtttaaagatggataaaaagacatcgaccgtatacacgattatcggagacggcgaatccaacgaagggcaggtttgggaaggcgcggcatttgcgggctttcacaaactccccaacttaatcgcttttaccgattacaacaaacaacagcttgacggctttaccaaagatattttggacatgggaaacctcgccgcaaagtgggaacaattcggctggttcactcaggaagttgacggtcacgacattgccgcattggacgccgcgattgacaaagctctcgcggaaaaagaaagagcttcgatgattgttatgaacacaatcaagggaaagggctgcagttttgcggaaggtgtggagaaaaaccacagcatggctttcgacatggaaaaggctaaagaagccatagccgcgttaggataa

SEQ ID NO: 1234 - protein, 254 aa, Unknown
  Obtained from environmental sample
  DOMAIN (79)...(219): Thiamine pyrophosphate enzyme, C-terminal TPP binding domain
  misc_feature (1)..(254): Xaa is any amino acid
MTIEEIGNLGTGHIGGAMSIVDLLALLYFHKMKVDPKNPRWEERDQLVVSKGHSGPAVYATLALKGFFPKDWLTTLNKGGTSLPSHCDRNKTPGIDMTTGSLGQGFSAAIGIALGLKMDKKTSTVYTIIGDGESNEGQVWEGAAFAGFHKLPNLIAFTDYNKQQLDGFTKDILDMGNLAAKWEQFGWFTQEVDGHDIAALDAAIDKALAEKERASMIVMNTIKGKGCSFAEGVEKNHSMAFDMEKAKEAIAALG

SEQ ID NO: 1235 - DNA, 462 bp, Unknown
  Obtained from environmental sample
  misc_feature (1)..(462): n is a, c, g, or t
atgaattttcgcattgtagacaaacaggcatggactcttgctggacggcgtggttttatggaggatgatctctggggactttgtaagaatgaaaaaggtttttttgactgtttggcaaaaattgacattgaaaaacccaataaaaatcttgcttattgtataggtggaggttcagaaggaaaatcaccttggattgtaggtgttgagactaattctaaagaacttgatggattggatattattaatgttcctaaatcattatggcttgtatttgaatcacatggtccaatgaaaccgaaattttttgatatgcaaaatgaagtttataatgggtattttaatgatccgtcaagagaatataattggcatgacggtatgcgttcttttgaaaaatattgtacagcagatgtaaatggtaaagatacacttattgaactttggtgtcctgtagtaaaaatataa

SEQ ID NO: 1236 - protein, 153 aa, Unknown
  Obtained from environmental sample
  misc_feature (1)..(153): Xaa is any amino acid
MNFRIVDKQAWTLAGRRGFMEDDLWGLCKNEKGFFDCLAKIDIEKPNKNLAYCIGGGSEGKSPWIVGVETNSKELDGLDIINVPKSLWLVFESHGPMKPKFFDMQNEVYNGYFNDPSREYNWHDGMRSFEKYCTADVNGKDTLIELWCPVVKI

SEQ ID NO: 1237 - DNA, 672 bp, Unknown
  Obtained from environmental sample
  misc_feature (1)..(672): n is a, c, g, or t
atgctggcgggcggcgcggaagaattaagtcccgcggacgccgcggtctttgacactctctttgcggcaagttccaaaaacgacaacccggataaaactcccgccgcttatgacaagaaccgcgacggccttgtcatcggcgaaggagcgggaacattaattttagaagattacgaacacgcgttaaaaagaggggcaaaaatactcgcggaaatttcaggattcggaaccaataccgacggcacgcacattacccagccgaaccgcgctactatgggcattgccatgaaacttgcgctggaagacgcctgtttggatccggcatcaatcgtatatgtgaatacccacggaaccgcaaccgatacaggcgatgttgccgaaagctgggcaactgcggatatttttaaaagaccggttcccgcaagcactttaaaaaattacataggccataccttgggggcatgcggcgttattgaggcgtggatttctattaacatgatgaaggaaaaatggttctgccccaaccttaaccttgaagaacttgatccgcgctgcggaccgcttgattatattaccggggacggacgaaaaattgagggggaatatataatgtccaataactttgctttcggcggaattaatacttcgcttatcttcaggaactggccatga

SEQ ID NO: 1238 - protein, 223 aa, Unknown
  Obtained from environmental sample
  DOMAIN (69)...(222): Beta-ketoacyl synthase, C-terminal domain
  misc_feature (1)..(223): Xaa is any amino acid
MLAGGAEELSPADAAVFDTLFAASSKNDNPDKTPAAYDKNRDGLVIGEGAGTLILEDYEHALKRGAKILAEISGFGTNTDGTHITQPNRATMGIAMKLALEDACLDPASIVYVNTHGTATDTGDVAESWATADIFKRPVPASTLKNYIGHTLGACGVIEAWISINMMKEKWFCPNLNLEELDPRCGPLDYITGDGRKIEGEYIMSNNFAFGGINTSLIFRNWP

SEQ ID NO: 1239 - DNA, 615 bp, Unknown
  Obtained from environmental sample
  misc_feature (1)..(615): n is a, c, g, or t
atgaaactgaaactcatttaccccaaatggaataaacttcccggacagactacttttaacctgcctccccacgggcctgttgtgtttgccgccgcgcttcctgattatgttgaggtaacttttaccgatgaaaatgtacaaaaccttgactttgatgaagactgcgatcttgtggcgatttccatgatgctcagcacccaggtaaagcgtggttgggccatcgcggacgaataccgcaagcgcggcaaacaagttattttcggcggcatcgccgttatgcttcacgccgaggaaaccatcgagcacgcggactcagtgtttctgggcgaagcggaaacgcgcatggatcaggttatcgcggactggaaagagggacatttgcagaaagtgtacaactttatgcctcaacagccgccggttgaatcaatagggcctgcccgccgcgacttgtacaaaaaagaattgtacaaccataaaggcgttcaaatggtagatcttttccacgcgtcccggggctgccgcttcagttgttatccctgcgctgtttcctatctcggcggacggtcattccgtccccgtccgttggataaggtaatcgaagaactggccggatga

SEQ ID NO: 1240 - protein, 204 aa, Unknown
  Obtained from environmental sample
  DOMAIN (10)...(121): B12 binding domain
  misc_feature (1)..(204): Xaa is any amino acid
MKLKLIYPKWNKLPGQTTFNLPPHGPVVFAAALPDYVEVTFTDENVQNLDFDEDCDLVAISMMLSTQVKRGWAIADEYRKRGKQVIFGGIAVMLHAEETIEHADSVFLGEAETRMDQVIADWKEGHLQKVYNFMPQQPPVESIGPARRDLYKKELYNHKGVQMVDLFHASRGCRFSCYPCAVSYLGGRSFRPRPLDKVIEELAG

SEQ ID NO: 1241 - DNA, 966 bp, Unknown
  Obtained from environmental sample
  misc_feature (1)..(966): n is a, c, g, or t
ttgatggagggcggccgagaccttgacgtgaggactggaagcgacccctatccgaacgcgacgctttacgggcaggctgtaacaatttataagaatttgggcgttgagattcaagtgacggagttggacgcaaccattaacgacggcaacgaaagttacttttccgcgcaggcgacgtactacaaaaatataatgaacgagattctcaccaagggcggcagcgccgttacagccgtagtcgtttggggtatccaagacaatcaatcttggcgcagcagcagaaagccgttgctcttcaacgcctccggcaataaaaaggccgcgtacgacgaagtttacaaactcattccccagtcggattggggcgacggaaacaacatgggcggcatcgagcccccgcctccgccgacccccgtgaatcccgactcaaacgggttcttcttctatcatccctttgaggcaagcacgcacaactggacaggcagaggcgaggcgacggtcgcccgttcaaccgcgcagaaggccaacggatcgagttcgttagccgtaaccggccgcgccgccgagtggcacggcgccgcctattctctcaacgcaaacgcgttcgtccccggcaaaaactacagtttcagcgtgatggcggcgtacacttcaggttccgccgacgcggacactttcaaactcacgctacaatacaaagacgccaaagattcaacccgttacagccaagtagcggtagcccgcgcgacaaaagggcagtgggtgcaactctccaacacccaattcccaatcccatcaggcgcgaccaacctcctcctatacgttgaaatgccgaaatcatcaaccgacttttacatagacgacgcgatgggcggcaaagccggcgcgttaataggccccgacggtaaacccggctcatcaacgcccatcgcccccgccataataaaaaatcccccgcccgcgtga

SEQ ID NO: 1242 - protein, 321 aa, Unknown
  Obtained from environmental sample
  DOMAIN (144)...(294): Carbohydrate binding domain
  misc_feature (1)..(321): Xaa is any amino acid
MMEGGRDLDVRTGSDPYPNATLYGQAVTIYKNLGVEIQVTELDATINDGNESYFSAQATYYKNIMNEILTKGGSAVTAVVVWGIQDNQSWRSSRKPLLFNASGNKKAAYDEVYKLIPQSDWGDGNNMGGIEPPPPPTPVNPDSNGFFFYHPFEASTHNWTGRGEATVARSTAQKANGSSSLAVTGRAAEWHGAAYSLNANAFVPGKNYSFSVMAAYTSGSADADTFKLTLQYKDAKDSTRYSQVAVARATKGQWVQLSNTQFPIPSGATNLLLYVEMPKSSTDFYIDDAMGGKAGALIGPDGKPGSSTPIAPAIIKNPPPA

SEQ ID NO: 1243 - DNA, 333 bp, Unknown
  Obtained from environmental sample
  misc_feature (1)..(333): n is a, c, g, or t
ttgcgcctggtcgcggcttccattaaggatatatcctcaaaaaccaatatgctctccgtcaacgcgggcattgaggccgcgcgcgcgggcgaagcgggcgccggattcgcggttgtggcgcgtgaggtgcgcattctggcgggtctctccaggaaggaagccgatcgctttggcccgctctttgagaaagtgcaggagatattcaccaatctgcggaatgatttggaaatagtcctggacgaaaaccgtaaaacccggaatgtcgtcgatcagatcaacaaggatgtctatggacttgttttccgcgaggagaacatggaaggcaagaaataa

SEQ ID NO: 1244 - protein, 110 aa, Unknown
  Obtained from environmental sample
  misc_feature (1)..(110): Xaa is any amino acid
MRLVAASIKDISSKTNMLSVNAGIEAARAGEAGAGFAVVAREVRILAGLSRKEADRFGPLFEKVQEIFTNLRNDLEIVLDENRKTRNVVDQINKDVYGLVFREENMEGKK

SEQ ID NO: 1245 - DNA, 843 bp, Unknown
  Obtained from environmental sample
  misc_feature (1)..(843): n is a, c, g, or t
gtgccgaataaaattaaattaataggcgagttgggcagtaaaaaggattttaaaaacatgctgaccaccgcagaaaaaaacggttacgctgtttttccggatgttgatttcctctatatgagggatgtaaaaccctttggcggattcaacctgtaccgcgacgcggcacgatatgtaaaccgtaaacgcatagaaaaatacccctacagctttgtctggttcggcgagcgcgtccgttggggcaaactcagttacctcgcgcgccccgcctacatgatttcacttatagacaattttagcagaaagatgcccgcgctgggtctgcgtaacatcgctttcagaagcctgggcgcgaaactctcgggcgattaccatgaaaagaggctggtcagccgcgaagcctcgatgaaaatgcggcaggaaaaactggcggatttaaaaaagcaggggacaggcgttctgctggatacaggttacgcctatgcggttccctgggccgattttattacaaacatggctgttgacgatcagagtttcggcattaccgacgcttcggttccgttttaccagatggttcttcacggcctggtgccatatacaggtccggcgataaaccttgccgaagattacaccaaaaaccttcttaaaaccattgaaagcggagctggattgtacttcagctttatgagtgaagaaagctccatcctgcagganacaaagttccggcaattttacgccaatgaattcgataaatggtcgccggacgccaacgccctgtatcaaagtttaccgctgattttgcccgcctgtatggccaggcgattgttaagcatgccattatag

SEQ ID NO: 1246 - protein, 280 aa, Unknown
  Obtained from environmental sample
  misc_feature (1)..(280): Xaa is any amino acid
MPNKIKLIGELGSKKDFKNMLTTAEKNGYAVFPDVDFLYMRDVKPFGGFNLYRDAARYVNRKRIEKYPYSFVWFGERVRWGKLSYLARPAYMISLIDNFSRKMPALGLRNIAFRSLGAKLSGDYHEKRLVSREASMKMRQEKLADLKKQGTGVLLDTGYAYAVPWADFITNMAVDDQSFGITDASVPFYQMVLHGLVPYTGPAINLAEDYTKNLLKTIESGAGLYFSFMSEESSILQXTKFRQFYANEFDKWSPDANALYQSLPLILPACMARRLLSMPL

SEQ ID NO: 1247 - DNA, 477 bp, Unknown
  Obtained from environmental sample
  misc_feature (1)..(477): n is a, c, g, or t
ttgaagccgcgtaaaagctgccgcaggatacttggtattgacccgggtcttgcagatacaggctggggaatacttgatgacagcgcgggaaaaattcaatacatcgcacatgggacaataaaaacaaaggcaggcgttccccgcgcggaacgcctttgttttattcttcattcacttcgtttgataatagataaatacaaaccagctgaagccgctgttgaaactctgtattttggtaaaaacgtaacaagcgcaattcctgtggcggaagcgcgcggggtaatttcagcgtgtcttgcggaaaacggcattactctttgtgaattgacacctaacgcgattaaaaagggagtaacaggggttgcgggcgcggataaaaagcaggttcaggaaatggtacgtattattctagctcttgatgaaaatccaaagtccgatcacgcggcagacgctttgggagcggcatttgtcttttaa

SEQ ID NO: 1248 - protein, 158 aa, Unknown
  Obtained from environmental sample
  DOMAIN (10)...(158): Crossover junction endodeoxyribonuclease RuvC
  misc_feature (1)..(158): Xaa is any amino acid
MKPRKSCRRILGIDPGLADTGWGILDDSAGKIQYIAHGTIKTKAGVPRAERLCFILHSLRLIIDKYKPAEAAVETLYFGKNVTSAIPVAEARGVISACLAENGITLCELTPNAIKKGVTGVAGADKKQVQEMVRIILALDENPKSDHAADALGAAFVF

SEQ ID NO: 1249 - DNA, 306 bp, Unknown
  Obtained from environmental sample
  misc_feature (1)..(306): n is a, c, g, or t
gtgccttccacccccgccggattgttgggagaattgctgcctttcctggacctgattctgataatgaccgtaaaccccggttttggcggccagcaccttattcctgaatgtcttgataaactccgttttctggccggagaacggcaaaaacagaaccttaactgccttctttcggttgacggcggcataaacagcgaaaccgccgcttccgccattgccgccggcgcggacgtgctggtcgttggctcggcgtttttcgccgcccctgacaaaaaaaaatttgtagataatttgcgtttacagtaa

SEQ ID NO: 1250 - protein, 101 aa, Unknown
  Obtained from environmental sample
  DOMAIN (1)...(89): Ribulose-phosphate 3 epimerase family
  misc_feature (1)..(101): Xaa is any amino acid
MPSTPAGLLGELLPFLDLILIMTVNPGFGGQHLIPECLDKLRFLAGERQKQNLNCLLSVDGGINSETAASAIAAGADVLVVGSAFFAAPDKKKFVDNLRLQ

SEQ ID NO: 1251 - DNA, 780 bp, Unknown
  Obtained from environmental sample
  misc_feature (1)..(780): n is a, c, g, or t
atgaaagttgccgattttgatggatatattcaaaaactcaatgtattaaaacagaatccaaggttgccattacatttttttgattggaaattagatttttctgatgtgatgaatcctgctttgatggcaaaagatgagagcgtcggttttgatattgttattggaaatccaccgtacatacaactgcagaaaaatggtggagaattatcaaaactttacggacctaaaaaagaaggtaaaggtagaacaaaaaaaataaccccaagccaatatcaaacatttgatagtatgggcgatatctattgtctattttacgaatgcggtcaccgacagctgaaagaggaaggaagactctgtttcatcacatccaacaaatggatgcgggcaggttacggcgaaaatacacgaaagttctttgtcgaaaatactaatccagaattactgattgattttgcaggcgtaaaagtgtttgaatctgcaacagtggatacgaatatattaatgttttcaaaggttaaaaatagacaaaaaacgttggcttgcgttgtgaaaaaggaaggtataaaagatttgaacgattttgttagacaaaatagcacgccttgtaacttcaaaacaggtgacccatgggttatcctatcgcctattgaacggaagattaaggagaagattgaggcagtcggaactccgctgagagattgggatataaacatctatcgcggcgtattaactgggtgtaatgaggcatttatcattgatggggctaagaaaaagagctaa

SEQ ID NO: 1252 - protein, 259 aa, Unknown
  Obtained from environmental sample
  misc_feature (1)..(259): Xaa is any amino acid
MKVADFDGYIQKLNVLKQNPRLPLHFFDWKLDFSDVMNPALMAKDESVGFDIVIGNPPYIQLQKNGGELSKLYGPKKEGKGRTKKITPSQYQTFDSMGDIYCLFYECGHRQLKEEGRLCFITSNKWMRAGYGENTRKFFVENTNPELLIDFAGVKVFESATVDTNILMFSKVKNRQKTLACVVKKEGIKDLNDFVRQNSTPCNFKTGDPWVILSPIERKIKEKIEAVGTPLRDWDINIYRGVLTGCNEAFIIDGAKKKS

SEQ ID NO: 1253 - DNA, 654 bp, Unknown
  Obtained from environmental sample
  misc_feature (1)..(654): n is a, c, g, or t
atggcacaacatcaatttcagaccgaagtaagccggttgttgcaccttatcattcattctctttattccaaccgggaaatttttcttcgggagcttgtctccaacgcctcagacgctctggacaagcttaaatacctgactgtcgcggacgaaaagtacaaatcgatcaattttgagccgcgaattgatatttccttcaataaagaagcgaaaactttgaccgtctgtgacaacggaatcggcatgaatgatgccgatttaatcgactcgcttggaactatcgcccgctcggggacaagggcgtttttggaaaaacttgcggaagacgcaaaaaaagattccaatcttatcggacagttcggcgtaggcttttattccgcttttatggtcgcggaaaaaatcgaggttataagccgaaaagccgccgaggacgccgcttggaaatggataagcgacggcaaagaaggttttgaaatagagaacgcatcgcgtgacagtcagggaacaacggtgattctttacctcacggaagagggaatagaatacgctaaccgctggtcaatcgaagatattatcaagcgttactccaaccatgtcgcgttccccatttaccttacctatgatgaaaaagagtgggacgataaggggaaatga

SEQ ID NO: 1254 - protein, 217 aa, Unknown
  Obtained from environmental sample
  DOMAIN (24)...(178): Histidine kinase-, DNA gyrase B-, and HSP90-like ATPase
  misc_feature (1)..(217): Xaa is any amino acid
MAQHQFQTEVSRLLHLIIHSLYSNREIFLRELVSNASDALDKLKYLTVADEKYKSINFEPRIDISFNKEAKTLTVCDNGIGMNDADLIDSLGTIARSGTRAFLEKLAEDAKKDSNLIGQFGVGFYSAFMVAEKIEVISRKAAEDAAWKWISDGKEGFEIENASRDSQGTTVILYLTEEGIEYANRWSIEDIIKRYSNHVAFPIYLTYDEKEWDDKGK

SEQ ID NO: 1255 - DNA, 528 bp, Unknown
  Obtained from environmental sample
  misc_feature (1)..(528): n is a, c, g, or t
atgtccgatgaaattgacgatcttgtaattcccaccctgcacagttaccgcaaagaaacggcgggaacggacggcaagagcgaaagccaaacttgggaacttaaagcggtaaaccgcgccggcgcggacgaagagttaggtgaaacaaaaaacaaagacgccgaaaaagaggcaaaacctgttatcgaaaaaattaaaaaggctcttggagaccgcgtaaaggacgtaaaactttcccgccgtcttcacgattcgccgtcttgcattgtcgccgacgaaaacgatccaagcatgcaaatggcgcaaatgctcaaggcaatgggacaaaccacaatgccggacattaagccgattttggaagtaaacggcgaacatcccattgtcgccggtttaaaggacatagaagacgaggaacgcattgccgacacagcggcggtgttattcgatcaggcgcttttggtggaaggcgtaaaactaaacgatcctgcggactttgtaaaacggcttaaccgcctgttggcaaggtaa

SEQ ID NO: 1256 - protein, 175 aa, Unknown
  Obtained from environmental sample
  misc_feature (1)..(175): Xaa is any amino acid
MSDEIDDLVIPTLHSYRKETAGTDGKSESQTWELKAVNRAGADEELGETKNKDAEKEAKPVIEKIKKALGDRVKDVKLSRRLHDSPSCIVADENDPSMQMAQMLKAMGQTTMPDIKPILEVNGEHPIVAGLKDIEDEERIADTAAVLFDQALLVEGVKLNDPADFVKRLNRLLAR

SEQ ID NO: 1257 - DNA, 471 bp, Unknown
  Obtained from environmental sample
  misc_feature (1)..(471): n is a, c, g, or t
atgggaaaaaagcaactaccggaagaattcaaagaatttatacagtgtttaaacaaaaataatgtaaaatatttacttgtcggcggctgggcggtaggaatatatggtcacccaagagccacaaaagatattgattttttattttcaaacgatcaggaaaatttaaaccaaataaaaaaagcattagaagaatttggagcgcctccaatagatttagaaaaatttaaagaagacggatatgttataagaatggggagttcgccaatacagatagatatgataaatagcgccgatggtattgatataaatgattgttttaaaagaaaggaaataatggatattgaaggtgtaaaagttaatgttattttcataaatgacttaataattaaccagaaaacaagcgccagaagtatggatattgcggatgcggaaaaacttggacagccaataaaaataaaatttaatacttga

SEQ ID NO: 1258 - protein, 156 aa, Unknown
  Obtained from environmental sample
  misc_feature (1)..(156): Xaa is any amino acid
MGKKQLPEEFKEFIQCLNKNNVKYLLVGGWAVGIYGHPRATKDIDFLFSNDQENLNQIKKALEEFGAPPIDLEKFKEDGYVIRMGSSPIQIDMINSADGIDINDCFKRKEIMDIEGVKVNVIFINDLIINQKTSARSMDIADAEKLGQPIKIKFNT

SEQ ID NO: 1259 - DNA, 693 bp, Unknown
  Obtained from environmental sample
  misc_feature (1)..(693): n is a, c, g, or t
ttgttggaagttctcgactggcccacaattatatctctaaacgaccgcgtagtcaaacaaaccgcggcggcggtctgttccccttggacggtcgatatacaaacggacaccatcttcggtctggcaaacttcgtcgccaagatcatcgactacaaatcggtcttcacccaaaaacactccacacagattgccaataaagcgtggtttatggggaaacattacaaatacgggccgcaagaattggcggaggtgtatctggccgcctctctccacgatctcgggaaattgacgattccctccgatattctggagaagcccggcaaacttacctcggaagaatttgacatcatcaaagatcacgtcaaactaacgtgggaacttctcagcgatatcgagggattcgaaacgatatgccgatgggcctgcaatcaccacgaaaaattggacggcagcggctacccgttcgggagaaaagccgatgaactggacttcaattccagactgctggccaacttggacctatatcaagcgataagcgaggaaagaccgtatcacccgggccggaatcacgccgataccatgaagatactctatgaaatggccggtaccgggaagatagacggcgacattgtcaatgacctaaacatcgtccttgccccatacgacgggaaggatctgccgccgccggattga

SEQ ID NO: 1260 - protein, 230 aa, Unknown
  Obtained from environmental sample
  DOMAIN (56)...(178): HD domain
  misc_feature (1)..(230): Xaa is any amino acid
MLEVLDWPTIISLNDRVVKQTAAAVCSPWTVDIQTDTIFGLANFVAKIIDYKSVFTQKHSTQIANKAWFMGKHYKYGPQELAEVYLAASLHDLGKLTIPSDILEKPGKLTSEEFDIIKDHVKLTWELLSDIEGFETICRWACNHHEKLDGSGYPFGRKADELDFNSRLLANLDLYQAISEERPYHPGRNHADTMKILYEMAGTGKIDGDIVNDLNIVLAPYDGKDLPPPD

SEQ ID NO: 1261 - DNA, 417 bp, Unknown
  Obtained from environmental sample
  misc_feature (1)..(417): n is a, c, g, or t
ttgaaaagcggcttgattgtaaagtctctcggtttggaaacgctacccactgcatatatactcataaacagcggaccagcaaccgcggtggaatatatttcaaacaccaaagcaattccagcaaacaagccaaagataacaatggctactgcaatagccgcagagttaatgggaatgcgttgggtttatttagaagcgggtagcggtgcagagagccccgttccattggaacatataattacaacacgcgaggcaaccagcttgaacataatagcagggggcggcataaccactcctcaagaagcaaaagcaagggttaaagccggagcgaatatgatagttactggaacaatctgggaaaaaaatatggatgcaaatttaatgaaagaatttgcagaagcggtgcatggcaattaa

SEQ ID NO: 1262 - protein, 138 aa, Unknown
  Obtained from environmental sample
  SIGNAL (1)...(29)
  DOMAIN (2)...(135): PcrB family
  misc_feature (1)..(138): Xaa is any amino acid
MKSGLIVKSLGLETLPTAYILINSGPATAVEYISNTKAIPANKPKITMATAIAAELMGMRWVYLEAGSGAESPVPLEHIITTREATSLNIIAGGGITTPQEAKARVKAGANMIVTGTIWEKNMDANLMKEFAEAVHGN

SEQ ID NO: 1263 - DNA, 663 bp, Unknown
  Obtained from environmental sample
  misc_feature (1)..(663): n is a, c, g, or t
atgcgacatctggcttatagccgtaatcccgaagacgccgtaaagtatatcgaaaacaccgcgccgtacattgataaacatacggttgtaattgattgctgcggtgttaaacgctatatttgcgaaaaatgctttcctttggcgaaaaagcacggctttacgttcgtaggcggccatccgatggcgggcagccacaagagcggttttaagaacagccgcgagaatctttttcgcggcgcttccatgatactcgttccgcctgtttttgacgatgccgctttattcggcagaatagaggaattaataaaaccggccggtttcggcaatttaacttttacaacggcggaaaaacacgacgagatgatcgcgttcagttcacagatggcgcatgttgtttcaaacgcttttattaaaagtccgtcggcaggcggccacaagggattttccgcgggaagttacaaagaccttacccgcgtcgcacagcttaatgcccaaatgtggacggaattatttatgaaaaacggcgataatttaattaacgaattggatatatttataaaagagctttctctttacaggagcgcgcttgcggatcataacgacggaaaaatgaaggaattattgaaagaaggcagtcagataaaggaaaaactggacagataa

SEQ ID NO: 1264 - protein, 220 aa, Unknown
  Obtained from environmental sample
  DOMAIN (2)...(215): Prephenate dehydrogenase
  misc_feature (1)..(220): Xaa is any amino acid
MRHLAYSRNPEDAVKYIENTAPYIDKHTVVIDCCGVKRYICEKCFPLAKKHGFTFVGGHPMAGSHKSGFKNSRENLFRGASMILVPPVFDDAALFGRIEELIKPAGFGNLTFTTAEKHDEMIAFSSQMAHVVSNAFIKSPSAGGHKGFSAGSYKDLTRVAQLNAQMWTELFMKNGDNLINELDIFIKELSLYRSALADHNDGKMKELLKEGSQIKEKLDR

SEQ ID NO: 1265 - DNA, 744 bp, Unknown
  Obtained from environmental sample
  misc_feature (1)..(744): n is a, c, g, or t
atgaaagaactcattaacaaactggaaaccgagcataccctttcaagggatgagtataaaacgctgttttcatgcgatgatgagtatctttttgaaagggcgcgtgatgcggcgcaaaaagcatacggcaaaagtatttatatgcgcggccttattgagtttaccagttattgcaaaaacgactgcctttactgcggcttacgcgccggaaataacagggcggaaagataccgcctttccaaacagcagatacttgactgctgtaaagcgggacattctttgggttttagaacatttgtattgcagggcggcgaagacccttattatacagatgatattctcgtggaaattgtaagcgggataagggatgcgtatcccgattgcgccattacgctctcacttggggagcgcagttatgaaagctacgggcgcctgcgaaaagccggcgcggacaggtatttaatgcgccacgaaaccgcaaacgaagagcactacaatagtcttcaccccgataacatgtcgcttgccgaccgcaaacaatgtctttttaacttaaaagaattaggatatcaggtagggtgcggctttatggtcggctctccttatcagaccgccgatcaccttgtagacgacctttgttttattaaagagctgaagccgcacatggtcggcatcggtccttttatcccccattcggacacgcctttcaaagacaaacaggccggtgatttgcacctaacatga

SEQ ID NO: 1266 - protein, 247 aa, Unknown
  Obtained from environmental sample
  DOMAIN (52)...(215): Radical SAM superfamily
  misc_feature (1)..(247): Xaa is any amino acid
MKELINKLETEHTLSRDEYKTLFSCDDEYLFERARDAAQKAYGKSIYMRGLIEFTSYCKNDCLYCGLRAGNNRAERYRLSKQQILDCCKAGHSLGFRTFVLQGGEDPYYTDDILVEIVSGIRDAYPDCAITLSLGERSYESYGRLRKAGADRYLMRHETANEEHYNSLHPDNMSLADRKQCLFNLKELGYQVGCGFMVGSPYQTADHLVDDLCFIKELKPHMVGIGPFIPHSDTPFKDKQAGDLHLT

SEQ ID NO: 1267 - DNA, 849 bp, Unknown
  Obtained from environmental sample
  misc_feature (1)..(849): n is a, c, g, or t
ttggatttcattgcaaataatatcgaaaatgagaagctttcaatagatgatgttccgttaatctttataagggttagaaatgtaaatcaatttcgtgaatttatctgcaaaataacacaagagcgcgcaaatatcctgtcaggttttgttttcccgaaatttgacagctacagcgctggagaatatcttaaaatacttgagcacctttgttcaaaacacaatgttgttttatatggaatgcctatttttgaaggaagaactatcgcatataaagaaacaagaaatgaagagttgcttatattaaagagaatactggaatcatataaacagttaattctgaatattagggtgggcggaactgacttttcatcaatttggggagtacgcaggggaattaactattcaatttatgacatactaactgtaagagattgtttatccgatatacttaatttttttaaccgcgcagatgataattatttggtatccgcgcctgtgtgggaatattttcttgcgtataaaaaagatgatataaatgacttattaaaacacgatctgcaccactctttaattaacagagtacctattgtaaatgaagctattgacggtttattgcgtgaagtaattcttgacaaagctaacgggtttgtaggaaaaacaattattcatccatcccacgcaaggtttgtaaatgccatgcaagctgttacaaaagaggaatatgatgacgcgttccagattatgaacgctaaaggaggggtaattaaaagcgcgagtaccaataaaatgaatgaaataaatccgcataaaagctgggcggataaaattataaatagagccgttgtataa

SEQ ID NO: 1268 - protein, 282 aa, Unknown
  Obtained from environmental sample
  misc_feature (1)..(282): Xaa is any amino acid
MDFIANNIENEKLSIDDVPLIFIRVRNVNQFREFICKITQERANILSGFVFPKFDSYSAGEYLKILEHLCSKHNVVLYGMPIFEGRTIAYKETRNEELLILKRILESYKQLILNIRVGGTDFSSIWGVRRGINYSIYDILTVRDCLSDILNFFNRADDNYLVSAPVWEYFLAYKKDDINDLLKHDLHHSLINRVPIVNEAIDGLLREVILDKANGFVGKTIIHPSHARFVNAMQAVTKEEYDDAFQIMNAKGGVIKSASTNKMNEINPHKSWADKIINRAVV

SEQ ID NO: 1269 - DNA, 378 bp, Unknown
  Obtained from environmental sample
  misc_feature (1)..(378): n is a, c, g, or t
ttgtttacgggcggcggcgcgtacggcgacgcggtcatcaggggttactccgactggtcgctcggcggttaccgccattggttagacggcgacggaatatccatgttcgccttgaatatgtcgctgcgctacccgatcatcgaccagcagatatacttaggcatattcgccgatatgggcaacacttggtcgtcgatctccagaatcgatttaggcgatctctaccgcggcgtcggcggcgggcttcgcatcaatctgccgatgataggggtaatgggcgtagacgtaggatacgggcttgacccgctcgacaaaagcggactcaacaacgcgccgagcgggatcagctggcatattattatgaatagaggtttttga

SEQ ID NO: 1270 - protein, 125 aa, Unknown
  Obtained from environmental sample
  misc_feature (1)..(125): Xaa is any amino acid
MFTGGGAYGDAVIRGYSDWSLGGYRHWLDGDGISMFALNMSLRYPIIDQQIYLGIFADMGNTWSSISRIDLGDLYRGVGGGLRINLPMIGVMGVDVGYGLDPLDKSGLNNAPSGISWHIIMNRGF

SEQ ID NO: 1271 - DNA, 363 bp, Unknown
  Obtained from environmental sample
  misc_feature (1)..(363): n is a, c, g, or t
atgatgagaggatttaaggttgcggtaacggtactcttcgccgccgccgcgttcagcgccgcttccgctcagttaaagcttgggttcgtcaactccgagaagatctttacccagtttgagggaacaaagatcgctcaggagaaattcaacaaggaggtggccaagtgggagcaggaggcctccaaacgggccaaggagatcaccgagatgagggatcagctcgaaaagcagagcctcctgctcagcgccgaacgcaagaagtctcttgaagactcgttgcgccagaagatcatcctgcacgagaaatttttgcaggagaaattcggccagcgcggcgacgtgctctccaaaacgaggagctga

SEQ ID NO: 1272 - protein, 120 aa, Unknown
  Obtained from environmental sample
  SIGNAL (1)...(23)
  misc_feature (1)..(120): Xaa is any amino acid
MMRGFKVAVTVLFAAAAFSAASAQLKLGFVNSEKIFTQFEGTKIAQEKFNKEVAKWEQEASKRAKEITEMRDQLEKQSLLLSAERKKSLEDSLRQKIILHEKFLQEKFGQRGDVLSKTRS

SEQ ID NO: 1273 - DNA, 858 bp, Unknown
  Obtained from environmental sample
  misc_feature (1)..(858): n is a, c, g, or t
gtgtcggggcatgactttgtaaagaaacgttttaagaacgccgcgaaagctattaaaaaaggacgccccgacgtattgccgatgggttatttaatcgcaggcccagtagggacgggtaaaagttttatggttagcgccttcgcgggcgagattggaatcccgatggtgaagttccgcaatttcagaaccaagtggcagggcgagactgaatctaatcttgaaagagtcttgaatattcttgtggcgatggctccggtgggagtgatgatagacgaggcggacgcttttttgggagaccgctctcaggaaggtgattccggcacaagcaaccgcgtgtttgcacaaatagcctctttcatgggcaatacggaattccgtggcaaaattatctggtttttaataacgtgccgccccgacttaataccgattgaccttaaaaggcagggacgcgccgaagagcatcttgcccttttttatcctgaaacaaaaaaagacagggaagacctttttaacacgttagtgcgcaaactggatttggacatccgtaatttttcaatttccgatctttttaaaaaatacgattacgagtattcaggcgcggatttggaagcggttcttgtccgcgcaaaacttcttgcggcgatggcagaccgcgtttatgtgaaacgtgaagacatggaagaggcgatgagcgattttattcccgccgaccatccctacgaagttgaattgcaaaatcttgtcgcggtcttggaatgtacgtcaaaagaaatgcttcctatgcgttttcagaaattaacgcgcagtaaattaattggcgatattcaggaaataaaatcgctgttaggcgagaggtag

SEQ ID NO: 1274 - protein, 285 aa, Unknown
  Obtained from environmental sample
  DOMAIN (29)...(216): ATPase family associated with various cellular activities (AAA)
  misc_feature (1)..(285): Xaa is any amino acid
MSGHDFVKKRFKNAAKAIKKGRPDVLPMGYLIAGPVGTGKSFMVSAFAGEIGIPMVKFRNFRTKWQGETESNLERVLNILVAMAPVGVMIDEADAFLGDRSQEGDSGTSNRVFAQIASFMGNTEFRGKIIWFLITCRPDLIPIDLKRQGRAEEHLALFYPETKKDREDLFNTLVRKLDLDIRNFSISDLFKKYDYEYSGADLEAVLVRAKLLAAMADRVYVKREDMEEAMSDFIPADHPYEVELQNLVAVLECTSKEMLPMRFQKLTRSKLIGDIQEIKSLLGER

SEQ ID NO: 1275 - DNA, 837 bp, Unknown
  Obtained from environmental sample
  misc_feature (1)..(837): n is a, c, g, or t
gtgtatttcagcccttccgatgaaacttcggagaaccgtgcggaagaccgcgcggagaaccgggggcgaaacctcctcagcctcaaggaagacgagctctgccgcgtcaggggcaggcatatctcaatgatctttcaagagcctatgtcgtccctcaaccccctgcaaaaaatcggccctcagatcgttgaggctttagaaatccacgaagggaaaaaaaacaaagctcaaaacagactaaaagtaattgacttaatggaaaagctggggcttcaggaacccgaaaggctcatgggaacctacccctggaggctttccggcggcatgtgccagcgggtgatgatcgccctggccatgatctgcggccccaggctgctaatcgccgacgaaccaagtaccgccctggataagagtacccaggaggaggtgcttaaactactgcaacagatcaaccgtgagtcgggcacggccattctcctaatctcccacgacctgggaataataagccgcgtctgtcataaagtgatggtaatgtatgcgggcaagatcgtagaaaaaggcagcgtggcggaggtgttttcccacccggcccacgaatacaccaaaggactcctgggcgcgcttccggaaaggggccgcaaaggagaaaaacttaaaatgattcccggcaaggttccttcgatagaagagatccataccctcagttcaggctgcgcctttgccccccgctgcgcgaaggcggacgaaaactgccgtactgtacttccagaggagtctctcttcatcaacgagaaccacctgaccacttgcaaaagagccgggcagaggccgtcatga

SEQ ID NO: 1276 - protein, 278 aa, Unknown
  Obtained from environmental sample
  DOMAIN (184)...(251): Oligopeptide/dipeptide transporter, C-terminal region
  misc_feature (1)..(278): Xaa is any amino acid
MYFSPSDETSENRAEDRAENRGRNLLSLKEDELCRVRGRHISMIFQEPMSSLNPLQKIGPQIVEALEIHEGKKNKAQNRLKVIDLMEKLGLQEPERLMGTYPWRLSGGMCQRVMIALAMICGPRLLIADEPSTALDKSTQEEVLKLLQQINRESGTAILLISHDLGIISRVCHKVMVMYAGKIVEKGSVAEVFSHPAHEYTKGLLGALPERGRKGEKLKMIPGKVPSIEEIHTLSSGCAFAPRCAKADENCRTVLPEESLFINENHLTTCKRAGQRPS

SEQ ID NO: 1277 - DNA, 561 bp, Unknown
  Obtained from environmental sample
  misc_feature (1)..(561): n is a, c, g, or t
ttggacattctatattggtatagagggcagtgcgcgtgcatgtgcgcgtgtattgatcattatataaaacacaaatatactttatttattatggtaaatacaaacgataatacggatatagttatctgggacgaaaagtatgctacagggattaatctgattgacagccagcacaaagagcttttttcccttaccaatgaacttttccatgcctgtctgggcggtgaagaagcccttgaaggcgtattcaaagagacaatggagcgaatggttgaatacgtccatttccattttggcgctgagcaggaaatgttgcagcgggtaaaatatcctgattatcaggagcataaaaagcagcacgaaacattggtgcgggacattcttgaatcggtaaaggaatataacgagggtaagaaacttgtacccaaccagtttgtccgcaccctcagggactggatattgagccacattgccctctatgacaagctctttgcgtcttacatcgccgcccagaagaaaaaaggcgtactcagcgatagggaaattaacggtaatctttaa

SEQ ID NO: 1278 - protein, 186 aa, Unknown
  Obtained from environmental sample
  DOMAIN (112)...(167): Hemerythrin HHE cation binding domain
  misc_feature (1)..(186): Xaa is any amino acid
MDILYWYRGQCACMCACIDHYIKHKYTLFIMVNTNDNTDIVIWDEKYATGINLIDSQHKELFSLTNELFHACLGGEEALEGVFKETMERMVEYVHFHFGAEQEMLQRVKYPDYQEHKKQHETLVRDILESVKEYNEGKKLVPNQFVRTLRDWILSHIALYDKLFASYIAAQKKKGVLSDREINGNL

SEQ ID NO: 1279 - DNA, 855 bp, Unknown
  Obtained from environmental sample
  misc_feature (1)..(855): n is a, c, g, or t
ttgcagcggcaaacaaaaatatatatactgatattccattttaacgtcgccctgctttattgggcacaccaactatttatgacatttaaagacttaaacattatagagcccgtcttgaaggctctaatcaataagaagtacgaaaccccgaccccaatacaggcgcaggcgatacccgtagcgctgagcggtcgcgacctgctggggatagcccaaacgggcaccggcaaaacggccgcgtttgcaatacccatcatacaaaatctctatcagccgtccaggcaggaacacaagcgggaaataaaggcgctgatactgacgccgacgcgcgaactggccatacagatagaagagtgttttagggattatgcgaaatatacgggccttcgccatacggttattttcggcggagtcaaccaaagaccgcaaatcgaaaaactgaaacgaggtgtagatattctcattgctacgcccggacggttgctcgaccttatcaaccagaagtttatcacactcgaccatattcggcattttgtgcttgacgaagccgaccgtatgctcgatatgggattcatacacgatatcagacggattttgccgatgcttcccaaacgcaggcaaacgcttcttttttcggcaacaatgcccactgacatcgtaaacctgtccaagagtatgctggataatcctgcaagaatagaagtaacgccggcatcttcggtggtggacacgatagagcaaaatttgtactttgtggagaaacctcanaagaacgacttgcttttcacgattttgaaagatagaccgaataaaacgacgttgggttttttcccgcacaaaacatggagcgaataa

SEQ ID NO: 1280 - protein, 284 aa, Unknown
  Obtained from environmental sample
  DOMAIN (47)...(217): Type III restriction enzyme, res subunit
  misc_feature (1)..(284): Xaa is any amino acid
MQRQTKIYILIFHFNVALLYWAHQLFMTFKDLNIIEPVLKALINKKYETPTPIQAQAIPVALSGRDLLGIAQTGTGKTAAFAIPIIQNLYQPSRQEHKREIKALILTPTRELAIQIEECFRDYAKYTGLRHTVIFGGVNQRPQIEKLKRGVDILIATPGRLLDLINQKFITLDHIRHFVLDEADRMLDMGFIHDIRRILPMLPKRRQTLLFSATMPTDIVNLSKSMLDNPARIEVTPASSVVDTIEQNLYFVEKPXKNDLLFTILKDRPNKTTLGFFPHKTWSE

SEQ ID NO: 1281 - DNA, 777 bp, Unknown
  Obtained from environmental sample
  misc_feature (1)..(777): n is a, c, g, or t
atgcattacgctcttaaaaacgcccgttggcaggtatcaaatattttctaccgcgccatggaacaggatataaatatgttccgcgacgattatattttgtatttagttggaacgcatgagaataatttatttaacagtgaaaagtatccggaatattatgataaattcgctgaattttatataaatgacaagaacccggaagaagacgtatatccgcatctgatggcattaataccgcttttattggaaaaaaaagaacttattccgtttgtggaaaaaatactgcccacgcttgaaaaaagcaaacaatacgaggataaagacgaaaagagttttgtgtatatacgaatgaccataaaactgtttaaacttcaatctgacaaacgaatacatggcgtgcttaatgacctgacagtatttcttttttatgacgaaaaaaataaaaacgaacagttggggatggaaatttatattgtctataatctgaccatgttacgcccgtcaataaaagttctcatgcatgaatatccggagttattcaaactaaaccaggcgttttacctggacgcgctcaatgaaaaaaaagaagattatcttttggataaatatatcgcgatacataaaaagattaagcccggttataacttttattatgatggtgatgaagatgcggaagatgtaacgcctattaagcgtgaatcccccaaaatcggacgtaatgccccatgtccgtgcggaagcggaaagaagtataaaaagtgctgcggggcaaaataa

SEQ ID NO: 1282 - protein, 258 aa, Unknown
  Obtained from environmental sample
  DOMAIN (239)...(258): SEC-C motif
  misc_feature (1)..(258): Xaa is any amino acid
MHYALKNARWQVSNIFYRAMEQDINMFRDDYILYLVGTHENNLFNSEKYPEYYDKFAEFYINDKNPEEDVYPHLMALIPLLLEKKELIPFVEKILPTLEKSKQYEDKDEKSFVYIRMTIKLFKLQSDKRIHGVLNDLTVFLFYDEKNKNEQLGMEIYIVYNLTMLRPSIKVLMHEYPELFKLNQAFYLDALNEKKEDYLLDKYIAIHKKIKPGYNFYYDGDEDAEDVTPIKRESPKIGRNAPCPCGSGKKYKKCCGAK

SEQ ID NO: 1283 - DNA, 555 bp, Unknown
  Obtained from environmental sample
  misc_feature (1)..(555): n is a, c, g, or t
ttgatactccgggaaaacgctaaggaaggcgttgaaaaagaaaggcctgtaatttcctttgatcccaatatccgcacctttatgataaaggacaaagaggcttttataaagcgcacggaaaaactcatcgccgcttccgccatcgtcaaaatttctaacgctgatataggctatttatatccgggcatggataccgacaaagccattgagcgaattttatcctttgggccacgtctggttattgctacactgggcccggatggcgctctggccctgctccggcgtcatgacggaaacataatcagggtcagcgctccggctgtagatattcccctcgcggataccataggagcgggagataccttccacggggctttcctttcatggcttgaaataaaagggaagatgtcccgttccgccctggcaaatatgagcaataccgaactctatgaggctctcttttttgccaataaagcggcggctatagtctgttcccgcaggggcgctgagcctcccactctgaaggaagtggaagaactgaaaataccggcataa

SEQ ID NO: 1284 - protein, 184 aa, Unknown
  Obtained from environmental sample
  misc_feature (1)..(184): Xaa is any amino acid
MILRENAKEGVEKERPVISFDPNIRTFMIKDKEAFIKRTEKLIAASAIVKISNADIGYLYPGMDTDKAIERILSFGPRLVIATLGPDGALALLRRHDGNIIRVSAPAVDIPLADTIGAGDTFHGAFLSWLEIKGKMSRSALANMSNTELYEALFFANKAAAIVCSRRGAEPPTLKEVEELKIPA

SEQ ID NO: 1285 - DNA, 309 bp, Unknown
  Obtained from environmental sample
  misc_feature (1)..(309): n is a, c, g, or t
atgcttatgcaagcagattcgccatttcacgggcttgaaggaatgaaacacatggaatcaaccataacgccaaagatatttgataaaagcattgcagacttatactccgaagttaaaacagaagatgcttatgcaacagcaaaacttcttgccttgaaagaaggattatttgtgggtgtaagttcaggggcaaatgtgtatgccgctatggaacttgcaaaaactttgccagcaggttcgcgagtagccacaattctctgcgacaacggatatcgctatctatcacaaccattatggagagacatttaa

SEQ ID NO: 1286 - protein, 102 aa, Unknown
  Obtained from environmental sample
  misc_feature (1)..(102): Xaa is any amino acid
MLMQADSPFHGLEGMKHMESTITPKIFDKSIADLYSEVKTEDAYATAKLLALKEGLFVGVSSGANVYAAMELAKTLPAGSRVATILCDNGYRYLSQPLWRDI

SEQ ID NO: 1287 - DNA, 438 bp, Unknown
  Obtained from environmental sample
  misc_feature (1)..(438): n is a, c, g, or t
atggagagacatttaatgctgcatctttcttctgaattagacaataatataaggaaagctggcgaagccacctaccccaatgaatgttgcggaatccttttaggtgaaattaaagacgatggaactaaaatcgcaaaaaaaactgtgaacatagataactccagcgaaaacgccgagcaatatcaccgatttctcataacaccagaggatatgttcaaagcggagaaaattgcaagagcggaaaaattggaaattatcggcttttaccactcgcaccccgaccatccatcaaaaccctccggctatgataaagaccacgccctgcctttttattcatatattattgtatcggtggacaagggcaaagcccaaattctcaccagttgggaactcaccgataatagagaggattttgtgcaagaaaaaattgtggagtag

SEQ ID NO: 1288 - protein, 145 aa, Unknown
  Obtained from environmental sample
  DOMAIN (2)...(117): Mov34/MPN/PAD-1 family
  misc_feature (1)..(145): Xaa is any amino acid
MERHLMLHLSSELDNNIRKAGEATYPNECCGILLGEIKDDGTKIAKKTVNIDNSSENAEQYHRFLITPEDMFKAEKIARAEKLEIIGFYHSHPDHPSKPSGYDKDHALPFYSYIIVSVDKGKAQILTSWELTDNREDFVQEKIVE

SEQ ID NO: 1289 - DNA, 537 bp, Unknown
  Obtained from environmental sample
  misc_feature (1)..(537): n is a, c, g, or t
ttgattcctaaaggatgggtgcttcttggtttattcatggatccgcgcaccgtttttggcgtttncaggaattttaccatcagtaactacgatttaatgaaagaacttgccaaagcgtgttccgaaaaaagtattgatgaaatacttgcaatgacggatgtaaaagaacgtctggatttgtactttgaacagacaaagaattataaagagatggttcttaagtatgctaaacccgttggtgatgttattatgatagacctgcgggatgtggaaacaatctatgcgggaaacagattttttctttacacgcttttcccggatcaaaatatttcagtctgggtcgtggatggccggaataaagtaaatgtcgccattactgtcgggtacagcattataaaccggactgcaactgcggatgtcggcgcactcttgctccgttacggcggcggcggccacaagcaggtgggaacatgtcaggttccatacgatgatgccgacaagatcattgccgaaattgtagaaaatttaaaacgctaa

SEQ ID NO: 1290 - protein, 178 aa, Unknown
  Obtained from environmental sample
  misc_feature (1)..(178): Xaa is any amino acid
MIPKGWVLLGLFMDPRTVFGVXRNFTISNYDLMKELAKACSEKSIDEILAMTDVKERLDLYFEQTKNYKEMVLKYAKPVGDVIMIDLRDVETIYAGNRFFLYTLFPDQNISVWVVDGRNKVNVAITVGYSIINRTATADVGALLLRYGGGGHKQVGTCQVPYDDADKIIAEIVENLKR

SEQ ID NO: 1291 - DNA, 936 bp, Unknown
  Obtained from environmental sample
  misc_feature (1)..(936): n is a, c, g, or t
ttgatggcgaggatcgcccaccccatgacccggcggctcatcaaaacccccctgcctctgggcctgcgggctctggacggcttattgacctgcggcgaaggccagcgcctgggcatcttcgccgcggccggcggcggcaaaagcaccctcttgtccagcatcataaaaggttcggcggccgaggtctgcgtcttggccctgatcggagaacggggccgggaagtgcgggaattcatcgagcatgacttggggccggagggccggcaaaaaagcgttctggtggtctccacctccgaccgctcctccatggaacgcctcaaggccgcctacacggccacagccatcgccgaatattatcgggaccagggccggaaagtcttacttctcatggattcggtcacccgtttcggccgggctctcagggaaataggcctggccgccggcgagcccccgacccgccgcggtttcccgccctcggtcttctcgaacctgccgaaactcatggaaagggccggcaactccgaccagggctccatcaccgccctctacaccgtgctggtggagggcgacgacatgaccgagcccatcgccgatgaaacccgctccatcctcgacggccacattgtgctgtcccgcaagctggccgcggccaaccactacccggccattgacgtcctggccagcgtcagccgggtcatgaacgccatcaccagcccggaacatcggcgagaggccgggaaacttcgggccattctggccaaatacgccgaaatagagttgctggtgcaactcggcgaatatcagccggggcatgatgccgaagccgaccaggccctggccaaaataggcgcggtcaacggctttctgcggcagggactggacgaaaagagcgccttcgcggacaccctggccgccttgngccangccgtgaactga

SEQ ID NO: 1292 - protein, 311 aa, Unknown
  Obtained from environmental sample
  DOMAIN (20)...(230): ATP synthase alpha/beta family, nucleotide-binding domain
  misc_feature (1)..(311): Xaa is any amino acid
MMARIAHPMTRRLIKTPLPLGLRALDGLLTCGEGQRLGIFAAAGGGKSTLLSSIIKGSAAEVCVLALIGERGREVREFIEHDLGPEGRQKSVLVVSTSDRSSMERLKAAYTATAIAEYYRDQGRKVLLLMDSVTRFGRALREIGLAAGEPPTRRGFPPSVFSNLPKLMERAGNSDQGSITALYTVLVEGDDMTEPIADETRSILDGHIVLSRKLAAANHYPAIDVLASVSRVMNAITSPEHRREAGKLRAILAKYAEIELLVQLGEYQPGHDAEADQALAKIGAVNGFLRQGLDEKSAFADTLAALXXAVN

SEQ ID NO: 1293 - DNA, 738 bp, Unknown
  Obtained from environmental sample
  misc_feature (1)..(738): n is a, c, g, or t
atggtaattgaaagcaataccaggactacgacaagtaaccttgtcccggcttgcatttgcaagggccgtaggggcatgggcgcaaagatggttatagtggcgtccgatagcagggacgtacaggattgggtctatcgctatttggagccttacgggctaaggggctatgctttttaccttgtggaaagcgaagatgtattttccgaatacgtagggaagattgacacggtaatggcatttgttgaggatattttctttggcgaaaggacggttggaattctgggcaatatccgaaagcagtaccctaagctaaagcttgcattgttttcggcttccgttttgcctttgggtttagcggcgcgatatttgtactggagcatgggaagctacctttcgctgcgggatagcgagaaggaaatcagggatgctgtggaagcgatttttgggaaacggcaggcagtcccatcgtacttaatgggctgtcttgatgaatacggccgcctttcggataagaaaccgtacctgactcaccgggaggttgagattgtccgcttcgccggagaggggagaacaggcaaagaaacggcatcggttttgatgctaagcgagaagacagtgcggaaccatatttccaacatctaccggaaattcgggattcgcaacatggtggggattcttaagctggcggtgtcgaaggggatattgccggtagaggagcttatgagtttaagggattaa

SEQ ID NO: 1294 - protein, 245 aa, Unknown
  Obtained from environmental sample
  DOMAIN (172)...(229): Bacterial regulatory proteins, luxR family
  misc_feature (1)..(245): Xaa is any amino acid
MVIESNTRTTTSNLVPACICKGRRGMGAKMVIVASDSRDVQDWVYRYLEPYGLRGYAFYLVESEDVFSEYVGKIDTVMAFVEDIFFGERTVGILGNIRKQYPKLKLALFSASVLPLGLAARYLYWSMGSYLSLRDSEKEIRDAVEAIFGKRQAVPSYLMGCLDEYGRLSDKKPYLTHREVEIVRFAGEGRTGKETASVLMLSEKTVRNHISNIYRKFGIRNMVGILKLAVSKGILPVEELMSLRD

SEQ ID NO: 1295 - DNA, 669 bp, Unknown
  Obtained from environmental sample
  misc_feature (1)..(669): n is a, c, g, or t
atgattgattttctccagttgcaggaaattgtaaaggagcatctggaagttgacagggcgattcgctctatagacgcttcgggtcctacattggaagcggctgtaaacgaagccgctacgcttcttgatacatccgttcgccgccttgagtatgaaatccttgaaagaggttcgtccggatttatgggcgcaggaaaaaaagattgggtaatacgcgcctatgaacgcactcaatctaaaaaggtgaaaaaagttgatgaaagccttaccgatgaagacgctgaaagcgtcgctgttattcaggataaagacggagacgcttttgtacgatgttggcctaacggagtatttcttaaagttactccgcctgtcggtaacggtaaaaaagtatattcgggttatgcgacacaggagcttcaacaaagaaatatacaagaatacgataacgctttagtagaaaaacttgtagatgaagccggcggaaaatatgtaaaggtggcggattataatcataatcccgctaatgacacttcggctaacattgaggttgacgatgcggaaatgagagttaccgcaacggtcattcctcccggtgaaggcggagccgatttaacggttgatgtttataagagtttgcttgtgcagaacagagtgtacccacggcgttaa

SEQ ID NO: 1296 - protein, 222 aa, Unknown
  Obtained from environmental sample
  misc_feature (1)..(222): Xaa is any amino acid
MIDFLQLQEIVKEHLEVDRAIRSIDASGPTLEAAVNEAATLLDTSVRRLEYEILERGSSGFMGAGKKDWVIRAYERTQSKKVKKVDESLTDEDAESVAVIQDKDGDAFVRCWPNGVFLKVTPPVGNGKKVYSGYATQELQQRNIQEYDNALVEKLVDEAGGKYVKVADYNHNPANDTSANIEVDDAEMRVTATVIPPGEGGADLTVDVYKSLLVQNRVYPRR

SEQ ID NO: 1297 - DNA, 510 bp, Unknown
  Obtained from environmental sample
  misc_feature (1)..(510): n is a, c, g, or t
gtgggtcagaattcggcacgagacattcagccgcccgcgccccaggttgaatacgtttatattcagccgcccgcgccccaggtcgaatacgtttacattcagcccccggagccccaggtcgaatatgtttatattcagccgcccgcgccccaggtcgaatatgtttacattcagccgcccgcgccccaggtcgaataccttccgccgccaaaggttgaacctatagttgaatatgtatatgttcaacagcccacgcagatccgtgttattcccaagttaccgaatccaaacagttccaggttataccgtctgcaggtaggctcttatgccgcgcataataccgcggagaaaatagcgcagcgcataagatcggcgggtttgcaggccagtattgagaattataattcattggagcgggtgttcgtaccaggcgtccgcgcgtcggacgcgagctcaatagtgcaaatgcttgagtcattgggatttcaggaagtttggataagggaataa

SEQ ID NO: 1298 - protein, 169 aa, Unknown
  Obtained from environmental sample
  DOMAIN (98)...(169): Sporulation related domain
  misc_feature (1)..(169): Xaa is any amino acid
MGQNSARDIQPPAPQVEYVYIQPPAPQVEYVYIQPPEPQVEYVYIQPPAPQVEYVYIQPPAPQVEYLPPPKVEPIVEYVYVQQPTQIRVIPKLPNPNSSRLYRLQVGSYAAHNTAEKIAQRIRSAGLQASIENYNSLERVFVPGVRASDASSIVQMLESLGFQEVWIRE

SEQ ID NO: 1299 - DNA, 351 bp, Unknown
  Obtained from environmental sample
  misc_feature (1)..(351): n is a, c, g, or t
atggccagggagcgcaccctggtgttgaacttggcctacctgcgtgcaggaaggcttaaacgcccatctcccggggacccgccccacgacgtgccccgcgcggaggcggtggcaaaggccgctttcgagatggacgacccgcttgaagctgcgattttcatagataaagcccgctggggtgcccttgatgacatggtggggctcgatcccttcggggtgaataatatttttgcctatttgatgaagcttcagttgcttgaacggcggcagtgtttcgacgccgaagtcggggctatcaagtataaagaactttacgattcaatactgaatacatacaattccagggtttaa

SEQ ID NO: 1300 - protein, 116 aa, Unknown
  Obtained from environmental sample
  misc_feature (1)..(116): Xaa is any amino acid
MARERTLVLNLAYLRAGRLKRPSPGDPPHDVPRAEAVAKAAFEMDDPLEAAIFIDKARWGALDDMVGLDPFGVNNIFAYLMKLQLLERRQCFDAEVGAIKYKELYDSILNTYNSRV

SEQ ID NO: 1301 - DNA, 468 bp, Unknown
  Obtained from environmental sample
  misc_feature (1)..(468): n is a, c, g, or t
gtgccgatagtatccgccctgacaactttatcgccgggtttagccaccggggtaaagtcccactcctttacaagcgaaagaggctcaagatacaccccccgttcaaggaagaaaccgcacttttccgccagttgcgggaggggattctggagaccgtcgtatatttgcgtgaggaggccgggccccagctccacggcaagcatgtctccagaaaactcaacggcatcgttgacaacaatacccctggtcatctcaaagacctggagactacaggtattccccttgattcggattacctcgcccttgagctttttgccttcggtttcaatatacgccacttcgttcatcattacaggaccgtcaaaattgacggctaccatgttaccgtttactgcggcgacttttcccttggttcctttcattatgatcctctttttaaaccctggaattgtatgtattcagtattga

SEQ ID NO: 1302 - protein, 155 aa, Unknown
  Obtained from environmental sample
  SIGNAL (1)...(22)
  misc_feature (1)..(155): Xaa is any amino acid
MPIVSALTTLSPGLATGVKSHSFTSERGSRYTPRSRKKPHFSASCGRGFWRPSYICVRRPGPSSTASMSPENSTASLTTIPLVISKTWRLQVFPLIRITSPLSFLPSVSIYATSFIITGPSKLTATMLPFTAATFPLVPFIMILFLNPGIVCIQY

SEQ ID NO: 1303 - DNA, 882 bp, Unknown
  Obtained from environmental sample
  misc_feature (1)..(882): n is a, c, g, or t
gtgaaccgcctggccggggatatggtgtctctgcaggtatttgccggaggccgtggtatttcgaccggcgacaccattgaatttttgggtcatcccatgcaggtttctttttcggaaaaccttctgggccgggtctttaccggttccggctctccccgcgataacgggcccggtctggcagaaaaccttatccccataggcggtccatctgtaaaccctgcccagcgtatcatcccccgcaagatgatccgcaccggtatcccgatgatcgatctttttaataccttggttgtttcccagaaactcccgattttctcaatttccggggagccctacaacgagcttttggcccgcatcgctatgcaggccgaggttgacgtaatcattttgggcggcatggggttaaaattcgacgattacctctattttaaggacactcttgaacagggcggctccctttccaagacggtaatgtttgtgcataccgccgccgaccccaccgtagaatgtctgatgataccggacatgagcctggccgtggccgagcaattcgccttgcagaacaaagacgtgctggtactccttaccgacatgacgagtttcgccgacgcgatgaaggaaatcgccatttcccaggagcaggtacccagtaaccggggttaccccggcgatctctacagccagctcgcctcccgttacgaaaaggccgttgactttgaaacggcgggttccattaccgtactgggcgtaactactatgcccggtgacgacgttacccacccggtacctgataataccggttacatcacggaaggtcagtactacctgcgcggcggacgcatcgagcccttcggtccctttcacgcctcgtgccgaatctga

SEQ ID NO: 1304 - protein, 293 aa, Unknown
  Obtained from environmental sample
  DOMAIN (85)...(288): ATP synthase alpha/beta family, nucleotide-binding domain
  misc_feature (1)..(293): Xaa is any amino acid
MNRLAGDMVSLQVFAGGRGISTGDTIEFLGHPMQVSFSENLLGRVFTGSGSPRDNGPGLAENLIPIGGPSVNPAQRIIPRKMIRTGIPMIDLFNTLVVSQKLPIFSISGEPYNELLARIAMQAEVDVIILGGMGLKFDDYLYFKDTLEQGGSLSKTVMFVHTAADPTVECLMIPDMSLAVAEQFALQNKDVLVLLTDMTSFADAMKEIAISQEQVPSNRGYPGDLYSQLASRYEKAVDFETAGSITVLGVTTMPGDDVTHPVPDNTGYITEGQYYLRGGRIEPFGPFHASCRI

SEQ ID NO: 1305 - DNA, 435 bp, Unknown
  Obtained from environmental sample
  misc_feature (1)..(435): n is a, c, g, or t
atgcaggatgaaaaaaaacacatcctgaaattacttaccatgaataaaatttcacttagcttctattatactcccggtgaaaactgggaaaacaccaggcatttccggtacatccgtatctttaaactcctcgttcccgaattggccctgggtaaaagcacggcggaaatttcccgcttcctcggcacggtgctgaaccccgatttggaaaagacggttcgcaaggattatcctaccccgtcaaatacgataaaaaagatcatgacggattttgcgacgctaaagctggtcgggtgtatcagcggcgaaggaggcaatgagggcgatgagatatgggaaattactccgcatgggaaggatatattctctgcatatcgcataacacagcttgaaaaggccatggagaaaaaagctgaagagggaaccagttcctaa

SEQ ID NO: 1306 - protein, 144 aa, Unknown
  Obtained from environmental sample
  misc_feature (1)..(144): Xaa is any amino acid
MQDEKKHILKLLTMNKISLSFYYTPGENWENTRHFRYIRIFKLLVPELALGKSTAEISRFLGTVLNPDLEKTVRKDYPTPSNTIKKIMTDFATLKLVGCISGEGGNEGDEIWEITPHGKDIFSAYRITQLEKAMEKKAEEGTSS

SEQ ID NO: 1307 - DNA, 627 bp, Unknown
  Obtained from environmental sample
  misc_feature (1)..(627): n is a, c, g, or t
atggcatttgcaaaagcagagcgtacccagctttatttgaggtgcgcgttatttgggccatctggttcaggaaaaaccatgactggcctacggatggcgaaaggaatagcggaaaagatgggagttcctttcgcggtaatcgacacagaagcaaagtcagcgacaaagtatgctgataggtttgattttcaagtagataatcttgaaaaaaagactgttgaccactacatagcttcaatgaacgaagcagccagagcaggttataaagtgctgcttattgacagcctcagccacgcatggagagaacttactgaggaggtagaccgtatcacccaagcaagcaacagcaagaacagccttttgtcctgggggaaagtcggaccaaagcagaagcggttcattgacgctatcctaaattatcccggccatatcatcgtaaccatgaggagcaaaactgaatgggtcattggtacaggcgaaaacggaaagatcgccgctgaaaagctgggcctagctcccgaacagggaaaagggattgaatatgagtttgacttgctccttgaactcaagcaaaaccattttgccacaataactaaagaccgtacggaaaataccaggacgaggtaa

SEQ ID NO: 1308 - protein, 208 aa, Unknown
  Obtained from environmental sample
  misc_feature (1)..(208): Xaa is any amino acid
MAFAKAERTQLYLRCALFGPSGSGKTMTGLRMAKGIAEKMGVPFAVIDTEAKSATKYADRFDFQVDNLEKKTVDHYIASMNEAARAGYKVLLIDSLSHAWRELTEEVDRITQASNSKNSLLSWGKVGPKQKRFIDAILNYPGHIIVTMRSKTEWVIGTGENGKIAAEKLGLAPEQGKGIEYEFDLLLELKQNHFATITKDRTENTRTR

SEQ ID NO: 1309 - DNA, 702 bp, Unknown
  Obtained from environmental sample
  misc_feature (1)..(702): n is a, c, g, or t
atgcgaaacgacatgaaaattgtagccggaggaacagcaaggcggatggctgaacgtttatacgttaacaatgaagaagcggatacgcagaatacgcaaaataacgaaacagatgagaaaaaaacaggaattataaggctctgcactgtacctgtaatcgtgaattcaaattatgaaatactgccgtctttatccgcgcctttgactcaccgcaagaaaataaaaacaattttaatggaacctcaaacagacggcgatttaagcctctatccgtttgacggaatcggaatatacgaccgtcagcgctttattcaaataggcggatatgatacaacgctggacaagattcattggcagttaatggatttcggtttccgcgcatttttgtgggaagaagaaatagcctttaatttacattataaagtttcttatgacggggaactgcctcctgaagactatactgcggaagacagttacaggcggttctaccttaaaaatatcgcccccgtattccgcggcgattacgcttatctgcccttttacaggtttctgtcattcttgaacaaatcggaagacgattttttcccggcatgggaagaattcaaacaaagcagaatatgggtcagaaaaaacaaatacaggtggagattagacgcccgcggcgttacagctatgtgggatacggcaaaagatggagaataa

SEQ ID NO: 1310 - protein, 233 aa, Unknown
  Obtained from environmental sample
  misc_feature (1)..(233): Xaa is any amino acid
MRNDMKIVAGGTARRMAERLYVNNEEADTQNTQNNETDEKKTGIIRLCTVPVIVNSNYEILPSLSAPLTHRKKIKTILMEPQTDGDLSLYPFDGIGIYDRQRFIQIGGYDTTLDKIHWQLMDFGFRAFLWEEEIAFNLHYKVSYDGELPPEDYTAEDSYRRFYLKNIAPVFRGDYAYLPFYRFLSFLNKSEDDFFPAWEEFKQSRIWVRKNKYRWRLDARGVTAMWDTAKDGE

SEQ ID NO: 1311 - DNA, 438 bp, Unknown
  Obtained from environmental sample
  misc_feature (1)..(438): n is a, c, g, or t
ttgctttcacagccggacgcggaaaagctgtggatgaaaggggaaagctccggccacacgctaaagctgctccgccttcgctctgactgcgacagggacgcgctgcttgcgacggtagaaccggctgggccggtttgccacaccggagcgtggtcctgcttcgacgtgaaccgccgctatacattggaataccttcagtcggtaattgccgagcggttccgcaatcccgtgcccggttcctataccgcaaccctggatgaccagcttgtccgcgaaaaaatcatggaagaagcggaagagctttgcgccgccaagacccatgatgaaaaagtctgggaagcggcggatctgctctactttacggcggcccttatgaccagggaagggattccggttgcggaagttctgaatgaactggacaggcggcataaaaaatag

SEQ ID NO: 1312 - protein, 145 aa, Unknown
  Obtained from environmental sample
  DOMAIN (1)...(56): Phosphoribosyl-AMP cyclohydrolase
  misc_feature (1)..(145): Xaa is any amino acid
MLSQPDAEKLWMKGESSGHTLKLLRLRSDCDRDALLATVEPAGPVCHTGAWSCFDVNRRYTLEYLQSVIAERFRNPVPGSYTATLDDQLVREKIMEEAEELCAAKTHDEKVWEAADLLYFTAALMTREGIPVAEVLNELDRRHKK

SEQ ID NO: 1313 - DNA, 714 bp, Unknown
  Obtained from environmental sample
  misc_feature (1)..(714): n is a, c, g, or t
atggcacgggctctggcatccgggtcatgttctgcctgggcaagcatatctgcggcaaccagttccgccggatcaggattcccgttgtcaacaatgaccagcacatcggtcgggccggcaataaagtctatccctacttcgccaaaaagcagccgttttgcggcggccacatacttgtttcccggcccaacgataacgcttgctctgggaaccgattctgtacctatggcaagggcggcgattgcctgggcgccgccgacggcgaatatccgcagtttcgtagcctttgcggctgctgcctcccggccaatccgcaaagcaagggcggcggcggccaggatattcctgtcgggaaggccgtcttccatgggcggcgaagcaaggataatctcctccactccggcggccattgcggggatcatgcccattagcacggaagaaaaaagcgggaaacggccggcgggcacatacactgccgcccgttccgcgggaatcacccgctggccggtaaaaagcccctctgccatctcggtttcaaacccggacatctgctttcgctgtaattcggcaaaggtaaaaatatgccgggccgccagctccagcgccccggcggcttccgcatcttttttgcggaagtcttcccaggcggattccgccaaaccggggggaacttcaagctgtgccggagaactcctgtcaaaccgttccgcgtaa

SEQ ID NO: 1314 - protein, 237 aa, Unknown
  Obtained from environmental sample
  SIGNAL (1)...(23)
  misc_feature (1)..(237): Xaa is any amino acid
MARALASGSCSAWASISAATSSAGSGFPLSTMTSTSVGPAIKSIPTSPKSSRFAAATYLFPGPTITLALGTDSVPMARAAIAWAPPTANIRSFVAFAAAASRPIRKARAAAARIFLSGRPSSMGGEARIISSTPAAIAGIMPISTEEKSGKRPAGTYTAARSAGITRWPVKSPSAISVSNPDICFRCNSAKVKICRAASSSAPAASASFLRKSSQADSAKPGGTSSCAGELLSNRSA

SEQ ID NO: 1315 - DNA, 654 bp, Unknown
  Obtained from environmental sample
  misc_feature (1)..(654): n is a, c, g, or t
ttgggggccgacgaagggcttcgcccagaagctgggggcggccgtccacccagcggagcccgccgaagacgaggtctgcgcggggccgctgaccgcgaaaatgcaggcgatggtcgaggagagcttgccgctggtcaagtacatcgcgctgcgcatagccaaccgcgtgccgaagagcgtggagctggacgacctgataggcgacggggtaatgggcctnttgtccgcggtcaggcacttcgaccccgccaggggcgcgaagttcaagaccttcgcggagccaaggatacggggggcgatcctggacagcctccgcaacctggactgggtgccgcgctcgctgaggcagaagcagaaggacatcgaggacgcctaccatgtgctgtccatgcgccacggcagggccgcggaggacgaggaggtggcgctgcaccttggcgtgccgctggaggagctgcacaagtcgctggacgacctgaagggggtctcgctcggctccatcgaggacagcgccggggaaggcgaggggctgctggccttcatagcggaccccgacgcggaggacccgcaccatgccctgcacgggaaggagatgaagggcctgctggtcaaaatggtgagcgaactgcccgaaaaagactcggccgattctga

SEQ ID NO: 1316 - protein, 217 aa, Unknown
  Obtained from environmental sample
  misc_feature (1)..(217): Xaa is any amino acid
MGADEGLRPEAGGGRPPSGARRRRGLRGAADRENAGDGRGELAAGQVHRAAHSQPRAEERGAGRPDRRRGNGPXVRGQALRPRQGREVQDLRGAKDTGGDPGQPPQPGLGAALAEAEAEGHRGRLPCAVHAPRQGRGGRGGGAAPWRAAGGAAQVAGRPEGGLARLHRGQRRGRRGAAGLHSGPRRGGPAPCPAREGDEGPAGQNGERTARKRLGRF

SEQ ID NO: 1317 - DNA, 849 bp, Unknown
  Obtained from environmental sample
  misc_feature (1)..(849): n is a, c, g, or t
atggcgctgaatgtaaagggcttggtcaatatccaatacatattgtacgacaacgatatctacgtgatagaggtcaacccgcgagcgtcgcgtaccgtcccgtacatcagcaaggttacaagcgtccccatgtgcgaacttgccacaagcgtgagcgtagggaaaacactttccgaactcaaccgaaagccgggtttcgcgaaaatccctccatacgtggcggtcaaagttcccgtgttctcctttgaaaaattgaccggcgtagacacgcacctcggtccggaaatgaaatcgaccggcgaggttttggggctaggcaaaaatttacaagaggccttgtacaaggggcttatagccgccggttacaagatgaataagaagggcggcgtattgattaccgttcgcgacggcgacaaaggggaaatcatagacgtcgccgaaaaactggacaaatgcggattctcactccacgcgacacggggcacggcgcggttcctcaacgaaaaaggattcaaagtcaacgcggtggacaagatcagcgccaacacggaaaacagcaccgcggcgctcttggaaagcgggaaaatcagctacatcatctcaacgtcggaaaaaggcagagacccggcgtttgacgatgtaaaaatccgccgaaaagcctgctccctcggtatcccatgcctgacatccattgacaccgcaaacgccttagccgacagcctgctctccaagtacagcgaaaacaatacagaattggtagatataaacaggttaagggataaacctatgaaactgtcgttcaccaaaatgcacggatgcggcaacgactacatctacataaactgctaa

SEQ ID NO: 1318 - protein, 282 aa, Unknown
  Obtained from environmental sample
  DOMAIN (141)...(229): MGS-like domain
  misc_feature (1)..(282): Xaa is any amino acid
MALNVKGLVNIQYILYDNDIYVIEVNPRASRTVPYISKVTSVPMCELATSVSVGKTLSELNRKPGFAKIPPYVAVKVPVFSFEKLTGVDTHLGPEMKSTGEVLGLGKNLQEALYKGLIAAGYKMNKKGGVLITVRDGDKGEIIDVAEKLDKCGFSLHATRGTARFLNEKGFKVNAVDKISANTENSTAALLESGKISYIISTSEKGRDPAFDDVKIRRKACSLGIPCLTSIDTANALADSLLSKYSENNTELVDINRLRDKPMKLSFTKMHGCGNDYIYINC

SEQ ID NO: 1319 - DNA, 834 bp, Unknown
  Obtained from environmental sample
  misc_feature (1)..(834): n is a, c, g, or t
atgacctatagtaaagccgtgtggggcatagttcaggcggacgttcttgatttcntgcggcgcaggatacggccctacgaactgcagaaaggggaaaccgataaaattgttgaaaacgcttttgtcgaaatttccaaaggactcgcgaaaggcggcattccaggcgcgaacgccgcgttcaagaaggcaataaatgaactatgcgccgtccgttatgaccgctcaaagccgcgggaactggtttatcttcagggcgagtactatttaacctttcatccgggcgcaaatcaacaaattgaaaggtatctggaaaaaaacgggatggaagtgatcttctccagaatgtccagtatttaccgccatctgtttttgcagcacacccttgccgaaatgaacgaattcaaagtacgccattctttgtataacaatttatacgcccggcttggcaataaatttatggacatagccgtaagatacgccgataaaattgccgcgaagcatcccctgtatgaacctgatattacgcttgagcaggcggcaaaatacagcgatgacataatgcatcattcgatattgtccggggaatccttccttattgccgcccatactctgcataatgccgcaaaaggaatccgttcatttgttattctccagccttttggctgcctgccgaatcatgtctgcgggcggggggtgatcaagagaatcaaggaattgcatccggatattcaaatactgccgcttgattacgatcctgacgtgagttttgccaatatcgaaaacagaatacagatgctgttgatgaatatgaaaaatttgaaagcggcggggtga

SEQ ID NO: 1320 - protein, 277 aa, Unknown
  Obtained from environmental sample
  misc_feature (1)..(277): Xaa is any amino acid
MTYSKAVWGIVQADVLDFXRRRIRPYELQKGETDKIVENAFVEISKGLAKGGIPGANAAFKKAINELCAVRYDRSKPRELVYLQGEYYLTFHPGANQQIERYLEKNGMEVIFSRMSSIYRHLFLQHTLAEMNEFKVRHSLYNNLYARLGNKFMDIAVRYADKIAAKHPLYEPDITLEQAAKYSDDIMHHSILSGESFLIAAHTLHNAAKGIRSFVILQPFGCLPNHVCGRGVIKRIKELHPDIQILPLDYDPDVSFANIENRIQMLLMNMKNLKAAG

SEQ ID NO: 1321 - DNA, 762 bp, Unknown
  Obtained from environmental sample
  misc_feature (1)..(762): n is a, c, g, or t
atggtttcccgccgcggtattgcctatatgtcgcgccgcgttgattctgaaggaatgacatttacctttagggccgaagaaacgggaattttcgctttaagattttacaggcgtgattatatcagggattatattttatatgattatgttcaggttattgtggaagaacagccggataaaggaagtgcgggagcgtttattgaccgcggcaaggtaacggcggaaccccgctggccgtccgcgcttgaagaagcggaaatgctcaggggcggcgcgagacccgctttagctgcggagtcttctccaagtaataaaaacggctcttccgcctcatcggcatcgtcagctaacagagggtcagctgccgccgcaacgcagggaacgacagcgccgccgcagaccgcgtcttcaaacagggaaactccaacgcagggaaccggcgttgcaccgcaagctgttgttccatcggcggctgtaacgcagcagcctgtaacgccgtcggtgacgcagtcggcgacaccggaagatgccgcgccgcccgccgtaaaaaaggagaaacttccgcctgaagaaatattaaaaaaggcgcaggacgcatttaacgggggaaacgccgccgaggcgatagcgttactcgatcaatacatggaattttatcccggcggcaatgatgaattatattggatgtacggtcagttttacgaagccaatactccgtccagaaacattctgctttctctggattattacgccgtcttgtaa

SEQ ID NO: 1322 - protein, 253 aa, Unknown
  Obtained from environmental sample
  misc_feature (1)..(253): Xaa is any amino acid
MVSRRGIAYMSRRVDSEGMTFTFRAEETGIFALRFYRRDYIRDYILYDYVQVIVEEQPDKGSAGAFIDRGKVTAEPRWPSALEEAEMLRGGARPALAAESSPSNKNGSSASSASSANRGSAAAATQGTTAPPQTASSNRETPTQGTGVAPQAVVPSAAVTQQPVTPSVTQSATPEDAAPPAVKKEKLPPEEILKKAQDAFNGGNAAEAIALLDQYMEFYPGGNDELYWMYGQFYEANTPSRNILLSLDYYAVL

SEQ ID NO: 1323 - DNA, 489 bp, Unknown
  Obtained from environmental sample
  misc_feature (1)..(489): n is a, c, g, or t
atgaaaataaaggaaatacctcccgtctccgcggcgtcttcggcacaagcgccatcggcacaagtgccggcgccgtctgcggcgcgctctgccctaacagagaactttcacgctatacttaaagagacccctatgggcgatcttgaaagagcggaactttccgccagaattgacaggcgtattgtcctgtgcgaaacgcagttaaaagaggcgagcctgcgttacgagaaacttgaagcgcgcaacatggattatgccggaaagcagaacattgccaaacaagccatagcccagcaatcgcccgtggagatagtccggggcgcgggaagcggagagcagcgcattttcggcattcccaaagcgcttgagaaaaaagagggagattatgttttggttgttattcccgccggcggaaaggatgaattatccataccgcttggaaagatcagccttttgcgccggataaaaaaatctatttttgagatataa

SEQ ID NO: 1324 - protein, 162 aa, Unknown
  Obtained from environmental sample
  SIGNAL (1)...(20)
  misc_feature (1)..(162): Xaa is any amino acid
MKIKEIPPVSAASSAQAPSAQVPAPSAARSALTENFHAILKETPMGDLERAELSARIDRRIVLCETQLKEASLRYEKLEARNMDYAGKQNIAKQAIAQQSPVEIVRGAGSGEQRIFGIPKALEKKEGDYVLVVIPAGGKDELSIPLGKISLLRRIKKSIFEI

SEQ ID NO: 1325 - DNA, 774 bp, Unknown
  Obtained from environmental sample
  misc_feature (1)..(774): n is a, c, g, or t
gtgaatatagttccaaaagaactaagggatttgggtgttggcactgctggcattcacccaaggcacagggtttttgcagcggcagaacctttagaagactcccccgctggcaaagctggcttaaagcaaaacgataccattttaagcgtggacggctacacaataggctattaccaagatatgatagacataatttcagcatctgatggaaacgctgttgaggtggtgtatttaagagcacaagaaaacggcacaacagatactttaaatgcctcaataaatccgctatggaacgaggaagcagagcgttatttaattggaattcaaatgggacttgcccaatttgatgaattgcaggttgttcacaagccactaggtgcagcccttgcaatggcggcaaaaaagagcattagcatgggaaccagcgtatttcgctacattcatcgcattataataggagaggttaaatttagagctatgagcggacccgttggcattgtgcaagttataggtttggtgtggcttgaaaatttgcaaaaagcggtatttttgcttgcccttataagcataaatttgggcgttatgaatttgctaccccttgccattacagatggaggccttcttttgtttttgctcattgaaaaaataagaggcaagccactttctcaaaagaaccaagctcgcattcagcaagctgcaacttcattttttatagccctgtttatttatataacatttgtggatttgagcagaggctcaatgttaatgaagtaa

SEQ ID NO: 1326 - protein, 257 aa, Unknown
  Obtained from environmental sample
  DOMAIN (126)...(248): Peptidase family M50
  misc_feature (1)..(257): Xaa is any amino acid
MNIVPKELRDLGVGTAGIHPRHRVFAAAEPLEDSPAGKAGLKQNDTILSVDGYTIGYYQDMIDIISASDGNAVEVVYLRAQENGTTDTLNASINPLWNEEAERYLIGIQMGLAQFDELQVVHKPLGAALAMAAKKSISMGTSVFRYIHRIIIGEVKFRAMSGPVGIVQVIGLVWLENLQKAVFLLALISINLGVMNLLPLAITDGGLLLFLLIEKIRGKPLSQKNQARIQQAATSFFIALFIYITFVDLSRGSMLMK

SEQ ID NO: 1327 - DNA, 789 bp, Unknown
  Obtained from environmental sample
  misc_feature (1)..(789): n is a, c, g, or t
atgctcaactctttgcccatggccgtaaaagccggttacgcgcttgacggctggttcacggatactactgctagcggtgtcaaaataacgacaaacacggtgttcgacaatgacgcgattgtctatgccaattgggtgacaggatacgccataacgttcagcgccggcgcaaacggcaatcttacggcaaaggttgagggcattgccattacctcaggcacaccagtggcgggcgacaagagcgtcgtgttcaccgcgactccggcaacgggttacgaggtaagcggttggaatatcggcggcacgccggtcgccggcaatactagtgctatttacacacttataagcgtaacggacactactacggtaacggtatcgtttatcttaaatcaggacgctgtcgcgtcacccgaccgcgtaatccccagcgccgattccgacattggcgtggcggcggtagcgcccgcggccacgcttgccgccggattcacggctggcccgaatcctgtcgtcaggtcgtcgggcgcggtgagtttcttccgcaacggcagccgcattgagggcgcaacgttgtttgtttacgacgcgtccggcaatgaggtcaccaaggtgaacatcggaaaggcaaccgacatcggcggcagcggcaagcgcgcgataggctcttgggatttgcgggacaagagcgggcgcgcggtgccggaggggacatacttggtcaagggaacgatcaagaccgccggcggtaagcgcgagcaggtatcgacgatcttgggcgtggggcggtag

SEQ ID NO: 1328 - protein, 262 aa, Unknown
  Obtained from environmental sample
  misc_feature (1)..(262): Xaa is any amino acid
MLNSLPMAVKAGYALDGWFTDTTASGVKITTNTVFDNDAIVYANWVTGYAITFSAGANGNLTAKVEGIAITSGTPVAGDKSVVFTATPATGYEVSGWNIGGTPVAGNTSAIYTLISVTDTTTVTVSFILNQDAVASPDRVIPSADSDIGVAAVAPAATLAAGFTAGPNPVVRSSGAVSFFRNGSRIEGATLFVYDASGNEVTKVNIGKATDIGGSGKRAIGSWDLRDKSGRAVPEGTYLVKGTIKTAGGKREQVSTILGVGR

SEQ ID NO: 1329 - DNA, 483 bp, Unknown
  Obtained from environmental sample
  misc_feature (1)..(483): n is a, c, g, or t
ttggaagcaatccgtatccttggtatggaaaaaaaagtccgcttttatcaggcgtcaacttcggagcttttcggcaaggtacaggaaattccccagaaggagacaactcctttttatccccgcagtccatatgccgcggcgaaactgtacgcttattggattacggtgaattacagggaaagttacgggatgtacgcctgtaatggaatcctgttcaaccacgaaagccccctgcggggagaaacctttgtaacacgcaaggttacccgcgccgcggcccgtatcagtcttggcttgcaggataaattgtatatgggcaatattgacgcaaaacgggactgggggtttgccggagattatgtagaacttatgtggcttatgcttcaacagaatgagccggaggattatgtgatggcaaccggcgttactactacggttcgggattttatactatggctttttaggaagccagtattgaaatag

SEQ ID NO: 1330 - protein, 160 aa, Unknown
  Obtained from environmental sample
  DOMAIN (1)...(139): NAD dependent epimerase/dehydratase family
  misc_feature (1)..(160): Xaa is any amino acid
MEAIRILGMEKKVRFYQASTSELFGKVQEIPQKETTPFYPRSPYAAAKLYAYWITVNYRESYGMYACNGILFNHESPLRGETFVTRKVTRAAARISLGLQDKLYMGNIDAKRDWGFAGDYVELMWLMLQQNEPEDYVMATGVTTTVRDFILWLFRKPVLK

SEQ ID NO: 1331 - DNA, 564 bp, Unknown
  Obtained from environmental sample
  misc_feature (1)..(564): n is a, c, g, or t
atgtttgacagtgttgcgctgcagagcggcgcgttggaaatatctgcggcgataaaagtaaaaaagctcagcgtgatagaagcggtaagcgcgtatatagaaaaagttgaaaaaaacgacaaacaatttaacgcttttttggcgctgtcaaaagagagcgctcttaaacgcgcgcaagagatacaggcgctaattgacaaaggggaagagctttcgcctctcgccggaacgccaatcgcccttaaagacaatatctctacaataggacttgaaaccacctgcgcgtcaaaaattcttacgggttataaacctgtgttcaatgccacaataactgaaaaacttgaacgcgcgggaatgatcgttatcggaaaactcaatatggacgagttcgctctcggcggctcaagcgagacgggggcgttcggcgcggctcataacccttgggatacaacgcgggtctgcggaggttcatcgggggggagcgccgccgcaattgcctcgggagaagcgccgattacgctcggcactgatacgggcggaagcatacgcctcggccgattctga

SEQ ID NO: 1332 - protein, 187 aa, Unknown
  Obtained from environmental sample
  DOMAIN (27)...(187): Amidase
  misc_feature (1)..(187): Xaa is any amino acid
MFDSVALQSGALEISAAIKVKKLSVIEAVSAYIEKVEKNDKQFNAFLALSKESALKRAQEIQALIDKGEELSPLAGTPIALKDNISTIGLETTCASKILTGYKPVFNATITEKLERAGMIVIGKLNMDEFALGGSSETGAFGAAHNPWDTTRVCGGSSGGSAAAIASGEAPITLGTDTGGSIRLGRF

SEQ ID NO: 1333 - DNA, 318 bp, Unknown
  Obtained from environmental sample
  misc_feature (1)..(318): n is a, c, g, or t
atgttatctaaaggcaggagaataactgtcatgcagattgacgacaaactgatctcgtaccttgaagatttatcctatcttactcttcccgccgatgaaaagctccggttgactgaggatttaggaaaaatactgaacagtattgaacgtcttagcgaactaaatacggacggtgtgcaggaacgcagtcatccttttgataatgtaaatgttttccgggacgatgaagtacattcttcttttgatcgtgaattgatcctgaaaaacgctcctgtcaggaacgatgaattcattgtcgcgccgaaaacggtcgagtaa

SEQ ID NO: 1334 - protein, 105 aa, Unknown
  Obtained from environmental sample
  DOMAIN (29)...(100): Glu-tRNAGln amidotransferase C subunit
  misc_feature (1)..(105): Xaa is any amino acid
MLSKGRRITVMQIDDKLISYLEDLSYLTLPADEKLRLTEDLGKILNSIERLSELNTDGVQERSHPFDNVNVFRDDEVHSSFDRELILKNAPVRNDEFIVAPKTVE

SEQ ID NO: 1335 - DNA, 876 bp, Unknown
  Obtained from environmental sample
  misc_feature (1)..(876): n is a, c, g, or t
gtgcgcggtgttatagcggcgcgcttggcggcgtccgagccttttgccgtttgcgtttgcgggaatgaggagcggcttcggcgggtgcttgcggatatcggcggcgacgcggagcgttgcgagtttgagatcgagcactgtccggatgtgatctcggagggggacaggcgctctacggcttggaagacgaagaagggggcgtctatcgtccgttgcgtggccttgcaaaaggaggggcgggcggacgcctcggtcagcgcgggggacaccggggtgttgatcggatcggcgctgtttatattgggttgcgcggagggggtggcgcgtccggcgcttgccgcttttgtgcctacgccgaaaaagccggttcttataatggatgtcggcgcgaatatagactgccgcgccgagttgctcgcggggtttgctaggctgggttgcgagtacgtgggccgcgtcaggggcaacaaggcgcccaaggccgcgttgctgaatgttggttcggagcccaacaagggccccccggcggtacgcgccgcggcggagcttttgggcggttacgagaattacgccgggttcatagaaggtaacaaggtcttttcgggggaggcggacgtagtggtctgcgacggctttgtgggcaacgccctgctcaaagcctgcgagagcttctacgccctgacatctgagtttttggccgacagcaaagagacgtacgagaagctgtcgcanaagataagcgcgctgaatccggaaaactacggggcggtgccgttcctcggcataaaagggacggtactngaagcccacggcggatcatcggtaaacatcataaaaaacgcggtattaacggctgtaaaagcagtaagcggttga

SEQ ID NO: 1336 - protein, 291 aa, Unknown
  Obtained from environmental sample
  DOMAIN (1)...(290): Fatty acid synthesis protein
  misc_feature (1)..(291): Xaa is any amino acid
MRGVIAARLAASEPFAVCVCGNEERLRRVLADIGGDAERCEFEIEHCPDVISEGDRRSTAWKTKKGASIVRCVALQKEGRADASVSAGDTGVLIGSALFILGCAEGVARPALAAFVPTPKKPVLIMDVGANIDCRAELLAGFARLGCEYVGRVRGNKAPKAALLNVGSEPNKGPPAVRAAAELLGGYENYAGFIEGNKVFSGEADVVVCDGFVGNALLKACESFYALTSEFLADSKETYEKLSXKISALNPENYGAVPFLGIKGTVLEAHGGSSVNIIKNAVLTAVKAVSG

SEQ ID NO: 1337 - DNA, 732 bp, Unknown
  Obtained from environmental sample
  misc_feature (1)..(732): n is a, c, g, or t
gtgtcccgcaacctgatctatcacgcccttattctcagaagccggccttcgggggagtccaaccgcgacgtatggctgctcagcaaggaagccggcttgttgcgcgtaacggtattcggcggccccaaaagccggcttcgatcatacgcctcgccgttccattcggggcaggcatgggtttaccatgatcctgtaaagaacacgttcaaactcagcgattttgacgtggattcctggaggcccggcctgcgtgaaatgtacgagcgggcaatgtcggctgacgctgtcgccgaaacaattctcgcgtctcacggcggcggcggaaactggggcggcgccctttcaatcgcccggtcctcacttgacgcgcttgccgcggccgacgaggaaacctgcgccaggattgtcctgtggtttctgtggcaatggacggatttcctcgggcttaggccggaattcgacacatgttccgtttgcggaaaacccgcgccgcacaggtactcggtacgggaaggaggcatggtctgcggttcatgctctgaaggcgcggcgggccttgtagatgcgagccccggctgctgccactggctggaaaccacgcgccggctaaaccccgatcagctctcccgctatacccttgataaaaaatccttccgcgaggccaggtcactggcgacggcgatacttgccgaagcgataggcaagcggctggagagctgggaaaaaatataa

SEQ ID NO: 1338 - protein, 243 aa, Unknown
  Obtained from environmental sample
  DOMAIN (4)...(229): Recombination protein O
  misc_feature (1)..(243): Xaa is any amino acid
MSRNLIYHALILRSRPSGESNRDVWLLSKEAGLLRVTVFGGPKSRLRSYASPFHSGQAWVYHDPVKNTFKLSDFDVDSWRPGLREMYERAMSADAVAETILASHGGGGNWGGALSIARSSLDALAAADEETCARIVLWFLWQWTDFLGLRPEFDTCSVCGKPAPHRYSVREGGMVCGSCSEGAAGLVDASPGCCHWLETTRRLNPDQLSRYTLDKKSFREARSLATAILAEAIGKRLESWEKI

SEQ ID NO: 1339 - DNA, 762 bp, Unknown
  Obtained from environmental sample
  misc_feature (1)..(762): n is a, c, g, or t
ttgtttatgtgctggggcgatgaaaggagcgttacgagcgttacgattccaaatagtgtaacgagtattggagtgaaggcgtntgagggatacaaaatcaccagcctcactttccctaacggcttaacttttattggggatggcgcgtttgacagtaacagactgggcagcgtcactatccctaacaacgtaacctacattggagataaggcatttaataataaccagctaagcaatgttacaattggccttagcgtaactacgattggaagcagcgcgtttgcgagaaatcaactgaccaatgtcgccatccctaacagcgtaacttccatcggggatggcgcgtttgaaaacaacaaactgaccaatgttgttattcccggcaacgtaacatccattggaaagagcgcgtttttgaataaccaacttggcagcgttactattggcagcagtgtagcgagtatcggagacaaggcatttagcaagaaccagttaacaagcgttgagattcccaacagcgttactttgattggaagcggctcgtttgaagaaaaccggctcaccactgtcacgattcccaacaacgctaccgttgggaacaacgcgtttgacaaaaaccaactgaacagagttgttattggcacaagagtcgagatatatcctaattcgtttccgagcgatttttccagcttttactttgcgcaaccggcaacggcgggaacctataccttcaataacggcaagtggagcaaaaacagatag

SEQ ID NO: 1340 - protein, 253 aa, Unknown
  Obtained from environmental sample
  misc_feature (1)..(253): Xaa is any amino acid
MFMCWGDERSVTSVTIPNSVTSIGVKAXEGYKITSLTFPNGLTFIGDGAFDSNRLGSVTIPNNVTYIGDKAFNNNQLSNVTIGLSVTTIGSSAFARNQLTNVAIPNSVTSIGDGAFENNKLTNVVIPGNVTSIGKSAFLNNQLGSVTIGSSVASIGDKAFSKNQLTSVEIPNSVTLIGSGSFEENRLTTVTIPNNATVGNNAFDKNQLNRVVIGTRVEIYPNSFPSDFSSFYFAQPATAGTYTFNNGKWSKNR

SEQ ID NO: 1341 - DNA, 801 bp, Unknown
  Obtained from environmental sample
  misc_feature (1)..(801): n is a, c, g, or t
atggcttaccagggccttgtcatacccgacgacttgatgatgaacggggccaccgaatttgccggaagcctttcgcgggcagcgaagcaggcgcttcttgccggtaacgacatcatcatgctttcaaaaaccccaagcctgaacgacactgtgtggacatacctggctgttgccatgaaggatgagcctgaatttcgagaccgtgtgcgggatgcctgccgccgtatactggtattaaagctggaatacctgcgcggagaaaaaaaagttccatacattcccgatttaaaaaagatcgatgacggccttgttgaccctgaagggacagctttttttctaggcttggcggcccgcagcgttacccttgtgaatagcagggaagtttttccccttagcgcggagcgggcaggccgggtgcttctggcgggaaacttttcggattttttcacttatgggagaaaagcttttccgggagccgtttcgtattggtacgatgcgaatcagaccgccacggatattattccttatgccagaaatgtcgatacagtgatcttctgcctttccaacagagccggaatcaggatactccagcagttacgggctttaaataaaagggtgattgtcttttcagtgttgagcccggcttaccttgacgaggttgcctgggcggatggcgcggtggcggtttatagctatgccccggagtcgtttatagcgggcttttcggcaatccttgggagaataaatggagaagggaaactccctttcgcgccgaatatgcctcctttatccgggaactag

SEQ ID NO: 1342 - protein, 266 aa, Unknown
  Obtained from environmental sample
  misc_feature (1)..(266): Xaa is any amino acid
MAYQGLVIPDDLMMNGATEFAGSLSRAAKQALLAGNDIIMLSKTPSLNDTVWTYLAVAMKDEPEFRDRVRDACRRILVLKLEYLRGEKKVPYIPDLKKIDDGLVDPEGTAFFLGLAARSVTLVNSREVFPLSAERAGRVLLAGNFSDFFTYGRKAFPGAVSYWYDANQTATDIIPYARNVDTVIFCLSNRAGIRILQQLRALNKRVIVFSVLSPAYLDEVAWADGAVAVYSYAPESFIAGFSAILGRINGEGKLPFAPNMPPLSGN

SEQ ID NO: 1343 - DNA, 525 bp, Unknown
  Obtained from environmental sample
  misc_feature (1)..(525): n is a, c, g, or t
atgggctatcaggagatgatatacaactatctcggctcgcgcaaagatctggtcgaaaaaatgcgcggctccggtgatcgcattatccgcatcgcaaaccccatgaccgaaaattacgagtatgtccgcgattcaataatcgcgtccctcatggaaagcgaggcagtttcgggcaattcggtatacccgcacaaaattttcgaggtaggcaaagtcgcgtatcttgacagcgcggacaattccggcactgtaacccgccagtacgccggcttccttcacgccgacaaagaggcgaacttcaacaccgcagcgggccagatgcagactctgttctattatctttcccgtgagtacgaggtcgaggaatctgatgacccgcgctttattccgggacgcgccgccgcagtcctgtacaagggccgtaaaataggcgtattcggcgagatacatcccgaagtccttgaaaactggggcataaccgtgccctgcactgcgggggaatttgatttggatatgttaatgtaa

SEQ ID NO: 1344 - protein, 174 aa, Unknown
  Obtained from environmental sample
  misc_feature (1)..(174): Xaa is any amino acid
MGYQEMIYNYLGSRKDLVEKMRGSGDRIIRIANPMTENYEYVRDSIIASLMESEAVSGNSVYPHKIFEVGKVAYLDSADNSGTVTRQYAGFLHADKEANFNTAAGQMQTLFYYLSREYEVEESDDPRFIPGRAAAVLYKGRKIGVFGEIHPEVLENWGITVPCTAGEFDLDMLM

SEQ ID NO: 1345 - DNA, 543 bp, Unknown
  Obtained from environmental sample
  misc_feature (1)..(543): n is a, c, g, or t
atgtggttcggagaaagcgaaaagcgcattaaggcggtttttgatcgttacaggggaattgtgaaaaacaacggccatgttcctatacttctttttaacgaagccgacgccgtttttggcaagcgcagggagctggcggagtcccgcagcggtccggatcagacagaaaacgctatacaaaacataattttacaggagatggaaaacttaaacggtatacttatcgccacgaccaacatgactgtcaactttgacaaagcttttgagcgccgcttcctttacaaaataagctttgaaaagcccgaccttgaatcaaaaagattgatgtggcaaagctttatccccgcgcttactgattctgacgccgagaacctcgcgattaaattcgatttctccggaggccagatagaaaatatagcccgaaaaagcgcggtgtcctttattttgaaaggagcggcacctgatatatcttccctcgaaactttttgcggggaagagtcgttcgaaaagaccgtaagcgggataggttttcgcgcttgctaa

SEQ ID NO: 1346 - protein, 180 aa, Unknown
  Obtained from environmental sample
  DOMAIN (1)...(149): ATPase family associated with various cellular activities (AAA)
  misc_feature (1)..(180): Xaa is any amino acid
MWFGESEKRIKAVFDRYRGIVKNNGHVPILLFNEADAVFGKRRELAESRSGPDQTENAIQNIILQEMENLNGILIATTNMTVNFDKAFERRFLYKISFEKPDLESKRLMWQSFIPALTDSDAENLAIKFDFSGGQIENIARKSAVSFILKGAAPDISSLETFCGEESFEKTVSGIGFRAC

SEQ ID NO: 1347 - DNA, 852 bp, Unknown
  Obtained from environmental sample
  misc_feature (1)..(852): n is a, c, g, or t
ttgataggcggcgaccccggcattggaaaatccaccttggttttgcaaaccctttcaaccatagcagcggctggttgcaaaacgctttatgtgagcggtgaagagagtgcagcacaagttaaacttagggcagagcggctcggtgcagcgggcagcgatatgctgttgctntgcgaaacctcacttagcaaaattttggaatatgcggagcagataaaaccgcaggtgatggttatagattccatacaaactatttacagcgaagaattgcccggcacgcccggcagcgtttctcagctccgcgaatgtgcattgaaactgatggtttatgcaaaaaacagcggcaccgtcactatgctgatagggcacgtcacaaaagacgggcaaatagcggggcctagaatcttggaacacatagttgacacggtagcatattttgaaggtgataaaaaagggcagtatagaattttgagaactgtgaaaaaccgctttggcgcaacggatgagataggtgtttttgagatgacctcattcgggcttatacccgtgcagaacccatcgatggtatttttgcaagatggcgaacttttgcccggtagcgcggtaagttgcactatagaaggcagccgtgctctgctctttgaaatacaggctttggttggcaaaagcagctatgcaatgccgcaaagggtctccgcgggggtggagcaaaaaaaattgacaattatattagcgcttttggaacgctttgcaaaaattcaaacgggcaactccgatgtttttgtctctgttgctggcggccttaaattggatgaccccggtatagatttatcccttgccctagccatgtaa

SEQ ID NO: 1348 - protein, 283 aa, Unknown
  Obtained from environmental sample
  misc_feature (1)..(283): Xaa is any amino acid
MIGGDPGIGKSTLVLQTLSTIAAAGCKTLYVSGEESAAQVKLRAERLGAAGSDMLLLCETSLSKILEYAEQIKPQVMVIDSIQTIYSEELPGTPGSVSQLRECALKLMVYAKNSGTVTMLIGHVTKDGQIAGPRILEHIVDTVAYFEGDKKGQYRILRTVKNRFGATDEIGVFEMTSFGLIPVQNPSMVFLQDGELLPGSAVSCTIEGSRALLFEIQALVGKSSYAMPQRVSAGVEQKKLTIILALLERFAKIQTGNSDVFVSVAGGLKLDDPGIDLSLALAM

SEQ ID NO: 1349 - DNA, 411 bp, Unknown
  Obtained from environmental sample
  misc_feature (1)..(411): n is a, c, g, or t
atgagaaaccttccgccctcaaagatgaacttttcaaacatgaaccagtccattgccgccgaaggctgtattattaccaacgccaacattaccaattcaattgtcggcatacgtacaatcatagaaacaggctcaagcctgaacggcgtcgtctgcatgggcgccgactattatgagactgaatcgcaaaaaatgaaaaacgccgaggcaagaatcccgaatgtcggaataggccgaggcgcgattgtcaaaggcgctatcatagacaaaaacgtatgcgtgggcgaaggctgccgcataggcgtggacgacataaaacgcaccgacggcaactacggccattatcatgtcgtggacggaattatcgtaattccgaaaaacactattttgtatcccggaacagttatttga

SEQ ID NO: 1350 - protein, 136 aa, Unknown
  Obtained from environmental sample
  misc_feature (1)..(136): Xaa is any amino acid
MRNLPPSKMNFSNMNQSIAAEGCIITNANITNSIVGIRTIIETGSSLNGVVCMGADYYETESQKMKNAEARIPNVGIGRGAIVKGAIIDKNVCVGEGCRIGVDDIKRTDGNYGHYHVVDGIIVIPKNTILYPGTVI

SEQ ID NO: 1351 - DNA, 405 bp, Unknown
  Obtained from environmental sample
  misc_feature (1)..(405): n is a, c, g, or t
atggatcttttggagaaacagcaaagcgttatcgaatcaggcagcgcggaagaccttttaacatacgttgaaattgaagaaaaaattgtcgcggacattttctcgattcagaaagttatagatccgcttgaagaaatgtactattcggtaatttccaaacaggacgccggaaaaacgtctgtcaaaattgataacccggaagaagtttccggccttaaagcctcgcttgaaaaattaaagagcgaagccgtcatacgctcgacaaaaaacaaagaattgctctccaagcgcatgctcgaactgcgccaggaaataaaaaccttacgaaacaacccctacgccgccaaaggcaggcaagccttctccgactcanactccgcgtccttgatagacattaaaggctaa

SEQ ID NO: 1352 - protein, 134 aa, Unknown
  Obtained from environmental sample
  misc_feature (1)..(134): Xaa is any amino acid
MDLLEKQQSVIESGSAEDLLTYVEIEEKIVADIFSIQKVIDPLEEMYYSVISKQDAGKTSVKIDNPEEVSGLKASLEKLKSEAVIRSTKNKELLSKRMLELRQEIKTLRNNPYAAKGRQAFSDSXSASLIDIKG

SEQ ID NO: 1353 - DNA, 834 bp, Unknown
  Obtained from environmental sample
  misc_feature (1)..(834): n is a, c, g, or t
atgcaggaaggtcacagaatggagtaccagaacggaaaactttcaatcaccggcgtcgtctacaatgaaatgaaaggcgcttattcatcgcttgatacttatgccggtcattggtctgttaaagcgattatgccgaacactccctacgattntgaatcgggcggcgacccgcaggcaattccgcaattaacatgggacggcttaaaagaatttcaccgcagccgttattctcccgctaactgcaaaatttttcttgcgggtaatattccaacagaaaaacaacttgcgtttttaaacgatgaatttttttccaaattggaaggcggtaaggcgtgcgatccaatcgttaaaacacaacgctggaaagaaccaaaaaaattccatgtaccctgccccgccggaagcgaacgtaaatcgacaatttttctctcgtggctttgttccgatgttaccgatatttacgaaggtcttgcgctggcggcgcttacggaaattcttttgggacatgacggctctccgcttacaagagcgctaattgagtccggtcttggagaggatatcactccggtatcgggactggagagcgagatacgggaagttttatttgttgcgggattaaggggcgttaagggaaatataaaacaaaaaagcgaggcgatagaaaaattgataatgggggaactgcgcagacttgtaaccgaaggtattccgccggaagaaatagaagccgctcttttggcgcttgaattttctcaacgggaaattcgacgttcaggcggaccattctcgcttgtctggatgcgccgctctttacgcgcgtggcttcacggctga

SEQ ID NO: 1354 - protein, 277 aa, Unknown
  Obtained from environmental sample
  DOMAIN (62)...(248): Peptidase M16 inactive domain
  misc_feature (1)..(277): Xaa is any amino acid
MQEGHRMEYQNGKLSITGVVYNEMKGAYSSLDTYAGHWSVKAIMPNTPYDXESGGDPQAIPQLTWDGLKEFHRSRYSPANCKIFLAGNIPTEKQLAFLNDEFFSKLEGGKACDPIVKTQRWKEPKKFHVPCPAGSERKSTIFLSWLCSDVTDIYEGLALAALTEILLGHDGSPLTRALIESGLGEDITPVSGLESEIREVLFVAGLRGVKGNIKQKSEAIEKLIMGELRRLVTEGIPPEEIEAALLALEFSQREIRRSGGPFSLVWMRRSLRAWLHG

SEQ ID NO: 1355 - DNA, 549 bp, Unknown
  Obtained from environmental sample
  misc_feature (1)..(549): n is a, c, g, or t
atgcacgaaaggaataggggttccccagtagcgctggcgcgagatcagccagtcgcgcaggcgaaagttcacctcgcgcttgcagaagccctctttctcgccccagccgatcattttctcaatggcggcctgagtcggcaggccgtcgaactccccggagttacagcttacgccgtcgccctcgaacgcggctttcatcgccgttccctccaaaggaacggcgccctccggctgaatgaccgggatgacctctataccgtacttgcggcagaactcgaagtcgcgctggtcgtgcgcggggacgcccatgatggcccccgtgccgtagtccatcagaatgtagttggcgatccagatggggacgggcttgccagtgacggggtgagcgccggtgaagggcgttttaaagcccagcttctcccccccggcggcggagcgctctatggcgctctgcgcggcgcacttcgccacgaaggcggccatctccttagcctgcccggctggcgatttttctatcatgagcttgaccagatcgtgctcaggggatag

SEQ ID NO: 1356 - protein, 182 aa, Unknown
  Obtained from environmental sample
  misc_feature (1)..(182): Xaa is any amino acid
MHERNRGSPVALARDQPVAQAKVHLALAEALFLAPADHFLNGGLSRQAVELPGVTAYAVALERGFHRRSLQRNGALRLNDRDDLYTVLAAELEVALVVRGDAHDGPRAVVHQNVVGDPDGDGLASDGVSAGEGRFKAQLLPPGGGALYGALRGALRHEGGHLLSLPGWRFFYHELDQIVLRG

SEQ ID NO: 1357 - DNA, 609 bp, Unknown
  Obtained from environmental sample
  misc_feature (1)..(609): n is a, c, g, or t
ttggaacgaccgcggcttgcgatagcggactattccctgctctctcttgttacgcaaattgccgttgtccgcacagtttcgtccgtttgcggaaaaaaggcgtatcttcgctggcctaacgatatttatcttaacaggcagaaaatcgcgggcgttacaacggaaatttccggcgagggagatttaatatcatggctttcatgcggcgtgggagtaaatgttaataaccctgtcccttccggcaaggcggtaagctgtacggaaattaccgggcatcatctttcgcgccgcgttgtgcttaataaaatactggacgaaattgaaaatgtcagaaaaaaatttacctccgttgcggcatattcgcagggcaaccgccctcttgcggcagaatggaactcccttgccgactgcatcggcgcaaaagcggttgtttttgaaccggaagacaaaacggtaaactattccattgacaagcccggcaaaatacttgcgcgcggtattttttccggcatagaccctgcgggcaggtgtattctaaaaaccgaaaaaggcagtttatattttaatcaggggactgtgtcgcttgcgtttcttaatgtgaatagataa

SEQ ID NO: 1358 - protein, 202 aa, Unknown
  Obtained from environmental sample
  misc_feature (1)..(202): Xaa is any amino acid
MERPRLAIADYSLLSLVTQIAVVRTVSSVCGKKAYLRWPNDIYLNRQKIAGVTTEISGEGDLISWLSCGVGVNVNNPVPSGKAVSCTEITGHHLSRRVVLNKILDEIENVRKKFTSVAAYSQGNRPLAAEWNSLADCIGAKAVVFEPEDKTVNYSIDKPGKILARGIFSGIDPAGRCILKTEKGSLYFNQGTVSLAFLNVNR

SEQ ID NO: 1359 - DNA, 672 bp, Unknown
  Obtained from environmental sample
  misc_feature (1)..(672): n is a, c, g, or t
atgcttaccgtgctttatttggcgtgtaacgcctgtgtgcgctcgcactttatggtaaccaacgcctgccaagcctgcgttgcccgtccatgccttgtgaactgcggcaagaaagcgattgaaattaaagacggcagagcttgtatcgacagtgaaaaatgcgttagctgcggaatgtgtctgcagaattgcccctatcacgcgattattaaaattcccgttccctgcgaggaagcttgtcctgtgggagcgatcaacaagaacgaagacggcagggaatgtattgattatcacaaatgtattttttgcggtaaatgtatgcgcgaatgtccctttggcgcgatgatggacaaggggcagttagttgacgttattaagcatattatgaataagaaaaacgtggttgccatgtatgcgccggctgcggcggcacagttcagggttgaaccgggcaggcttgagggagcgctgttggcggctggcttttcaaatgtggttgaagtcgccattggcgcggatattacatcggacaaagaagctgcggaatttgccgagcgcatggaaaaaggcgaaaagatgatgaccacttcctgctgtcccgcgtatgttagggctgttaatcgccatataccggaacttgctaatgtattcaggcactgcccccggcgataa

SEQ ID NO: 1360 - protein, 223 aa, Unknown
  Obtained from environmental sample
  DOMAIN (47)...(70): 4Fe-4S binding domain
  misc_feature (1)..(223): Xaa is any amino acid
MLTVLYLACNACVRSHFMVTNACQACVARPCLVNCGKKAIEIKDGRACIDSEKCVSCGMCLQNCPYHAIIKIPVPCEEACPVGAINKNEDGRECIDYHKCIFCGKCMRECPFGAMMDKGQLVDVIKHIMNKKNVVAMYAPAAAAQFRVEPGRLEGALLAAGFSNVVEVAIGADITSDKEAAEFAERMEKGEKMMTTSCCPAYVRAVNRHIPELANVFRHCPRR

SEQ ID NO: 1361 - DNA, 480 bp, Unknown
  Obtained from environmental sample
  misc_feature (1)..(480): n is a, c, g, or t
atgataaaaatccgggagttgatcagggaaaactgcgtcgtcaccgacctcaaagccgccgacaagcttgaggcgatccgattgatggcgcgattcacctgctcgataggcgggctagaccgcgcggaggaggttgcggagaaggtactcgaacgcgagggggagatgtcgaccgggatcggcttcggcatagcgattccacatgcgcgcctttccgggacagaccgcttatatatggccgcggcgcgttcagtggaggggatagagtacgattctttggacggactggcggtaaacctgatctttatgctcgtctcgtcggaaagcatcccgacggcgcatacggaggtgctctcggcgctgtcgaggatactctcctacgaggaggtcaggcgggggcttttgtcggccggtaccgcgaaggagtttgcggatattttagccaaggccgaagagaaatacgtcgaggcgcacccctaa

SEQ ID NO: 1362 - protein, 159 aa, Unknown
  Obtained from environmental sample
  DOMAIN (6)...(150): Phosphoenolpyruvate-dependent sugar phosphotransferase system, EIIA 2
  misc_feature (1)..(159): Xaa is any amino acid
MIKIRELIRENCVVTDLKAADKLEAIRLMARFTCSIGGLDRAEEVAEKVLEREGEMSTGIGFGIAIPHARLSGTDRLYMAAARSVEGIEYDSLDGLAVNLIFMLVSSESIPTAHTEVLSALSRILSYEEVRRGLLSAGTAKEFADILAKAEEKYVEAHP

SEQ ID NO: 1363 - DNA, 324 bp, Unknown
  Obtained from environmental sample
  misc_feature (1)..(324): n is a, c, g, or t
atgttattagttagagcaattattcgtcccgaaaaagctggagctgttatgagcgagctggctgccgctggctttcctgctatcacaaaactcgacgtgttcgggcgtggcaaacaaaaaggtatcaccgttggcaatgttcactacgacgagattccaaaagaaatgctcgttatagtctgcaatgatgaagacaaagacgaccttgtgaaaatcatcatccgcgttgcaagaacaggcgaaggcaactacggagacggacgcatttttgtttcccctgtggaatctgcctacactgtcagctccggcaagcccggtctgtag

SEQ ID NO: 1364 - protein, 107 aa, Unknown
  Obtained from environmental sample
  DOMAIN (4)...(103): Nitrogen regulatory protein P-II
  misc_feature (1)..(107): Xaa is any amino acid
MLLVRAIIRPEKAGAVMSELAAAGFPAITKLDVFGRGKQKGITVGNVHYDEIPKEMLVIVCNDEDKDDLVKIIIRVARTGEGNYGDGRIFVSPVESAYTVSSGKPGL

SEQ ID NO: 1365 - DNA, 402 bp, Unknown
  Obtained from environmental sample
  misc_feature (1)..(402): n is a, c, g, or t
atgcgggaaattatgtgttttatacgaccaaacaaggtcaatgacacgaaaagggcaatggcagaaaacggcttcccagcttttacttgctgtaaatgccttgggcgtggaaaaaaaagcattgacccagaattgcttaaaacagttcttgcagcaggcgaattgccgctttctccaattggagaaagcacaaccgaggctactcggttagtcgccaaacgttttttcacgctgatcattgacgataaagatgttgataaagcagttaaaacaataatcagtgttaaccaaactggcaaccccggagatggcagaatttttgttttgcctatccttgaaacattctccgttagaactggcgaaggcggtttacacatatcactagaagaaggaggcgaataa

SEQ ID NO: 1366 - protein, 133 aa, Unknown
  Obtained from environmental sample
  DOMAIN (4)...(120): Nitrogen regulatory protein P-II
  misc_feature (1)..(133): Xaa is any amino acid
MREIMCFIRPNKVNDTKRAMAENGFPAFTCCKCLGRGKKSIDPELLKTVLAAGELPLSPIGESTTEATRLVAKRFFTLIIDDKDVDKAVKTIISVNQTGNPGDGRIFVLPILETFSVRTGEGGLHISLEEGGE

SEQ ID NO: 1367 - DNA, 381 bp, Unknown
  Obtained from environmental sample
  misc_feature (1)..(381): n is a, c, g, or t
atgtcgctacattacttcgagttgccgaaactgccaaaaatcgaggatattgacgcaaacgacgaagtagagttgtggcttgccgcgattaacgcgaaaaccgaagaacagctgtcaaccataaaaaccatagggggtgaggtcatggaacagttagtagaagcgtatcacgatgtggcggcgtcgcccgaatttcgggagatggtgcgtcaaagggaacgcgcaaggcacaacgaggcgtcggcgctcgctaatgcggagcaaaaagcaacgttaaaggcgcgtataacgtttgcgagacgacttaaagccaaaggcatagatgtaaaagagattatcgaactaaccgatctttctgtagacgaagttttaaaagcgtga

SEQ ID NO: 1368 - protein, 126 aa, Unknown
  Obtained from environmental sample
  misc_feature (1)..(126): Xaa is any amino acid
MSLHYFELPKLPKIEDIDANDEVELWLAAINAKTEEQLSTIKTIGGEVMEQLVEAYHDVAASPEFREMVRQRERARHNEASALANAEQKATLKARITFARRLKAKGIDVKEIIELTDLSVDEVLKA

SEQ ID NO: 1369 - DNA, 762 bp, Unknown
  Obtained from environmental sample
  misc_feature (1)..(762): n is a, c, g, or t
ttgaactcaaactcagtaaccctgttaagcgaatttccgacgggcgggattatgcttttcaagtacaaccttgacacggacaatgattcaatacgcgccctgattaatcaaaccgccgcgcttgtaaacagcgaatcgggcatacagccgtttattgcggtagatcatgagggaggcactgtaaaccgtttcaggcgcggcacggcagacttgccggacgcttcctcttattgggatctttcgttaaaacaggacaggcagaccagctttaaaaaaattgaaaatgacagtttaagggcgggaaaagaattaaaagatttgggtatcaatgtaaatttcgcacctgtagcggaatgtttaaatgacgggaaccgtgtctttttaaaccgccgctcctacgggccggacccgcttttcacggcgaacgcggcgcaggcctttataatgggaatgaaacaggcgggagtcttttgcgtaatcaaacattttcccggcattgccggaagcgatccccactactccgcttccgttattaacggggacaaagctgaattggaaaagctggtttttccttttaagacagtcattgataatatttatggaggtggcgcggtaatggtttcacatacccttgtttcggctttggacggaagaatagcgagcctgtcaaaagttgtcatggaagactggctaagaggcgaactgggtttttcaggcctattaattgccgatgatttcagcatggcctccgcaggcatgtaa

SEQ ID NO: 1370 - protein, 253 aa, Unknown
  Obtained from environmental sample
  DOMAIN (40)...(253): Glycosyl hydrolase family 3 N terminal domain
  misc_feature (1)..(253): Xaa is any amino acid
MNSNSVTLLSEFPTGGIMLFKYNLDTDNDSIRALINQTAALVNSESGIQPFIAVDHEGGTVNRFRRGTADLPDASSYWDLSLKQDRQTSFKKIENDSLRAGKELKDLGINVNFAPVAECLNDGNRVFLNRRSYGPDPLFTANAAQAFIMGMKQAGVFCVIKHFPGIAGSDPHYSASVINGDKAELEKLVFPFKTVIDNIYGGGAVMVSHTLVSALDGRIASLSKVVMEDWLRGELGFSGLLIADDFSMASAGM

SEQ ID NO: 1371 - DNA, 339 bp, Unknown
  Obtained from environmental sample
  misc_feature (1)..(339): n is a, c, g, or t
ttgaagaggaatcgtatttattttcaatttgttttttacgtcttcgataacaaagaaaaaatccgcccccatcctgtccattttgttcacatagcctatgcacggcacattgtacctacgcgcctgccgccagacggtttcggtttgcggctcaacgccgtggaccgcgtcgaaaatcgctatggcgccgtccagcaccctaagcgaacgctcaacttcggcgaaaaaatcaacatggccgggcgtgtcgattatattgatctggtggtctctccagtaagtggtagtcgccgcgctttgtatggtgatgccgcgctgctgtcctctcggccaatctga

SEQ ID NO: 1372 - protein, 112 aa, Unknown
  Obtained from environmental sample
  misc_feature (1)..(112): Xaa is any amino acid
MKRNRIYFQFVFYVFDNKEKIRPHPVHFVHIAYARHIVPTRLPPDGFGLRLNAVDRVENRYGAVQHPKRTLNFGEKINMAGRVDYIDLVVSPVSGSRRALYGDAALLSSRPI

SEQ ID NO: 1373 - DNA, 747 bp, Unknown
  Obtained from environmental sample
  misc_feature (1)..(747): n is a, c, g, or t
atgctggcgtttctctttatatgtaaccattacgcgaaccaatataacagttttagttttaatatctcaaatctcgcggcttatgtttatacggccgtcaaactgcccgtgcttattctgaatgataccggcgatataatgctctgcaatacggcttcggaaagtttttttaaaaaacaagccggcctgctcaccaaagtaaaattgtttgacctgtttgaattttccgacgcttcgttgtctgacgcttcattctcattgcaccgccataaaaaagacgcgtctgttttcaactgcgacgccgtttgccgcattgaggggcaaaagtgccagatctcgctgaattatatttatgataaatttgacgaaatgatctgcaccgttgtgattgtaacggacatcacggaaaaagaggatctgattcgccagcttaatgaatctcacgccaaaattgagcaatttaacaaagaactgcagtccgaagttgaccggcagactgaaagcatacgcaaccttcaaaaagcgattgtatattcgatgagtgatctgatagaaaaaaaagacggatacaccggcgtacacacaaggcgtgtaagcgaatatgtttctattttactgcgggaactggtgcggcgcggttatcagttgaccgaatcggaaattcaaagaatagcggaatcttccctgttacatgatatgggaaaaatcgcgatacccgacagcattcttcttaaaacggaaaattga

SEQ ID NO: 1374 - protein, 248 aa, Unknown
  Obtained from environmental sample
  misc_feature (1)..(248): Xaa is any amino acid
MLAFLFICNHYANQYNSFSFNISNLAAYVYTAVKLPVLILNDTGDIMLCNTASESFFKKQAGLLTKVKLFDLFEFSDASLSDASFSLHRHKKDASVFNCDAVCRIEGQKCQISLNYIYDKFDEMICTVVIVTDITEKEDLIRQLNESHAKIEQFNKELQSEVDRQTESIRNLQKAIVYSMSDLIEKKDGYTGVHTRRVSEYVSILLRELVRRGYQLTESEIQRIAESSLLHDMGKIAIPDSILLKTEN

SEQ ID NO: 1375 - DNA, 672 bp, Unknown
  Obtained from environmental sample
  misc_feature (1)..(672): n is a, c, g, or t
gtggtgggccttgcccgcaaactgcgtaaggaaggatatacggtacgcatcctgngggaaggctcaaacgggggcaacatcacacacccatccgcggtacgcgatccgctcaacacagtgctggccatggcaaaactccttatggttacaacaacggacaacaggccgggcctgtttgaactttggtgcaatttgacaggaagcttataccgccctgatttcactatgagcgatataatcgcgagcctgcccccctttaccactacggcggcatccgcgccggaagcggtattgaaaatcgccagcgccgagcacggcgcgttgaaaggccgttatcagaaaattttcacggatgaatgggagaaacgcaaagaacaactcgcggccaattacggcatatacagatgggaagcgaaagcgtacaatgggacagaggagcgcgacgtgaccgccgatttcgcgcaagccggcaagggggggctgaagatatgctttctcaacgccgggggcaggccgcttgcctcaatatggatgaggggttccgccaccgagccggtctttcgggtcatggcggatgtcgaaggaacagaccggcgctttgaacaggaactgataaactggcagcgcggcatgataaaagaagctgataaaattgaagcaaacaggagctga

SEQ ID NO: 1376 - protein, 223 aa, Unknown
  Obtained from environmental sample
  misc_feature (1)..(223): Xaa is any amino acid
MVGLARKLRKEGYTVRILXEGSNGGNITHPSAVRDPLNTVLAMAKLLMVTTTDNRPGLFELWCNLTGSLYRPDFTMSDIIASLPPFTTTAASAPEAVLKIASAEHGALKGRYQKIFTDEWEKRKEQLAANYGIYRWEAKAYNGTEERDVTADFAQAGKGGLKICFLNAGGRPLASIWMRGSATEPVFRVMADVEGTDRRFEQELINWQRGMIKEADKIEANRS

SEQ ID NO: 1377 - DNA, 534 bp, Unknown
  Obtained from environmental sample
  misc_feature (1)..(534): n is a, c, g, or t
ttggtcagaatcggccgagccgtacagctttatgaagacgatataatgtacgtgtcacgccataacgaatataccggttatgatcagaagcttaccggcctcagacaggtagtagtggaacattttcgggccatggttggcgccggctgccataagctcctcatccccggagaccctgcgctccttgtcccgctggaaagcattttgcggacctaccttgaagacagcgctaccatctttaccagcaaaccgtattttcttgaaattctgccgcccaatgtcaacaaaggcacggccctggaaaaagtcgcggatatgctggggattgctcagaaagatgtgatggccattggggattcgatgaacgatgaagccatgctcaaatgggcaggcatgggcatcgcaatggcaaacagcgatgagagaataaagaatatcgcagatctggtaacatcaaaagataatgatgatgacggcgttgccgaagtcattgaaaaatatatcctttctaaaacggcggcttccaatgagtga

SEQ ID NO: 1378 - protein, 177 aa, Unknown
  Obtained from environmental sample
  DOMAIN (3)...(164): haloacid dehalogenase-like hydrolase
  misc_feature (1)..(177): Xaa is any amino acid
MVRIGRAVQLYEDDIMYVSRHNEYTGYDQKLTGLRQVVVEHFRAMVGAGCHKLLIPGDPALLVPLESILRTYLEDSATIFTSKPYFLEILPPNVNKGTALEKVADMLGIAQKDVMAIGDSMNDEAMLKWAGMGIAMANSDERIKNIADLVTSKDNDDDGVAEVIEKYILSKTAASNE

SEQ ID NO: 1379 - DNA, 438 bp, Unknown
  Obtained from environmental sample
  misc_feature (1)..(438): n is a, c, g, or t
gtggggcatcaaggtatcgacttcctggaggctcatgcgctccttgatggcccgttccatgcgcaccaggcccacccggtactggttctccagaagttcgcccacggaacgcacccgccggttgcccaggtggtctatgtcgtccacttcgctggtggggtcgtccttgagcttgaccagttccttgaccgcggccaggatgtccaggggccggagaacctggacccccaggtccgcggcctgatcgcccaggccctgctcgccgaaaagccggaggttgagcttgagccgccccaccggcgacaggtcgtagtgctcggggttgaaaaacaggttgtcgaaaaaggtctgggccacttccggggtgggcggggtggaggggcggatcttgcggtagatctcaaagaccgcctcctgggtggtctccaccttgtctaa

SEQ ID NO: 1380 - protein, 145 aa, Unknown
  Obtained from environmental sample
  misc_feature (1)..(145): Xaa is any amino acid
MGHQGIDFLEAHALLDGPFHAHQAHPVLVLQKFAHGTHPPVAQVVYVVHFAGGVVLELDQFLDRGQDVQGPENLDPQVRGLIAQALLAEKPEVELEPPHRRQVVVLGVEKQVVEKGLGHFRGGRGGGADLAVDLKDRLLGGLHLV

SEQ ID NO: 1381 - DNA, 522 bp, Unknown
  Obtained from environmental sample
  misc_feature (1)..(522): n is a, c, g, or t
atggaacgcagcaagaaagaggaagtcgtagccggcttgaagcgcagcttcgccgaagcccaggccgttttcgtggccgacttcaagggcatcgacatggaaaacctgaccggcctgagggtcaaggtgcgcgaggcgggctgtgaattccaggtggccaagaacaccctggtgaaactggccgccttgaacacccccatgggccgcctggaacagttgttcgtcggcaacaacgccctgggccgcacgacccgggacccggccgtcctggccaaggtgctgaccgatttcgccaaggccaatgaaaagttcgtcatcaagggcggacttttgggcgatcagcccttgaacccggcccaaatcaaggccctggccaacctgccgagccgtgaggccctcttggccgccttcctgggcgccttgaacgccgtgcccaccggcctggcccaggtcttggcggccgtgccccggaagcttctttacgccctggccgccatacgcgaccagaaggccaaggcctga

SEQ ID NO: 1382 - protein, 173 aa, Unknown
  Obtained from environmental sample
  DOMAIN (1)...(99): Ribosomal protein L10
  misc_feature (1)..(173): Xaa is any amino acid
MERSKKEEVVAGLKRSFAEAQAVFVADFKGIDMENLTGLRVKVREAGCEFQVAKNTLVKLAALNTPMGRLEQLFVGNNALGRTTRDPAVLAKVLTDFAKANEKFVIKGGLLGDQPLNPAQIKALANLPSREALLAAFLGALNAVPTGLAQVLAAVPRKLLYALAAIRDQKAKA

SEQ ID NO: 1383 - DNA, 633 bp, Unknown
  Obtained from environmental sample
  misc_feature (1)..(633): n is a, c, g, or t
atggaggaaggcatcctggaaaccgttctctgccagtacaacctgatggatcgcaacaaggaaaaaggcattgccctggcgcatgataaggggcttggcacagttgtaatggggccggttggcggcggtcgccttgggacgccttcaaaaactatcctggatctgcttcccggcaagttcacgagcaccgccgaactcgccctgcgttttgtgctggcgaacaataatgttgacattgccctatccggggtttcttccattgaacagctggaagaaaatgcccgtgtagcggacaatgttgcgcccttaagcgctgccgagctagcgcaaatagaaaccatgatgaaagaaaacgagcgccttgctgggctttactgcacaggctgcaaatactgcatgccctgtccggagggaatcaacatccctgacatttttaccatcatgaactatcacagggtttatcagataacagaattcgccaaaagcgcttacgccgagatcggtaaagttccctggaagcaatacaagaatgcgtcggcctgtattgattgcggagtttgcgagactaaatgtccccagggtattcatgtcagggagcagctcaaggagacccacaaagttcttgcgcaataa

SEQ ID NO: 1384 - protein, 210 aa, Unknown
  Obtained from environmental sample
  DOMAIN (174)...(197): 4Fe-4S binding domain
  misc_feature (1)..(210): Xaa is any amino acid
MEEGILETVLCQYNLMDRNKEKGIALAHDKGLGTVVMGPVGGGRLGTPSKTILDLLPGKFTSTAELALRFVLANNNVDIALSGVSSIEQLEENARVADNVAPLSAAELAQIETMMKENERLAGLYCTGCKYCMPCPEGINIPDIFTIMNYHRVYQITEFAKSAYAEIGKVPWKQYKNASACIDCGVCETKCPQGIHVREQLKETHKVLAQ

SEQ ID NO: 1385 - DNA, 519 bp, Unknown
  Obtained from environmental sample
  misc_feature (1)..(519): n is a, c, g, or t
atgtattgggaatatttgaaaaatataataaaagagcagaatccgcaaatgcttttcgactcaagtatgatttattcaagtcttgggaaaatggcttttcataatgattacaaaccttttttcgacaagtttcaacacgattttgtcgcccgtctttcaaatcgcgatttgcaaaacttctccgaaaaagatataaaactgttccttctaagtgtattctttcaggcaaacatgtatttgccaatctccgaaaccgaaaattcggcaggttacagcgatatatacctccagcgccgctactatatctatccggctattaaaaccgactgggtaatggaactgaaatatataaaacagtcgaacattaaaaacagtaaccttatagagcaaaagaaagcggaagcaatagaacagttgctacgctataaaacatcagaccagtttaaagacagaacggatgttcgctatttagcagttgtttttatcggaaagaaagattatttgattgaggagatataa

SEQ ID NO: 1386 - protein, 172 aa, Unknown
  Obtained from environmental sample
  misc_feature (1)..(172): Xaa is any amino acid
MYWEYLKNIIKEQNPQMLFDSSMIYSSLGKMAFHNDYKPFFDKFQHDFVARLSNRDLQNFSEKDIKLFLLSVFFQANMYLPISETENSAGYSDIYLQRRYYIYPAIKTDWVMELKYIKQSNIKNSNLIEQKKAEAIEQLLRYKTSDQFKDRTDVRYLAVVFIGKKDYLIEEI

SEQ ID NO: 1387 - DNA, 735 bp, Unknown
  Obtained from environmental sample
  misc_feature (1)..(735): n is a, c, g, or t
gtgatagacaacggcagaatcgtcacgtggaaagccgacggcaaacgccttacaattatctccccgcaaacgaacgggcttaacgctaagtataatttgtccggctatgcgcttacccttgcctacgacgacggggataccgcgacattcatatttaaagaaaaactcggagaacacaagaagaagataagcgacgaaaggatcgaaaaaatatccacgtattttacagattcaagagacggccgaaagtatcgcgccgtaaagataggcggcaagacgtggatggcggagaatttaaacttgaagacggaaaattcgtggtgttactatgaagaggactccaactgcgttaaattcggaaggctgtacgaattggaaacggcaaaggcgtcttgcccttccgggtggcatctgtctaaccgtcaggagtggaatgatttgatagcggctaccggcggagctgcggcgggtaagaatttaaaggcgatattcggctggtataaaacaggcaacgccaccgataaattcggattctccgccctgccgggcggaggcatcaacaatctcggcagattcgtcagcataggcgaagtcggcgtctggtggatagatatgggcgcagagaacaaccgcggccaagcccacagcaaacgtatgttcgaagacaaagacatcgtggaagagcactacagcggaagcgactacggtttctcggtacggtgcgttgcggactaa

SEQ ID NO: 1388 - protein, 244 aa, Unknown
  Obtained from environmental sample
  misc_feature (1)..(244): Xaa is any amino acid
MIDNGRIVTWKADGKRLTIISPQTNGLNAKYNLSGYALTLAYDDGDTATFIFKEKLGEHKKKISDERIEKISTYFTDSRDGRKYRAVKIGGKTWMAENLNLKTENSWCYYEEDSNCVKFGRLYELETAKASCPSGWHLSNRQEWNDLIAATGGAAAGKNLKAIFGWYKTGNATDKFGFSALPGGGINNLGRFVSIGEVGVWWIDMGAENNRGQAHSKRMFEDKDIVEEHYSGSDYGFSVRCVAD

SEQ ID NO: 1389 - DNA, 822 bp, Unknown
  Obtained from environmental sample
  misc_feature (1)..(822): n is a, c, g, or t
ttggcgattatttcgattttatctttcagcctgttattcatgggatgtccgaatataactgaaaccgaaaacccggatcctccggttattcagggtttaagcataccgccgacatcggtaaccccgacagatacggtaaccgtatccgcaacagtaaaaacaactacatcgacaattacaaaggttgttcttcaatggacgcttgacagtaaagcgcaaaaagacattactatgacgacagtaagcgggaatgtttattccgctgtgattccggcgcaagacgtagattcagttgtcacctataaagtttccgcaaccaacaatcttaataaaaccaaatctacggctacgcaaaactatacagtggcagaagtaccggttggtcctccggttatttcaaatttaagcagagagccgacatcggtaaccccgtcagatacggtaaccgtatccgccacggtgacatcgaatactgcatcggcaatttcaacggttgttcttcaatggacgcttgacaatgtggctcaaactcctgacattaatatgacgaaaaacgggaatgtttattccgccgtgattccgaagcaagtcctgggtgcggtagttacctataaagtttccgcaaccaatactcatggaaccaattctacggttgcgcaaacctataccgtaggcagcgtgtccgggtccactgattatacaaaacttaaattgaacgaagtaagcggggttggcgaggattctgaaaaattctatgaattgaaaaatattggtactcaagacattccgttagagggctgcaagatttattacaacgcgtaa

SEQ ID NO: 1390 - protein, 273 aa, Unknown
  Obtained from environmental sample
  SIGNAL (1)...(22)
  misc_feature (1)..(273): Xaa is any amino acid
MAIISILSFSLLFMGCPNITETENPDPPVIQGLSIPPTSVTPTDTVTVSATVKTTTSTITKVVLQWTLDSKAQKDITMTTVSGNVYSAVIPAQDVDSVVTYKVSATNNLNKTKSTATQNYTVAEVPVGPPVISNLSREPTSVTPSDTVTVSATVTSNTASAISTVVLQWTLDNVAQTPDINMTKNGNVYSAVIPKQVLGAVVTYKVSATNTHGTNSTVAQTYTVGSVSGSTDYTKLKLNEVSGVGEDSEKFYELKNIGTQDIPLEGCKIYYNA

SEQ ID NO: 1391 - DNA, 516 bp, Unknown
  Obtained from environmental sample
  misc_feature (1)..(516): n is a, c, g, or t
gtggggcagcagcaaatcatagcagcacgatatttcagcgtaaatcaaccgcgctcggtggtaacctcaggcggcttggggactatgggtttcggcttgccctcagcgatgggcgcgaaggtggctgcgcctaaccgcgaggtcgtgctgttcgttggcgatggcggaatacaaatgaccatacaggagctggggactatcatgcaggacaacatcggcgtaaaaattgtgctgctcaacaacggatttctcggcatggtgcgccaatggcaggagctgttttacagcaagcgttactccgccacgccgctcgtcagccccgactttgtgaaggttgctgaggcgtacagcatcaagggcaagcgcgtagccgaccgcaaggacttgagcgcagccgttgacgaaatgctgaggcacaacggcgcatacctgctggaggtggtggtgcagcccgaaggcaacgtattccctatgatacccgcaggtgcgccgctggaaaaaatcagattttcataa

SEQ ID NO: 1392 - protein, 171 aa, Unknown
  Obtained from environmental sample
  DOMAIN (1)...(147): Thiamine pyrophosphate enzyme, C-terminal TPP binding domain
  misc_feature (1)..(171): Xaa is any amino acid
MGQQQIIAARYFSVNQPRSVVTSGGLGTMGFGLPSAMGAKVAAPNREVVLFVGDGGIQMTIQELGTIMQDNIGVKIVLLNNGFLGMVRQWQELFYSKRYSATPLVSPDFVKVAEAYSIKGKRVADRKDLSAAVDEMLRHNGAYLLEVVVQPEGNVFPMIPAGAPLEKIRFS

SEQ ID NO: 1393 - DNA, 708 bp, Unknown
  Obtained from environmental sample
  misc_feature (1)..(708): n is a, c, g, or t
ttgtacgcaagcgcatcgggcggtggaagaaacctcgtcataggctcgcaaagctctacctgcaaggagttggataaggatagagtaggcggttgtattcgcagcgttgagcattgctacacgcaggagggcggactggcggtgctgtttggtaacattgctactaacggttgtattgtaaaaaccgcaggggtaagcgaaaaaatatttcacttcgagggcaaggctaaggtgtttgaatcgcaggaggaagcttgcgatggtatcttagacggcagggtgcaagcaggagatgtggtggttatccgccatgaaggtccgcgcggaggtcccggtatgcaggaaatgctttaccccacctcgtacatcaaaagtaaaaagctgggcgaggcgtgcgccctcatcaccgatgggcgtttttcgggcggaacatcggggttgtccatcggacacatttcgcctgaggcggcagcaggaggcgagattgccctgctgcgcaacggcgatgtgattgaaatagatattccgcaccgcagcattaacgtaaagctgtctgacgaagatttgatgcagcgcaaggcgcaggaggaggcgcgaggcaagcaagcttacacccctgtttcgcgcaagcgcgaggtgagcaaatcgctccgcgcgtatgcaagcatggtgagctcggcggacaagggagcggtgaggatagcttga

SEQ ID NO: 1394 - protein, 235 aa, Unknown
  Obtained from environmental sample
  DOMAIN (1)...(234): Dehydratase family
  misc_feature (1)..(235): Xaa is any amino acid
MYASASGGGRNLVIGSQSSTCKELDKDRVGGCIRSVEHCYTQEGGLAVLFGNIATNGCIVKTAGVSEKIFHFEGKAKVFESQEEACDGILDGRVQAGDVVVIRHEGPRGGPGMQEMLYPTSYIKSKKLGEACALITDGRFSGGTSGLSIGHISPEAAAGGEIALLRNGDVIEIDIPHRSINVKLSDEDLMQRKAQEEARGKQAYTPVSRKREVSKSLRAYASMVSSADKGAVRIA

SEQ ID NO: 1395 - DNA, 426 bp, Unknown
  Obtained from environmental sample
  misc_feature (1)..(426): n is a, c, g, or t
ttgtttcaggggagagccggaatgactaatttcggcgagcgctcttacgcttacgccaaggcctgcggcattatttccaagtcatttgtcgggaatagggtactcaaccttgaaaaagcaggccgtctttcagaactggatcggatggtattttcctccgaggccaaaagtctgccggaaaaagagctgcttcgtgaccttgaaaaaagaataattaaccgcgaagtaaattccatcatctccattgtaaaatgtttttccaggcctccggaattttttaccttgctgatacgcagttatgaatacgcggatctgttaagcgccatcaacgcctcctgggacaaggaaagaaacgccccggctcatgttgaccttgggcgttttcaaaccgtacactttgaagcctggcctgatattcaaaaatga

SEQ ID NO: 1396 - protein, 141 aa, Unknown
  Obtained from environmental sample
  misc_feature (1)..(141): Xaa is any amino acid
MFQGRAGMTNFGERSYAYAKACGIISKSFVGNRVLNLEKAGRLSELDRMVFSSEAKSLPEKELLRDLEKRIINREVNSIISIVKCFSRPPEFFTLLIRSYEYADLLSAINASWDKERNAPAHVDLGRFQTVHFEAWPDIQK

SEQ ID NO: 1397 - DNA, 651 bp, Unknown
  Obtained from environmental sample
  misc_feature (1)..(651): n is a, c, g, or t
atgcacaaggtggaagaagctttaaacgaagcgaaggcctttgcgaatctcaacgcccccttttcggatttggatcagctctcttaccttacccttagggtaggccgccttgatggacagcggcatgaggaattaagagaaaaccttgaaggaagggcggtggttattcctttaggttcaggcgacagggtgttggcggcggcatcaagaaagggccgctttgctctggattcggaacttaaaaagatgaattttgttcccattgatattccggaagggtacaacggcataccgccggaactgcttttgggccttgaggaaaggcttaagggcacggcaaagaaactggaagaaataaacgaaagcaaaaataaactccgtgatgaatacgagttgagccttcaagcgcttaccgcttcttacttaatggccggcattaccgaaaagttaaaggcctgccttagagcgacaaaaaacgtgtacctcctttccggctgggtacccgccgatatggttcatacgctggttaccgagcttgaaaagcttactgagggcaggatagccgtgcgttcgtataaccccgaagagcttgaaagggtaaaagaaggcagggaaaaagttcccgtttcccttgaccacggcgctttttaa

SEQ ID NO: 1398 - protein, 216 aa, Unknown
  Obtained from environmental sample
  misc_feature (1)..(216): Xaa is any amino acid
MHKVEEALNEAKAFANLNAPFSDLDQLSYLTLRVGRLDGQRHEELRENLEGRAVVIPLGSGDRVLAAASRKGRFALDSELKKMNFVPIDIPEGYNGIPPELLLGLEERLKGTAKKLEEINESKNKLRDEYELSLQALTASYLMAGITEKLKACLRATKNVYLLSGWVPADMVHTLVTELEKLTEGRIAVRSYNPEELERVKEGREKVPVSLDHGAF

SEQ ID NO: 1399 - DNA, 480 bp, Unknown
  Obtained from environmental sample
  misc_feature (1)..(480): n is a, c, g, or t
gtggcggtattgcccgaggcggatgaaactgaaattgacatcaggcaggaagaccttcgcattgatgtaatgcgcgccggcggccccggcggtcagtgtgtcaatactaccgattccgccgtgcggattacccaccttcccaccggcattaccgtccactgtcaggacgaaaagagccagattaaaaacaaagccaaggccatgcgcatactgcgggcgcgtatttatgaaatggaggaggcgaaagccgccgccgaacgcgccgaagcccgtaaaacccaggtcggttccggcgaccgttccgaacggatcagaacctataattttcccgataaccgcgttaccgatcaccgcatcggccttaccctgtacaaactggatcgcattatggaaggcgacatcggcgaagtatttgacgcgctcaaactttctgctcgcgaagaattattgaagatgaccagttccgaagccgcctcttaa

SEQ ID NO: 1400 - protein, 159 aa, Unknown
  Obtained from environmental sample
  DOMAIN (5)...(118): Peptidyl-tRNA hydrolase domain
  misc_feature (1)..(159): Xaa is any amino acid
MAVLPEADETEIDIRQEDLRIDVMRAGGPGGQCVNTTDSAVRITHLPTGITVHCQDEKSQIKNKAKAMRILRARIYEMEEAKAAAERAEARKTQVGSGDRSERIRTYNFPDNRVTDHRIGLTLYKLDRIMEGDIGEVFDALKLSAREELLKMTSSEAAS

SEQ ID NO: 1401 - DNA, 480 bp, Unknown
  Obtained from environmental sample
  misc_feature (1)..(480): n is a, c, g, or t
atgacagattcgccagctgaacacttcaaccatttggattatcaaaataatgaaaatgaggagataaaatgtgttacaagtgtatttactgttttctttgaagatccgttttgggttggaatattggaagaaaattataacggcataaattatatgggcaaacatatattcggagcggaaccatcaaattctgaactggtacaattctatatttatgaatttgataaaattaaaaaaataaaaatcagtgaatcagaaattgaaacaaaaaaaatgagttttaagaaatcgctgaacaaatcaaaaaaaatacagaataaaaaaagtacagggacaaaatcacaaaatctatttcaaagggcatttgaagaaatattgaaaataaataaaaaagaaagaaaaaaggaggaaataatgaataaaaaggaaaaatataaaaagaaactggaaaagaaatcagagaaaaagaaggggcattaa

SEQ ID NO: 1402 - protein, 159 aa, Unknown
  Obtained from environmental sample
  misc_feature (1)..(159): Xaa is any amino acid
MTDSPAEHFNHLDYQNNENEEIKCVTSVFTVFFEDPFWVGILEENYNGINYMGKHIFGAEPSNSELVQFYIYEFDKIKKIKISESEIETKKMSFKKSLNKSKKIQNKKSTGTKSQNLFQRAFEEILKINKKERKKEEIMNKKEKYKKKLEKKSEKKKGH

SEQ ID NO: 1403 - DNA, 693 bp, Unknown
  Obtained from environmental sample
  misc_feature (1)..(693): n is a, c, g, or t
atgattaaaaatatttcgctttcttcgagggataaaatgaatgaaatggtattgtataaagaaaatataaaaacaggtctaacatcaaatgcattgaaaataatcgctattattgcgatgacaatagatcatagcgccaccattctttttccccgttatagtttgtatatgccggcgctgtttatgcacgttattggaagattaaccgctccaattatgatgtttcttattgtagaaggatatcatcatacaaaaaatattaaaaaatacatttttagattgtttattttggcaattatttcacattttgcctatgcgttttgttttgataaacatttcgatacggtatttgatcagaccagcgttatttgggcgtatatgttaggtttattagcgttggtaataagaaaaaatgataaattaaaaacctggcaaaaacatttaatactttttcctgttatgtggcttgcttttcccgctgattggagtactcccgccgctttcgcaattttgtatatgggattaaattacggaaatttcaaaaaacaaatgatttctcttgttatttgcgtggctttttacacaataatatactcaatttttctaaattttgttcatggcttaattcaaatgttaattgtattggctattcccttattataccaactcggccgctcggccgatctgtcatga

SEQ ID NO: 1404 - protein, 230 aa, Unknown
  Obtained from environmental sample
  DOMAIN (24)...(162): TraX protein
  misc_feature (1)..(230): Xaa is any amino acid
MIKNISLSSRDKMNEMVLYKENIKTGLTSNALKIIAIIAMTIDHSATILFPRYSLYMPALFMHVIGRLTAPIMMFLIVEGYHHTKNIKKYIFRLFILAIISHFAYAFCFDKHFDTVFDQTSVIWAYMLGLLALVIRKNDKLKTWQKHLILFPVMWLAFPADWSTPAAFAILYMGLNYGNFKKQMISLVICVAFYTIIYSIFLNFVHGLIQMLIVLAIPLLYQLGRSADLS

SEQ ID NO: 1405 - DNA, 459 bp, Unknown
  Obtained from environmental sample
  misc_feature (1)..(459): n is a, c, g, or t
atgaggctcttatcgcgngttgttgacatgacaactaacaaggtggtaaaacgctggcgttttcgcgaaggtgaaggagccgcgcggcacattatttacaaaggcgacaaactctatgtttccgatatgttccgaggaaccgtgaacatattgaaccccacgacaggcgagctccttaaatatacacgtgtcggctataatataaacaccatcgcaatatcacctgacggcaagtacattttcgcatcctcacgcggcatgaataacccagttgactacacaatgcccggaccggatttaggcgcggtctatatgctaaacgcgcaggacttaaccctaattgaaaaagtatggggacgcaatcaaccaacaggtcttgccgtttctccaaacggaaaacttttggtatttaccgattttcttgacgcgaatctggaattgtacacgattgggtattag

SEQ ID NO: 1406 - protein, 152 aa, Unknown
  Obtained from environmental sample
  misc_feature (1)..(152): Xaa is any amino acid
MRLLSRVVDMTTNKVVKRWRFREGEGAARHIIYKGDKLYVSDMFRGTVNILNPTTGELLKYTRVGYNINTIAISPDGKYIFASSRGMNNPVDYTMPGPDLGAVYMLNAQDLTLIEKVWGRNQPTGLAVSPNGKLLVFTDFLDANLELYTIGY

SEQ ID NO: 1407 - DNA, 672 bp, Unknown
  Obtained from environmental sample
  misc_feature (1)..(672): n is a, c, g, or t
gtggtcattccagccacctacaacaacctatcggtaactggaatccaaagcggagcgtttaggaattgcatcaatattaccagcgttacaatccccgcaagcgtaactggaatcggtactaccgccttctttacatgctcaaacctaactagcgttactttcgtggggagcaatactagcttttctgcgaggggtgtttcatcggactcattccccgccgccaaagatttaaatgataaataccaagccggaggcgcgggaacctacactcgcccagccggaggcactgtctggacaaagcaggcggcggcaagcgtacccgcgcccaacacttcacttgaaggcagttggagagttcagccttctggtaacataattattaatatcagcggcaatactgctgtttttagttattataatcctactggtactcttggaaagagtgccacggacaaaggctatataaaagtcggcgaccaagcttttcgtaatctaagaagcactggcaatttaacatggtcaggacaggtattgcgagttacatataatacgcgcactcctgatgtcgccacaggcacaacttgngataatttaacaatcacgatggacccaagcggaaatacctttactgatagtactggttctacttatataagagctggcattcagtag

SEQ ID NO: 1408 - protein, 223 aa, Unknown
  Obtained from environmental sample
  misc_feature (1)..(223): Xaa is any amino acid
MVIPATYNNLSVTGIQSGAFRNCINITSVTIPASVTGIGTTAFFTCSNLTSVTFVGSNTSFSARGVSSDSFPAAKDLNDKYQAGGAGTYTRPAGGTVWTKQAAASVPAPNTSLEGSWRVQPSGNIIINISGNTAVFSYYNPTGTLGKSATDKGYIKVGDQAFRNLRSTGNLTWSGQVLRVTYNTRTPDVATGTTXDNLTITMDPSGNTFTDSTGSTYIRAGIQ

SEQ ID NO: 1409 - DNA, 555 bp, Unknown
  Obtained from environmental sample
  misc_feature (1)..(555): n is a, c, g, or t
ttgggcgcagatattattttgcacagcggaacaaaatatttaggcgggcacaacgatactttgtctggatttttggttgtgaagagcaacaaccttttagaaaaactgaggttcatagcaaaaaccaccggaggatgcctctccccttttgacgctttcctcattattcgcggcataaaaactcttgctattcgcatggaacgcagtcaagaaactgcaaaaaaaattgtgaactggcttttggaacaaggcactgtaaaaaaagtatattatcccggattgaaagaacacccagactatgaaatatcgcttcgccaaaccagcggttttggtggcatgatttctttttctgtgcaaaatgagcaaacagccataaaaatactggaaagcgtgaaagtgataaaatacgcagaaagtttgggcggagttgaaagcctaatcacctacccaatgctccaaacccacgccgacctcccagaaagcgacaggcgcgcacgtggcatagacgagtgtttactccgcctcntccgtgggctagaagcggcagacgattaa

SEQ ID NO: 1410 - protein, 184 aa, Unknown
  Obtained from environmental sample
  DOMAIN (1)...(184): Cys/Met metabolism PLP-dependent enzyme
  misc_feature (1)..(184): Xaa is any amino acid
MGADIILHSGTKYLGGHNDTLSGFLVVKSNNLLEKLRFIAKTTGGCLSPFDAFLIIRGIKTLAIRMERSQETAKKIVNWLLEQGTVKKVYYPGLKEHPDYEISLRQTSGFGGMISFSVQNEQTAIKILESVKVIKYAESLGGVESLITYPMLQTHADLPESDRRARGIDECLLRLXRGLEAADD

SEQ ID NO: 1411 - DNA, 879 bp, Unknown
  Obtained from environmental sample
  misc_feature (1)..(879): n is a, c, g, or t
atgaggatctttcttatttgtctggaagaagaaaaagaaaaagccttacagcttgtgtctttccttgaaaaaataggtatttcctcggaaacactccttattaaaaccagggatgaggggttgaaactcattacagattacacccacgttgtgattctttcggcgcttgggccggggtggatagattttcttgcgggatttttctgcggttcgcatcttcctatttttatattgggaaaagaagctatcgaaagtattccggatgtatttgccttttgcttcaaattttttgacactgaagaaaaattattaagctgtctctccgaagaattagaaactttcaaaaagaatgaagccgcctgggaaacaaatcatatcaggcaagccctgcttgacaagggcattcccacgacaattgaggctcttgcccagtgtgttgccgaaaataaagttgacgaagtttctctttttatagccgcgggatttttacctgacgcaaaagacaaaaaaggaattcccttgctttgtatttccgccagaaacgggcatttaaacaccgttgagttcctgcttcgttccggggctcaagtggatattattgccgaggatagaggttctacccctcttattgacagcgctatgggaaggcataaagatgtgataaaaacccttattgaagccggagcggatgtaaatatcaagaacaaggacggacagaccgcgctgattattgttgtaggcgccggggatatagaaattgttgaaatgctggttaaggccggggctgaccctgacatcgaagatgcttttggcgtcagcgcaagaatgtatgctaatatctttaagaacgataaaatgaaagccatttttgatttctaa

SEQ ID NO: 1412 - protein, 292 aa, Unknown
  Obtained from environmental sample
  DOMAIN (204)...(236): Ankyrin repeat
  misc_feature (1)..(292): Xaa is any amino acid
MRIFLICLEEEKEKALQLVSFLEKIGISSETLLIKTRDEGLKLITDYTHVVILSALGPGWIDFLAGFFCGSHLPIFILGKEAIESIPDVFAFCFKFFDTEEKLLSCLSEELETFKKNEAAWETNHIRQALLDKGIPTTIEALAQCVAENKVDEVSLFIAAGFLPDAKDKKGIPLLCISARNGHLNTVEFLLRSGAQVDIIAEDRGSTPLIDSAMGRHKDVIKTLIEAGADVNIKNKDGQTALIIVVGAGDIEIVEMLVKAGADPDIEDAFGVSARMYANIFKNDKMKAIFDF

SEQ ID NO: 1413 - DNA, 912 bp, Unknown
  Obtained from environmental sample
  misc_feature (1)..(912): n is a, c, g, or t
atgtccccgctgaggaacttgccggggctgtgcagaaaattgccaaacggtattatgatggcgatgaatacgcgtaatatttttgaaaagaactttcaactgctttccgtgaaagaccgggagctgtgtttcaggatttcagccgcgcaaactacgcagggaaggtatacattcattgagtccaggacgcgcagggcagtgcctgccattgttgattcaggcggtcaggcccacgcccttcattcaacagtagacccggaaaaggaagcccaaaggctggcggcaactcttgatgaaggctgggctgaaccgggttttgtggtgtttctggggcttggcgcggcttatgcggcgaccgcggccttaagcgccggtaccgcgtctcatgtccttgtgatagacttcggcatcgacggcattgccgaacttttcggctcccttatatacgccgtgttagacgatccccgttttaccctgcttgtggatcctgacgccggcttgatacaaaaaacaatactcgatctgtacagcccggctctttgcgggggtatcagggctctgcccttgaggggcagggtagagcaggacaaagaagccttcgctcttgccggtgaagcggtacagcgggcaatagaaagggtctcggcggactattccgtgcaggctcattttggcatccgctggttttccaacataatccgcaacatgggtatcgctcagtccctgaacccgggcgcgtctcaaatcagcgcggcggacatcagcgatgccgccatttgcgccgcgggtccttcgcttgatgtccagatccctcttcttcgggagcggcggcaggcccatcccgttttcgtcattgccgcagataccgctctgccggcattgctggcagggggcgtaaaccggacgcaatag

SEQ ID NO: 1414 - protein, 303 aa, Unknown
  Obtained from environmental sample
  misc_feature (1)..(303): Xaa is any amino acid
MSPLRNLPGLCRKLPNGIMMAMNTRNIFEKNFQLLSVKDRELCFRISAAQTTQGRYTFIESRTRRAVPAIVDSGGQAHALHSTVDPEKEAQRLAATLDEGWAEPGFVVFLGLGAAYAATAALSAGTASHVLVIDFGIDGIAELFGSLIYAVLDDPRFTLLVDPDAGLIQKTILDLYSPALCGGIRALPLRGRVEQDKEAFALAGEAVQRAIERVSADYSVQAHFGIRWFSNIIRNMGIAQSLNPGASQISAADISDAAICAAGPSLDVQIPLLRERRQAHPVFVIAADTALPALLAGGVNRTQ

SEQ ID NO: 1415 - DNA, 804 bp, Unknown
  Obtained from environmental sample
  misc_feature (1)..(804): n is a, c, g, or t
atgacactgttggcggttggcagcatagcctttgacgacctagaaacccccgcgggcatcaggaacgacctgctgggcgggtccgcgacttacttttcgctctgcgcgagcaacttctgtccagtccgcctagtggcggtggtcggggaggacttcggcgaagcgcaggaggtaacatacaggggccgccccattgacttggacggcgtgatccgccgaaagggcaggagcttccactggaaggggcgctacggccacgacctgaacgaggcccagacgctgaagacggaactgaacgtctttgccgacttcgtgcctgagctgccgagccactacaggaattccccattcctgtttcttgggaacattgacccgcgcctgcaactgcaggtggtaggtcagatgtcgccccgcccgaagtgggtggcactggatactatgaacttctggatagacggctctaggggcgagctggagaaggtcctgaaggtcacggacatcctgctcatcaacgaggccgaggccaagtcgctggcgggcgagaccaacgctgtgaaggccggcgtagtcatcacctccatggggccaaggatagtggtggtcaaaaggggcgagtacggtgccctgctggtggcgcctggtctgcgcgtgccggtgccagccatgccaatggaagccgtcaccgacccgactggcgctggggacacgtttgcggggggcttccttggctacctagcgtctgtaggggacttggaggagcagacgctgaggaaggccatgtgcgattggtacggtgatggctag

SEQ ID NO: 1416 - protein, 267 aa, Unknown
  Obtained from environmental sample
  misc_feature (1)..(267): Xaa is any amino acid
MTLLAVGSIAFDDLETPAGIRNDLLGGSATYFSLCASNFCPVRLVAVVGEDFGEAQEVTYRGRPIDLDGVIRRKGRSFHWKGRYGHDLNEAQTLKTELNVFADFVPELPSHYRNSPFLFLGNIDPRLQLQVVGQMSPRPKWVALDTMNFWIDGSRGELEKVLKVTDILLINEAEAKSLAGETNAVKAGVVITSMGPRIVVVKRGEYGALLVAPGLRVPVPAMPMEAVTDPTGAGDTFAGGFLGYLASVGDLEEQTLRKAMCDWYGDG

SEQ ID NO: 1417 - DNA, 903 bp, Unknown
  Obtained from environmental sample
  misc_feature (1)..(903): n is a, c, g, or t
atggaattgcaatctgtggaactgcgcgaaagaatcgagcaggaacttgagcgtaatccggcgctggaaataattgaagataaaagcacagtcccacttaatgacgaagaagagacgcatcagcaggaagtagatgaatattttgaaacaagctcggatccgggaaagcagggcgctcaggcttcggaagaacacaaccgttttatagaaggcgctcttacccggcctgaaactttacaggaacacctaatacgccaattacagcttgaacctattgatgaagagttacgagaaatcgccgagacgcttattcagaatttagacgccgacggttttcataaggaaaagccggaaaccctatttgccgcccctcagcaaaggcttgatgaagctatggaactggtaagaggccttgatccaatcggctgctgtacaagtaattaccgcgaatcgctccttacgcaaatagaactgttaggcgacgctccgtgcgaaatatccgtaatagaaaaagtactggataaccttgatcttgtagaccgtgaaaaatacagcctccttgaaaaaaaaacggggattgatgaagaagaagacacccgcattatctgcgaatatataaaaaaactttaccccttccccggccgcgcgttcgcctcagccgaagtgcgttttgtcgtgccggacatcaaagtcatcagaaacgcagacgggtttacaatcaatctgaacgatgaagtttatcccgttctcggcatcaatcataattttgaagtgttctgtgagagtacggacaaggcggcaagagattttgcgcgggaaaatatcagggaaagcgagctttttatcagccatctaagccagcggaatcagacattgataagggtcgcaaacgcaatcccttga

SEQ ID NO: 1418 - protein, 300 aa, Unknown
  Obtained from environmental sample
  DOMAIN (62)...(257): Sigma-54 factor, core binding domain
  misc_feature (1)..(300): Xaa is any amino acid
MELQSVELRERIEQELERNPALEIIEDKSTVPLNDEEETHQQEVDEYFETSSDPGKQGAQASEEHNRFIEGALTRPETLQEHLIRQLQLEPIDEELREIAETLIQNLDADGFHKEKPETLFAAPQQRLDEAMELVRGLDPIGCCTSNYRESLLTQIELLGDAPCEISVIEKVLDNLDLVDREKYSLLEKKTGIDEEEDTRIICEYIKKLYPFPGRAFASAEVRFVVPDIKVIRNADGFTINLNDEVYPVLGINHNFEVFCESTDKAARDFARENIRESELFISHLSQRNQTLIRVANAIP

SEQ ID NO: 1419 - DNA, 765 bp, Unknown
  Obtained from environmental sample
  misc_feature (1)..(765): n is a, c, g, or t
atgaccggaaacatagcgcacgagctgcgaacacctgtaaccagcatacggggttttttggaaataattttgagcaataatcttgaagaggaaaaaaagcaggaatatttgaaacgtgcatacaaccaaacacaggtgttatccgagcttattgcggatatgagccttttgaccaaaattgatgagcacgcagagagccttaaaatgggcaaagtgaatataaatgagcttctccaaaatataagaaccgcttctgacaaagctcttgaagaaaaaaatatccagttcaatgcgaatttaccggaaaatttattcatatttggcaacgagagccttatatattccattttcaggaatttaaccgataatgttatacgccacgcgggcgaaaatgtgagcattaatataagaactttgcccgaattgaacgatggaagggtttattttgtgttttctgatactggaaagggcgttggcgaaaatgttatattggagcgtttatttgagcgtttttaccgtgtggaggagggtcgttcccgtgatacgggcggttcggggcttgggctttccattgtgaaaaacgcagttcttttccacggcggcaccataacggcgcgcaccggaggggagaatatgggtcttgaattcctattttcactcaaaaaactgtctgaaccagaattatcagaatggtgtgtttcacagggcaggcaaaaccctgcccctacggcaaatccacaaataggtataacagacacttggtaa

SEQ ID NO: 1420 - protein, 254 aa, Unknown
  Obtained from environmental sample
  DOMAIN (1)...(63): His Kinase A (phosphoacceptor) domain
  misc_feature (1)..(254): Xaa is any amino acid
MTGNIAHELRTPVTSIRGFLEIILSNNLEEEKKQEYLKRAYNQTQVLSELIADMSLLTKIDEHAESLKMGKVNINELLQNIRTASDKALEEKNIQFNANLPENLFIFGNESLIYSIFRNLTDNVIRHAGENVSINIRTLPELNDGRVYFVFSDTGKGVGENVILERLFERFYRVEEGRSRDTGGSGLGLSIVKNAVLFHGGTITARTGGENMGLEFLFSLKKLSEPELSEWCVSQGRQNPAPTANPQIGITDTW

SEQ ID NO: 1421 - DNA, 561 bp, Unknown
  Obtained from environmental sample
  misc_feature (1)..(561): n is a, c, g, or t
atgacttcaacttttatgggaattgaaattggcaaacggggcgttcaggcccaccagcaggccctgtatgttaccgggcataacctcgacaatgccggcaacgatggctattcccgccagcgtgttgaaatgtccgcgttcgagccgatttatctgccgggactgaaccgtgcggaaacgccggggcagatagggcagggcgttgtcattgagcgcattgaacggatgagggatcaactgcttgataagcggattattcagcaatcctccaaagaaggttactggaccgcccgcgatccctatgttcgcatgatggagcatctgtacctggaaccgggtgagaattcggtgcggtcaaaaatggactctttttgggcttcatgggatgaactttccatgtttcccgcggacaccgctccccgtaccgcggttatagaacggggcaaaacccttattgacggcattcacaaccgctatcagaaactgaaaggtttgcaggatcaggccaatgaggacatagaactcaccgtaggccgcgtcaacgagcttttccgcagatag

SEQ ID NO: 1422 - protein, 186 aa, Unknown
  Obtained from environmental sample
  misc_feature (1)..(186): Xaa is any amino acid
MTSTFMGIEIGKRGVQAHQQALYVTGHNLDNAGNDGYSRQRVEMSAFEPIYLPGLNRAETPGQIGQGVVIERIERMRDQLLDKRIIQQSSKEGYWTARDPYVRMMEHLYLEPGENSVRSKMDSFWASWDELSMFPADTAPRTAVIERGKTLIDGIHNRYQKLKGLQDQANEDIELTVGRVNELFRR

SEQ ID NO: 1423 - DNA, 900 bp, Unknown
  Obtained from environmental sample
  misc_feature (1)..(900): n is a, c, g, or t
atggggcataggttagcctccgccaaggcgggacggggcaattctattaccaaaaaaacagaagagattnggcacgggctttcccagcttgagtttgtccaccgccttgccgggtataacgcggcggaaatcgcctctaaattaaaatatttactggaaaaaatttcaggcgcggggttaattgctaacataacaggccttgcccttaacgcgggagaagaaatttcgcaaaggttcgcaaggttcggcgcccctaaaccgcgccccgccttgtcccgcgctccggcgcttttggaaaaagccgaagttttcgcgtccggctccctgcaaattggttttgcggcgcggacaatgaactcggcggcttttgacactaaagaacaaattgcggaaatggtattggctcaccggctttcgacaggggcgctttgggaggatattcgcatgaagggcggagcttacggcgcgtttgcgcaaagcgatacccttgataactgtgtttctttcgcgacataccgcgatcccaaccccttgcgctctcttgaaactttttccgcgatactgaataacagcgcgtacggagaatgtgatgaagacgaacttgtaaaaaacatcatcggatgttacgcgaaagaaacatacccaaggacaaacagcgaaaaagggaatatggatttttcccgctttctggcaggtatggatgaaagttaccgaaaaagaaggatagaacgccttgtttcaatttccgccgcggatatcaaggcggctttttcctcgatgggaaaaagacccgcgacgggctcggtaattatcgcggggactaaggccgcggaacaggcggcaaaagcgcttggaaccgacgtgcaggtactgccgggtaagaaaaaaactaaagtttga

SEQ ID NO: 1424 - protein, 299 aa, Unknown
  Obtained from environmental sample
  misc_feature (1)..(299): Xaa is any amino acid
MGHRLASAKAGRGNSITKKTEEIXHGLSQLEFVHRLAGYNAAEIASKLKYLLEKISGAGLIANITGLALNAGEEISQRFARFGAPKPRPALSRAPALLEKAEVFASGSLQIGFAARTMNSAAFDTKEQIAEMVLAHRLSTGALWEDIRMKGGAYGAFAQSDTLDNCVSFATYRDPNPLRSLETFSAILNNSAYGECDEDELVKNIIGCYAKETYPRTNSEKGNMDFSRFLAGMDESYRKRRIERLVSISAADIKAAFSSMGKRPATGSVIIAGTKAAEQAAKALGTDVQVLPGKKKTKV

SEQ ID NO: 1425 - DNA, 507 bp, Unknown
  Obtained from environmental sample
  misc_feature (1)..(507): n is a, c, g, or t
gtggataattctatttttaatgattttcccatactctcaaaaccattttatttttcacttggcagcctttcaaaacgaaaaaatataaggtggattattgagtatgccgaaaaacaccctgaatctatttttgcaatttcaggaaccggtctttcaaccttaaaagtaaatgaactagacggcgaaatcccaaaaaacataattcttcttggttatcttgacgacttcaaagtaaaagcccttatgacaaaatgcaaagcgtttattttaccatcttattttgaaggtttcggcattccccctcttgaagctctgtcatgcggcgcgcaaattattattgcaaaatccgcaagtcttcccgaaatctacggaaacacggcgcattatattgacccgttcaaaaccgatgttgatcttgacgctntgcttcgtgaaccggttgaaaaacggacgcaattcttgccaaatattcctatgacatttccgctganaaagtatataatctga

SEQ ID NO: 1426 - protein, 168 aa, Unknown
  Obtained from environmental sample
  DOMAIN (2)...(160): Glycosyl transferases group 1
  misc_feature (1)..(168): Xaa is any amino acid
MDNSIFNDFPILSKPFYFSLGSLSKRKNIRWIIEYAEKHPESIFAISGTGLSTLKVNELDGEIPKNIILLGYLDDFKVKALMTKCKAFILPSYFEGFGIPPLEALSCGAQIIIAKSASLPEIYGNTAHYIDPFKTDVDLDAXLREPVEKRTQFLPNIPMTFPLXKYII

SEQ ID NO: 1427 - DNA, 339 bp, Unknown
  Obtained from environmental sample
  misc_feature (1)..(339): n is a, c, g, or t
atgaaccaaggtgaaatttggcttgttaatcttgcccccactcttggcgctgaaatgaataagacccgtccggcattaattattagcgataataggctcggcaaattgccgctaaaagtcgttgttccgattaccggatggaaagaacgctacaacgcagccgcttggatgataaaaatcgaaccgcaccaaagaagcggtcttagcaaaatatcctcaatagattgttttcaaattaggtcggtgtcgcaacagcgtcttgtgcagaaaatcggtgagattacgagcgatgaaattagtaaggtacatgaaggactcttgaaagtcttagggatatag

SEQ ID NO: 1428 - protein, 112 aa, Unknown
  Obtained from environmental sample
  DOMAIN (2)...(111): PemK-like protein
  misc_feature (1)..(112): Xaa is any amino acid
MNQGEIWLVNLAPTLGAEMNKTRPALIISDNRLGKLPLKVVVPITGWKERYNAAAWMIKIEPHQRSGLSKISSIDCFQIRSVSQQRLVQKIGEITSDEISKVHEGLLKVLGI

SEQ ID NO: 1429 - DNA, 546 bp, Unknown
  Obtained from environmental sample
  misc_feature (1)..(546): n is a, c, g, or t
ttgagcaccgtccccgggccgacctcggcgcagtgctgtggggaaagctccgacagggccttcatcgagtccacccagcgtaccggggagaccagctgttttatcagtaaatccttcaatacggcggggtcggtttcgggctttgcggtgacgttcgcgatcaccggacagcgcggcgcggagaatttcaccgactccagcgccttggccagcttctccgccgccggttgcataagcggagagtggaaagccccgcttacaggcaacggcatggcgcgcttagcccccgccgcctttagcagaccgcaagcctcgtccacggcggcggcctcgccggagataaccgtttgctccggagcgttctcgtttgccgtgacgaccacgccgctcttaacccctgaaataacgtccgcgatcttgtcccgatccatccccaagaccgccgccatcgcgcccggactggccgccccggcctccgccatagcctcgccgcgggcagcgaccaaccgtaagccgtcctcaaaagagaccgcaccggcggcgtag

SEQ ID NO: 1430 - protein, 181 aa, Unknown
  Obtained from environmental sample
  misc_feature (1)..(181): Xaa is any amino acid
MSTVPGPTSAQCCGESSDRAFIESTQRTGETSCFISKSFNTAGSVSGFAVTFAITGQRGAENFTDSSALASFSAAGCISGEWKAPLTGNGMARLAPAAFSRPQASSTAAASPEITVCSGAFSFAVTTTPLLTPEITSAILSRSIPKTAAIAPGLAAPASAIASPRAATNRKPSSKETAPAA

SEQ ID NO: 1431 - DNA, 600 bp, Unknown
  Obtained from environmental sample
  misc_feature (1)..(600): n is a, c, g, or t
atgatggccggntcacctgaaagctttgacgggtgggcccacggaaggtcgtttacaactagttttgtgctgaatggcgaattggcttttatatttacaacgataacgctagtcattattctcgcgctgctgcagaattttatccgttccacttatggccgtgcgataaaggcgtgcagagaagatgaaattgcggctaacgcgaacgggattaatattttccgctacaaaatgattggctttgtcattgccgcttttattgcaggcataggcggctgcgtctacgcgctggttgtcggctttgttaagccggatatggcgcagttcctcagatccatcgacttccttatttatgtcgtgctgggcggtatgggttccatgaccggctcgattcttgcggcttatgtccttacctatttgcaggaatttttgcgtttcctgcaagactaccgcctcctgatatatccgataatactgatatttgtcatgctgttccgcccaaaaggccttatgggaatgaaagagctttccatagtgggttttgttgataaaatctacggtaaattccttaagcgggcgaagggggaagcgaaggcatga

SEQ ID NO: 1432 - protein, 199 aa, Unknown
  Obtained from environmental sample
  DOMAIN (1)...(163): Branched-chain amino acid transport system / permease component
  misc_feature (1)..(199): Xaa is any amino acid
MMAGSPESFDGWAHGRSFTTSFVLNGELAFIFTTITLVIILALLQNFIRSTYGRAIKACREDEIAANANGINIFRYKMIGFVIAAFIAGIGGCVYALVVGFVKPDMAQFLRSIDFLIYVVLGGMGSMTGSILAAYVLTYLQEFLRFLQDYRLLIYPIILIFVMLFRPKGLMGMKELSIVGFVDKIYGKFLKRAKGEAKA

SEQ ID NO: 1433 - DNA, 447 bp, Unknown
  Obtained from environmental sample
  misc_feature (1)..(447): n is a, c, g, or t
atgcccccgcttagncatattgaagcgtcgatagtgctttccgccccgccggcgccgattatggtatgtatctcgtcgatgaacaggataacatccccggcntgcgtaatttccctggtgattttttttatcctttcttcaaattcgccccggtactttgttccggcgactattgagcccatgtccagggaaagtatgcgtttacccgaaagggcttccggcgcgttcccggatacgagcagttggaccaggccctcgacaatggctgtctttccgacgcccggctcccctaccagtatggggttgttctttgagcgtctggcgagtatccgcacaatgcggttcatctctttttccctgccgattaccggatccagtttgccggttttcgcaagcgccgtcagatcgcgggagaaattatcaagcgtgggggtaagtacgggataa

SEQ ID NO: 1434 - protein, 148 aa, Unknown
  Obtained from environmental sample
  misc_feature (1)..(148): Xaa is any amino acid
MPPLXHIEASIVLSAPPAPIMVCISSMNRITSPACVISLVIFFILSSNSPRYFVPATIEPMSRESMRLPERASGAFPDTSSWTRPSTMAVFPTPGSPTSMGLFFERLASIRTMRFISFSLPITGSSLPVFASAVRSREKLSSVGVSTG

SEQ ID NO: 1435 - DNA, 489 bp, Unknown
  Obtained from environmental sample
  misc_feature (1)..(489): n is a, c, g, or t
ttgatatgccggttgatatataaaatgtcaattgaagtcgaggccctggtgaagagctacggttccctggaggtggtcaaagacgtcagtttcgttttgggccggggagagattctcggcttgcttgggcccaacggcgcggggaaaaccacggtcatgcgcgtcctggcaggctaccatttacccagctccggctccgtccgcatagacggcctttccctgggaaacgataccttagagatccaacggcgtgtcggctacctcggcgagaacgtgcccctctacggggatttgactcccctggagttccttggctttgctgcccaggcccgctcgattccccgagacaaaagagaagccgcggtggataaagccctcaacatctgcggtcttgaaacgcgggcgcgccaaaggatcgaaaccctttccagaggtttgcgccagcgcgtagggcttgcccagccgtactccacgatccgcccatcctga

SEQ ID NO: 1436 - protein, 162 aa, Unknown
  Obtained from environmental sample
  DOMAIN (36)...(160): ABC transporter
  misc_feature (1)..(162): Xaa is any amino acid
MICRLIYKMSIEVEALVKSYGSLEVVKDVSFVLGRGEILGLLGPNGAGKTTVMRVLAGYHLPSSGSVRIDGLSLGNDTLEIQRRVGYLGENVPLYGDLTPLEFLGFAAQARSIPRDKREAAVDKALNICGLETRARQRIETLSRGLRQRVGLAQPYSTIRPS

SEQ ID NO: 1437 - DNA, 654 bp, Unknown
  Obtained from environmental sample
  misc_feature (1)..(654): n is a, c, g, or t
gtgcctgtgacaggccggcccgcgggctggtgcgactgcattgcccgccaatggcccgtggacggcgttgtcggggaaaacggcgcgctggccttttgggaagagccgcgcggcgcggcacagcccggtcatcaaatccttaaagcaatgtatcaccccaatgccgtaaaaaacgatcatccggtactaaaaaaggttagggaacgcgcccttgccgaagttccgggcctgcgcgacgccaaggatcagtttgccaggctcttcgacattgccctggattttgccgaggaagagcctgtgcttccgttcagcgaggctgaaaaagtaaaggagatagccctcgcgcaaggcgttgtggcaaaaatctcgtcaatacacgtcaatgtctggatgggcgattacgacaagctctccatgaccgagcgttttttaagggatcgattcggttggcagggcgctttggaagaggtggtctttgccggcgactcccccaatgacgagcccatgttcgcccgtttccccctttcatgcgccgtagccaatatccgtgatttccttcacctcataaaaagccggccgggattcgttgcttcaaaggaaggcggggaggggtttgcggaaattgcggacgcgctgctggagaaaaggcagtaa

SEQ ID NO: 1438 - protein, 217 aa, Unknown
  Obtained from environmental sample
  misc_feature (1)..(217): Xaa is any amino acid
MPVTGRPAGWCDCIARQWPVDGVVGENGALAFWEEPRGAAQPGHQILKAMYHPNAVKNDHPVLKKVRERALAEVPGLRDAKDQFARLFDIALDFAEEEPVLPFSEAEKVKEIALAQGVVAKISSIHVNVWMGDYDKLSMTERFLRDRFGWQGALEEVVFAGDSPNDEPMFARFPLSCAVANIRDFLHLIKSRPGFVASKEGGEGFAEIADALLEKRQ

SEQ ID NO: 1439 - DNA, 687 bp, Unknown
  Obtained from environmental sample
  misc_feature (1)..(687): n is a, c, g, or t
atggttttattttttattattgatacttcaggcagtatgacgggaacaaaaattggcaccgtgaacacggccattcgtgaggttttaccggaattaaaagggatcggcggctctgacgttgatttaagaatagcgtgtcttaaattttcctgcggttgttcgtggatgcatacttccccggtcacggttgaacaatttcaatggaacaatctttccgctgacggtgaaactgattttggagccgcttgtaaagaactttccaataaattatccagggataaatttttagctgctccttccgcttccgtagcccctgccattattcttatgtcagatggcgagcctacagatgattataaaaaaggcttgttcgaattacgggaaaacaaatggtataaatatgccattaaggttgctgtggctatcggcgaagacgcgaatattgaagtgttaaaagagtttaccggaaacattgaggccgtaactacggtacacacgccggaagcccttctgaaatggatacgttttgttaccattgaatcagtacaaattggaagtaaaagccagcccatgcaggacgggcaggttgaatccaaacaggagacgatgatagaacagatgaaggatctgcagcaaagcgatcctgattttaaccaggtttcaacttcagaggatgactgggattaa

SEQ ID NO: 1440 - protein, 228 aa, Unknown
  Obtained from environmental sample
  misc_feature (1)..(228): Xaa is any amino acid
MVLFFIIDTSGSMTGTKIGTVNTAIREVLPELKGIGGSDVDLRIACLKFSCGCSWMHTSPVTVEQFQWNNLSADGETDFGAACKELSNKLSRDKFLAAPSASVAPAIILMSDGEPTDDYKKGLFELRENKWYKYAIKVAVAIGEDANIEVLKEFTGNIEAVTTVHTPEALLKWIRFVTIESVQIGSKSQPMQDGQVESKQETMIEQMKDLQQSDPDFNQVSTSEDDWD

SEQ ID NO: 1441 - DNA, 825 bp, Unknown
  Obtained from environmental sample
  misc_feature (1)..(825): n is a, c, g, or t
atgtgtatttcaattggttatatgcgggaaagcagtcatgtagcgggactgaaaacggatggtacagtngtcgctgtcggatctaatgacaacggccaatgcaatacccaacaatggcgggatattatcgcggtttccgccggcgcgagagttaccgcgggcttaaaatcggatggctcgcttgtcattgtcgggggtaatgttaccggttccacacaaagtaactccaaagacattactgctttttcccttggcagcagccatatcgtgattttaagaaaagacggatttgttaacgcgattggggataatgatttcggtcaatgtgatattcagggatggcgtgatattatcaagatttcagcaggccaatttcacactgttggcttgaaggcggatggcactgttgcagcggctgggcataatgaatacagtcaatgcgaaacccgggagtggcgggatattgttgacatctcagccggatttggtcatacagtcggcataaaggcaaacggtacggttataacagccggatgcaagggcgcagcgcaatgcgctacccaacactggcaggatattgtcgcggtttccgcggggttggcccataccgtaggtttgaaagctgacggaacagttatcgtgaccggaagcaatgatttcggccaatgtaatgttcaaggctggaaaaactatattgcggttcgcgccggaatgtttaatactgtgggtttgaaagcaaatggaacagtcgttgtatgcggtgataataaattcggccaatgtaatactcaaagctggcggaatatcggagtaaacactgactaa

SEQ ID NO: 1442 - protein, 274 aa, Unknown
  Obtained from environmental sample
  misc_feature (1)..(274): Xaa is any amino acid
MCISIGYMRESSHVAGLKTDGTVVAVGSNDNGQCNTQQWRDIIAVSAGARVTAGLKSDGSLVIVGGNVTGSTQSNSKDITAFSLGSSHIVILRKDGFVNAIGDNDFGQCDIQGWRDIIKISAGQFHTVGLKADGTVAAAGHNEYSQCETREWRDIVDISAGFGHTVGIKANGTVITAGCKGAAQCATQHWQDIVAVSAGLAHTVGLKADGTVIVTGSNDFGQCNVQGWKNYIAVRAGMFNTVGLKANGTVVVCGDNKFGQCNTQSWRNIGVNTD

SEQ ID NO: 1443 - DNA, 369 bp, Unknown
  Obtained from environmental sample
  misc_feature (1)..(369): n is a, c, g, or t
atgtctttcagaaaggaagttttcgggaaatgcggctttttcgatgttaaattttcaggtaacgcggtacgggaggatacggatatgtccgtcaggctgcgcaggaacgggtataaaatagcctatattcccaaagccgccgttattcactttatggataatacgggcggaacaagaacagccgccagtgaagcatactggcatacgattttttggaatcaatgttatttttacttaaaaaattttcatttttcacgcgtaacaataatgtttattcagatgtttgatcttttacggtgcgggcggcagggcttcaatgccatgactatattccgcaaagcctgccgcgaggcgggggataagatatga

SEQ ID NO: 1444 - protein, 122 aa, Unknown
  Obtained from environmental sample
  misc_feature (1)..(122): Xaa is any amino acid
MSFRKEVFGKCGFFDVKFSGNAVREDTDMSVRLRRNGYKIAYIPKAAVIHFMDNTGGTRTAASEAYWHTIFWNQCYFYLKNFHFSRVTIMFIQMFDLLRCGRQGFNAMTIFRKACREAGDKI

SEQ ID NO: 1445 - DNA, 360 bp, Unknown
  Obtained from environmental sample
  misc_feature (1)..(360): n is a, c, g, or t
atgaatttacgccttctttacattgatcccggcactgggagtatgcttttttctatcctcattggcgccgccgcggccattttcttcgtctcaagagccgtaataattaaggcgaaaatactgttttccggcggaaacacaaagaacgcaaagaaccggcacaaatgcgtaatttacgcggaagataaacgttactggaatctctttaagcccgtagtggatgaatttgaaaaacggaaatatccgcttatctatttaacctcctcaaaagacgatccctgttttgaatccgtatacaatcatattgttttcgagtacatcggagaggggaacaaggctttcgcgcggcttaacctataa

SEQ ID NO: 1446 - protein, 119 aa, Unknown
  Obtained from environmental sample
  misc_feature (1)..(119): Xaa is any amino acid
MNLRLLYIDPGTGSMLFSILIGAAAAIFFVSRAVIIKAKILFSGGNTKNAKNRHKCVIYAEDKRYWNLFKPVVDEFEKRKYPLIYLTSSKDDPCFESVYNHIVFEYIGEGNKAFARLNL

SEQ ID NO: 1447 - DNA, 519 bp, Unknown
  Obtained from environmental sample
  misc_feature (1)..(519): n is a, c, g, or t
ttgtcaacaagcacctgcctgtcgaagcggccggggcgcagaagcgcggggtccagcacgtcagggcggtttgtcgccgcaaggacgataagcccgccggcattgtcaaaaccgtccatttcaactaacaactggttaagagtctgttcgcgctcgtcgttgccgccggaaatgctgtttatcctgctcttgcctatcgcgtccaactcgtcaataaaaacaatacagggcgctttggttcttgcctgtttgaacaaatcccttacacgggcggcgcctacgcctacaaacatttccacaaagtccgctccgctcatgcggaagaaagaaacaccggcctctcccgctaccgcccgcgccagcaaagtttttcccgttcccggcggcccgacaaggagaacgcccttaggaatctttccgcctatatctttgtatttttgcgggttcttcagaaaatcgactacttcaaaaagttcctcttttgcctcgtcaacgccggcgacatcgcgaagcgcgtaa

SEQ ID NO: 1448 - protein, 172 aa, Unknown
  Obtained from environmental sample
  misc_feature (1)..(172): Xaa is any amino acid
MSTSTCLSKRPGRRSAGSSTSGRFVAARTISPPALSKPSISTNNWLRVCSRSSLPPEMLFILLLPIASNSSIKTIQGALVLACLNKSLTRAAPTPTNISTKSAPLMRKKETPASPATARASKVFPVPGGPTRRTPLGIFPPISLYFCGFFRKSTTSKSSSFASSTPATSRSA

SEQ ID NO: 1449 - DNA, 927 bp, Unknown
  Obtained from environmental sample
  misc_feature (1)..(927): n is a, c, g, or t
atgatcagatggccgagtcgttcggcaaacttctttttttggttacagcgtctaacatttttgctttttgttctttatcttatgggagggatgaactggtttgaagccgtctgccaaagtttgtcggctctggctacaggcggaataaatgtcaggaacaaggggatcgaagcgtggaattcgccgtttatcgacggcgtcactacggtatttctgctccttgccgggattaactttaacctttactgccgcgttttacagagaaaatttacggaaataaaaaataatatagagcttaaagcctatcttggcattttcgccgctgccgcggtaattataactgtttcgcttgttccttattacggttccgtttcaagcgctatccgtcacgcgtcatttcagagcgcgtctgtcctgtccaccgccggcaatacgaccgtaaactatgagcaatggccctcccttgccagaatggttctttttattcttatgtttgccggcggctgttcgggatccacggcgggaggcattaaagttatacgccatgttattctttggaaacaaataaagaatgaaacgcagcgtatgctttacccgcagggaattttcaggatacagataaacaaccgcgtagggcgtaacgacatagtatacggagtatcgggttttatcttcatgtatttattcgtaattatgatagtaacgctcattaccgcggcatcgggaatcgaccttttttcttcgttaagcgccgccctttcaattaccggaaatataggggtgggcttcggggcaataggccccggacacaattacagtatttttgccgatcatatncagtggcttttttcatttgtaatgcttgcaggccgtcttgagatgtggaccgtgtttattttgtttacacgagtatattggcggaagtag

SEQ ID NO: 1450 - protein, 308 aa, Unknown
  Obtained from environmental sample
  DOMAIN (1)...(306): Cation transport protein
  misc_feature (1)..(308): Xaa is any amino acid
MIRWPSRSANFFFWLQRLTFLLFVLYLMGGMNWFEAVCQSLSALATGGINVRNKGIEAWNSPFIDGVTTVFLLLAGINFNLYCRVLQRKFTEIKNNIELKAYLGIFAAAAVIITVSLVPYYGSVSSAIRHASFQSASVLSTAGNTTVNYEQWPSLARMVLFILMFAGGCSGSTAGGIKVIRHVILWKQIKNETQRMLYPQGIFRIQINNRVGRNDIVYGVSGFIFMYLFVIMIVTLITAASGIDLFSSLSAALSITGNIGVGFGAIGPGHNYSIFADHXQWLFSFVMLAGRLEMWTVFILFTRVYWRK

SEQ ID NO: 1451 - DNA, 765 bp, Unknown
  Obtained from environmental sample
  misc_feature (1)..(765): n is a, c, g, or t
gtgaggccggccaacgccgccgcgctccgtaggatacgcgagagcggcgcggcggtagccctggcctccggacgcctgggctgcggcgtcaggcgctacgcccccgaactcggaatagacccggcgctggtcgtcctaaacggcgccgaggtctacgcaagctccgaacccggggcgaaacgcgtctactacgccccgctcgaaacctgctacgcggagtacctgatagactactgcaaggacaaacccgtggtgctgaacttttaccacgacgacaaactctactccgcaaaaacggacaaaaacgccgagtggacggagctataccgtgaacaaaccggcgtcagctacaacttcatagacaaaaagttctccgccgtggcgaacctgcccccctcaaaaatactctttgtgggcgacgaggcctacttagacgagcaagaagccgtcttccaagcaaaatggggcgacggcggcgacaaatccgtctacgtctgccgcacgtggagccactacctggagttcatgaaccccaaagccaccaaaggaatcggcctgacggctctgtgcgacgcgctcggcataaacctatcggaggtagcggcctacggcgacgcggagaacgacattccgatgattacggccgtaggctacggcacggcgatgaaaaacgcgtcgccggcggtcaaacaggcggcgccgagggtcacgggcatgaccaacgatgaagattgggtggcgcaggagtggaacgaaggtttttaa

SEQ ID NO: 1452 - protein, 254 aa, Unknown
  Obtained from environmental sample
  DOMAIN (3)...(250): haloacid dehalogenase-like hydrolase
  misc_feature (1)..(254): Xaa is any amino acid
MRPANAAALRRIRESGAAVALASGRLGCGVRRYAPELGIDPALVVLNGAEVYASSEPGAKRVYYAPLETCYAEYLIDYCKDKPVVLNFYHDDKLYSAKTDKNAEWTELYREQTGVSYNFIDKKFSAVANLPPSKILFVGDEAYLDEQEAVFQAKWGDGGDKSVYVCRTWSHYLEFMNPKATKGIGLTALCDALGINLSEVAAYGDAENDIPMITAVGYGTAMKNASPAVKQAAPRVTGMTNDEDWVAQEWNEGF

SEQ ID NO: 1453 - DNA, 519 bp, Unknown
  Obtained from environmental sample
  misc_feature (1)..(519): n is a, c, g, or t
atggaacagaaagaatacaaaagccccgtttacaacataaaagctattcccgtggaaaagctgagggctaacgagtacaatcccaacagcgttgcaccgccagaaatggaacttttgtaccgtagcattaaagaagacggctacactatgcccatagtggtttatcatcgcaaagatgatgatgtgtacgaaatagtggatggctttcacagatattccataatattgcaatacaaagatatttacgaaagagaaaaaggattactgccttgttccgttattgaaaagcctataagcgagcgcatggcatccaccataaggcataatagggcgcgcggaagccataatgttgatcttatgagcaatattgtggcggagctggtggagcttggtaaaagcgattcctggatttcaaaatatttgggaatgtctagggatgaaattctgagactcaagcaagtaaccggaatagccgcgcttttcaaagaacaggaattttcaaaaagttgggttgtgtaa

SEQ ID NO: 1454 - protein, 172 aa, Unknown
  Obtained from environmental sample
  DOMAIN (14)...(110): ParB-like nuclease domain
  misc_feature (1)..(172): Xaa is any amino acid
MEQKEYKSPVYNIKAIPVEKLRANEYNPNSVAPPEMELLYRSIKEDGYTMPIVVYHRKDDDVYEIVDGFHRYSIILQYKDIYEREKGLLPCSVIEKPISERMASTIRHNRARGSHNVDLMSNIVAELVELGKSDSWISKYLGMSRDEILRLKQVTGIAALFKEQEFSKSWVV

SEQ ID NO: 1455 - DNA, 471 bp, Unknown
  Obtained from environmental sample
  misc_feature (1)..(471): n is a, c, g, or t
atgcaaccgcataatgacaaagacgcaaaccagagtgacgcggggggagctaagagcttcggccgctatcgggttttggggcttctgggcgagggggccatgggccgggtgtacctttccgaggacccgatcctcaaacgccgcgtggcggtgaaggtcatccccaccgaccgcaacctcgaaccggcggtgcggcgcgagttcctagagcgtttcgccgtcgaggcgcaggcgtgcgctatgctcaatcacccctccatagtctctatctacgacgcccgagaggagaacggggcgccgtggatcgccttcgagtacgtctcgggcgagcacctggataggctcatctctcanaaaacgccgctaccgttcgaccaaatactgcgtatcgccggggatatcgccgcggccatgcgccacgcgcacggcatgggcatcgtccaccgcgacatcaaacgggcgacatcctga

SEQ ID NO: 1456 - protein, 156 aa, Unknown
  Obtained from environmental sample
  DOMAIN (23)...(156): Protein tyrosine kinase
  misc_feature (1)..(156): Xaa is any amino acid
MQPHNDKDANQSDAGGAKSFGRYRVLGLLGEGAMGRVYLSEDPILKRRVAVKVIPTDRNLEPAVRREFLERFAVEAQACAMLNHPSIVSIYDAREENGAPWIAFEYVSGEHLDRLISXKTPLPFDQILRIAGDIAAAMRHAHGMGIVHRDIKRATS

SEQ ID NO: 1457 - DNA, 879 bp, Unknown
  Obtained from environmental sample
  misc_feature (1)..(879): n is a, c, g, or t
ttgaagaaattgacagggaaaaccggtgaagattatcaactgtatctaaagctgcgtgaagattacatcggttcgcctaccttctattttgacatggccgagtggttttacacgcacaacgacaaaaagctcgcgcttcgcgtgcttacctccatagccgacttagacctcgaaaacgcagctctatatcgattgctcggctataggctgaaagagtacggggagtacgcgatggaaaaattcgtttgcagaaaggtggttaagtggcgcccgatggaaccgcagagccatcgcgattacgccctcgccctcgccgacaacggagaggcgcaggcggcgctcgactcactctacggactgctcaaaaagacctactcggaaaatatcggcaaccgcagcaaagggatagacgagatcgtgattacggaaataaatcaattgatcgccaaaaacccgaaactgaacacgtcaaagatcgataccggccttataacaaacatcgcaatggatgttcgcgtggtcataaactggaatatgaacaataccgacatcgacctgcacgtgctggatccatacgatgaaatgtgctattaccgccacaacgcgacacaaatcggcggacgaataagcgccgacaatacaaacggctacgggcccgaacaattccttctgaaaaaagcggtaaagggaaaataccgcgtctccgtcaattactacggcgacaaccaatttaccatagccggaccgtcgacagttatggcggaaatctatacaaactacgccggcaagaccgaacagcgtaaagtcgtgtgcctgcaaatgtcaaacgcaaagaaaagcaacgggaagaatgtaacggtagcggaatttgatttttga

SEQ ID NO: 1458 - protein, 292 aa, Unknown
  Obtained from environmental sample
  misc_feature (1)..(292): Xaa is any amino acid
MKKLTGKTGEDYQLYLKLREDYIGSPTFYFDMAEWFYTHNDKKLALRVLTSIADLDLENAALYRLLGYRLKEYGEYAMEKFVCRKVVKWRPMEPQSHRDYALALADNGEAQAALDSLYGLLKKTYSENIGNRSKGIDEIVITEINQLIAKNPKLNTSKIDTGLITNIAMDVRVVINWNMNNTDIDLHVLDPYDEMCYYRHNATQIGGRISADNTNGYGPEQFLLKKAVKGKYRVSVNYYGDNQFTIAGPSTVMAEIYTNYAGKTEQRKVVCLQMSNAKKSNGKNVTVAEFDF

SEQ ID NO: 1459 - DNA, 342 bp, Unknown
  Obtained from environmental sample
  misc_feature (1)..(342): n is a, c, g, or t
gtgcgcctgtttcaactcgcaaagtccgcaatttattcaggtattacggttctgtgtagaacagccggcttaactcctgctgctctggacaaggcgtacattgcaggaggacttggattttacatcaaccttgaaaacgccgcgtacacagggttgcttccccgcgaaataatctccaaaacaaacgttagcggcaacacaagtttgaaaggcgctatccttagcctgacggacgaatcttttctgcaccgctgccgcgaaattatcgcccgcagtaccgtggtagacttggctgtggataaagagtttgccgatgcatttgcggaaaatatggtgatttaa

SEQ ID NO: 1460 - protein, 113 aa, Unknown
  Obtained from environmental sample
  misc_feature (1)..(113): Xaa is any amino acid
MRLFQLAKSAIYSGITVLCRTAGLTPAALDKAYIAGGLGFYINLENAAYTGLLPREIISKTNVSGNTSLKGAILSLTDESFLHRCREIIARSTVVDLAVDKEFADAFAENMVI

SEQ ID NO: 1461 - DNA, 816 bp, Unknown
  Obtained from environmental sample
  misc_feature (1)..(816): n is a, c, g, or t
atgcggcttacgagcggaatgtcggcgaaacgtggaaacattcttcttaaactgatacaaagcgcgggcggcaatatctccgccgctgaaagaggaattgtttatatagatgaaatcgacaagattgcccgcaaaggcgaaaatatttccattacacgagacgtttcaggcgagggcgttcagcaggcgctcttaaaaataatcgaaggcactgtcgcctctgttccgcctcaaggcggcagaaaacatcccaatcaggaaatgatacggattgacacgacaaatattctttttatttgcggcggagcttttgtaggactggataaattaatcgctcagcgtgttgtcaatcacccgctgggctttggagcggagacaggcggcggagaaaaatctttaagagaactttacgacgcaatgcaccccgacgatttaatccgtttcggcatgatacccgaatttatcggaaggcttccgattaccgtcggtcttgaagaattaaaactcgaagacttgaagcggattatcacggagcctcgcaacgctatcgtgcgccagtatcaggcgtctttggcttacgacaatgtaaaacttgagtttacggagaaggctatcgacgctatagcggacaaagcgattaaacaaaaaacaggcgctcgcggattaagagcgattgtagaaaaaatgatgacggacattatgtttgaaattccttcgatacagggcgagaaaaaaataattatttcccaagatacagttgaaaaatcagaaccgccgcagataatatatctggagcaaaagcaaaagagcgcataa

SEQ ID NO: 1462 - protein, 271 aa, Unknown
  Obtained from environmental sample
  DOMAIN (2)...(161): ATPase family associated with various cellular activities (AAA)
  misc_feature (1)..(271): Xaa is any amino acid
MRLTSGMSAKRGNILLKLIQSAGGNISAAERGIVYIDEIDKIARKGENISITRDVSGEGVQQALLKIIEGTVASVPPQGGRKHPNQEMIRIDTTNILFICGGAFVGLDKLIAQRVVNHPLGFGAETGGGEKSLRELYDAMHPDDLIRFGMIPEFIGRLPITVGLEELKLEDLKRIITEPRNAIVRQYQASLAYDNVKLEFTEKAIDAIADKAIKQKTGARGLRAIVEKMMTDIMFEIPSIQGEKKIIISQDTVEKSEPPQIIYLEQKQKSA

SEQ ID NO: 1463 - DNA, 501 bp, Unknown
  Obtained from environmental sample
  misc_feature (1)..(501): n is a, c, g, or t
gtggcggcgcggatattggccgggaaggagttcatcatacacgacaagggtgaatcgctgtggacgctgaccgcttcgtccgacttcgccagagggcttgcgggactcgtggggaacaaagcggccatcggtgaaacgttccacatcacaagcgacgaggctctaagttggaacgacatctacaaggaacttggcgcggcgctgggggcggagaaggtgaacgcgatacatataccgactactttcatcgtgaaaagataccccgacgcccgcgggaaacttttgggagacaaggcggagaacgcggtgttcgacaactctaagatcaaaaagtttgttcccggattcaaatgcgaaaaaaacttcgcgacggcgatccgcgagtccgtcgcttggttcatggaaaagccggagcggcaggagattgatttagatgaggataaacttattgaggcaatggtgggagcttggagtcggtattgcctaagatcgaatatataa

SEQ ID NO: 1464 - protein, 166 aa, Unknown
  Obtained from environmental sample
  misc_feature (1)..(166): Xaa is any amino acid
MAARILAGKEFIIHDKGESLWTLTASSDFARGLAGLVGNKAAIGETFHITSDEALSWNDIYKELGAALGAEKVNAIHIPTTFIVKRYPDARGKLLGDKAENAVFDNSKIKKFVPGFKCEKNFATAIRESVAWFMEKPERQEIDLDEDKLIEAMVGAWSRYCLRSNI

SEQ ID NO: 1465 - DNA, 378 bp, Unknown
  Obtained from environmental sample
  misc_feature (1)..(378): n is a, c, g, or t
atgggaacgaaaagattgcttattgttgacgataaacgtgagatccgccagctcgtgcgagccacccttgagttcgacgggtgggaggtctttgaggcggagaccggggacggcgccgttacggctgcggcgcagcacaagccggacttggtcattatggacatgatgatgcccggcacaatcgacggcatggaggccactcggcgcataaaggcggcgccggagacggccgattgcaaggtcgttatgctcagcggctcggacatagagttgcgcgaaacggcgcttgcggccggggtcgcggaattcattcagaaacctttcagcccgctcgacctaatggataagatcggggaactgtttgggaataaagcctaa

SEQ ID NO: 1466 - protein, 125 aa, Unknown
  Obtained from environmental sample
  DOMAIN (4)...(118): Response regulator receiver domain
  misc_feature (1)..(125): Xaa is any amino acid
MGTKRLLIVDDKREIRQLVRATLEFDGWEVFEAETGDGAVTAAAQHKPDLVIMDMMMPGTIDGMEATRRIKAAPETADCKVVMLSGSDIELRETALAAGVAEFIQKPFSPLDLMDKIGELFGNKA

SEQ ID NO: 1467 - DNA, 591 bp, Unknown
  Obtained from environmental sample
  misc_feature (1)..(591): n is a, c, g, or t
ttgaaacggattccaacaggcgtttttatttttgtcgtgggtggcggagggcctgcgcggatatggcagaacgcttatcgggaagtttcagcgggcggcgtaaaagacgaagaagcggactggatagggattatggctacaagattgaacgcgcaattaataaaagcgattatgggtgagtggtgcacgcaggaagtggttactaacccgcgtgaggttgaccccctgacggggcatgtgcttgtagccgccggctggaaaccggggttttctacggattacgacgcggtattgttagctgaacgttttggcgctaaaacgctgataaacctttcaaatatagaaaaagtttacacggcggatccaaagaccgacccaaatgcccgcccaatcgataaaataacatgggctgattttagagctatggtcggcgatgaatgggttcccgggaaaaatgttccgtttgatccggttgccagccgccatgcggagaaaatcggcttaaaagttatttgcgccgccggcaaaaatcttgacaacttaagaaaaattattaatgacgaagattttaccggtactacgatttattag

SEQ ID NO: 1468 - protein, 196 aa, Unknown
  Obtained from environmental sample
  DOMAIN (1)...(174): Amino acid kinase family
  misc_feature (1)..(196): Xaa is any amino acid
MKRIPTGVFIFVVGGGGPARIWQNAYREVSAGGVKDEEADWIGIMATRLNAQLIKAIMGEWCTQEVVTNPREVDPLTGHVLVAAGWKPGFSTDYDAVLLAERFGAKTLINLSNIEKVYTADPKTDPNARPIDKITWADFRAMVGDEWVPGKNVPFDPVASRHAEKIGLKVICAAGKNLDNLRKIINDEDFTGTTIY

SEQ ID NO: 1469 - DNA, 363 bp, Unknown
  Obtained from environmental sample
  misc_feature (1)..(363): n is a, c, g, or t
gtggtggtggatgaggtttttaccgtgagaacgaaggaggagttggccatgatagccgagaagagtcctgtattggagaaagccgccgcccgtttgaccgaggtgtcggaggacatgcacacgcgtcatcgtttagagagttaccgtctctacgagatggatcagcgggtcaaggcgaaggtggcaaagagggaggcggaggaggagatgaggatggcggaggagaaagccatggagaagggcatgaagaagggcatggaaaagggcatggaaaaaactatggaactcattgaacaagggtacactttcgacgaaattaaaaagatattgcgggacggtggcggtcaagggcaggaagcgtaa

SEQ ID NO: 1470 - protein, 120 aa, Unknown
  Obtained from environmental sample
  misc_feature (1)..(120): Xaa is any amino acid
MVVDEVFTVRTKEELAMIAEKSPVLEKAAARLTEVSEDMHTRHRLESYRLYEMDQRVKAKVAKREAEEEMRMAEEKAMEKGMKKGMEKGMEKTMELIEQGYTFDEIKKILRDGGGQGQEA

SEQ ID NO: 1471 - DNA, 381 bp, Unknown
  Obtained from environmental sample
  misc_feature (1)..(381): n is a, c, g, or t
atggtattccgctttatctccgagaggtggaaagctgcgggctgctctatgaagcagcaggcgcagatgacgatcgcggctgaggaggtgttcgtcaatatcgccagctacgcctacggccaaatgagcggcggcgctaccgtgcgcgtggcggtcggcgacgagatcatggtcgagttcgaggacggcggaaggccctacaaccccatcgccagaaaagacccggacatcactataggcactgagaaacgcgaggtgggcggcctcggcgtcttcatggtcaagaagctcatggacagcgtggagtacaagcgcgataaagacaagaatattttgacgctgcgtaaaaaacttgcgccgacgctggccatggctaaataa

SEQ ID NO: 1472 - protein, 126 aa, Unknown
  Obtained from environmental sample
  misc_feature (1)..(126): Xaa is any amino acid
MVFRFISERWKAAGCSMKQQAQMTIAAEEVFVNIASYAYGQMSGGATVRVAVGDEIMVEFEDGGRPYNPIARKDPDITIGTEKREVGGLGVFMVKKLMDSVEYKRDKDKNILTLRKKLAPTLAMAK

SEQ ID NO: 1473 - DNA, 585 bp, Unknown
  Obtained from environmental sample
  misc_feature (1)..(585): n is a, c, g, or t
gtgataaaaaaaattggaatgcctgttaaatacaaattgtttttcctgctgctgccttttttaatactgattaccgtattcgcttatcttcctttggcggggtggcgttacgcgttttttaactaccgtccggggcttcctcttagattggcggattttgccgggttcaagtggttccaatccgttatttcaagccaggcgcggagatcggaagttgtccgtgtaatgaaaaacacgcttgccatgagcggacttggaattttaacctcatggattcccgttttattcgcggttctgctcaccgaattcaaaaatgagcgttataaaaagatagtgcaaacacttaccaccgtgccgaattttataagctgggtaatggtttattcattcgcgtttatgcttttttccgttgacgcgggccttataaaccgcctgcttattgatttgggttttatcggcaagggcgtgaattttctgctgtccggaaatcatatctggcttaagatgacggcctggggcatatggaagggattaggctggggcgcgatttttacctgccccatcgcctcgtccgatctgtcatga

SEQ ID NO: 1474 - protein, 194 aa, Unknown
  Obtained from environmental sample
  SIGNAL (1)...(28)
  misc_feature (1)..(194): Xaa is any amino acid
MIKKIGMPVKYKLFFLLLPFLILITVFAYLPLAGWRYAFFNYRPGLPLRLADFAGFKWFQSVISSQARRSEVVRVMKNTLAMSGLGILTSWIPVLFAVLLTEFKNERYKKIVQTLTTVPNFISWVMVYSFAFMLFSVDAGLINRLLIDLGFIGKGVNFLLSGNHIWLKMTAWGIWKGLGWGAIFTCPIASSDLS

SEQ ID NO: 1475 - DNA, 711 bp, Unknown
  Obtained from environmental sample
  misc_feature (1)..(711): n is a, c, g, or t
gtggaaaacatacgccgcttcgcgatagaggagctgggcttaaaaaagagcaaaaattatacccgttatgtggaacttgacagggattatttagcggcggtggtttccgcatccgccaaagactcgtttaagcgctacgaatggtggtttccggtagttggcaatgttccctacaagggttttttcaatgtcgcggacgccaggaaagagcgggcaaaacttgaaaaaaaagatctggatgtgtgggttcggggcgttgacgctttcagtaccctgggctggtttcgtgatccactctactcttacatgaagaagtactctgaccgttctttggctgacctcatcatccatgagctgcttcacgcaacggtattcctaaagggccagtcccagtttaacgaagagcttgctgaattcgtggggacagagggatcgcggctttacatggaaaagacaggccagtctgtaaacgattccgatgccgctgacgcccaggcggacagagcggcctattctgtttttatccggggcctcattgccgagctggatgaactgtacaaaactgatttgcccagagatgaaaagctgcaaagaaaatcggagattattgaagctgccaaggccaattttagcaccagctacgaagagaattttaaaacagacaattatcgcggctttagcgaactgccggtgaataacngcgtatcttga

SEQ ID NO: 1476 - protein, 236 aa, Unknown
  Obtained from environmental sample
  misc_feature (1)..(236): Xaa is any amino acid
MENIRRFAIEELGLKKSKNYTRYVELDRDYLAAVVSASAKDSFKRYEWWFPVVGNVPYKGFFNVADARKERAKLEKKDLDVWVRGVDAFSTLGWFRDPLYSYMKKYSDRSLADLIIHELLHATVFLKGQSQFNEELAEFVGTEGSRLYMEKTGQSVNDSDAADAQADRAAYSVFIRGLIAELDELYKTDLPRDEKLQRKSEIIEAAKANFSTSYEENFKTDNYRGFSELPVNNXVS

SEQ ID NO: 1477 - DNA, 837 bp, Unknown
  Obtained from environmental sample
  misc_feature (1)..(837): n is a, c, g, or t
ttgagcgcgattaaaagcggcgaaaacaacaaggtgcgggaattcccgcttgggccgtttcttgcccaaatggacgctcttgtcaggcaaggagtgaaaacttttaagtttttggacagaactttcaatatcaacatagaccgcgcccgcaaaataatggaattttctcttgaaaagctagaagaaaaaaatgagattgtcgtccactttgaaatggttccctccctctttccgcctgccctgcgcgaaactctttccctctttccgcccggcagcctgcggctggaaatcggtattcaaacgctgaatccggaagttgccgcccgcattaaccgcgtcggctgtcaaaatcaatccgaaaaagagttggatgccgtccgcttcctccgcgaaaaaacaaacgccattatccacgcggacctaatcgcggggcttcccggcgaggacatcgcgtccttcggcaatggtttcgaccgcctgcttgcctgcctcgtttcgtccgggacggataacatggaaattcaggtcggtattttaaaactgcttcccggctctcccatatcccgccacaatgatacttttggaatggtttacgattctttgcccccatacgaagtcagggaaacttccgccataagcgccggtgattttttacgcataaaaaacttcgcccgtttctgggaaataattgttaaccgcaaactttcggcctttgacgctaaaatttttacttttgaaaaattttcggccatgtcagactcactttacgcgcgttttggcaaaaattggggaatagataaaaatgaattgctggaagccgtaaaaaacttaatatga

SEQ ID NO: 1478 - protein, 278 aa, Unknown
  Obtained from environmental sample
  misc_feature (1)..(278): Xaa is any amino acid
MSAIKSGENNKVREFPLGPFLAQMDALVRQGVKTFKFLDRTFNINIDRARKIMEFSLEKLEEKNEIVVHFEMVPSLFPPALRETLSLFPPGSLRLEIGIQTLNPEVAARINRVGCQNQSEKELDAVRFLREKTNAIIHADLIAGLPGEDIASFGNGFDRLLACLVSSGTDNMEIQVGILKLLPGSPISRHNDTFGMVYDSLPPYEVRETSAISAGDFLRIKNFARFWEIIVNRKLSAFDAKIFTFEKFSAMSDSLYARFGKNWGIDKNELLEAVKNLI

SEQ ID NO: 1479 - DNA, 696 bp, Unknown
  Obtained from environmental sample
  misc_feature (1)..(696): n is a, c, g, or t
atgcaattctacaaagggaaaaagcttcttccgaatttgttcagggacgagaaccgcatcaacagcatacagggattgtatgttccgttctggctttttgacgccaaagctcagggtagcgtaagttataaggcaaccagagtttcagcctggagcgacagtgaatacaactatacaaagaccgatttttattcggtgcaaagagaaggcagtttaggttttgaaaagatatcggtagacgggtcagcaaaaatgggcgacgactttatggactccatagagccttttgattacggcaagctgacaaagtttcaaaccgcgtacctttccggctatattgccgaaaagtacgatgtcagtattgaggccagtaaagaaagggctataaagagaatcaagaattccgtagaatccaaatttgcctcatccgtaacgggttattctacggttacaaaggaacgctccagcattaacgttgaaaaccccaaggtggcgtattcgctctttccggtttgggttttaaacagcaagtacaagaatgaaagctaccagttcattatgaacggtcagtccgggcttattgtaggcaagcttcctgtagataagggcaaggtttttaaatactggctgctttatatgcttggattcggcgcggctttttcccttattatcgcgttactacagatattcctttaa

SEQ ID NO: 1480 - protein, 231 aa, Unknown
  Obtained from environmental sample
  misc_feature (1)..(231): Xaa is any amino acid
MQFYKGKKLLPNLFRDENRINSIQGLYVPFWLFDAKAQGSVSYKATRVSAWSDSEYNYTKTDFYSVQREGSLGFEKISVDGSAKMGDDFMDSIEPFDYGKLTKFQTAYLSGYIAEKYDVSIEASKERAIKRIKNSVESKFASSVTGYSTVTKERSSINVENPKVAYSLFPVWVLNSKYKNESYQFIMNGQSGLIVGKLPVDKGKVFKYWLLYMLGFGAAFSLIIALLQIFL

SEQ ID NO: 1481 - DNA, 480 bp, Unknown
  Obtained from environmental sample
  misc_feature (1)..(480): n is a, c, g, or t
atgagaagaaaagacaaagagataatcgagattgatgaaaaacttgagattattgcaaggtgtaagatttgcaggcttggattatctgaaaataattacccgtatgtcgtaccgttaaattatggattttcttatgatgacggaagattaactttatatttccattgcgctttagagggtaaaaaggttgatattatcagaaaaaacaataatgcgtgttttgaaattgattgtgacacaaaactgattgaaggcgaaaaaccgtgccgttacggttatgaattcaaaagcgtaatcggttttgggaaaattatttttcttgataccgatgatgaaaagattgccggtttaaattatttgatgaaacaacagaccggaaacgacgtaaattatgatttcaatgaaaatgaattaaataatgttgtggtttttaaactgtcggttgatgaatttacgggaaagcaaaagataataaaatag

SEQ ID NO: 1482 - protein, 159 aa, Unknown
  Obtained from environmental sample
  DOMAIN (11)...(87): Pyridoxamine 5'-phosphate oxidase
  misc_feature (1)..(159): Xaa is any amino acid
MRRKDKEIIEIDEKLEIIARCKICRLGLSENNYPYVVPLNYGFSYDDGRLTLYFHCALEGKKVDIIRKNNNACFEIDCDTKLIEGEKPCRYGYEFKSVIGFGKIIFLDTDDEKIAGLNYLMKQQTGNDVNYDFNENELNNVVVFKLSVDEFTGKQKIIK

SEQ ID NO: 1483 - DNA, 663 bp, Unknown
  Obtained from environmental sample
  misc_feature (1)..(663): n is a, c, g, or t
atgtccgctccgccgaagcccgccgacatcgaagaaataaaagcgtactctatcgttaacgcggtggcttccgtatcgtctcgctctgttacaaaaaccctgcctgacaatttgcaggtgaaaaaacgtgtggcgttaatggacttcggagcaaaacggggaatagcgaacgcccttgcggctcgaggctgtgaagtgtggacttttccgcatgacacaaacgctcaagatattctaaaaatgaaacctgacggaatcatgttgagtaacggacccggagaccctgcggaaaaagcaaataacggaattattgaaacgcttcgtactttgcaaaatagtaatgttacaatcttcggtatatgtctcgggcatcaactaatggctcttgcaaacggctacacaacaaaaaaacttaaattcggtcatagaggagctaatcagcccgttaaggaaaattcaacagggcgtgtctatatcacaagtcaaaaccacggatacgctgttgttacagataacggttcttttgtgaacgtaaacgacggcacttgcgaaggactggattacggaaaatctttttcagtacaatttcaccccgaagcgtgcggcggtccgcttgacacgtcttttttgtttgatcgttttatcgaaaggatgggcaaatga

SEQ ID NO: 1484 - protein, 220 aa, Unknown
  Obtained from environmental sample
  DOMAIN (46)...(199): Peptidase C26
  misc_feature (1)..(220): Xaa is any amino acid
MSAPPKPADIEEIKAYSIVNAVASVSSRSVTKTLPDNLQVKKRVALMDFGAKRGIANALAARGCEVWTFPHDTNAQDILKMKPDGIMLSNGPGDPAEKANNGIIETLRTLQNSNVTIFGICLGHQLMALANGYTTKKLKFGHRGANQPVKENSTGRVYITSQNHGYAVVTDNGSFVNVNDGTCEGLDYGKSFSVQFHPEACGGPLDTSFLFDRFIERMGK

SEQ ID NO: 1485 - DNA, 405 bp, Unknown
  Obtained from environmental sample
  misc_feature (1)..(405): n is a, c, g, or t
atggcgtatctggatgaatgggtagcaggactttcagatggagttgatacctatattggcgagagaggaattttactttcaggcggccaaaaacagcgcgtggcaatcgcaagagcctttattaaaaatgcaccgataataattcttgatgaggcgacatccgcacttgataacaaatctgaagcaattgtgcagaaagcgattgacaacttaatgcaggataaaaccgtgttcgtaatcgctcacaggctttcaacaatccaaaatgccgacaggattgcggtaatcaacaaaggacaactcgtcgaactgggaactcaccatgaacttctcgcaattcccaagggtgaatacagacaactctatgaaatgcagcttagaggaacaaaagaaggtgttatttaa

SEQ ID NO: 1486 - protein, 134 aa, Unknown
  Obtained from environmental sample
  DOMAIN (1)...(99): ABC transporter
  misc_feature (1)..(134): Xaa is any amino acid
MAYLDEWVAGLSDGVDTYIGERGILLSGGQKQRVAIARAFIKNAPIIILDEATSALDNKSEAIVQKAIDNLMQDKTVFVIAHRLSTIQNADRIAVINKGQLVELGTHHELLAIPKGEYRQLYEMQLRGTKEGVI

SEQ ID NO: 1487 - DNA, 492 bp, Unknown
  Obtained from environmental sample
  misc_feature (1)..(492): n is a, c, g, or t
atggcgaagaccataatggcgtttgccatcacggtacttacaataattatttttaccccattcggattccttttcattattttgtactttcttggcttaaaaaaacctatggcctggatgatatataaaattggccagggttgggcgcggtgtgttatatgggttacaggctgcacaatggaggttataggaagagaacgcatccccaaaaaaggcggcgtttgtttcgtaagcaaccatgtggggatttttgacatcattcttacgcttgcctacgcgggccgccctttcggcttcatcgcaaaaaaagagcttctttatgtcccattcatcgatatatggatttctatgttaggcggcctttttattgaccgcaaaaatatccgaaaagccaaaaaaactatcgatctcggtattcaaaaactacaaaaaggctggtgtatgctatcttcccaaggacgccagcaggcaaggctctcatatcgnntttaa

SEQ ID NO: 1488 - protein, 163 aa, Unknown
  Obtained from environmental sample
  DOMAIN (59)...(162): Acyltransferase
  misc_feature (1)..(163): Xaa is any amino acid
MAKTIMAFAITVLTIIIFTPFGFLFIILYFLGLKKPMAWMIYKIGQGWARCVIWVTGCTMEVIGRERIPKKGGVCFVSNHVGIFDIILTLAYAGRPFGFIAKKELLYVPFIDIWISMLGGLFIDRKNIRKAKKTIDLGIQKLQKGWCMLSSQGRQQARLSYRX

SEQ ID NO: 1489 - DNA, 408 bp, Unknown
  Obtained from environmental sample
  misc_feature (1)..(408): n is a, c, g, or t
atggacgaaaaaagcattgaagagctgatagagatagacacaaatagctggaaaaacatcaatacagaaacagaagctcttatgaaagagataaaggcagccgggtatctggtcgggatactctcaaatatgccgagtgattttcttgcctgggcaagaaaaaatcttcctgttttttcccttccgcatatcgggctttattcatgcgacgcaaacctcgtaaagcccgaagaggcaatttaccgaaaattgctttccatgctcggcgttgaagctgacgagcttgttttttttgatgataaaattgaaaatatcaaaggcgccgaagctataggcataaaagccatactctgggagaattcaaaagaagcccggcgggaattattatccctgggcttaaaactgtag

SEQ ID NO: 1490 - protein, 135 aa, Unknown
  Obtained from environmental sample
  misc_feature (1)..(135): Xaa is any amino acid
MDEKSIEELIEIDTNSWKNINTETEALMKEIKAAGYLVGILSNMPSDFLAWARKNLPVFSLPHIGLYSCDANLVKPEEAIYRKLLSMLGVEADELVFFDDKIENIKGAEAIGIKAILWENSKEARRELLSLGLKL

SEQ ID NO: 1491 - DNA, 717 bp, Unknown
  Obtained from environmental sample
  misc_feature (1)..(717): n is a, c, g, or t
gtggcagcaacggaattttccattatggagcagttggagaatggaataaaagatgctggaatgcttgcctattttcaaagttatacaaatacttatgcttctgttcaaaaacttcgcgagatttttatgcctattattttgcacaacagagttgcaggaattgccattggaacccgcccagattgtttaaacctaggtgttgtagaattacttgtggaactgaacaatataaaacccgttattgtagaaattggagtacaaagcgcaaacaacaaaaccttgaaaaacataaacagaaaccacaccacagaatgcacccgcgcatctgccttgctctgtaaaaattcaaagctcctgataactgctcatataataatagggttgccgcacgaagatatagacgattttacaaacaccgcaaaattggttagagattgcaaattttccgctgttaaaattcaccctttgcacatagtgaaaggaacaagatttgcagaggaatacgaaagaggcaaaataaagcttttgtctatggacgattattgcagggcggctgcggaagttattcgcattgtgcagcccgccgttgccatagaaagggtgagcgcagaatcacccgcagatatacttgtagcaccaacttggtgcgggcagagggaaaaaatttggaaaggcattagtgcccaattgcttgcggcgggtttgctggttcagtag

SEQ ID NO: 1492 - protein, 238 aa, Unknown
  Obtained from environmental sample
  misc_feature (1)..(238): Xaa is any amino acid
MAATEFSIMEQLENGIKDAGMLAYFQSYTNTYASVQKLREIFMPIILHNRVAGIAIGTRPDCLNLGVVELLVELNNIKPVIVEIGVQSANNKTLKNINRNHTTECTRASALLCKNSKLLITAHIIIGLPHEDIDDFTNTAKLVRDCKFSAVKIHPLHIVKGTRFAEEYERGKIKLLSMDDYCRAAAEVIRIVQPAVAIERVSAESPADILVAPTWCGQREKIWKGISAQLLAAGLLVQ

SEQ ID NO: 1493 - DNA, 333 bp, Unknown
  Obtained from environmental sample
  misc_feature (1)..(333): n is a, c, g, or t
ttgtcgctgataggaaaacgcggactcgtcgacgtggccacgctatgccgcgacaaggcggtctacctgcgcgaacggatcaaagagtcaatcccgtcaataaagacgtacgacggcgcgccgatattcaacgagttcgtggtcgatctgccgataaacgcggacaaatgcgcggaagcgatgctggccaaaggcttcgcggcgggaattccgatcggtcaatactacaactacaacggcgcggacaaggcgctgctggtggccgtgacagaaaagaggacgcgcagggagattgacgcgtttgtcgacggtctgcggggtgtcgttgggtga

SEQ ID NO: 1494 - protein, 110 aa, Unknown
  Obtained from environmental sample
  misc_feature (1)..(110): Xaa is any amino acid
MSLIGKRGLVDVATLCRDKAVYLRERIKESIPSIKTYDGAPIFNEFVVDLPINADKCAEAMLAKGFAAGIPIGQYYNYNGADKALLVAVTEKRTRREIDAFVDGLRGVVG

SEQ ID NO: 1495 - DNA, 420 bp, Unknown
  Obtained from environmental sample
  misc_feature (1)..(420): n is a, c, g, or t
ttgggcggcaagttttttgagatgaccttgttgaacgacgccgccctgaaagcatatttagacgaatttacgcacaatgtgcagaacgccgataaaaccatctacgaaaactacattccccttgattcttcggtcgaaagctggttcgcaaaagattgcgagagcattgaaaacgtcgaattttacttcaagctgccgacttggtttaagatttccacccctataggcaactacaacccggattgggcgatagttttcaaaggcgttcggaaagtatactttatcgccgaaacaaagggcgagggagagttgcgcggcggtgaagagctgagaatcaaatgcgggaaagcgcattttagggagtttgagggtgttgtctatgaacgcgtatcaaaagtcagcgacatcgtctcgcaatag

SEQ ID NO: 1496 - protein, 139 aa, Unknown
  Obtained from environmental sample
  misc_feature (1)..(139): Xaa is any amino acid
MGGKFFEMTLLNDAALKAYLDEFTHNVQNADKTIYENYIPLDSSVESWFAKDCESIENVEFYFKLPTWFKISTPIGNYNPDWAIVFKGVRKVYFIAETKGEGELRGGEELRIKCGKAHFREFEGVVYERVSKVSDIVSQ

SEQ ID NO: 1497 - DNA, 381 bp, Unknown
  Obtained from environmental sample
  misc_feature (1)..(381): n is a, c, g, or t
gtgttacgcgctatcatgccgagcagggtagattttcccacgcccgagccggcgaatatgcccagccgctggcccttccctacagccaaaaggccgtcaatggcacgtacgcccgtaacaatgcgatcggtaatccgcctgcgtttaaggggatccggcgggctcgccagcgccgggtacattacaggggaatcaatatcccccttatcatcaataggagtccccagggcgttcagcacccggcctaatagttttgtggacacagggacttcaaggcggtttccctgggcaatgacaaggttgcccacttccaagccgtcggtttcctcgaacaccataagctgcacgatttcgtttctaagcccgacaacctcggcataa

SEQ ID NO: 1498 - protein, 126 aa, Unknown
  Obtained from environmental sample
  misc_feature (1)..(126): Xaa is any amino acid
MLRAIMPSRVDFPTPEPANMPSRWPFPTAKRPSMARTPVTMRSVIRLRLRGSGGLASAGYITGESISPLSSIGVPRAFSTRPNSFVDTGTSRRFPWAMTRLPTSKPSVSSNTISCTISFLSPTTSA

SEQ ID NO: 1499 - DNA, 807 bp, Unknown
  Obtained from environmental sample
  misc_feature (1)..(807): n is a, c, g, or t
atgttttgggagaggctaaacttgaaacaattcattctaaacagcaagcctgataaaaacgggcatcttcgctttgaaggcggcgactaccgctaccttgcgagggtgcgccgtcttgcacccggtgaatactttccggctttgcttcccgataccgctgacatcgtaaatgtgcgtgtgttgtcggttgataaccatgtgctgataggtgaaatatccaatgaaaaacctgtccaaaaagaatcttctgtttctgaaaatatattaccacccataatcttgtttcagtccctgccgaaaggagaaaaaatggaccttatcgtcaggcaggccgccgaagggggggtagagcagatcattccgtttatgtcggaattctcggcaattaaaaataaaaattcatggcacaaattcacacgatgggaaaagattattaaggaggctcggcagcaaagcggctcgctgacgccgaccgttattcgacagcctttgtctattgacgggttttttgccttttgggaagaattaaactcgcagaaccccggcgttctcgggctgctgtttcatcatttgccgcttgcaaagaccagcctccacggttatctttataaaaagcccgaaattgtcgcgctggcaatagggcctgaaggcggtttttcagattccgaggcgcagaggtttatagccgccgggttcaagccgttaacaatcggggaaacaatactccgcacggagacagcggcgctgtacgcccaggctgccgtgcgggttattttattggagagggattcgtgngagatgaaataa

SEQ ID NO: 1500 - protein, 268 aa, Unknown
  Obtained from environmental sample
  DOMAIN (23)...(257): Protein of unknown function (DUF558)
  misc_feature (1)..(268): Xaa is any amino acid
MFWERLNLKQFILNSKPDKNGHLRFEGGDYRYLARVRRLAPGEYFPALLPDTADIVNVRVLSVDNHVLIGEISNEKPVQKESSVSENILPPIILFQSLPKGEKMDLIVRQAAEGGVEQIIPFMSEFSAIKNKNSWHKFTRWEKIIKEARQQSGSLTPTVIRQPLSIDGFFAFWEELNSQNPGVLGLLFHHLPLAKTSLHGYLYKKPEIVALAIGPEGGFSDSEAQRFIAAGFKPLTIGETILRTETAALYAQAAVRVILLERDSXEMK

SEQ ID NO: 1501 - DNA, 408 bp, Unknown
  Obtained from environmental sample
  misc_feature (1)..(408): n is a, c, g, or t
atggatcagatcggccgagcgctgaatctcggcaggccgggagtgctgcacggccagttcagcatgctgctgcaagacgcggacgggcagatagagccttcccattccgtctccgcgggcctcgactatcccggcgtgggcccggaacacgcctggctgcaccgctccgggcgcgccgcataccatatcgtcactgacgcttcggccctgcgcgcctttgaagtcctctcccggaaagagggcatcatcccggcgcttgagtcctcccatgccctggccttcgtgctggataacccttccgcctttgccgaaggttctcatgtagtggtgaacctttccggcaggggagacaaggacctcggcattgtgtcccaacatcttgccttgcttcaaggagacgcggcatga

SEQ ID NO: 1502 - protein, 135 aa, Unknown
  Obtained from environmental sample
  misc_feature (1)..(135): Xaa is any amino acid
MDQIGRALNLGRPGVLHGQFSMLLQDADGQIEPSHSVSAGLDYPGVGPEHAWLHRSGRAAYHIVTDASALRAFEVLSRKEGIIPALESSHALAFVLDNPSAFAEGSHVVVNLSGRGDKDLGIVSQHLALLQGDAA

SEQ ID NO: 1503 - DNA, 645 bp, Unknown
  Obtained from environmental sample
  misc_feature (1)..(645): n is a, c, g, or t
atgccatacatgaatagttattcagagaaagcaagaaaaaaaggtttacaactaataaacgcttctgaaaaaggcgatattgaagccgtaaaattattgattaagaaaggtgtttatatccacgtgcagggtagggaaggcatgtgcgcccttgtggctgccgcgtataataaccatcttgaaattgttgatttattgattgatgcgggcgcggatgtcaacatgaaggataattccctgcaaagcgcatatttaatttcaacatctgaaggatatacggagctgctgaagaaaacactcaaagccggtgcggatgtccattgtacagacagttacaatggaacagggttgatccgcgccgccgaccgtgggcatattgaaataataagggaacttttaaaaacagatatccgtgtaaatcatattaacaggcttgggtggactgcattacttgaggcaatcattttgggcgacggagggagacggcatactgaagttgtgcgtcttttggttgattccggagctgatgttaatttgccggataaggacggagttaccccgttggcgcatgctaagagtaagggttatactgacattatcaagatattggagaattctggggcaatggagttactccccctttaa

SEQ ID NO: 1504 - protein, 214 aa, Unknown
  Obtained from environmental sample
  DOMAIN (145)...(182): Ankyrin repeat
  misc_feature (1)..(214): Xaa is any amino acid
MPYMNSYSEKARKKGLQLINASEKGDIEAVKLLIKKGVYIHVQGREGMCALVAAAYNNHLEIVDLLIDAGADVNMKDNSLQSAYLISTSEGYTELLKKTLKAGADVHCTDSYNGTGLIRAADRGHIEIIRELLKTDIRVNHINRLGWTALLEAIILGDGGRRHTEVVRLLVDSGADVNLPDKDGVTPLAHAKSKGYTDIIKILENSGAMELLPL

SEQ ID NO: 1505 - DNA, 345 bp, Unknown
  Obtained from environmental sample
  misc_feature (1)..(345): n is a, c, g, or t
ttgcgagcgacgcgttggcgatcctatggtaaacgattatcatatcgcggcgttaaccttgcgacaaaagcggaactggaaaaaatttcagattattcgtttaagataaacaaaatactgtctgaatatcttaaggatttgggcattgaattaattgattttaagcttgaattcgggcgcacaagcgacgggacaattgttctcgcggacgaaatatctcccgacacatgccgtttctgggacagtaagacgcacgaaaaactggacaaggaccgcttccgccgcgatttgggaggagtggaggacgcgtacaaggaaatattaaaaaggctgcttggagaataa

SEQ ID NO: 1506 - protein, 114 aa, Unknown
  Obtained from environmental sample
  DOMAIN (2)...(114): SAICAR synthetase
  misc_feature (1)..(114): Xaa is any amino acid
MRATRWRSYGKRLSYRGVNLATKAELEKISDYSFKINKILSEYLKDLGIELIDFKLEFGRTSDGTIVLADEISPDTCRFWDSKTHEKLDKDRFRRDLGGVEDAYKEILKRLLGE

SEQ ID NO: 1507 - DNA, 501 bp, Unknown
  Obtained from environmental sample
  misc_feature (1)..(501): n is a, c, g, or t
atggatatagcgtttggccataccaagatggactttgactgcctcggttcgcttattttggttaagaaattgttccctggtttcgctcttattaagagcaatagaattcacccagcggcgcaaaacatctttgatttttaccaaagatattttgattttcttgcccctaaagatatctcccgaaaaaggatcgataacattattatagttgatacctgtgcggcaagcatggtgagtgaatattacacccacgttagggattcccatccaacaataaagattattgatcatcattatatggaacaatgcgacattttgggcgcctgtgttgagggagggcgatttgtggcaaatacttcggtgcttgggaaaatggcgatggataggggaattacgcttgacagcgaggaagcaaccattgcccttactgcgatatatgccgatactgggcggcttatttacgagactgtaacgctggacgattatcaagttgccgcctga

SEQ ID NO: 1508 - protein, 166 aa, Unknown
  Obtained from environmental sample
  DOMAIN (4)...(146): DHH family
  misc_feature (1)..(166): Xaa is any amino acid
MDIAFGHTKMDFDCLGSLILVKKLFPGFALIKSNRIHPAAQNIFDFYQRYFDFLAPKDISRKRIDNIIIVDTCAASMVSEYYTHVRDSHPTIKIIDHHYMEQCDILGACVEGGRFVANTSVLGKMAMDRGITLDSEEATIALTAIYADTGRLIYETVTLDDYQVAA

SEQ ID NO: 1509 - DNA, 783 bp, Unknown
  Obtained from environmental sample
  misc_feature (1)..(783): n is a, c, g, or t
gtgaaactcaataagatttttattttatttgcggctgcggcaataatattgggtatattaaattcttactttataatgaaaacgcctgtatataacgccgtaaaatccgattatgacatggataccgtaataacggatttggaaaatatagctaaggaaagccacagcgcggcgaatcaggccgcgcttggggaagtcagggaatatttattatcacgcttttctgaaatgggtattggaacgtctgtaaaatcgtataccgtgaataattggtttggtgaatatgagatcaataatatttttgcgcaaattgacggtgattcgggaaatccttatgtcttgatcatggcccactatgattctgtgatggaaaacttgttaatggaacctactaaatcaaccggcgcggcggacgacgggtacggtgtggcaacactcctgcaaatagcacagcgatattcaaagaaggaaaagcggcttgtaaacggaattaagtttctcattactgattcggaagaaacaggtccgggagaaggttcaaaagccgaagtaatgaacaatctagatttttacagcgatgtatccctgattatcaatattgagggaagaggttttggcggcccggtttatatgtttcaaacctcaacaagaaacagggctgtaatggatttgtacagtaagacaaaaaacaagacggctaattcatttttattggggcttttcaggtttatgcctaattttacggatttgcagccgtttttggaaaagggctttcgggtataa

SEQ ID NO: 1510 - protein, 260 aa, Unknown
  Obtained from environmental sample
  SIGNAL (1)...(26)
  DOMAIN (111)...(260): Peptidase family M28
  misc_feature (1)..(260): Xaa is any amino acid
MKLNKIFILFAAAAIILGILNSYFIMKTPVYNAVKSDYDMDTVITDLENIAKESHSAANQAALGEVREYLLSRFSEMGIGTSVKSYTVNNWFGEYEINNIFAQIDGDSGNPYVLIMAHYDSVMENLLMEPTKSTGAADDGYGVATLLQIAQRYSKKEKRLVNGIKFLITDSEETGPGEGSKAEVMNNLDFYSDVSLIINIEGRGFGGPVYMFQTSTRNRAVMDLYSKTKNKTANSFLLGLFRFMPNFTDLQPFLEKGFRV

SEQ ID NO: 1511 - DNA, 729 bp, Unknown
  Obtained from environmental sample
  misc_feature (1)..(729): n is a, c, g, or t
ttggcatcggaaactgatcntgagaaacgacatgaactgataaaaggtatacgtaaggatgttatttcccttgagccatcgacaggcggagggtttcaatttatccgcattgattctctgaaagtacagcctccctcatggctggttaaagggctgattgagacagattcttttggttgcctatacggcgatcccggtaccggaaaatcatttatcggaatagaactttcttcatgcgttgcgactggaacgccgttttacggcttaccggtaaagaaggggccggttgtttaccttgccggtgaagggcaatccggcttgacgcgaaggttaaaggcgtggagcatagtccggggcgtttcattagaaggggcggcactttacacaaacagcaagccgttgtcactcattgacaataattcaatgattaccgtggttcaagccctggaacgccttgtcttggaaatcggccgttctccagccctggccatcttggacacatggagccgcgttctcggtggtgatgattccgccccatcggacgcggcggccggtgttgccgcgctcgatgatctgcgctcgcggtttgggaactttgccgcccttataatacaccatgaggggcatacaaaaggccgggggcgcgggtggtctggcttgagggccgccgtagacgtggaacttcgggcagaactcgggaacgataaaatattacgcctgaagtactag

SEQ ID NO: 1512 - protein, 242 aa, Unknown
  Obtained from environmental sample
  misc_feature (1)..(242): Xaa is any amino acid
MASETDXEKRHELIKGIRKDVISLEPSTGGGFQFIRIDSLKVQPPSWLVKGLIETDSFGCLYGDPGTGKSFIGIELSSCVATGTPFYGLPVKKGPVVYLAGEGQSGLTRRLKAWSIVRGVSLEGAALYTNSKPLSLIDNNSMITVVQALERLVLEIGRSPALAILDTWSRVLGGDDSAPSDAAAGVAALDDLRSRFGNFAALIIHHEGHTKGRGRGWSGLRAAVDVELRAELGNDKILRLKY

SEQ ID NO: 1513 - DNA, 615 bp, Unknown
  Obtained from environmental sample
  misc_feature (1)..(615): n is a, c, g, or t
atgatgtactaccttgtccggcagtggcgcgccgactgggccgatgacagccttccgtttttgtttgtacaactgccgatgtacgcttcccgtgaagaagtggaatcggggaatcccccccggcactggtgtcttatgcgggaaagccagtatctcgcgtcgcttgatatcgcgcacagcggcatggcggttattatcgactgcggcgagtatgacaatattcacccgctggacaagcagacggtcggtttccgtttggctttacaggccctgcgcaaaatttacgaccagactgaaattgaagccgacggtccggtattctcatgggcggagacgacaaaaaacggcggcagcctgcgcctgcattttgatcacgcggaaagcggtcttgagtttcgcggcgaacctgccggatttgaaatcgccgccatgaagggcccctattataccgcgcatgcccgcgttgacggtaatgacgttgttatctcttcggataaaataacccatccctgccgcgcccgctatgcctgggccaaattcggccccacgcccctctatgcccaaaacggcctgcccgccatgcccttccgcacgcattttgatgagtctgtgtaa

SEQ ID NO: 1514 - protein, 204 aa, Unknown
  Obtained from environmental sample
  misc_feature (1)..(204): Xaa is any amino acid
MMYYLVRQWRADWADDSLPFLFVQLPMYASREEVESGNPPRHWCLMRESQYLASLDIAHSGMAVIIDCGEYDNIHPLDKQTVGFRLALQALRKIYDQTEIEADGPVFSWAETTKNGGSLRLHFDHAESGLEFRGEPAGFEIAAMKGPYYTAHARVDGNDVVISSDKITHPCRARYAWAKFGPTPLYAQNGLPAMPFRTHFDESV

SEQ ID NO: 1515 - DNA, 561 bp, Unknown
  Obtained from environmental sample
  misc_feature (1)..(561): n is a, c, g, or t
ttgggagcccggaattactactattttgtagctaccctgccttttatcgaatatggcgataaacctcccgtagcttcagaagagtttcgggaacagtgctatggcctcttgcatccggacgacgcggctctcattcgttattgttactatagccccccattggccgttgaaacggttcaacctacaggttcggagtttatcgaccttcttatggcaagggaacgtaccctgatgctgaatctggcctatctgcgggcggcaaggcttaaacgcccttctcccggggatccgccccacgatgtaccccgcgccgaggcggttgcaaaagccgcatttgagatgtccgacccgcttgaagccgcgattttcatagacaaatcccgctggggcgctttggatgatatggtggggatcgatctcttcggggtgaataatgttttcgcctatttgatgaagcttcagttgcttgaacggcggcagtgttttgacgccgaaatcggggctgtcaagtataaagaactttacgattcaatactgaatgcctacaaatccagggtttaa

SEQ ID NO: 1516 - protein, 186 aa, Unknown
  Obtained from environmental sample
  misc_feature (1)..(186): Xaa is any amino acid
MGARNYYYFVATLPFIEYGDKPPVASEEFREQCYGLLHPDDAALIRYCYYSPPLAVETVQPTGSEFIDLLMARERTLMLNLAYLRAARLKRPSPGDPPHDVPRAEAVAKAAFEMSDPLEAAIFIDKSRWGALDDMVGIDLFGVNNVFAYLMKLQLLERRQCFDAEIGAVKYKELYDSILNAYKSRV

SEQ ID NO: 1517 - DNA, 591 bp, Unknown
  Obtained from environmental sample
  misc_feature (1)..(591): n is a, c, g, or t
atgaaagaaagcgctgaacgtcgtcaaaaagaatttgaaaaagagatgaaagaaaggactgaaaggcatatagaatttgaaaaggaaattaaggaaagctctgaaaggcacaaagaatttgaaaaagagatgaaggagagtaaggctgaattcaatgaaaggcttgggaattatattaatctttttggcgatttcactgaatatactatgataccaaaactgcgtgaaaaatttagcgagttaggacttgattttcaaaagacaaccagaagagttagcgtcagggacagcaaaaacgatattttctttgaagtagacgctatgctggagaatggcgatacggcaatgctggttgaaataaaaaccgaacttacagttgagcgcataaataagcatataatccgccttgaaaaaatgcgaaaatattctgacatacgcggcgacaaacgaatatttataggcgcggtcgctggcgtcatattggacgatgaaacaaaaaattacgcattggatcagggtttctatttaattgaacccgctggccaagaccttagcattaccccgccaaacggaaagccaaaggaatggtag

SEQ ID NO: 1518 - protein, 196 aa, Unknown
  Obtained from environmental sample
  misc_feature (1)..(196): Xaa is any amino acid
MKESAERRQKEFEKEMKERTERHIEFEKEIKESSERHKEFEKEMKESKAEFNERLGNYINLFGDFTEYTMIPKLREKFSELGLDFQKTTRRVSVRDSKNDIFFEVDAMLENGDTAMLVEIKTELTVERINKHIIRLEKMRKYSDIRGDKRIFIGAVAGVILDDETKNYALDQGFYLIEPAGQDLSITPPNGKPKEW

SEQ ID NO: 1519 - DNA, 822 bp, Unknown
  Obtained from environmental sample
  misc_feature (1)..(822): n is a, c, g, or t
atgacactccaccccaaccgagcaggacgaaacaaatactttgagcagaactctgtattgctctccagcgatattctggcgtattacggccatcccaactcgcgcaacatgggtattttagggcgttactcgatagaagatctggataaactgctcacggagaaggcggcggaatacgaagaagtgagcgacggaagaagggttgttaaagctttttatttaatatacgggactgtatggcccggcggcgacatagggattttaagcaatgaaattcttatgaaatacattgattacggccttaaaaatgacattcttgtttttattgatcatcaaatcggaaagtatgatcccgttgaatcgcttaaaagaatgctgccgtacctgaaatatcccaatgtccatcttgcccttgatcccgaatggcgcacattaaaacccctggtagaaataggatcagtaaccgcggaagaaatcaacaccgcgcagcaggttatggaagactatattattaaaaacaacattcccggcgagcggatgcttgttatacaccaattcaactatgtaatgataaaaaaccgaagcgctgtaaaagccgatttcagcagggtgcgtcttgttcactgcgccgacggcttcggccatcccggaatgaagcgcgacacttacgcctttaacgctcttgcgagtaacatgccggttaaagggtttaaattgttttataattttaacattcccggcgcggggtatgatgatccgattatgacgccgaaacaggtttatgaattgaatccgcggccttatgtgattatgtatcagtag

SEQ ID NO: 1520 - protein, 273 aa, Unknown
  Obtained from environmental sample
  misc_feature (1)..(273): Xaa is any amino acid
MTLHPNRAGRNKYFEQNSVLLSSDILAYYGHPNSRNMGILGRYSIEDLDKLLTEKAAEYEEVSDGRRVVKAFYLIYGTVWPGGDIGILSNEILMKYIDYGLKNDILVFIDHQIGKYDPVESLKRMLPYLKYPNVHLALDPEWRTLKPLVEIGSVTAEEINTAQQVMEDYIIKNNIPGERMLVIHQFNYVMIKNRSAVKADFSRVRLVHCADGFGHPGMKRDTYAFNALASNMPVKGFKLFYNFNIPGAGYDDPIMTPKQVYELNPRPYVIMYQ

SEQ ID NO: 1521 - DNA, 411 bp, Unknown
  Obtained from environmental sample
  misc_feature (1)..(411): n is a, c, g, or t
atggaatgtgtgtttctcgacgcgacccaccgcagntatatggaagaaggctcatcctgtaacatcttctttttcttaaagtcaggcgagcttgtcacgccggagcttggagacacaatcctgcccggcattacccgcgcgagcatcatagagcttgcacgcgacaaaggcataaaagtgtccgaaaggcaaatttctattgacgaggtttttgccgagacaaaggaatgtttcgtcagcggaaccgcggcaggagccacccccatcacttcccttacatataaaggaaagaaagcggtctttaacggcggaaaagtcggcgaatttaccgctgatatccgcgataccatcaaaggcatccagtacggaactttgcctgatactaaggggtggatgacgagggtcatctga

SEQ ID NO: 1522 - protein, 136 aa, Unknown
  Obtained from environmental sample
  misc_feature (1)..(136): Xaa is any amino acid
MECVFLDATHRXYMEEGSSCNIFFFLKSGELVTPELGDTILPGITRASIIELARDKGIKVSERQISIDEVFAETKECFVSGTAAGATPITSLTYKGKKAVFNGGKVGEFTADIRDTIKGIQYGTLPDTKGWMTRVI

SEQ ID NO: 1523 - DNA, 762 bp, Unknown
  Obtained from environmental sample
  misc_feature (1)..(762): n is a, c, g, or t
atgaaaaccaaaccacagttaattacggtcactatcattgcaggcctagttttgtcttgccaatttttcctgtcgtgttcaaggtcattaaacgctaaaatgttgaatttggctaatgacgctgtatttgaagtagtcctggaaaaacctgccgatgaacaaatagaatatgaggaagaaattaactgggactttgttccttttcacattagaagcgataaatacgattccattggtaccgctttcgcaatttccaaaacggaacttatgacagcctttcatgtgatggaaggtgaccatgaaaaatactatgtcagagacgcgcgaaaaaatatttacgaagtagatatggttacaggcggttccaaagaaaaggattatcttatatttacagtaaaaggaaaaactttcaataaaatatttaaatttgaaagaaagtacaatattggagatcctgtttttagtataggtaacgccctgggtgaaggcatcgtaatacgtgatggccttgttttgggtgagattccggaagaggattcaggcagatggaatgagctcaaaacttccgccagcagcaatccgggaaattcaggtggccctatcgtaacacctaatggtaatgtgatttccctattgacttcccgcagggaaaacatagtttattcaactccaattgatgttattctaaatgatgaccgttcggtgtttttacataggaaagaaacatcatttctatcattttttattggcaaacacatttaa

SEQ ID NO: 1524 - protein, 253 aa, Unknown
  Obtained from environmental sample
  SIGNAL (1)...(25)
  misc_feature (1)..(253): Xaa is any amino acid
MKTKPQLITVTIIAGLVLSCQFFLSCSRSLNAKMLNLANDAVFEVVLEKPADEQIEYEEEINWDFVPFHIRSDKYDSIGTAFAISKTELMTAFHVMEGDHEKYYVRDARKNIYEVDMVTGGSKEKDYLIFTVKGKTFNKIFKFERKYNIGDPVFSIGNALGEGIVIRDGLVLGEIPEEDSGRWNELKTSASSNPGNSGGPIVTPNGNVISLLTSRRENIVYSTPIDVILNDDRSVFLHRKETSFLSFFIGKHI

SEQ ID NO: 1525 - DNA, 909 bp, Unknown
  Obtained from environmental sample
  misc_feature (1)..(909): n is a, c, g, or t
atgatggccgaggcacctgcgntcgtacatcttcgaggatgttctaagcgggcgcttttgtggctcggttacggggtgcgccacgtggtcaacataaccgacgtgggccacctgacctccgacgccgacgagggcgaggacaagatggagagcggggcggcgcgcgagggcaagagcgtgtgggatatagcggcgttatacacggaacggttcatggccgacatcgtgtcgctgaacattttgcagcccgacctctggcccaaggctaccgagcacattccccagatgatcgccttagtgaaagcgcttgaggagaagggtttcacctaccgcaccggcgacggtatatactttgacacggccaagttcccgtcgtactgcgatttcgcccgcatagacccgtcgagccttcgcgccggcgagcgcgttgatatgggggagaagcgctccgccactgacttcgccctgtggaagttttccccggccggcggcaagcggcagatggagtgggcgagcccgtggggcacgggcttccccggatggcatatagagtgcagcgccatggctacggcgcgcctgccccagccgctcgacatccactgcggcggcatggaccatatccgcgtccaccacacaaacgagatagcccaaacggaggcggcgaccggtaagaagtgcgcccggtattggatgcacggggagtttctcgtgcttgacaaggggaaaatggccaagtccggcgggaatttcgtcaccttgagcacgctcaaagaacacggcgtctcaccgctcggctataggatgttctgtttcacggcgcactatcgcacgccgctgactttctcgtttgagggcgttctatcggcggagcatgctttggcgaatcttaaaagtccgtattgtcgatag

SEQ ID NO: 1526 - protein, 302 aa, Unknown
  Obtained from environmental sample
  DOMAIN (7)...(291): tRNA synthetases class I (C) catalytic domain
  misc_feature (1)..(302): Xaa is any amino acid
MMAEAPAXVHLRGCSKRALLWLGYGVRHVVNITDVGHLTSDADEGEDKMESGAAREGKSVWDIAALYTERFMADIVSLNILQPDLWPKATEHIPQMIALVKALEEKGFTYRTGDGIYFDTAKFPSYCDFARIDPSSLRAGERVDMGEKRSATDFALWKFSPAGGKRQMEWASPWGTGFPGWHIECSAMATARLPQPLDIHCGGMDHIRVHHTNEIAQTEAATGKKCARYWMHGEFLVLDKGKMAKSGGNFVTLSTLKEHGVSPLGYRMFCFTAHYRTPLTFSFEGVLSAEHALANLKSPYCR

SEQ ID NO: 1527 - DNA, 483 bp, Unknown
  Obtained from environmental sample
  misc_feature (1)..(483): n is a, c, g, or t
gtgttctttgagcgtgctcaaggtgacgaaattcccgccggacttggccattttccccttgtcaagcacgagaaactccccgtgcatccaataccgggcgcacttcttaccggtcgccgcctccgtttgggctatctcgtttgtgtggtggacgcggatatggtccatgccgccgcagtggatgtcgagcggctggggcaggcgcgccgtagccatggcgctgcactctatatgccatccggggaagcccgtgccccacgggctcgcccactccatctgccgcttgccgccggccggggaaaacttccacagggcgaagtcagtggcggagcgcttctcccccatatcaacgcgctcgccggcgcgaaggctcgacgggtctatgcgggcgaaatcgcagtacgacgggaacttggccgtgtcaaagtatataccgtcgccggtgcggtaggtgaaacccttctcctcaagcgctttcactaa

SEQ ID NO: 1528 - protein, 160 aa, Unknown
  Obtained from environmental sample
  misc_feature (1)..(160): Xaa is any amino acid
MFFERAQGDEIPAGLGHFPLVKHEKLPVHPIPGALLTGRRLRLGYLVCVVDADMVHAAAVDVERLGQARRSHGAALYMPSGEARAPRARPLHLPLAAGRGKLPQGEVSGGALLPHINALAGAKARRVYAGEIAVRRELGRVKVYTVAGAVGETLLLKRFH

SEQ ID NO: 1529 - DNA, 549 bp, Unknown
  Obtained from environmental sample
  misc_feature (1)..(549): n is a, c, g, or t
gtgccgaccataccccaaagatgtagaaaaagcgaaagcccttatgagggaagcngggttttccaaacnggcttttccctggagataacggttccctccgtctacacaatgcacgttgatacggcgcaggtaattgtcagccagctctctactgcggggatcaacgccagcatacgccttgttgactgggggacatggctttcggaagtttactttgggcgcagctaccaggcgacgataatttcgctggatgcaaataccgtttcgccccgaagttttcttttccgctatgtttcaggagattccggtaattttatcaactttaataatactgagtatgaccgcgtttataaggccgcgcttttggagccggacgagaaaaagcgcgtcgcgctctacaaggaatgtcagcgaattatttcggaaagtgccgccagtgttttcatacaagacatcctgggctttagggccttcgcggctgaccgctttggaggcgtggtaaattatcctctctatgtaattgattttgcctcgatgtatcgcaaataa

SEQ ID NO: 1530 - protein, 182 aa, Unknown
  Obtained from environmental sample
  misc_feature (1)..(182): Xaa is any amino acid
MPTIPQRCRKSESPYEGSXVFQTGFSLEITVPSVYTMHVDTAQVIVSQLSTAGINASIRLVDWGTWLSEVYFGRSYQATIISLDANTVSPRSFLFRYVSGDSGNFINFNNTEYDRVYKAALLEPDEKKRVALYKECQRIISESAASVFIQDILGFRAFAADRFGGVVNYPLYVIDFASMYRK

SEQ ID NO: 1531 - DNA, 828 bp, Unknown
  Obtained from environmental sample
  misc_feature (1)..(828): n is a, c, g, or t
atggggaaaataaatttcattattcaggataaattaaagtcaaaatttattcttcgtgatatatttgccgcttgttatgtatcaataatatgcgtgataatagcgttaccgctgatagtttttttaattctaacttttatcaaaagctatccaataaatatggggatatcatttaataatataattagaacattggatttaggcgcaggtcaattccttgttaattctgtattaattgcgtttttaacttcttttttgggcgcaattttatcatggattaccgcatattttaccgctcgtactcaaagtaaatcatcaagaatattacatcttttttctataacatctcttgccattcccggaatggttttaggaatttcttatgttcttttttttaagggatcatttctatatggaaccttagctatgcttattctggttaatacgacccattttattgctccgccgtatttaatagcatataactcattggggaagttgaatagtaatcttgagaatgttggccgtacattaggcataaatcgtttacatattattcttgatgtccttattcctcaaactaaattatcaatattggaaatgttttcttatttctttgtaaattctatgattacaatttccgctgtttcatttttaagcgcgacaataaacaggcctgtttcgctgatgataactcaatttgaaaccttcctgtttcttgaaggcgccgcatttgtctctattcttattctttgtgttaatttaacagttaaatttctgttatataccataggtaatagaataaaacaagtggaattaatacaatga

SEQ ID NO: 1532 - protein, 275 aa, Unknown
  Obtained from environmental sample
  DOMAIN (69)...(270): Binding-protein-dependent transport system inner membrane component
  misc_feature (1)..(275): Xaa is any amino acid
MGKINFIIQDKLKSKFILRDIFAACYVSIICVIIALPLIVFLILTFIKSYPINMGISFNNIIRTLDLGAGQFLVNSVLIAFLTSFLGAILSWITAYFTARTQSKSSRILHLFSITSLAIPGMVLGISYVLFFKGSFLYGTLAMLILVNTTHFIAPPYLIAYNSLGKLNSNLENVGRTLGINRLHIILDVLIPQTKLSILEMFSYFFVNSMITISAVSFLSATINRPVSLMITQFETFLFLEGAAFVSILILCVNLTVKFLLYTIGNRIKQVELIQ

SEQ ID NO: 1533 - DNA, 822 bp, Unknown
  Obtained from environmental sample
  misc_feature (1)..(822): n is a, c, g, or t
ttgcaaaaaattcgccatgttttgggtgtgtttcgcaatgcgcccgatgtggttttgttatggcgcccgcatccgttgaatgagaccacttaccaagtgatgcgccctagattgcttgatgaatatgagcggataataggggagtacaagagcgagggctggggcatttttgatgacagccccgatttgcaccgagccattgcgtggagtgatgtgtattacggagacgcaagctcggttatggcgatgttcgatgcggtgggtaagccagtggtggtgcaaagagtgggggtgatgggaggattgggagatagggcatttttttctaattttttctttgtcaacgacgaaatttggttctgcgatagacattcccgttcattctttaaaatgaacaaagaaactctagaatacgagtatgtagaaagctttgctaattcattacattatgacagctatatgactggaacattgcacaatgaactggtgtattttgttccgtattttgcaaatgaaattgctgaatatgatattcaaaaaaaaacaacgacttatattccttataacaatacaaaatgcaacaaatgttttgttgctgctttaaattatgggaaatacattttttttacgccatatatgtataaagcaattatgcgacttgatacggaatcgaaaaaaaatgatttttttgatgattggattgagcctctgaagcaattaacaacagatgaaaaacaacccttttttggcaagccattcaggaacaccgaaaaacaccattatgctttgcgccgctggagcaaatgttgtggtagattttaa

SEQ ID NO: 1534 - protein, 273 aa, Unknown
  Obtained from environmental sample
  misc_feature (1)..(273): Xaa is any amino acid
MQKIRHVLGVFRNAPDVVLLWRPHPLNETTYQVMRPRLLDEYERIIGEYKSEGWGIFDDSPDLHRAIAWSDVYYGDASSVMAMFDAVGKPVVVQRVGVMGGLGDRAFFSNFFFVNDEIWFCDRHSRSFFKMNKETLEYEYVESFANSLHYDSYMTGTLHNELVYFVPYFANEIAEYDIQKKTTTYIPYNNTKCNKCFVAALNYGKYIFFTPYMYKAIMRLDTESKKNDFFDDWIEPLKQLTTDEKQPFFGKPFRNTEKHHYALRRWSKCCGRF

SEQ ID NO: 1535 - DNA, 741 bp, Unknown
  Obtained from environmental sample
  misc_feature (1)..(741): n is a, c, g, or t
atgccgaacttggatgctgttagcaactgtcgcggttcctcatattcaggcaaatattacgaattgcagaacgacatagacttaggtagctaccttgccaactcaagtgcaggctggcagccgataggcagtagtgagtataattcattccgtggcaagttcaacggaaatgggcataaggtgtctgggctttggataaacagacctgcggcgaatcgtgtgggtctgtttggttcaggagcggagataaggaacataggtgtggagattgacaatagcaagggcggggtcagaggcaacgaagatgtaggcggcttggtgggctccggcaacggcacaatcagcaacagctacgccactggtagtgtcacaggaagtggcaactatgtcggcggtttggcgggaagtggcggcacaatcagcaacagctacgccacgggcagcgtcacgggcaacaacaatgtcggcggcttggtggggtataacagcggcaccatcagcaacagctacgccacaggcaacgtgtctggtaatgactatgtcggtggcttgatggggtctaattttggaaccatcatcaacagttacgccaccggcagcgtgtctggcaacagttatgtcggcgggttggtgggggataacttcagcagcggtacaatcatcaacagctactacgacaaggaaactactggcagaacagatatcaggcaaaggaacaggcaaaaaccacaccagaaatga

SEQ ID NO: 1536 - protein, 246 aa, Unknown
  Obtained from environmental sample
  DOMAIN (99)...(124): The GLUG motif
  misc_feature (1)..(246): Xaa is any amino acid
MPNLDAVSNCRGSSYSGKYYELQNDIDLGSYLANSSAGWQPIGSSEYNSFRGKFNGNGHKVSGLWINRPAANRVGLFGSGAEIRNIGVEIDNSKGGVRGNEDVGGLVGSGNGTISNSYATGSVTGSGNYVGGLAGSGGTISNSYATGSVTGNNNVGGLVGYNSGTISNSYATGNVSGNDYVGGLMGSNFGTIINSYATGSVSGNSYVGGLVGDNFSSGTIINSYYDKETTGRTDIRQRNRQKPHQK

SEQ ID NO: 1537 - DNA, 789 bp, Unknown
  Obtained from environmental sample
  misc_feature (1)..(789): n is a, c, g, or t
atgaacgccggcggcgacggattcagcgccagaaataattcggccgccagattgtcgaaagtgtccagtttctcccactccgcggcaagtgaatcgtcgagcgcgcgcgccgccaccttggcccgcggcagaattgtcaggaaatccagcgcgcagataaggtcgcgcggcgttcaccgtccggattcaaggcgagaaatcgcccgcccgacgtcgcccgcgcgcgccaaaattccggcaaagtcgcgcaagacgttcggattcgcgacaagatgcgccacatgtccctgccgcgcgacgataacatcaaagtcgccggaaagcgcgcgcagccatcggcgcagcaaccgccccccggccgcgctcttcgtcatgtcgataacgtccataagggaacgcccgccggggttcagcggcgcgtcgagttcaagcgatttccagctgttcgcgtcgatcgaaagctccgccgccgccccaagtttcttcgccggccccagccggattttggaatcccgctgcgtctttttaagatacgcgaacagcatcttttcggcccgcccgccgtccgcctcgaaattgtcgtattcccgcgcattcagcgccgcccacttgaaaacggcccgaatccgcaaaaagaccggtttttcggcatccgtttcatcgaacaaaacctccgccgcgtcaagtttggaaaggtcgctctctatattttcggacggccccgccataagttcgcccgtcgaaatgtccgccgccgcgatccgcccgtccgccaccgccgccagataa

SEQ ID NO: 1538 - protein, 262 aa, Unknown
  Obtained from environmental sample
  misc_feature (1)..(262): Xaa is any amino acid
MNAGGDGFSARNNSAARLSKVSSFSHSAASESSSARAATLARGRIVRKSSAQIRSRGVHRPDSRREIARPTSPARAKIPAKSRKTFGFATRCATCPCRATITSKSPESARSHRRSNRPPAALFVMSITSIRERPPGFSGASSSSDFQLFASIESSAAAPSFFAGPSRILESRCVFLRYANSIFSARPPSASKLSYSRAFSAAHLKTARIRKKTGFSASVSSNKTSAASSLERSLSIFSDGPAISSPVEMSAAAIRPSATAAR

SEQ ID NO: 1539 - DNA, 603 bp, Unknown
  Obtained from environmental sample
  misc_feature (1)..(603): n is a, c, g, or t
gtggcggacgggcggatcgcggcggcggacatttcgacgggcgaacttatggcggggccgtccgaaaatatagagagcgacctttccaaacttgacgcggcggaggttttgttcgatgaaacggatgccgaaaaaccggtctttttgcggattcgggccgttttcaagtgggcggcgctgaatgcgcgggaatacgacaatttcgaggcggacggcgggcgggccgaaaagatgctgttcgcgtatcttaaaaagacgcagcgggattccaaaatccggctggggccggcgaagaaacttggggcggcggcggagctttcgatcgacgcgaacagctggaaatcgcttgaactcgacgcgccgctgaaccccggcgggcgttcccttatggacgttatcgacatgacgaagagcgcggccggggggcggttgctgcgccgatggctgcgcgcgctttccggcgactttgatgttatcgtcgcgcggcagggacatgtggcgcatcttgtcgcgaatccgaacgtcttgcgcgactttgccggaattttggcgcgcgcgggcgacgtcgggcgggcgatttctcgccttgaatccggacggtga

SEQ ID NO: 1540 - protein, 200 aa, Unknown
  Obtained from environmental sample
  misc_feature (1)..(200): Xaa is any amino acid
MADGRIAAADISTGELMAGPSENIESDLSKLDAAEVLFDETDAEKPVFLRIRAVFKWAALNAREYDNFEADGGRAEKMLFAYLKKTQRDSKIRLGPAKKLGAAAELSIDANSWKSLELDAPLNPGGRSLMDVIDMTKSAAGGRLLRRWLRALSGDFDVIVARQGHVAHLVANPNVLRDFAGILARAGDVGRAISRLESGR

SEQ ID NO: 1541 - DNA, 417 bp, Unknown
  Obtained from environmental sample
  misc_feature (1)..(417): n is a, c, g, or t
ttggaagccggaggccatgagctcagttcccttgtaccacgcaaggcgttttttntgcaccgngattattttcgcatggaagacggaaaaaggaaaaaggatcatcatttctgcccgacaagcccgggcgccatccgtcttatcgccgaagaagcggaaaaattgttccgggcggcggatggtataaaggtctttcacctttggcccgataacgaggcggaaaccgcatggtgctcatgccccacctgcagggctttcaccacgcaggaacagagccgtatgggcgtaaacgccgccgcagacgttcttactgcaataaacccggatgctttgataactttttatgaaaaacccggcgaagacggaaaaatccccatgcgaaaaaacacaattaaaatagagaaaccgcctgagtaa

SEQ ID NO: 1542 - protein, 138 aa, Unknown
  Obtained from environmental sample
  misc_feature (1)..(138): Xaa is any amino acid
MEAGGHELSSLVPRKAFFXHRDYFRMEDGKRKKDHHFCPTSPGAIRLIAEEAEKLFRAADGIKVFHLWPDNEAETAWCSCPTCRAFTTQEQSRMGVNAAADVLTAINPDALITFYEKPGEDGKIPMRKNTIKIEKPPE

SEQ ID NO: 1543 - DNA, 312 bp, Unknown
  Obtained from environmental sample
  misc_feature (1)..(312): n is a, c, g, or t
gtgaacgtgggcgctttttccagacgcggggcggaggccgccaagatggccgtggagaacgacgtccacgttgtcggcatgttcagcctagccgctggccacaagacgctgctgccacagttggtggcagagttaaaggcgcatggccgcgaggacatcatggtggtggctggtggcgtgatacccgcgcaggactacgatgcactgcggaaggcaggcgccgccgccatattcggccctggcacaaacatcccatacgccgctaaggtgatgctgacggagatgaacaggcgactcggctacggtggctga

SEQ ID NO: 1544 - protein, 103 aa, Unknown
  Obtained from environmental sample
  misc_feature (1)..(103): Xaa is any amino acid
MNVGAFSRRGAEAAKMAVENDVHVVGMFSLAAGHKTLLPQLVAELKAHGREDIMVVAGGVIPAQDYDALRKAGAAAIFGPGTNIPYAAKVMLTEMNRRLGYGG

SEQ ID NO: 1545 - DNA, 321 bp, Unknown
  Obtained from environmental sample
  misc_feature (1)..(321): n is a, c, g, or t
atggatcagatcggccgagggcggattcactgtcgaggacagcggtggttcaagacaccggaggaagcggccaaagccgcgctggacagcggagcgccgatcatcgtcgctgtgggtctggacgacacgtacgtggagcaggtgccagtccttgccaaggcactcaaagccggtcagggcaagagcctactggtggcgggtctgctgaaagaccacgcggaggcgttcaaggacgccggcgttgacgacttcatacatgtaaagagcgacgtccatgccgtcctgagcggtctggccaagggcttgggggtgatcagatga

SEQ ID NO: 1546 - protein, 106 aa, Unknown
  Obtained from environmental sample
  misc_feature (1)..(106): Xaa is any amino acid
MDQIGRGRIHCRGQRWFKTPEEAAKAALDSGAPIIVAVGLDDTYVEQVPVLAKALKAGQGKSLLVAGLLKDHAEAFKDAGVDDFIHVKSDVHAVLSGLAKGLGVIR

SEQ ID NO: 1547 - DNA, 627 bp, Unknown
  Obtained from environmental sample
  misc_feature (1)..(627): n is a, c, g, or t
gtggaaaaantgatattcatgcagcattaccgttttccaactcgtattatggacatcagcaaaaatccgcttatagcgttgttttttgcgtgttttccagatgtcaataaagaaactttaaaacaagacggtatggtctattgntataaagttcccgaaaaagaaattaaatactgcgacagcgacgctgtaagcgttattgccaacttgtctaaaagaccttcagatttttctataaaagatatttacaatttgaatgataatgtatttaacaaacaagtagaaatcgtgtatctggttcatgaaatcagagaagaaaaaccttatttttatatagatgttgacaaagaacatattaactctgttgtatgcctgcgtccccgaatgaataacccgcgcattgtccggcaggacggatattttttcctctttggcattaattatgaaaaaaaggattgcgctaaaatcaaccctgattggatagacgacaagaaattccttattccgcatggcgcaaaacaagaaatactgaaagagcttaacatgctgaatattaacgaggcgtttgtctatcccgattatgagcatatttcaaatgatattaggaataggtacagaaaaccataa

SEQ ID NO: 1548 - protein, 208 aa, Unknown
  Obtained from environmental sample
  misc_feature (1)..(208): Xaa is any amino acid
MEKXIFMQHYRFPTRIMDISKNPLIALFFACFPDVNKETLKQDGMVYXYKVPEKEIKYCDSDAVSVIANLSKRPSDFSIKDIYNLNDNVFNKQVEIVYLVHEIREEKPYFYIDVDKEHINSVVCLRPRMNNPRIVRQDGYFFLFGINYEKKDCAKINPDWIDDKKFLIPHGAKQEILKELNMLNINEAFVYPDYEHISNDIRNRYRKP

SEQ ID NO: 1549 - DNA, 654 bp, Unknown
  Obtained from environmental sample
  misc_feature (1)..(654): n is a, c, g, or t
atgagaaaacagttagtaacaaagaggatcataccggtattgatttgctgctttttatcggcatgtgctttatcaaaatcgaatgaaggacaggaaatgaaagattcaaggaatcaagattcaaagaatcaggattcaaagaatcaggattcaaagaaacaagaaccgaccgggataatatttaacggcaacagcaacggaagcaaacctttggagggtactccttacagttatgaaatatggagcgccagcgggaataataataggattatttggcgcggaccggatacaggcggcggcgcggcgttcagggccgaatggaataacgcggatacttttttagggcgcgtgggtctgtattggaaccgcggaaaaccttatacggaatacaaaaatgtcttctgtgattttgagtttacaaaatccgccaatggcactgccggaggccattcatatctgggaatttacggctggtcgaaaaaccccatgatagaatggtacattgtggatgattggttcggaaacggaataattcaacctcataatataggcggaggggcggtaaaaaaggcgagttttccgcggacggcgcaacctatttcatttatctggcaacaaganccggccggttccggcaatactcgtgccatctga

SEQ ID NO: 1550 - protein, 217 aa, Unknown
  Obtained from environmental sample
  SIGNAL (1)...(25)
  DOMAIN (73)...(216): Glycosyl hydrolases family 11
  misc_feature (1)..(217): Xaa is any amino acid
MRKQLVTKRIIPVLICCFLSACALSKSNEGQEMKDSRNQDSKNQDSKNQDSKKQEPTGIIFNGNSNGSKPLEGTPYSYEIWSASGNNNRIIWRGPDTGGGAAFRAEWNNADTFLGRVGLYWNRGKPYTEYKNVFCDFEFTKSANGTAGGHSYLGIYGWSKNPMIEWYIVDDWFGNGIIQPHNIGGGAVKKASFPRTAQPISFIWQQXPAGSGNTRAI

SEQ ID NO: 1551 - DNA, 852 bp, Unknown
  Obtained from environmental sample
  misc_feature (1)..(852): n is a, c, g, or t
atgatcttttccgagaatcagaaatcccccgtctactcttttaccatcgagatggaagagataaagcaaaagagcaaggccttcaacgttgtatcaaacggcgtttattcccggatgggcttttcgctttcttcgaacgatgaattcctgttcattgtagcgattctttttggtgccgccttcaaagaggcttctcccctcgcatgggaaagccgggctcttgaacaaagcatcacatgggttaaaagctggatcgaggaggcaaataccagcattcaggtggaagatgactttgcttttaaatacttttacgacccgccggataaactggttaattccgggcgcatactcttcacatttatggacagttccagtttttttacgctaagcgaagaacggcggacaaacctggatttccgctggattgccgaaaatgacaaaattcccctggatgaggccggtgtctattacggtatccacaaaaaaacaagggccttaaaagccgccgaagcctttacaaaatggtttttcacggctgaaacccaaaagctgcttttggagacggcaaaaatcaacaggctaaacgaatcgtcgtttggcatagccggaggattttcggccatgagaaccgtaacggaacaggtcttcccccaattttaccccaaccttttgggcagaatgcccccggagagttatctttcgccccccaatatactgccaaggaactggacggccataaaagcgcgngtaatacttccatacttgcgcgacagaatccgccatgccagcagggaagaagtaaggtccctggaacgccgtatcagcgattggcataggctaaatagagactaa

SEQ ID NO: 1552 - protein, 283 aa, Unknown
  Obtained from environmental sample
  misc_feature (1)..(283): Xaa is any amino acid
MIFSENQKSPVYSFTIEMEEIKQKSKAFNVVSNGVYSRMGFSLSSNDEFLFIVAILFGAAFKEASPLAWESRALEQSITWVKSWIEEANTSIQVEDDFAFKYFYDPPDKLVNSGRILFTFMDSSSFFTLSEERRTNLDFRWIAENDKIPLDEAGVYYGIHKKTRALKAAEAFTKWFFTAETQKLLLETAKINRLNESSFGIAGGFSAMRTVTEQVFPQFYPNLLGRMPPESYLSPPNILPRNWTAIKARVILPYLRDRIRHASREEVRSLERRISDWHRLNRD

SEQ ID NO: 1553 - DNA, 459 bp, Unknown
  Obtained from environmental sample
  misc_feature (1)..(459): n is a, c, g, or t
atgctgcttcccggagctataggggcatggaatgtcattgtcacccgtacttactatcagtccaatatatccgacgagctccttgatgcggcgtacctggacggttgcgataatttcaggttccttcttagggtagtaattcccctctcggcccccattacggcggtaatgatcctgttctacgcggtaggtcactggaatgcttactttagcgcgtttttgtatctttccaaacgcgacctcttcccgctgcagatttttctgcgggaaattctgattctaaacgaaattaccgcagacctaacctatgacgctgaacttttggcggcaaagcagggtatggccgatcttttaaagtactctctcatcattgtggcgagtcttccgatttggtgcgcttatcctttcgttcagaaatacttcgttaagggtattatgatcggggctataaaagggtaa

SEQ ID NO: 1554 - protein, 152 aa, Unknown
  Obtained from environmental sample
  misc_feature (1)..(152): Xaa is any amino acid
MLLPGAIGAWNVIVTRTYYQSNISDELLDAAYLDGCDNFRFLLRVVIPLSAPITAVMILFYAVGHWNAYFSAFLYLSKRDLFPLQIFLREILILNEITADLTYDAELLAAKQGMADLLKYSLIIVASLPIWCAYPFVQKYFVKGIMIGAIKG

SEQ ID NO: 1555 - DNA, 387 bp, Unknown
  Obtained from environmental sample
  misc_feature (1)..(387): n is a, c, g, or t
atgcgcgtgcttccccgttattcgataaaggaagtgttagacgaggttaacatcatcaaggaagaagttgcggcgaagcacaaggttgccattgaatataacgttctgctttcaaacgaatcccccgcaacttcggcccaagctccgtttatcaaatccctctcgcttgcgataaacgaagtctacggcaaaacggcccatcccgtcggtataggcggcggcactgtggcgtcgttccttcgcaagatgggaattgacagcgcggtatgggcgcggctcagcggcaccgcacatcagcccaacgaatactcccttgtcaaagatatattgggcgacgcaaaagtcatggcgcttttaatgtggggaacagccaacaaccaggaataa

SEQ ID NO: 1556 - protein, 128 aa, Unknown
  Obtained from environmental sample
  misc_feature (1)..(128): Xaa is any amino acid
MRVLPRYSIKEVLDEVNIIKEEVAAKHKVAIEYNVLLSNESPATSAQAPFIKSLSLAINEVYGKTAHPVGIGGGTVASFLRKMGIDSAVWARLSGTAHQPNEYSLVKDILGDAKVMALLMWGTANNQE

SEQ ID NO: 1557 - DNA, 690 bp, Unknown
  Obtained from environmental sample
  misc_feature (1)..(690): n is a, c, g, or t
atgttccagcgcggcggcaggctttacaatgaagaaggttcccgcaccgaattggacggcgaaatcgccattgaggcgtttgacgtatacacgaaattctttacgcattacaaaacgccgatggtttacgactttttaaacaggtttcgcaccggagaaatgccgcttgcttttgccgattacacaaactttaacactcttgaagttttcgctcctgagcttcgcggtctttggggtttttccagaatgcccggccttaaaaagaaagacggaacaatcgaccgttccgtaccgacgggcactcttgccgcgatgattttttccaattcaaaaaaacgggacttggcttgggaattcatgaagtggtggataagctctgatacgcagcttaggttcgggcgcgaacttgaaagcattatgggcgcggccgcccgttatccaacggcgaattacgaggcgtttaaacggctttcttggggatcggagcaaatggcggttcttgatgagcagcgcagttggactgtcggcactcctgaagtgcctggcggttattttgtaagtcggcatattaccaatgcggtgcgcaaaatattaaacgaaggcatggatacgcgggaaactttgttggattatacgatcaccattaacgacgagttgattaagaaacggaaagaatttggtctggagtag

SEQ ID NO: 1558 - protein, 229 aa, Unknown
  Obtained from environmental sample
  misc_feature (1)..(229): Xaa is any amino acid
MFQRGGRLYNEEGSRTELDGEIAIEAFDVYTKFFTHYKTPMVYDFLNRFRTGEMPLAFADYTNFNTLEVFAPELRGLWGFSRMPGLKKKDGTIDRSVPTGTLAAMIFSNSKKRDLAWEFMKWWISSDTQLRFGRELESIMGAAARYPTANYEAFKRLSWGSEQMAVLDEQRSWTVGTPEVPGGYFVSRHITNAVRKILNEGMDTRETLLDYTITINDELIKKRKEFGLE

SEQ ID NO: 1559 - DNA, 642 bp, Unknown
  Obtained from environmental sample
  misc_feature (1)..(642): n is a, c, g, or t
atgagaacattatcagaacaaagatattcaaagctcggaccgaggatagtaaaatcgcttcattctcgttcctttgacgccttctattttgacgaaaaagccgaggcggtggaaaaaattatttccatgatacccaaaaatcatttggtgtcatggggcggttcccaaactctgatcgaacttggcattcaagagaggcttgagaaagaaggctataatctgctggacagggataaggcggcttctcccgaagaacgaatggaaagaatgaggcgggcattgacgtgcgacacttttcttacggggacaaatgcaatcagcgaggacggtcagcttataaacattgacgggtacggcaaccgggtcgccgcgatgatcttcggccccaagcaggtaattgtagccgtaggcatgaataaagtggccagaacttacgcggaagcccttgtccgcgcaagaaacatcgccgcgccattgaatattcagcgttttccgaatctggaaacatcctgcaccgagacaggttcatgcggggactgcctaagccccgacacaatttgctcgttctttgttacgacgcgcttctgcaaaccggcgggaagaattaaggttattttgattggtacggatttaggactttaa

SEQ ID NO: 1560 - protein, 213 aa, Unknown
  Obtained from environmental sample
  DOMAIN (1)...(213): Protein of unknown function (DUF1121)
  misc_feature (1)..(213): Xaa is any amino acid
MRTLSEQRYSKLGPRIVKSLHSRSFDAFYFDEKAEAVEKIISMIPKNHLVSWGGSQTLIELGIQERLEKEGYNLLDRDKAASPEERMERMRRALTCDTFLTGTNAISEDGQLINIDGYGNRVAAMIFGPKQVIVAVGMNKVARTYAEALVRARNIAAPLNIQRFPNLETSCTETGSCGDCLSPDTICSFFVTTRFCKPAGRIKVILIGTDLGL

SEQ ID NO: 1561 - DNA, 402 bp, Unknown
  Obtained from environmental sample
  misc_feature (1)..(402): n is a, c, g, or t
atggccganagaccagttaacgggccggccaaagagtatcgtgaagcgataagcctcatatcaaaacacgaatacgaaaaggcaattcaggcttttacaacaatcattgacacatgcaaagaagccggattgatttccaaaagcgaatacgcgattggcaactgcctgtttcttcttgaaaagtttgaggattgcatcaaacacttttcagatctgctttcaaaaaaccccaagcatcccgaggcaaaggaggcgatgttcttcatagggcaggcttccgagaggatcggcgacaaggcccaggcggcggaatggtatggcaaaatcatgtcattatccgacctggaagcgggcgggatgagggcaagagtaagacaggcgcttaaaggattggaggcgtaa

SEQ ID NO: 1562 - protein, 133 aa, Unknown
  Obtained from environmental sample
  DOMAIN (46)...(79): Tetratricopeptide repeat
  misc_feature (1)..(133): Xaa is any amino acid
MAXRPVNGPAKEYREAISLISKHEYEKAIQAFTTIIDTCKEAGLISKSEYAIGNCLFLLEKFEDCIKHFSDLLSKNPKHPEAKEAMFFIGQASERIGDKAQAAEWYGKIMSLSDLEAGGMRARVRQALKGLEA

SEQ ID NO: 1563 - DNA, 537 bp, Unknown
  Obtained from environmental sample
  misc_feature (1)..(537): n is a, c, g, or t
atgagcggcccggtgatgtaccagttgatggattccggcggcatgacctttaccggcataaacgatatggtgttataccagatggtggcgcagttctccaggccccttgccaacgcgctggtttttctctttcagaatttttccatggtgctgtggtttacgggcatccccatcatcctgtttatcacaggtttgcaaaaaatcaatgccagtatgctggaagccgctaaaatagattcggcgacttcctggcagatcctctggaagataattatacccattatccggccgattgccgtggtttcgattattttaactattgtgcagttgggtacctattccataaacccggttttgcccatggtgcaggaggcgatttataacacgacgagcgggctggggcttgccagcgccttcgcctggatttataccgtagcggccctggcgctgatggggattgcgttcgcccttttgaaaaaccccaaggaagatttggtggaagaacaaaaacgcgcgaaaaaaagaagggagatatag

SEQ ID NO: 1564 - protein, 178 aa, Unknown
  Obtained from environmental sample
  misc_feature (1)..(178): Xaa is any amino acid
MSGPVMYQLMDSGGMTFTGINDMVLYQMVAQFSRPLANALVFLFQNFSMVLWFTGIPIILFITGLQKINASMLEAAKIDSATSWQILWKIIIPIIRPIAVVSIILTIVQLGTYSINPVLPMVQEAIYNTTSGLGLASAFAWIYTVAALALMGIAFALLKNPKEDLVEEQKRAKKRREI

SEQ ID NO: 1565 - DNA, 774 bp, Unknown
  Obtained from environmental sample
  misc_feature (1)..(774): n is a, c, g, or t
atgtatgattcggcggcatatataaaaatggcgtcaccgcctgtcgaaatgtttgttgaagcggtaaagaaagttgtgaagctcaacgagcattttgttcctccctacgaatcgggcgctacgctatatattcgtccgctgttgataggtgcgggcgcgcaggtaggcgttaaaccgtctgacgaatatctttttctggtatttgtttcgccggtaggaccgtattttaagacaggatttaaacctgtagacgtcataataacgcgcgacagcgaccgcgctgctccgctcggaacgggtcatatcaagtgtggaggcaattatgctgcaagtttgcctgccggcgttgctgcacaacaacagggttatgcaacctgtctctacctggacgcaagagagaaaaaatatattgatgaatgtggtcctgccaattttttcggtatcaaaaacaatacatatataactcccgattcaaagagtatattgccttcgataaccaaccgaagccttataacgttagccgaagatttgggaattaaagtcgaacggcgcgtagtagaagtttcggaattagaaacatttgaggaagtaggcgaatgtggcacagcggcagtaatcacacctgtggggaaaattttcgacccgcataacaacagaatatatgattacggcaacgaagcaggaactgtcagtacgaaactttataaccttttgcgcgcaattcagtatggcgatgcgccagatacgcacaactgggtagaatttattaattag

SEQ ID NO: 1566 - protein, 257 aa, Unknown
  Obtained from environmental sample
  DOMAIN (1)...(239): Aminotransferase class IV
  misc_feature (1)..(257): Xaa is any amino acid
MYDSAAYIKMASPPVEMFVEAVKKVVKLNEHFVPPYESGATLYIRPLLIGAGAQVGVKPSDEYLFLVFVSPVGPYFKTGFKPVDVIITRDSDRAAPLGTGHIKCGGNYAASLPAGVAAQQQGYATCLYLDAREKKYIDECGPANFFGIKNNTYITPDSKSILPSITNRSLITLAEDLGIKVERRVVEVSELETFEEVGECGTAAVITPVGKIFDPHNNRIYDYGNEAGTVSTKLYNLLRAIQYGDAPDTHNWVEFIN

SEQ ID NO: 1567 - DNA, 729 bp, Unknown
  Obtained from environmental sample
  misc_feature (1)..(729): n is a, c, g, or t
atgnacagaatcggccgaggccatgtaccaaagcttgaaattgacgacgaaaatgatcctaccgaacggcttaacattctgaccatgctctccccggaacccggagctattaacgatcctattatgtttatatcaaaattcaggactatcaggctggttcctgtcctgccatacaccctaagggatcacctgatttcaatcaacgaatttgaagcagcggacggtcaaacctttaatccgggccttatctcaggcgaactcatgcggatcccacgggaagaagtggaaaaacaggccgctctggccggggaactcaaggaaaccgtcgaagccatctgctcggccgcaaacgaaaaaatgcaaagcggttacagcctggcaatgggttccctgattggggagatcaacaaactctgcaagttttacgcgcaatactcaggaggctcaagcggagaaacggaaaacattgaagacgcgtcttcaattaccgcggttccggcatcgggcggttttaaccttgcttctttcattccgggcacccgctccgatgccctgctcctgctccgcaaaggagccgaatactttcagcgccaggaacccaacagccctatcccgttactcgtaaaccgggcgctgcgtttctcggagatgagtttcattgacttgctggaagatatagtcccggacgcgttatcccacggcaaaacaatactggggattaaggaatga

SEQ ID NO: 1568 - protein, 242 aa, Unknown
  Obtained from environmental sample
  misc_feature (1)..(242): Xaa is any amino acid
MXRIGRGHVPKLEIDDENDPTERLNILTMLSPEPGAINDPIMFISKFRTIRLVPVLPYTLRDHLISINEFEAADGQTFNPGLISGELMRIPREEVEKQAALAGELKETVEAICSAANEKMQSGYSLAMGSLIGEINKLCKFYAQYSGGSSGETENIEDASSITAVPASGGFNLASFIPGTRSDALLLLRKGAEYFQRQEPNSPIPLLVNRALRFSEMSFIDLLEDIVPDALSHGKTILGIKE

SEQ ID NO: 1569 - DNA, 849 bp, Unknown
  Obtained from environmental sample
  misc_feature (1)..(849): n is a, c, g, or t
ttgtcggcgagctccgatccgcagaggatagacgcggtctttgccattgatgtttcgcgaagtatggatattaacgacgcgaaggaagattcgcttaacagcgcgcttaacagcggacagggcggcggcgaactgtcgcgccttgaacgcggcgttcaaatcgcggaagaaacgataaaggctgcttcaggcgcgcgctttgccgccgccataggcagaagcaggggttatttgtccgtaccgctcacatgggacagcgaagcgccgttaagttttcttcacgcgcttgacacgtcttccatgacgggcaggagcaccaatcttgaagcgcttgttgaagcggcggcagacgcctttcaggagtcgtctccggcgaaaaaagtgattattcttgtttcggacggcgaggcgctgggcggcgttcttggaaacgcgcttaacaggtgcataagagaggatatcattgtaaacacagtcgctctgggcagcgacagggggcggcctatatcgcagtattccggcagcgcggaaacaccggccgcaatcagccggagagacgccgccgttatgcgcatggccgccgaaaagacgggcggcatttacattgacggcagccgcgatgacgccgcaattattcttgcaaaccacctgtttttccgtttccagcagacaagcgcggggagaagcagagcgagccgaaagaacgcgttcattgttgtaatctggcgatatagcctacggtctttcaaaattattccgctgctccccgggattccgctgcgcccttacccgaataatttcacggttacttcaggtccgaaggcaaactgcttcttcgggagcgattaa

SEQ ID NO: 1570 - protein, 282 aa, Unknown
  Obtained from environmental sample
  DOMAIN (11)...(213): von Willebrand factor type A domain
  misc_feature (1)..(282): Xaa is any amino acid
MSASSDPQRIDAVFAIDVSRSMDINDAKEDSLNSALNSGQGGGELSRLERGVQIAEETIKAASGARFAAAIGRSRGYLSVPLTWDSEAPLSFLHALDTSSMTGRSTNLEALVEAAADAFQESSPAKKVIILVSDGEALGGVLGNALNRCIREDIIVNTVALGSDRGRPISQYSGSAETPAAISRRDAAVMRMAAEKTGGIYIDGSRDDAAIILANHLFFRFQQTSAGRSRASRKNAFIVVIWRYSLRSFKIIPLLPGIPLRPYPNNFTVTSGPKANCFFGSD

SEQ ID NO: 1571 - DNA, 681 bp, Unknown
  Obtained from environmental sample
  misc_feature (1)..(681): n is a, c, g, or t
gtgatctgtttttgggaaatgcaagcgctttcaagcattgaaaaaacagttgaaaacattattattgcggatggatgcatagaccttgtggttgattataacgggaaaagaatcgggtttgcggggatgtcaaaaaccgattttaattttaaaattagcctgccggccaattctatgggagtaaggttaaaacccggcgcattttatgcaattacaaatattcccgcaaataaagcaatggataattttatacctgttgacactatagacagacactttgacagtaaaggattctttacgttggatttttcaaatgccaaagtattttttaagaattatatcggttctttacttgaaaacaaaaggccaagtaagtttatggctctctttgaggaacttaataacgatattccaaattcagccattgaagtgtataaaaaattatactacagccgcaggcaatgtcaaaggcttttttccaaaaactatggattatcaccgcaaatggttttgtgtattttaaggtttcagtggtgtctgagaaaacttacagtagaggaaaaaagccctaaggatattatggatatatccacttattatgaccaatcgcattttattcatgattttaaacagaatattgggttgaccccggttgaattggtacgtagatatacttcctga

SEQ ID NO: 1572 - protein, 226 aa, Unknown
  Obtained from environmental sample
  misc_feature (1)..(226): Xaa is any amino acid
MICFWEMQALSSIEKTVENIIIADGCIDLVVDYNGKRIGFAGMSKTDFNFKISLPANSMGVRLKPGAFYAITNIPANKAMDNFIPVDTIDRHFDSKGFFTLDFSNAKVFFKNYIGSLLENKRPSKFMALFEELNNDIPNSAIEVYKKLYYSRRQCQRLFSKNYGLSPQMVLCILRFQWCLRKLTVEEKSPKDIMDISTYYDQSHFIHDFKQNIGLTPVELVRRYTS

SEQ ID NO: 1573 - DNA, 378 bp, Unknown
  Obtained from environmental sample
  misc_feature (1)..(378): n is a, c, g, or t
gtgttgacgttgcgtttgactgaagttcgggggtttagcccccgaactatctatggaaggcgcagccttccgtctaaaaaagattttaaagaaaggagcaagaaaatggatgatgtcgaattaggggttaagaaaatcattgccggaagactgaacgtaagcgaagacaagatactcccgtcggcggcgtttgtcggcgacttgggcgcggactctctcgaccttgtggagatagtcatggacttagaagataatttcaaagtgtctatccccgacaatgacctcggcaaacagcgtaccgttcaggatgtcattgactacatacaaaagtgcttggcgtggcagaaatgcagcgcctgcggcttcgtgtgccattag

SEQ ID NO: 1574 - protein, 125 aa, Unknown
  Obtained from environmental sample
  DOMAIN (41)...(108): Phosphopantetheine attachment site
  misc_feature (1)..(125): Xaa is any amino acid
MLTLRLTEVRGFSPRTIYGRRSLPSKKDFKERSKKMDDVELGVKKIIAGRLNVSEDKILPSAAFVGDLGADSLDLVEIVMDLEDNFKVSIPDNDLGKQRTVQDVIDYIQKCLAWQKCSACGFVCH

SEQ ID NO: 1575 - DNA, 903 bp, Unknown
  Obtained from environmental sample
  misc_feature (1)..(903): n is a, c, g, or t
ttgagatttcttctacaactttttgtggagctttctgaggaacttcttttgcaacttctttctgaggaacttcttttgcaacttctttctgaggaacttcttntgcaacttcttcctgtggagcttctttcgcaacttcttcctgtggaacttctttttgtggaacttcntgaggaacttcttcttgcggagcttcctgtggaacttctttttgtggaacttcctgaggaacttcttcttgcggagcttcctgtggaacttctttttgtggaacttcctgaggaacttcttcttgcggagcttcctgtggaacttcttcctgtgaggtttccgttatcactctcagttttcccgttaatctttccttttcttcttttaacttttgctcttcagctattattttttgatgttcttcttttaatctctgctcttccctttgcctttcctcttcttttaatctcagtacttcttttaatctttctttttcttcttttaacttttgctcctcagctattagctttagctcttcttcttttagcctttgcacttctcttaatctctcctcttctcttaatctctcttcttcttttaatctctgctcttcccttaaccttttttcttcttttaatctttctttttcttcttttagcttttgctcctcttcttttaaccttttttcttcagctattagcctttgttcttcagctattatcttttgttcttcttctttttttagcctttgccgttcttcttctttcagcctctgctcttccattaatctttgtttttcttcttcttcttttaatcttttcgcttcatcttttaacttttgctcttcacttaatctatctccttcttttaattttttctcttttagttgcatttcagtcaacattctcttga

SEQ ID NO: 1576 - protein, 300 aa, Unknown
  Obtained from environmental sample
  misc_feature (1)..(300): Xaa is any amino acid
MRFLLQLFVELSEELLLQLLSEELLLQLLSEELLXQLLPVELLSQLLPVELLFVELXEELLLAELPVELLFVELPEELLLAELPVELLFVELPEELLLAELPVELLPVRFPLSLSVFPLIFPFLLLTFALQLLFFDVLLLISALPFAFPLLLISVLLLIFLFLLLTFAPQLLALALLLLAFALLLISPLLLISLLLLISALPLTFFLLLIFLFLLLAFAPLLLTFFLQLLAFVLQLLSFVLLLFLAFAVLLLSASALPLIFVFLLLLLIFSLHLLTFALHLIYLLLLIFSLLVAFQSTFS

SEQ ID NO: 1577 - DNA, 303 bp, Unknown
  Obtained from environmental sample
  misc_feature (1)..(303): n is a, c, g, or t
ttgtggagctttctgaggaacttcttttgcaacttctttctgaggaacttcttttgcaacttctttctgaggaacttcttntgcaacttcttcctgtggagcttctttcgcaacttcttcctgtggaacttctttttgtggaacttcntgaggaacttcttcttgcggagcttcctgtggaacttctttttgtggaacttcctgaggaacttcttcttgcggagcttcctgtggaacttctttttgtggaacttcctgaggaacttcttcttgcggagcttcctgtggaacttcttcctgtga

SEQ ID NO: 1578 - protein, 100 aa, Unknown
  Obtained from environmental sample
  misc_feature (1)..(100): Xaa is any amino acid
MWSFLRNFFCNFFLRNFFCNFFLRNFXCNFFLWSFFRNFFLWNFFLWNFXRNFFLRSFLWNFFLWNFLRNFFLRSFLWNFFLWNFLRNFFLRSFLWNFFL

SEQ ID NO: 1579 - DNA, 795 bp, Unknown
  Obtained from environmental sample
  misc_feature (1)..(795): n is a, c, g, or t
ttgaagataggcgtaatgggagcggcgttgtcaacctttttaagcagaataatcgcggcgtccattacaaccgttatgctgntcaggaacagaaaaagcccaatatcgctttccggcctgcatcatgtccgtatagtccgttccatgataaaaaatattcttaatgtaggaatccccagcggcatggaaagctccatgttcatgatcggaaaactccttacacagcgcatttttgccgttttcggaaccgccgccattgccgctaacgcaatcgccagccttattaattctttttcattcatgcccggaaacgcctttggcatggctctgctgaccgttgtcgggcaatgcgtcggcgcgggtgactatccggcggtaaaaaaacaggtttttaagatcatgaaaatcgcgttcatttccatttttaccgtgagcactgcaacctacatctttatggaaccgctggtaagcctgtttagcctgagccccgaagcccatgagacggccaagtccatcctgcgtatacactgcatttccatggcgtttggctgggcaatgagttttgcccttcccaacgccctgcgggccgccggcgacgcccgttatgtgatggttgtcgcgagcatatccatgtggactgtccgcgtatgcgcctcatatttgttttcctttacatttaaactggggcctgtaggcgtatggctcgccatgggcgccgatttcctggtacgcggcacttcgtatttaatacgctggcttggcggaaaatggcaggcgaaaaaagtgattgaatag

SEQ ID NO: 1580 - protein, 264 aa, Unknown
  Obtained from environmental sample
  SIGNAL (1)...(20)
  DOMAIN (59)...(221): MatE
  misc_feature (1)..(264): Xaa is any amino acid
MKIGVMGAALSTFLSRIIAASITTVMLXRNRKSPISLSGLHHVRIVRSMIKNILNVGIPSGMESSMFMIGKLLTQRIFAVFGTAAIAANAIASLINSFSFMPGNAFGMALLTVVGQCVGAGDYPAVKKQVFKIMKIAFISIFTVSTATYIFMEPLVSLFSLSPEAHETAKSILRIHCISMAFGWAMSFALPNALRAAGDARYVMVVASISMWTVRVCASYLFSFTFKLGPVGVWLAMGADFLVRGTSYLIRWLGGKWQAKKVIE

SEQ ID NO: 1581 - DNA, 471 bp, Unknown
  Obtained from environmental sample
  misc_feature (1)..(471): n is a, c, g, or t
ttgagggggagaagtattaggcttcaggtttttctctctcacgcgggagtcgcctcaagaagggcggcggaagaaataatagcggcggggcgggtttccgttaacggcgtaaaaataacggagatgggaaccaaagtagaagagggcgataaggttcttttagacggaaagcccgtgcttcaggaaactcaaaaacattatatcgcgcttaacaagccgcccggctacatttgcagttcagaggacccgcagggccgtccgcttgcgttaagcctgcttcccgttcaaaaagagcggctttacaatgtggggcggctggattttttatcatgcgggcttattttttttaccaacgacggcgcttttgccgcccgccttggacacccttcatgcggccttgaaaaagagtacatcgtagaggcgacaggcgtaatccgggacgaagtagtagaagcttctgcggcggaataa

SEQ ID NO: 1582 - protein, 156 aa, Unknown
  Obtained from environmental sample
  DOMAIN (66)...(155): RNA pseudouridylate synthase
  misc_feature (1)..(156): Xaa is any amino acid
MRGRSIRLQVFLSHAGVASRRAAEEIIAAGRVSVNGVKITEMGTKVEEGDKVLLDGKPVLQETQKHYIALNKPPGYICSSEDPQGRPLALSLLPVQKERLYNVGRLDFLSCGLIFFTNDGAFAARLGHPSCGLEKEYIVEATGVIRDEVVEASAAE

SEQ ID NO: 1583 - DNA, 357 bp, Unknown
  Obtained from environmental sample
  misc_feature (1)..(357): n is a, c, g, or t
atgatttctgcaaaacgcgaatactgggaaaatctaaaagagcgatacggcagaaagagcgaaggaaaaatttcccgcgccgccatggaaaccctggctatcgtcgcgtatatgcagcctgtaacgcgccccgaaattgaaaaaatacgcggagtgtccgcggacaatatgattaggcttctgttggaaaaaggtcttgtggacgaagcggggaaaaaagacattcccggaaggcccgttatgtataaaacgacaaaagaattccttaaaatattcggactttcctcgatagcggaacttccgaaactcggagaaagcgacatcgaaaaattcgagcttgagggggagaagtattag

SEQ ID NO: 1584 - protein, 118 aa, Unknown
  Obtained from environmental sample
  DOMAIN (2)...(103): Putative transcriptional regulators (Ypuh-like)
  misc_feature (1)..(118): Xaa is any amino acid
MISAKREYWENLKERYGRKSEGKISRAAMETLAIVAYMQPVTRPEIEKIRGVSADNMIRLLLEKGLVDEAGKKDIPGRPVMYKTTKEFLKIFGLSSIAELPKLGESDIEKFELEGEKY

SEQ ID NO: 1585 - DNA, 573 bp, Unknown
  Obtained from environmental sample
  misc_feature (1)..(573): n is a, c, g, or t
atgaaagcgaaagaatttgtagattcactttttaagggttatgaagaaacggcggcgcttgcggattttaaggaagaactgctggcaaacctaaacgcaaaaaccgaaagccttgtcaaaaaaggcatggagccggaagcggcttttgaaaaagcggccgcgcagttgggcgatgtatccgcgctggcggatgaactttcgctgaaaaagcgaaaagaagtatttgaggaggtatatatggatataagaaattttatgagcataaagagagtagcaggttacgctgtttttacggtattggcgctttttggaattattactgggcttattgtttttttcagcggaaaccgacagaacgcgcaaattgatctttccggagtatttgcttcggtaataccttttattacagcctctgttgcgggatttacatgtcttggaatgacgcaggaaacctcttcatcgtatcctgtgagtggtaaacgcgccaaatggtatgctgccgccgccggccttatcgtttttggactttttactgtaccgatagtttgtcggcagcaaagcaactcgccataa

SEQ ID NO: 1586 - protein, 190 aa, Unknown
  Obtained from environmental sample
  misc_feature (1)..(190): Xaa is any amino acid
MKAKEFVDSLFKGYEETAALADFKEELLANLNAKTESLVKKGMEPEAAFEKAAAQLGDVSALADELSLKKRKEVFEEVYMDIRNFMSIKRVAGYAVFTVLALFGIITGLIVFFSGNRQNAQIDLSGVFASVIPFITASVAGFTCLGMTQETSSSYPVSGKRAKWYAAAAGLIVFGLFTVPIVCRQQSNSP

SEQ ID NO: 1587 - DNA, 348 bp, Unknown
  Obtained from environmental sample
  misc_feature (1)..(348): n is a, c, g, or t
atggcggaattgtcatcggccataatgtcatctgacctgctaagggggcatacggacaccattgtccttcacatccttgcgggcggcgacgcttacggcttcgagatttacaaccgtattcttgagaaaacagacgggcagtacgagccaaaggaaactaccctttactcaagttacaagcggctggaagcggacggttgtattgattcgtattggggagacgagacgcagggagcaaggcggaaatattaccggattaccgataaaggccggaaagtattaactcagggactgcgcgactggaagtttacgcagaaaatcatcaacgatttattggaggagaaatga

SEQ ID NO: 1588 - protein, 115 aa, Unknown
  Obtained from environmental sample
  DOMAIN (12)...(97): Transcriptional regulator PadR-like family
  misc_feature (1)..(115): Xaa is any amino acid
MAELSSAIMSSDLLRGHTDTIVLHILAGGDAYGFEIYNRILEKTDGQYEPKETTLYSSYKRLEADGCIDSYWGDETQGARRKYYRITDKGRKVLTQGLRDWKFTQKIINDLLEEK

SEQ ID NO: 1589 - DNA, 933 bp, Unknown
  Obtained from environmental sample
  misc_feature (1)..(933): n is a, c, g, or t
ttggcgtttctcggggagaaaaaaagggccaaaatggggggggacccgggaaaaccccccaggggggttcccctttttgccctttgggggggcttaaccccgcccccggaagggcagggggggtttggccaaaattggcccccttccgaaacgttggggggaaattttcccacatcaccctttccaggaaataaacgcccgaagttatttgaggctggggttagatttttggataattttatcttggacgcagattttgcttctctgcctaatgatggtcggctttattgcgcaaaagtcggcctcattgacgagaaggcccgcatctcaattagcgaccttattctttgtgtgtttntgccctgtactacatngtctgcgtttctgggtgccggtttttcacagctttcttcgctgggagttatctttttaatttcagccctcaatatggttatttgttttatgctttccaaatacatactgtacagaaaagccggagtggatcaaaaaaaggttttgacgtacgccacagttattcccaatgccagtttcctgggaaacccgattatagaaagcatttacggccttgaagcacttgtttattcggcggtctaccttgcgccgcttagagtatccctttggtcggtgggcatcgcaattttttccggcaaaaaggtcagtctaaaaaaaatcgcctttcacccctgccttgtggcaacttatcttggcattctgattatggtaacaaactttaagccgccgccgctggtgttccggctggccaatagcctggggaattgtacaacgccgctttcaatgatggttgtaggcagcatccttggcacggtaaagcccaagcatttcttttccggactgaccctttatttcaccttcgcccgcctgattctaattcccctcatggtactggcttag

SEQ ID NO: 1590 - protein, 310 aa, Unknown
  Obtained from environmental sample
  DOMAIN (80)...(308): Auxin Efflux Carrier
  misc_feature (1)..(310): Xaa is any amino acid
MAFLGEKKRAKMGGDPGKPPRGVPLFALWGGLTPPPEGQGGFGQNWPPSETLGGNFPTSPFPGNKRPKLFEAGVRFLDNFILDADFASLPNDGRLYCAKVGLIDEKARISISDLILCVFXPCTTXSAFLGAGFSQLSSLGVIFLISALNMVICFMLSKYILYRKAGVDQKKVLTYATVIPNASFLGNPIIESIYGLEALVYSAVYLAPLRVSLWSVGIAIFSGKKVSLKKIAFHPCLVATYLGILIMVTNFKPPPLVFRLANSLGNCTTPLSMMVVGSILGTVKPKHFFSGLTLYFTFARLILIPLMVLA

SEQ ID NO: 1591 - DNA, 552 bp, Unknown
  Obtained from environmental sample
  misc_feature (1)..(552): n is a, c, g, or t
ttgcgcaggcagggcatggaactggatcttggagccatggcaaaaggatacgccgcggacgaagcggcgcgtatagccaagaggggcaaggtaaaacgcggcattattgatcttggcggaaacatccttgcgctgggctggcgcaatgaaagaggatcggttccatggcgcataggagtccaaaacccctttgacgtccgcggcgaatctatcggctttcttgctgttcatgacacaagcgttgtaacaagcggcgtttacgagcgtttttttgaagctggcggaatgcgtttccatcacattctttctacaactgacggttacccggtagataacggcctgttatctgtaactattgtaacggagcgttcaatggaagccgacgcgctttctaccgccgtttttgccatgggctatgagcggggcagagttctgatagattcaatccccaacgcggaagttgtttttgtgttcgcggacaggagcgtgaaaatcaccggaggcctctccggcattttcacgctcaccaataatgaatttaccctatactag

SEQ ID NO: 1592 - protein, 183 aa, Unknown
  Obtained from environmental sample
  DOMAIN (1)...(162): ApbE family
  misc_feature (1)..(183): Xaa is any amino acid
MRRQGMELDLGAMAKGYAADEAARIAKRGKVKRGIIDLGGNILALGWRNERGSVPWRIGVQNPFDVRGESIGFLAVHDTSVVTSGVYERFFEAGGMRFHHILSTTDGYPVDNGLLSVTIVTERSMEADALSTAVFAMGYERGRVLIDSIPNAEVVFVFADRSVKITGGLSGIFTLTNNEFTLY

SEQ ID NO: 1593 - DNA, 591 bp, Unknown
  Obtained from environmental sample
  misc_feature (1)..(591): n is a, c, g, or t
gtggcggattcacggcgcaatgtcgccaataccgccctgggcgcggtgcgttccaaactgggtaaggatttagggcttggcgataaaggcagccgttttgaatttgtgtggatcattgattttcccctgtttgaatttaatgaggaagaaaaccgctgggaggcggcgcatcatctgttcagttggccgcaggaacaataccacgcaacgctggaaagcgaccccggcgcggtaaaaggcgacctgtacgatctggtattaaacggctacgaacttgcctccggctccattcgtattcatgacccggttttgcagcagcggattttcagcatcgccggttttgatcccgccgaagcggaaaaacgattcggctttttaaccggcgcgtttaaattcggcgctcccccccacggcggcatcgctccgggactggaccggctggttatgctcatggccgggcaaacttcaataaaagaagttatcgccttcccgaaaaattcatttgccgaaggcctgatggacgacagccccggcgaaatcgaccaaaagcagcttgatgaattgcgaataacgatacggaaggaaaaatag

SEQ ID NO: 1594 - protein, 196 aa, Unknown
  Obtained from environmental sample
  DOMAIN (1)...(168): tRNA synthetases class II (D, K and N)
  misc_feature (1)..(196): Xaa is any amino acid
MADSRRNVANTALGAVRSKLGKDLGLGDKGSRFEFVWIIDFPLFEFNEEENRWEAAHHLFSWPQEQYHATLESDPGAVKGDLYDLVLNGYELASGSIRIHDPVLQQRIFSIAGFDPAEAEKRFGFLTGAFKFGAPPHGGIAPGLDRLVMLMAGQTSIKEVIAFPKNSFAEGLMDDSPGEIDQKQLDELRITIRKEK

SEQ ID NO: 1595 - DNA, 411 bp, Unknown
  Obtained from environmental sample
  misc_feature (1)..(411): n is a, c, g, or t
ttgatggccgaggatgacgccctgcatcccgacgatcttatccactacggcatgatccccgaattcataggcaggcttccgatcaccgtgagccttgatgaacttaaacgcgaggacctcaggcggatcatcaccgagccgaacaacgccatagtaaaacagtaccaggcttccctcgcctatgatgacgtgaagctggaatttaccgaagaagccattgacgccatagccgataccgcaatcaagcagaagactggggcgcgcggcctgcgcgccatcgtagaaaaactgatgatcgatattatgttcgagttaccgtcgatgaaaggcagcaaacatgtgattatcaccgaggacgtagtcaaaaatttacagacgcccataatccaccagcttcaaaaaagcgcataa

SEQ ID NO: 1596 - protein, 136 aa, Unknown
  Obtained from environmental sample
  misc_feature (1)..(136): Xaa is any amino acid
MMAEDDALHPDDLIHYGMIPEFIGRLPITVSLDELKREDLRRIITEPNNAIVKQYQASLAYDDVKLEFTEEAIDAIADTAIKQKTGARGLRAIVEKLMIDIMFELPSMKGSKHVIITEDVVKNLQTPIIHQLQKSA

SEQ ID NO: 1597 - DNA, 333 bp, Unknown
  Obtained from environmental sample
  misc_feature (1)..(333): n is a, c, g, or t
atgctcttatcaaacaaaatcgcaaaggcgtctagggcgttttcgacgaattcaacgttaatcgcgcttgttatgtccttgtcaagctcgtcccactcgctgcggttgtcagcgggcagaagtactttttccagttggttgcggatggcggctaacagcttttccttgaggccgcctatgggcagtacccgcccggtcagcgtcagctcgccggtcatggcgatgcccgggcgcggcggtttttggcagagcgtagagagcagggaaacggcgattgccaggcctgccgagggaccgtccttggggattgccccttcggggacatggatgtga

SEQ ID NO: 1598 - protein, 110 aa, Unknown
  Obtained from environmental sample
  SIGNAL (1)...(31)
  misc_feature (1)..(110): Xaa is any amino acid
MLLSNKIAKASRAFSTNSTLIALVMSLSSSSHSLRLSAGRSTFSSWLRMAANSFSLRPPMGSTRPVSVSSPVMAMPGRGGFWQSVESRETAIARPAEGPSLGIAPSGTWM

SEQ ID NO: 1599 - DNA, 579 bp, Unknown
  Obtained from environmental sample
  misc_feature (1)..(579): n is a, c, g, or t
ttgccagtttcgctatatggaaaccgggggacttgtcaacaaaaaactgttgaggagggatttgagttgcgccaaggtcttggttgtggacgatatacagaccacctggacgtagcatcgggactccttggcaaatacaaaatacaggtcgactgcgtaccaagcgggcaggaagcaattgaacgtatcaatgataaaaccccggttnacaacgctatatttatggatcatatgatgccgggaatggacggtatagaagcggcggaagcgatccgtgccttagactcagaatatgccaggaagataccgattatcgccctcactgcaaacgctgtccagggaacgcagaatatgttttttgagcacggttttcaggactttatttccaagcccatagacacaatggatcttgattccgtaataaaaaaatgggtgcgaaacgaatcgcttgagactctgacccctcccgatgaaatgtcctccaatgcggtgcctccggacgcaaaaggcaaaataagcataccgggagtggatactgaaaaagggctttctttcttcgacgggaaccaggatttttaa

SEQ ID NO: 1600 - protein, 192 aa, Unknown
  Obtained from environmental sample
  DOMAIN (34)...(142): Response regulator receiver domain
  misc_feature (1)..(192): Xaa is any amino acid
MPVSLYGNRGTCQQKTVEEGFELRQGLGCGRYTDHLDVASGLLGKYKIQVDCVPSGQEAIERINDKTPVXNAIFMDHMMPGMDGIEAAEAIRALDSEYARKIPIIALTANAVQGTQNMFFEHGFQDFISKPIDTMDLDSVIKKWVRNESLETLTPPDEMSSNAVPPDAKGKISIPGVDTEKGLSFFDGNQDF

SEQ ID NO: 1601 - DNA, 624 bp, Unknown
  Obtained from environmental sample
  misc_feature (1)..(624): n is a, c, g, or t
ttgtgcgacgaaattaacctgcttaccccgaaaacacagggaagcttttttcaggtgatggaagagcagagcgtaactatcgagggcaaatcataccgcttgcaagatccgttctttatcatcgctacaatgaacctgaagggcgtccacctgttcccgctccccgtgccccagcttgaccgttttatgatacgcctctccctcggttatcccagcgaagaagacgagacagaaattatcaacaggcacggaaagatagacgcgtggaacaactttaagagcgtaatcgacagcagggacttaatccgctggcggaaaatggtggacgaggttcatatgcaccccgaagtaaccgcctaccttgtaaactgcgtcagaaaaaccaggtcgcaccccgacatagaaacacccgcaagcccgcgcgccggcgtgcgtatctcgcgtcttgcccgctcgctcgctatgtgccgcggtatggattttgtttccgttgatataattaaggaaatatttattcacgcgatggctcaccgtataattacccgcgatccttccataccgccggaagcgccgcttcaaaatattttaaattcggtccctgttgagccgaagcgggaacagtaa

SEQ ID NO: 1602 - protein, 207 aa, Unknown
  Obtained from environmental sample
  misc_feature (1)..(207): Xaa is any amino acid
MCDEINLLTPKTQGSFFQVMEEQSVTIEGKSYRLQDPFFIIATMNLKGVHLFPLPVPQLDRFMIRLSLGYPSEEDETEIINRHGKIDAWNNFKSVIDSRDLIRWRKMVDEVHMHPEVTAYLVNCVRKTRSHPDIETPASPRAGVRISRLARSLAMCRGMDFVSVDIIKEIFIHAMAHRIITRDPSIPPEAPLQNILNSVPVEPKREQ

SEQ ID NO: 1603 - DNA, 498 bp, Unknown
  Obtained from environmental sample
  misc_feature (1)..(498): n is a, c, g, or t
gtggagccggatacctgggcaaaggtggtgaaccgcgttagcggcgcgaattttggcaatatttattgcggaaccaaagtgctgggttatagaaaggtaaaactccctgcagggcatacttgggagagctacaccaagctactgcttgcaacgcttccaaaagcggtttcaatcggttacaaaaaaaaattcaccaagttcataaagcactggcaaagcacagggtctgccataaatagttcatggattccagaagaagctactttttcggggaaattctcaactcggggcaaaaagaacctaccacttgtgatttacaaaaaaataccggacaaacttcctttttgggtggaatcaaaaaagattggtccaagctggcggcgcatggctatatgtattttgaaaaacgaccaattgtgccgctcgctttctttttctcaaacaaaaaagcaaagagagagaatacaaagcatgtttgaaaaatatagcttaatataa

SEQ ID NO: 1604 - protein, 165 aa, Unknown
  Obtained from environmental sample
  misc_feature (1)..(165): Xaa is any amino acid
MEPDTWAKVVNRVSGANFGNIYCGTKVLGYRKVKLPAGHTWESYTKLLLATLPKAVSIGYKKKFTKFIKHWQSTGSAINSSWIPEEATFSGKFSTRGKKNLPLVIYKKIPDKLPFWVESKKIGPSWRRMAICILKNDQLCRSLSFSQTKKQRERIQSMFEKYSLI

SEQ ID NO: 1605 - DNA, 318 bp, Unknown
  Obtained from environmental sample
  misc_feature (1)..(318): n is a, c, g, or t
atggaacaaaaagaatacgaaagcccagtttacaatgtaaaggctatccctgtggaaaagctgagggctaacgagtacaaccccaacaaggttgccccgccagaaatggaacttttgtaccgcagcattaaagaagacggttacaccatgcctatagtggtttatcaccgcaaagaagaagacgtgtacgagatagttgacggctttcatagatattccgtgatattgatatacaaggatatttacgaaagggaaaaagggttgctgccctgttctgttattgaaaacccattggcgagcgcatggcatccaccataa

SEQ ID NO: 1606 - protein, 105 aa, Unknown
  Obtained from environmental sample
  DOMAIN (14)...(97): ParB-like nuclease domain
  misc_feature (1)..(105): Xaa is any amino acid
MEQKEYESPVYNVKAIPVEKLRANEYNPNKVAPPEMELLYRSIKEDGYTMPIVVYHRKEEDVYEIVDGFHRYSVILIYKDIYEREKGLLPCSVIENPLASAWHPP

SEQ ID NO: 1607 - DNA, 702 bp, Unknown
  Obtained from environmental sample
  misc_feature (1)..(702): n is a, c, g, or t
atggggtcgataatgccatgcaccgccaagaagttcgagatctcccgctccaaagagatgtcgtccagcggctacaaggacatcgacgtctctctcaccacgcgcgagctgagccgtatgataaagtcggcgggcatagacttcaaaaatctgccggaagagggcgccgactccatactcggcgattacaccggcgccgggacgatcttcggagcgacaggcggcgtcatggaggctgcgttgcgtaccgcttatcatttgataacgaagaaagagctctccgacgtaaacttcaaaggcgtccgcggtttagagggcgtcaaagaagcgacggtggatgtggacggcacggaggtgagggtagccgtagcccacggcatggtcaacatcgccgcggtgctcgacaaaatcaaaaccgcgctcgccgaaggcaaggagaccccgtaccacttcgtagaggtgatggcctgccgaggcggttgcgtaggcggtggaggccagccgtacggcgccgacgacaacgtgcgcaaactccgcgccgacggcctgtacctagatgatgagaagtcaaaattccgctgttcgcacaagaacccgcagatcgccaagctctacgaggagttcttggaaaagccgctgtcccacaagtcgcatgatctgctgcacaccagttacgaaccgagaccggagtatcggtggtag

SEQ ID NO: 1608 - protein, 233 aa, Unknown
  Obtained from environmental sample
  DOMAIN (170)...(229): Iron hydrogenase small subunit
  misc_feature (1)..(233): Xaa is any amino acid
MGSIMPCTAKKFEISRSKEMSSSGYKDIDVSLTTRELSRMIKSAGIDFKNLPEEGADSILGDYTGAGTIFGATGGVMEAALRTAYHLITKKELSDVNFKGVRGLEGVKEATVDVDGTEVRVAVAHGMVNIAAVLDKIKTALAEGKETPYHFVEVMACRGGCVGGGGQPYGADDNVRKLRADGLYLDDEKSKFRCSHKNPQIAKLYEEFLEKPLSHKSHDLLHTSYEPRPEYRW

SEQ ID NO: 1609 - DNA, 543 bp, Unknown
  Obtained from environmental sample
  misc_feature (1)..(543): n is a, c, g, or t
atgcaccgccaagaagttcgagatctcccgctccaaagagatgtcgtccagcggctacaaggacatcgacgtctctctcaccacgcgcgagctgagccgtatgataaagtcggcgggcatagacttcaaaaatctgccggaagagggcgccgactccatactcggcgattacaccggcgccgggacgatcttcggagcgacaggcggcgtcatggaggctgcgttgcgtaccgcttatcatttgataacgaagaaagagctctccgacgtaaacttcaaaggcgtccgcggtttagagggcgtcaaagaagcgacggtggatgtggacggcacggaggtgagggtagccgtagcccacggcatggtcaacatcgccgcggtgctcgacaaaatcaaaaccgcgctcgccgaaggcaaggagaccccgtaccacttcgtagaggtgatggcctgccgaggcggttgcgtaggcggtggaggccagccgtacggcgccgacgacaacgtgcgcaaactccgcgccgacggcctgtacctagatga

SEQ ID NO: 1610 - protein, 180 aa, Unknown
  Obtained from environmental sample
  misc_feature (1)..(180): Xaa is any amino acid
MHRQEVRDLPLQRDVVQRLQGHRRLSHHARAEPYDKVGGHRLQKSAGRGRRLHTRRLHRRRDDLRSDRRRHGGCVAYRLSFDNEERALRRKLQRRPRFRGRQRSDGGCGRHGGEGSRSPRHGQHRRGARQNQNRARRRQGDPVPLRRGDGLPRRLRRRWRPAVRRRRQRAQTPRRRPVPR

SEQ ID NO: 1611 - DNA, 873 bp, Unknown
  Obtained from environmental sample
  misc_feature (1)..(873): n is a, c, g, or t
gtgaacagtacaagccttatcccgtcccaatccccggaagaagcggccgctgcagccgaagcggaaaaagccgaggcggctgagaagtcgggtatttacaatttaagagcgaggcaggacggagaaagggtaattatcacttttgataaggaagataaaaacaaaaacgctattttgtaccgcagtatgcagcccatcgcccgttctcaagatttgcttaacgccgtaattgtacaatcaaaaataaactctccctttgttgattttcccgttcccgcgccagggcttacatggtattacgcggtaatttatgaagacgaaattgccggcggcaacatgggaattaaaccgggaataaacgctactgtgtctcctgtaaccgtaacaagcgaacagccgcctgagcgtaatctgcgcccgattccgcttcccgaacttacgttacgcaatacagtccccgacagttattttttgacggagataccggagcaggttcctttaagttcggtttctgaaaatattgtccgcgatacaagaatgccggcgaaagctccgctgaaattaaaaagaccgcgtgttttttcggtggatttagtagcgcccacgggcggcgaagaatcggctctgtttcagataattacggaatcctttttaacatttaactgggaagaagcaagaatcagtttacagcattatttatctttgccgcgatcaagggatattgaggcgcgtgcccgtttttatcttgngcagacattgtactatacgggaaattaccgtcaatcgttaatggaatttatgtcgataaggtctattcatcttgcggaagcgaataaatggatagaagcggtattatcggctatggtatattaa

SEQ ID NO: 1612 - protein, 290 aa, Unknown
  Obtained from environmental sample
  misc_feature (1)..(290): Xaa is any amino acid
MNSTSLIPSQSPEEAAAAAEAEKAEAAEKSGIYNLRARQDGERVIITFDKEDKNKNAILYRSMQPIARSQDLLNAVIVQSKINSPFVDFPVPAPGLTWYYAVIYEDEIAGGNMGIKPGINATVSPVTVTSEQPPERNLRPIPLPELTLRNTVPDSYFLTEIPEQVPLSSVSENIVRDTRMPAKAPLKLKRPRVFSVDLVAPTGGEESALFQIITESFLTFNWEEARISLQHYLSLPRSRDIEARARFYLXQTLYYTGNYRQSLMEFMSIRSIHLAEANKWIEAVLSAMVY

SEQ ID NO: 1613 - DNA, 420 bp, Unknown
  Obtained from environmental sample
  misc_feature (1)..(420): n is a, c, g, or t
ttgagttaccgcctgaatttgcacgaaagcataaacgattatttgatagcgcaaaatttggatggtgtgaattattactaccgtgtaaagacaagcgaaagcattgaggacaaaattatgcgttttcagggcaggggtgagcaatttcctgttaataactggatgaatgatatttttggggctaggataatcctctgttcaggcgatattgaagctattttaaagctgctggacggctggcaggagaaatacgggttgaaaaactggtattcaagggacaaggaaggttataagggcatacatatttattttaaaaataaaagcaatttttatttcccttgggagcttcaaatctgggataaaaaggatgttgaaaaaaatattgaaaatcataggaaatttaagagaaaatttatataa

SEQ ID NO: 1614 - protein, 139 aa, Unknown
  Obtained from environmental sample
  misc_feature (1)..(139): Xaa is any amino acid
MSYRLNLHESINDYLIAQNLDGVNYYYRVKTSESIEDKIMRFQGRGEQFPVNNWMNDIFGARIILCSGDIEAILKLLDGWQEKYGLKNWYSRDKEGYKGIHIYFKNKSNFYFPWELQIWDKKDVEKNIENHRKFKRKFI

SEQ ID NO: 1615 - DNA, 402 bp, Unknown
  Obtained from environmental sample
  misc_feature (1)..(402): n is a, c, g, or t
gtggtgcgccagatatatatactcaattctcttgactttgatgatcttattcaggcctgtaatgaatcgttaaggcagggaaactgccttattatttttccggaaggaaccagaaccccccgatccggtaaagtaattttcagaaaaggagccgcccgcattgctctggcttccggttgtaatattgtaccggtgtatataggcggtacggacaaatacggtctgggcaagaaagatccctggaccggttttaactcacgggagcgttatgtctaccgtatcagcatagggcctgaaattgatcctgaaaaataccggagattgcccatacccagagcggtacgggcgctgaccagggaaatgacagctttcctgtctccggcaaaggatgccgttaaataa

SEQ ID NO: 1616 - protein, 133 aa, Unknown
  Obtained from environmental sample
  misc_feature (1)..(133): Xaa is any amino acid
MVRQIYILNSLDFDDLIQACNESLRQGNCLIIFPEGTRTPRSGKVIFRKGAARIALASGCNIVPVYIGGTDKYGLGKKDPWTGFNSRERYVYRISIGPEIDPEKYRRLPIPRAVRALTREMTAFLSPAKDAVK

SEQ ID NO: 1617 - DNA, 945 bp, Unknown
  Obtained from environmental sample
  misc_feature (1)..(945): n is a, c, g, or t
atgggttgcaatatgctgcgtctgcatcacatggacgccccttggacgtcgccgaatatcttcggcaacgcggaggggacgcgcgctttctccgcggagtctatgcggcagcttgactatcttataacgcgttgcaaggagcgcggcatctatatattcctcgacttcctagttcatcgcgactttactgccgcggacggcgtttttgacccgccgccggatctcggcggaaagcaagcgggatttttctcccgcaagcttatcgacttgcagaaagagtatattgccaatttattaaaccacgtcaaccaattcacgggaatcgcctacaaggacgaacccgccatagcggcgtcggaattcataaacgagtctaccgtctttaccgcgttctccggcgacatactgacgccggcttaccgcaaggagcttgagagtttgtgggaggagcggctgttaaatatggagatggcggaatccgctccggcgaatcgtaatttaacgaaaccgatagtaaaaaaatcgtcatcctcaaaatccgccgcgaggccgtcctattcaaaaacggctgcggcaaaagcggaattcgcaaagtttaaatcaacttacagtgagtccgccgcgccgtcggaaccggaaacggtggtgccggatatcgggccgtcaggattcgcgaagatagatccggtggaatttgtcagcctcgcctcaacctacaagagcctcgcggtgttcggcatagattggaagggcgaccgatcgtggctcanacgaacatccgattccggtgatgtcaaggagagtataanattcctctcggaggtggagaggggatacttcagggagatgcgcggctactttcacggcatangcgggcgctacgtgcttgccggcagcaacatgccgctgccgtttttggcatgctcaagacaatacggaacttga

SEQ ID NO: 1618 - protein, 314 aa, Unknown
  Obtained from environmental sample
  misc_feature (1)..(314): Xaa is any amino acid
MGCNMLRLHHMDAPWTSPNIFGNAEGTRAFSAESMRQLDYLITRCKERGIYIFLDFLVHRDFTAADGVFDPPPDLGGKQAGFFSRKLIDLQKEYIANLLNHVNQFTGIAYKDEPAIAASEFINESTVFTAFSGDILTPAYRKELESLWEERLLNMEMAESAPANRNLTKPIVKKSSSSKSAARPSYSKTAAAKAEFAKFKSTYSESAAPSEPETVVPDIGPSGFAKIDPVEFVSLASTYKSLAVFGIDWKGDRSWLXRTSDSGDVKESIXFLSEVERGYFREMRGYFHGIXGRYVLAGSNMPLPFLACSRQYGT

SEQ ID NO: 1619 - DNA, 675 bp, Unknown
  Obtained from environmental sample
  misc_feature (1)..(675): n is a, c, g, or t
ttgagaatgaggctcaatatggatgcattaaacgcaaacgaacaaccgcccgccgaacggccgcgccagcctaacatcgtctttgccggcaagaatatttgggtatccgaattggcaagcatggcgctcatcggcgtcctgcttctcccgctgctcaccgtgtctttattgattcttagaaacgagctcaccatacacaaacaaaactacgacatcgcggcgttgaaggcggagcgggtcaacactatgcacaccctggcgataatgaaggagaaggagcggttggtgcggatactggacgaggtcgcggggcaaaagataacgccggaggcgagataccggctcgcggagcttatacatcagaacagcgcccagtacggctacagcccggagctgctcttggcggttatagccgtggagagcaggttcaacccgcaggcgatggggcgctaccggggcgggacgctcagcggcgccatcggacttatgcagatcaagtacgagacggcggcgcatatcgctaaaacgctggacatgggaaagatcaagcggcaggatcttcttgatccggagatcaacatggtgctgggaacggcttacctgatgacgctgatcacgcagttcaagagcttcaaacacgggattcttggcttacaatttggaccggaaaggtag

SEQ ID NO: 1620 - protein, 224 aa, Unknown
  Obtained from environmental sample
  DOMAIN (117)...(224): Transglycosylase SLT domain
  misc_feature (1)..(224): Xaa is any amino acid
MRMRLNMDALNANEQPPAERPRQPNIVFAGKNIWVSELASMALIGVLLLPLLTVSLLILRNELTIHKQNYDIAALKAERVNTMHTLAIMKEKERLVRILDEVAGQKITPEARYRLAELIHQNSAQYGYSPELLLAVIAVESRFNPQAMGRYRGGTLSGAIGLMQIKYETAAHIAKTLDMGKIKRQDLLDPEINMVLGTAYLMTLITQFKSFKHGILGLQFGPER

SEQ ID NO: 1621 - DNA, 867 bp, Unknown
  Obtained from environmental sample
  misc_feature (1)..(867): n is a, c, g, or t
ttgcgcggcaagcggtataaaggaatttgtgaaaatttacgtaccaaaattttcgcatggcctttgggaaaaaaagatttacccgcacaggaagaatttgataaagcgattcgcgatctggttaagcatataatcgctctatggcaggtgaaagtagaggaagactacaccgctaatacatttacggcagaagagcttgaaaaagccgatgagaaacaccggaaaaaatacgaggcggatgctggcagccgcaacaaggcttatggttcaaccctgatagcagccgctattacaaaagattattggttcggtatccacataggcgacggccgctttaccgccctgtacccggacggtaatttcgagcaaccagttccgtgggatgagagatgttaccttaatgtgactacttcgatttgcgatgacgacgcttatgaacaggctcgttgttatttttcctaccatgaggtaaaagcgccacctgtcgcgatttttctgtgcagcgacggcattgatgacaattacccgattgatgaaaacgaaaaatatttgtttaagttataccgcaccattgccattacttttgccgaagacggttttgaatctaccaataaacagttgatagacctggctaattcattcgccaccaagggcaagggagacgataccagtattgccggttttgttgatatggaaggcttggagaaagcggttcctgtttggaaaaaacagattgaagaggaagaagctgctgaaaaaacgccaaaggatgaaacacaggcagaaacggaagctgagaagccaaaccaggccgataccagcaaagtgttggaagctatcgaagcgtataagaggaatatgaactga

SEQ ID NO: 1622 - protein, 288 aa, Unknown
  Obtained from environmental sample
  misc_feature (1)..(288): Xaa is any amino acid
MRGKRYKGICENLRTKIFAWPLGKKDLPAQEEFDKAIRDLVKHIIALWQVKVEEDYTANTFTAEELEKADEKHRKKYEADAGSRNKAYGSTLIAAAITKDYWFGIHIGDGRFTALYPDGNFEQPVPWDERCYLNVTTSICDDDAYEQARCYFSYHEVKAPPVAIFLCSDGIDDNYPIDENEKYLFKLYRTIAITFAEDGFESTNKQLIDLANSFATKGKGDDTSIAGFVDMEGLEKAVPVWKKQIEEEEAAEKTPKDETQAETEAEKPNQADTSKVLEAIEAYKRNMN

SEQ ID NO: 1623 - DNA, 594 bp, Unknown
  Obtained from environmental sample
  misc_feature (1)..(594): n is a, c, g, or t
gtggacggttcggtggaggcattggccacgtcgcttgaaaaattgagcacgccggagatcaaggtgcgtgtgatacacaagagcgtgggcgctgttaaagagacggacatcatgctcggcgtggcgtcgaacgcgcttatcatcggtttccatttgagccccaatacgaagataagggacatggcgaagcgtgaaggcgtggagatcaggacgtaccgcatcatctacgaggcggtggacgccgtgcacaacgccatggagggcatgctcaagccggagatcagggagaacgtcttggcggaagccgtggtgcgcaaactcttcaaggtctccaagatcggcacgatagccggttgcatagtggagagcggcacgctcaacaggaactctaaggcgagggttataagaaacgacgttgaattggcggagtccaagatatcgagcctgaagcgtctgcaggacgatgtgagggaggtgcagaccgggtacgagtgcggtatcatgcttgacaggttcacggacttccaggagggcgataggatcgtgacgtttgaggaagtggagatcgcgaggaagttgacgaagaataattga

SEQ ID NO: 1624 - protein, 197 aa, Unknown
  Obtained from environmental sample
  DOMAIN (114)...(182): Elongation factor Tu domain 2
  misc_feature (1)..(197): Xaa is any amino acid
MDGSVEALATSLEKLSTPEIKVRVIHKSVGAVKETDIMLGVASNALIIGFHLSPNTKIRDMAKREGVEIRTYRIIYEAVDAVHNAMEGMLKPEIRENVLAEAVVRKLFKVSKIGTIAGCIVESGTLNRNSKARVIRNDVELAESKISSLKRLQDDVREVQTGYECGIMLDRFTDFQEGDRIVTFEEVEIARKLTKNN

SEQ ID NO: 1625 - DNA, 318 bp, Unknown
  Obtained from environmental sample
  misc_feature (1)..(318): n is a, c, g, or t
ttggacgggtttatctgtatggacaagcccgtcggcccgtcgtcgttctcggcggcgcgggcggtctgtaaggcgttgggcgtatccaaaggcggtcacgccggaacgctcgaccccatggcgtcggggcttcttgtggtcgcgctcgggcggtgcacgcggcttttagaatacctgtcccttgagcctaaagagtacgagtttacggtgacgttcggcgccgccaccgacacgttcgacgcggagggcgaggttacggcgcgcagcggcgttattccgacgcgagatcggttagttaaggcgataaagggcttttag

SEQ ID NO: 1626 - protein, 105 aa, Unknown
  Obtained from environmental sample
  DOMAIN (23)...(105): TruB family pseudouridylate synthase (N terminal domain)
  misc_feature (1)..(105): Xaa is any amino acid
MDGFICMDKPVGPSSFSAARAVCKALGVSKGGHAGTLDPMASGLLVVALGRCTRLLEYLSLEPKEYEFTVTFGAATDTFDAEGEVTARSGVIPTRDRLVKAIKGF

SEQ ID NO: 1627 - DNA, 603 bp, Unknown
  Obtained from environmental sample
  misc_feature (1)..(603): n is a, c, g, or t
ttgaactatgtcgacgcctcggcggcggctacgggggaggttatcttctcgttcttcaagcactgcggcgtcgccgttcccgcgcacgtggctgtcgatctctatacagcggtgatgaccgacaccgggggctttcgcttctccaacacttgcgggcgggtgttgcgcatctgcgcggagttggcggagttgggggttgactgctcggacgtttacgaacgggtcttctcctgccacacgcctcaggcgttggcgctacaggcgcgggtatggtctacgcttaaatttcacttggggggcagggtgtgcagtttggatatgccgctctcgctcttggaagaggttggggcgaagtacagcgattcggagggcatggccgacaacacggtgacggcgctcggggtggaggtcggcgtgatgacgaaacactcgccggaggagacgcacttcagtctgcggtctaagggatcggtggacgtggggaagctggccaaaggtatagccggcggaggcgggcacagctgcgcggcggggtgcacgataaagaagccgtacgcggaggctatggcagtgatgcttgagatattggaaaaggcgctgtag

SEQ ID NO: 1628 - protein, 200 aa, Unknown
  Obtained from environmental sample
  DOMAIN (128)...(195): DHHA1 domain
  misc_feature (1)..(200): Xaa is any amino acid
MNYVDASAAATGEVIFSFFKHCGVAVPAHVAVDLYTAVMTDTGGFRFSNTCGRVLRICAELAELGVDCSDVYERVFSCHTPQALALQARVWSTLKFHLGGRVCSLDMPLSLLEEVGAKYSDSEGMADNTVTALGVEVGVMTKHSPEETHFSLRSKGSVDVGKLAKGIAGGGGHSCAAGCTIKKPYAEAMAVMLEILEKAL

SEQ ID NO: 1629 - DNA, 507 bp, Unknown
  Obtained from environmental sample
  misc_feature (1)..(507): n is a, c, g, or t
gtgggagttacggcgactgcaacaggcggaggggcgataacagcgggctctgcaggaacgacggctacgtcgggggcagcaggctctgggacgatagcagcgggttcctcaggaataacttctgctggagcatgttcttcgggagtgggttctacgatagttggtacaacaggggctatcgcaacaggcggagagactataacagggggctctgccggaacgacggctacgtcgggggcagcaggctctgggacgatagtagcgggttcctcgggaacaacttctgctggaatatgttcttcgagcgttggcacaacaggggctaccgcaacaggcggggggactatagcaggggtctctgccggaacgacggctacatcgggggcaggaagcggggggacgatagtagctggttctatgggggcaggttctacgggctgtgggacgatagcaacggtatcagcgggatcggggacgatagtagtggtcgaggttgtaatgttttga

SEQ ID NO: 1630 - protein, 168 aa, Unknown
  Obtained from environmental sample
  SIGNAL (1)...(26)
  misc_feature (1)..(168): Xaa is any amino acid
MGVTATATGGGAITAGSAGTTATSGAAGSGTIAAGSSGITSAGACSSGVGSTIVGTTGAIATGGETITGGSAGTTATSGAAGSGTIVAGSSGTTSAGICSSSVGTTGATATGGGTIAGVSAGTTATSGAGSGGTIVAGSMGAGSTGCGTIATVSAGSGTIVVVEVVMF

SEQ ID NO: 1631 - DNA, 468 bp, Unknown
  Obtained from environmental sample
  misc_feature (1)..(468): n is a, c, g, or t
gtgccaacgctcgaagaacatattccagcagaagttgttcccgaggaacccgctactatcgtcccagagcctgctgcccccgacgtagccgtcgttccggcagagccccctgttatagtctctccgcctgttgcgatagcccctgttgtaccaactatcgtagaacccactcccgaagaacatgctccagcagaagttattcctgaggaacccgctgctatcgtcccagagcctgctgcccccgacgtagccgtcgttcctgcagagcccgctgttatcgcccctccgcctgttgcagtcgccgtaactcccacggaacccgtttctatcgtcccctcgcctgtaccgcctccttcagttgtatcgccccctgttcaatcccctgaaccaacggtaactcccgttgtaacccaagcccagagagctccaatacaggntattaccggcgcatcaccagccaaaacataa

SEQ ID NO: 1632 - protein, 155 aa, Unknown
  Obtained from environmental sample
  misc_feature (1)..(155): Xaa is any amino acid
MPTLEEHIPAEVVPEEPATIVPEPAAPDVAVVPAEPPVIVSPPVAIAPVVPTIVEPTPEEHAPAEVIPEEPAAIVPEPAAPDVAVVPAEPAVIAPPPVAVAVTPTEPVSIVPSPVPPPSVVSPPVQSPEPTVTPVVTQAQRAPIQXITGASPAKT

SEQ ID NO: 1633 - DNA, 435 bp, Unknown
  Obtained from environmental sample
  misc_feature (1)..(435): n is a, c, g, or t
ttgcttcggaactatcccgataggaaaggtcgtttttttatgattatgtcgatcctttccgatgncatgaaacgagaaataaaggtatggactataaaggacggttataggttgggagacgatatacagagcaaagtcttatccttcgcttttagtttatccgctgaaattgaaagaaatttaatttctcaaagaacaaaagaagctctcgctcggtgcaaagcggaagggaaaattttaggtcgtaagccgggaagaaccttgaaagtaagattaactggaaatgaaaaagagatacgcaaaatgctccgtgaaggaaagaacaatgttgaaataggtaagaggtttggagtgcatcggcagaccgttagatattttatcagagaacgactgacaaagtggaagttaaagaagctgtttccggcggcgaaataa

SEQ ID NO: 1634 - protein, 144 aa, Unknown
  Obtained from environmental sample
  misc_feature (1)..(144): Xaa is any amino acid
MLRNYPDRKGRFFMIMSILSDXMKREIKVWTIKDGYRLGDDIQSKVLSFAFSLSAEIERNLISQRTKEALARCKAEGKILGRKPGRTLKVRLTGNEKEIRKMLREGKNNVEIGKRFGVHRQTVRYFIRERLTKWKLKKLFPAAK

SEQ ID NO: 1635 - DNA, 387 bp, Unknown
  Obtained from environmental sample
  misc_feature (1)..(387): n is a, c, g, or t
ttgagaaactgcatctgccggcaatttgccatcgttttctttcagagttttttcaacctgataaacaacttgttcagcctgattttttgcatccaccaattcgcgggattttctatctttctccgcattggcttctgcatctttaaccatcttgtttatctcatcttcgctaagccccgaagaactctgaattttaatgctctgttcctttcctgtttctttgtcttttgcgctaacgtgtacaatgccgtttgcatcaatatcaaaagaaacctcaatttgcggcagtccgcgcggttttggcggaattccagtcaaatcaaagcgaccaagtgtgcggttatcccttgcaaattccctttcaccttgcaaaacngtgtattgtaa

SEQ ID NO: 1636 - protein, 128 aa, Unknown
  Obtained from environmental sample
  misc_feature (1)..(128): Xaa is any amino acid
MRNCICRQFAIVFFQSFFNLINNLFSLIFCIHQFAGFSIFLRIGFCIFNHLVYLIFAKPRRTLNFNALFLSCFFVFCANVYNAVCINIKRNLNLRQSARFWRNSSQIKATKCAVIPCKFPFTLQNXVL

SEQ ID NO: 1637 - DNA, 633 bp, Unknown
  Obtained from environmental sample
  misc_feature (1)..(633): n is a, c, g, or t
ttgcaaggtgaaagggaatttgcaagggataaccgcacacttggtcgctttgatttgactggaattccgccaaaaccgcgcggactgccgcaaattgaggtttcttttgatattgatgcaaacggcattgtacacgttagcgcaaaagacaaagaaacaggaaaggaacagagcattaaaattcagagttcttcggggcttagcgaagatgagataaacaagatggttaaagatgcagaagccaatgcggagaaagatagaaaatcccgcgaattggtggatgcaaaaaatcaggctgaacaagttgtttatcaggttgaaaaaactctgaaagaaaacgatggcaaattgccggcagatgcagtttctcaagcgaatgcagcagttgcagatttaaaagccgttgccgaaaaagccacgagcaaagaggaaattcaaagcgcaatggacaaagctcagggcgttttgggtcaaattttgcaagcagcccaaatgggcggtgctccaggtggcgaacaccagcacggagagaactgcgaaggttcttgcggagacgactgcaaaaacaaaagcgaaaaaggcaaagaaggtcctgtagatgcagattttgaggttgttaacgaaaagaaataa

SEQ ID NO: 1638 - protein, 210 aa, Unknown
  Obtained from environmental sample
  DOMAIN (1)...(165): Hsp70 protein
  misc_feature (1)..(210): Xaa is any amino acid
MQGEREFARDNRTLGRFDLTGIPPKPRGLPQIEVSFDIDANGIVHVSAKDKETGKEQSIKIQSSSGLSEDEINKMVKDAEANAEKDRKSRELVDAKNQAEQVVYQVEKTLKENDGKLPADAVSQANAAVADLKAVAEKATSKEEIQSAMDKAQGVLGQILQAAQMGGAPGGEHQHGENCEGSCGDDCKNKSEKGKEGPVDADFEVVNEKK

SEQ ID NO: 1639 - DNA, 336 bp, Unknown
  Obtained from environmental sample
  misc_feature (1)..(336): n is a, c, g, or t
atgatgggcgtcgctatttttgacaccgatgttcccattgttaaaaccacatcgggagttttgttctttaccgaagaagaggcgcatatcccgccggaaagaaattgtatacgctgcggaagctgtgtcgagcattgtcctacggggctgataccgacagagttaaacgctgatattttaaaagaagacggcgaggcgtttgtacagcacaacggactcgattgtattgaatgcggcagttgttcctacatctgtccggctaagcggcgtttggctcaggcgatcagaacaatcagaaggatcgagcttgccaaacaaaaaaataaaggtaaataa

SEQ ID NO: 1640 - protein, 111 aa, Unknown
  Obtained from environmental sample
  DOMAIN (29)...(52): 4Fe-4S binding domain
  misc_feature (1)..(111): Xaa is any amino acid
MMGVAIFDTDVPIVKTTSGVLFFTEEEAHIPPERNCIRCGSCVEHCPTGLIPTELNADILKEDGEAFVQHNGLDCIECGSCSYICPAKRRLAQAIRTIRRIELAKQKNKGK

SEQ ID NO: 1641 - DNA, 549 bp, Unknown
  Obtained from environmental sample
  misc_feature (1)..(549): n is a, c, g, or t
gtgaaaatagaaataaaccaaataatgaccgtttcagctcctcctcatatttacggcactgatacaatcgaagcgcgtatgcgcgatgtggtaatcgctctggttcccgctatattaatgtctatgtaccattacggcaaagaggcgttttacgtaacggtaatcgccgttttatccgcgctccttgccgaatacctgtaccagaggatcatgggcaagaccgttacgataaacgatttcagcgcggcaattacgggtatacttctttcttttaatcttcctcctcatgttccgctgtggcttcccgctgtgggaagttttttcgcgattatcgttgttaaacagttattcggcggacttggctcaaactttgtaaaccccgctcttgcggcaagagcgttccttctcgtttcctttcccgtgcttatgacaaaatggacattcgctccggacgccgtgacaagcgccacttacccttgcatcttaaaacgcgatccgacttttgttccgcagctttcagatacatggctcttcttttcggtaaagtag

SEQ ID NO: 1642 - protein, 182 aa, Unknown
  Obtained from environmental sample
  DOMAIN (8)...(181): NQR2, RnfD, RnfE family
  misc_feature (1)..(182): Xaa is any amino acid
MKIEINQIMTVSAPPHIYGTDTIEARMRDVVIALVPAILMSMYHYGKEAFYVTVIAVLSALLAEYLYQRIMGKTVTINDFSAAITGILLSFNLPPHVPLWLPAVGSFFAIIVVKQLFGGLGSNFVNPALAARAFLLVSFPVLMTKWTFAPDAVTSATYPCILKRDPTFVPQLSDTWLFFSVK

SEQ ID NO: 1643 - DNA, 807 bp, Unknown
  Obtained from environmental sample
  misc_feature (1)..(807): n is a, c, g, or t
gtgattctnggagatgtccatacctaccgcgagcgaggcgccaaggcgcaaatcgccgccattctgggaagccgtgaaatgatgcggcccattattgcttcatcggcaacaaccctgtgcgtatttatccccctgatcatttacaaaaacgatctgaaggaaatggggcagcttttcaacgaccttatttttaccgtggtaatttctttgacagcctctctgttagtcgccattactctggttcccagcctctgtggatccgttttgccgctcaatacccgcatacagaaaccgctgaaaagccgttttctgcgcgcgatagacgacaaaatggaatcttttttgaaaacattggaaaacaaataccggggcgcgctggagtattgcctgtcccaccgtttgataattgttatgcttgttctgttgatgctgattttttccgtaatgcaattcggcggtatcgggatgaatatgtatgtccgtatgcgtaccgatgataacgtcaatatcaatgtatccatgcctcagggaaccgccattgatgtcaccgaagagatgttgttccggctggaagagctggtcaaaaaagaggtgcagggttaccggaacattatcctcaccgcgcggcgcagcggaaccaatcagggaacgattcaaattattcttcccgaaccggcaaaacagattgatacgcccgattcagtaatccgtaagctgactccctatacaaaccaaatccccggagcacggatcagctttagggcgggccggggagtgggaaacacttccgcggttgaattgccataa

SEQ ID NO: 1644 - protein, 268 aa, Unknown
  Obtained from environmental sample
  misc_feature (1)..(268): Xaa is any amino acid
MILGDVHTYRERGAKAQIAAILGSREMMRPIIASSATTLCVFIPLIIYKNDLKEMGQLFNDLIFTVVISLTASLLVAITLVPSLCGSVLPLNTRIQKPLKSRFLRAIDDKMESFLKTLENKYRGALEYCLSHRLIIVMLVLLMLIFSVMQFGGIGMNMYVRMRTDDNVNINVSMPQGTAIDVTEEMLFRLEELVKKEVQGYRNIILTARRSGTNQGTIQIILPEPAKQIDTPDSVIRKLTPYTNQIPGARISFRAGRGVGNTSAVELP

SEQ ID NO: 1645 - DNA, 357 bp, Unknown
  Obtained from environmental sample
  misc_feature (1)..(357): n is a, c, g, or t
atgaaaacaatttttgtggtagatgacagcgataccaacctgttgatggccgaagagtcgctggaagataactaccgggtaataacaatcccttccgcggcaaaaatgttcgcttttctggaaaaaattacgcccgatttgattttgctggatattcaaatgcccgaaatggacggttttgaagcgttacaacgcttgaaatcccagccgtcatacgcgaacatccccgttatatttctgacaggttatatagatgatgacgttgaagcccgcagccgggaactgggcgcgccggatataattaccaagccgttttccgcatccgcgcttctggaacgcattgaaacgtatttgtga

SEQ ID NO: 1646 - protein, 118 aa, Unknown
  Obtained from environmental sample
  DOMAIN (2)...(115): Response regulator receiver domain
  misc_feature (1)..(118): Xaa is any amino acid
MKTIFVVDDSDTNLLMAEESLEDNYRVITIPSAAKMFAFLEKITPDLILLDIQMPEMDGFEALQRLKSQPSYANIPVIFLTGYIDDDVEARSRELGAPDIITKPFSASALLERIETYL

SEQ ID NO: 1647 - DNA, 357 bp, Unknown
  Obtained from environmental sample
  misc_feature (1)..(357): n is a, c, g, or t
ttgggcaatcaggccatgtcgatgttttccgttatcggtattgtcgcgctggtaggcgttgtggtaaacaacggcattgtgctggttgattacaccaacaccctgcgggcgcggggaatgaaagtgcgcgaagcctgccttgaagcgggacgctgccgtctgcgtccgattctgatgaccagccttaccaccatcctgggcatggcccctatcgccttcttccccggagcgggcgcggacaccattcaacccataggcaaaacctttgtgggagggcttatggtcagcacttttatgacgctttttgttactccggtaatgtattcactgttgaattcgcggcatgataagcgttaa

SEQ ID NO: 1648 - protein, 118 aa, Unknown
  Obtained from environmental sample
  misc_feature (1)..(118): Xaa is any amino acid
MGNQAMSMFSVIGIVALVGVVVNNGIVLVDYTNTLRARGMKVREACLEAGRCRLRPILMTSLTTILGMAPIAFFPGAGADTIQPIGKTFVGGLMVSTFMTLFVTPVMYSLLNSRHDKR

SEQ ID NO: 1649 - DNA, 624 bp, Unknown
  Obtained from environmental sample
  misc_feature (1)..(624): n is a, c, g, or t
atggcacgcaattactactatctgatagcgggtctgcccgatctgatgagggaggacagtaagaacgtcccctcgttccgcctcgtcgcggaagagattcggcaggaggtcgcgccgtcggattttgagttcgtgagggcgatgacgctccccatagacaaccggaacctcgtcaacatcctcacgcgcagcggcgaagagtttgacgaacgcggcaacttctccaaggaggagctgaccaaggggtctattgatctgcccgaatatatgcaggtgttcttggcggcccacaaggagaataggcagctgttccctggattaacgcccttagaccaactcacgtggctcttctatgaggagatggccgggctgaacaacgcgttcgtcagggagtggttcgagtttgaaataagcctgcggaacgtgattgtcggcatgaacgtgaggaaaggcctcggccatatcgaagcgatagccaccgaaagagaccgcccgatagcgctcacgcttgtgggacgcggcgaagcggcggaggcggtattgcgctcatcttcgcccgacttcgggttgtcgggggcgtacccgtgggtagacaaagttatcgcgctggggcggggcgggtga

SEQ ID NO: 1650 - protein, 207 aa, Unknown
  Obtained from environmental sample
  misc_feature (1)..(207): Xaa is any amino acid
MARNYYYLIAGLPDLMREDSKNVPSFRLVAEEIRQEVAPSDFEFVRAMTLPIDNRNLVNILTRSGEEFDERGNFSKEELTKGSIDLPEYMQVFLAAHKENRQLFPGLTPLDQLTWLFYEEMAGLNNAFVREWFEFEISLRNVIVGMNVRKGLGHIEAIATERDRPIALTLVGRGEAAEAVLRSSSPDFGLSGAYPWVDKVIALGRGG

SEQ ID NO: 1651 - DNA, 510 bp, Unknown
  Obtained from environmental sample
  misc_feature (1)..(510): n is a, c, g, or t
atggccaatgaagctgttgcgccgtccggcgggacggccgccggtaacctggcggggaagtacctgacattcaaactggcgaacgaggagtacgggctcgaaattctgaaagtccgggagatcatagggcttctgccaatcacctgcctgccgcggacgcccgtgttcgtgcgcggggtgatcaacctgcgcggcaaggtcatccccgtgatcgacctgcgccagaagttcgagcttgacgtcgccaccgacaccgaccagacctgcatcatcgtcgtggacgtcgccggccagttcggcagcgtccaaatcgggatattggtcgattccgtctccgaagtgctcgacataaagggcgaggagatcgaggatcccccggccttcggctcaagcgtagacaccgctttcatactcggcatggcgaaggccaaggggtcggtcaagatcctcctcaacatcgagaaggtgctatcccaggcggaactggagcacgtctccaatgtggggtag

SEQ ID NO: 1652 - protein, 169 aa, Unknown
  Obtained from environmental sample
  DOMAIN (20)...(161): CheW-like domain
  misc_feature (1)..(169): Xaa is any amino acid
MANEAVAPSGGTAAGNLAGKYLTFKLANEEYGLEILKVREIIGLLPITCLPRTPVFVRGVINLRGKVIPVIDLRQKFELDVATDTDQTCIIVVDVAGQFGSVQIGILVDSVSEVLDIKGEEIEDPPAFGSSVDTAFILGMAKAKGSVKILLNIEKVLSQAELEHVSNVG

SEQ ID NO: 1653 - DNA, 651 bp, Unknown
  Obtained from environmental sample
  misc_feature (1)..(651): n is a, c, g, or t
ttggagacgtgctccagttccgcctgggatagcaccttctcgatgttgaggaggatcttgaccgaccccttggccttcgccatgccgagtatgaaagcggtgtctacgcttgagccgaaggccgggggatcctcgatctcctcgccctttatgtcgagcacttcggagacggaatcgaccaatatcccgatttggacgctgccgaactggccggcgacgtccacgacgatgatgcaggtctggtcggtgtcggtggcgacgtcaagctcgaacttctggcgcaggtcgatcacggggatgaccttgccgcgcaggttgatcaccccgcgcacgaacacgggcgtccgcggcaggcaggtgattggcagaagccctatgatctcccggactttcagaatttcgagcccgtactcctcgttcgccagtttgaatgtcaggtacttccccgccaggttaccggcggccgtcccgccggacggcgcaacagcttcattggccataattacctcccaaatgtcatacgcggccccaaacggcccgcggattggcccgccgggggtggcgaaagggttaacttttgaacgtgaaacgctattcctatataattatatactatcggcggagcaatatcaagccataaagtcaaaataa

SEQ ID NO: 1654 - protein, 216 aa, Unknown
  Obtained from environmental sample
  misc_feature (1)..(216): Xaa is any amino acid
METCSSSAWDSTFSMLRRILTDPLAFAMPSMKAVSTLEPKAGGSSISSPFMSSTSETESTNIPIWTLPNWPATSTTMMQVWSVSVATSSSNFWRRSITGMTLPRRLITPRTNTGVRGRQVIGRSPMISRTFRISSPYSSFASLNVRYFPARLPAAVPPDGATASLAIITSQMSYAAPNGPRIGPPGVAKGLTFERETLFLYNYILSAEQYQAIKSK

SEQ ID NO: 1655 - DNA, 699 bp, Unknown
  Obtained from environmental sample
  misc_feature (1)..(699): n is a, c, g, or t
gtggaagccattattcgtttagctagggaaagaggagaatctgggtctgcatattcacccacccttgaagaacaaacttcatctaagcttactaagagtataattaagatagttatttggcttgttatatttatatcttcatatttttttctacgttttataataagacctttgctatatcctgacgaggcacacatcaaaaatggcaatgcatattacgaaaagaaagattatgacaaggcaatagaggattataccgccgcaatcaagattaaaccagataacccagcgtattatggtatacgcggcaatgcatattacgaaaaaaaagactatgacaaggcaatagaggattataccgccgcaatcaagattaaacctgataatccaaagtatctgaacaatcgtggcagtgcatattacgaaaagaaagactacgataaggcaatagaggatcttaccgccgcaatcaagattaaaccagatgacccagtatatttgaactttcgtggaaaagtatattacgaaaagaaagattatgacaaggcaatagaggattatactgccgcaatcaagattaaaccagataacccagtatatttgaactttcgtggtttagcgtactacaataaacagaattacgatatggccgttacggattttgaaacagcgttgcggattaatccaattatgatttag

SEQ ID NO: 1656 - protein, 232 aa, Unknown
  Obtained from environmental sample
  DOMAIN (198)...(231): Tetratricopeptide repeat
  misc_feature (1)..(232): Xaa is any amino acid
MEAIIRLARERGESGSAYSPTLEEQTSSKLTKSIIKIVIWLVIFISSYFFLRFIIRPLLYPDEAHIKNGNAYYEKKDYDKAIEDYTAAIKIKPDNPAYYGIRGNAYYEKKDYDKAIEDYTAAIKIKPDNPKYLNNRGSAYYEKKDYDKAIEDLTAAIKIKPDDPVYLNFRGKVYYEKKDYDKAIEDYTAAIKIKPDNPVYLNFRGLAYYNKQNYDMAVTDFETALRINPIMI

SEQ ID NO: 1657 - DNA, 507 bp, Unknown
  Obtained from environmental sample
  misc_feature (1)..(507): n is a, c, g, or t
atgatgccggcggatattaaacgcaaggtcatcacaattgatcccgcccgcactaccgaatactttaagattgaagttgtggatgaggaatacgcccgcttaagcggggaagtaaggataagcctgaaagacggcgaggcggttcaccggataagcgcctgggatattctttttaaccgtaccaggaatatcctgacagcgtccggcggtgttgaatatatcaagacagaaggggataaaatagaaaccttcaggggagattccataactgtcgatattgataactggtcaagcgtgtttcttggcggcgtgtcggaacgctccctgcagagcgacaataccacttacctcttcgccggaaccgtaatttcacgcagcgaggaagatgtcaccgttctgagcagagccacgatcagcagcgctaacaaccctgaatctctctggtccctccgcgcttcgcgcgtatggctcttccccggatccgactcggccaatctaccatgttaa

SEQ ID NO: 1658 - protein, 168 aa, Unknown
  Obtained from environmental sample
  misc_feature (1)..(168): Xaa is any amino acid
MMPADIKRKVITIDPARTTEYFKIEVVDEEYARLSGEVRISLKDGEAVHRISAWDILFNRTRNILTASGGVEYIKTEGDKIETFRGDSITVDIDNWSSVFLGGVSERSLQSDNTTYLFAGTVISRSEEDVTVLSRATISSANNPESLWSLRASRVWLFPGSDSANLPC

SEQ ID NO: 1659 - DNA, 879 bp, Unknown
  Obtained from environmental sample
  misc_feature (1)..(879): n is a, c, g, or t
ttgggcgctttttcgggttcgggctccgattcgggtttgagttcaagaacagggctttcggtaaagcttggcggcgagattgcctttgaaataatgccctatgtccatgacttcaaaaagaaagacggcggagacgagatctctttttgggatatggcttcaggcaaattcaatttttcactgttatcttccaattttgaagcctattccgcttttaactttaactacgcggcgttccgcgagttgggagacggaagcctcaggttaagcgacacgccgctgctcatcgatgaggcttatttgcgggcctatataggccccgtcaatatcgaggcgggttttcgcaaactgacatggggcaaggccgacagtttaggaccgcttgatgttaccaacccccttgattataccgatttaagaaacatctccgatataaattccatcaaaatcgcgaggccgatgattcacctgacatggaacacgggtaatttctccaagctggaaggggtgtttattcctaactttaccggccatcgtttcgcggataaagggaggtggaggcccgcgcagtatgacaccatgacaaataatttcacttctggcgcctttgatgttatttttgctcgagcatatgagcagtactcctcctttttatcttctttgcctcccgggctaatgctcgccatggctcanaagttcgcctccggtctttcggaatttaatccgccgtttcctgatacctcaacccttaattactttcaaacagggctgcgctataccactaccattggctccgtagacatangcgcgcagtatttctacggcaaccttttcaatcccgctgtagcttttccaacaaaggcattgacgcttttttga

SEQ ID NO: 1660 - protein, 292 aa, Unknown
  Obtained from environmental sample
  misc_feature (1)..(292): Xaa is any amino acid
MGAFSGSGSDSGLSSRTGLSVKLGGEIAFEIMPYVHDFKKKDGGDEISFWDMASGKFNFSLLSSNFEAYSAFNFNYAAFRELGDGSLRLSDTPLLIDEAYLRAYIGPVNIEAGFRKLTWGKADSLGPLDVTNPLDYTDLRNISDINSIKIARPMIHLTWNTGNFSKLEGVFIPNFTGHRFADKGRWRPAQYDTMTNNFTSGAFDVIFARAYEQYSSFLSSLPPGLMLAMAXKFASGLSEFNPPFPDTSTLNYFQTGLRYTTTIGSVDIXAQYFYGNLFNPAVAFPTKALTLF

SEQ ID NO: 1661 - DNA, 486 bp, Unknown
  Obtained from environmental sample
  misc_feature (1)..(486): n is a, c, g, or t
ttgtcaaatattcattcagttgccaatggtaattttatagagtatgatgaaaaactaatgtttatggaaaaaggcttagaaaaacctattccccttttcaacgtttctgcgggaatgaaaccttttcttataattaagcgtcttctagaattaggtgaaataaaggagcaagatgttttaattcttgacgaaccagaaatacatcttcatcccgaatggcaattacagtttgcagaaattcttgttctattgcaaaaagaatttaacctgactatacttattactactcatagcccttattttctcaatgctcttgaagtttatagtaaaaaacacgaaagagaaaaatattgtaattattatttagcacaaaacaaagaagattacagtatagtagaagatgttacaaataaaacaaatgaaatttatgctttaatggaagaccctttctgtaaattagaacgtttaagaaacgaggatttataa

SEQ ID NO: 1662 - protein, 161 aa, Unknown
  Obtained from environmental sample
  misc_feature (1)..(161): Xaa is any amino acid
MSNIHSVANGNFIEYDEKLMFMEKGLEKPIPLFNVSAGMKPFLIIKRLLELGEIKEQDVLILDEPEIHLHPEWQLQFAEILVLLQKEFNLTILITTHSPYFLNALEVYSKKHEREKYCNYYLAQNKEDYSIVEDVTNKTNEIYALMEDPFCKLERLRNEDL

SEQ ID NO: 1663 - DNA, 606 bp, Unknown
  Obtained from environmental sample
  misc_feature (1)..(606): n is a, c, g, or t
ttggagagcggcgaaacaatagggtttgacatccttgtcctcgccgtgggcgtgcgtcccaatacctcgcttttaaacggtatagcgaagattgagcgtggcattgtcgttaatgagaaatcggagacgaccgctcctgacatttacgccgccggcgactgtactcaaactcttgacgtgtcaagcgggcagaacaaggtcatggcgcttttgcccaacgcctatatgcagggcgagtgcgccggaatcaatatgacgggcagcgccgccgggggcgccagtttcgacaaggctatacccatgaacgccatcggatttttgggcttgcacgtcattaccgccggcaactacgacggacaggtatattccgaaaataataatccaaaaaccgatgagggcagctataaacgcctgtttttcagcaataacaaattgaacggctatatccttatcggcaacgtggaaaaagcggggatttacacgaaccttatccgcgagcacaccccccttgacaccatagacttcccgcttgtctgtgaaaaacccgggcttatggcgtttaccaaagaagccagaatggaaaaattgggaaaagcggcgtcttga

SEQ ID NO: 1664 - protein, 201 aa, Unknown
  Obtained from environmental sample
  misc_feature (1)..(201): Xaa is any amino acid
MESGETIGFDILVLAVGVRPNTSLLNGIAKIERGIVVNEKSETTAPDIYAAGDCTQTLDVSSGQNKVMALLPNAYMQGECAGINMTGSAAGGASFDKAIPMNAIGFLGLHVITAGNYDGQVYSENNNPKTDEGSYKRLFFSNNKLNGYILIGNVEKAGIYTNLIREHTPLDTIDFPLVCEKPGLMAFTKEARMEKLGKAAS

SEQ ID NO: 1665 - DNA, 747 bp, Unknown
  Obtained from environmental sample
  misc_feature (1)..(747): n is a, c, g, or t
atggcgagcgccattcttcacctcattccggatcatctccagtccgtgctgtattcaggcggcgaatcctactcaacgatcgccacagacagctccgtcaccggattcgcgagcaacggcatccggttcggcgtgcaaataccggttcacgaaaaggtaaccctcggcttcgccggcgagtacatattgccgggagacggcaacggctcggagtccggcgaataccgccgcgacgacgacaacgaggttataaaaagctaccataaaaaaatctctgtaaccttgtcgccgtccatgagtataggcgcggcgtacaggccctccgaccactggttgttcgcggccgacgcccgctccacgctgtggggggacgcctacgaaaatgatttggataccgccaacgccgtaaaacccgaaatggaactcggcatatccgtcggcgcgcgctacgtcccggcggcaaacgttctcagttcaaaatactgggagaaagtccactacggcgcgggcattaggtacgccacgttgccaaacgataaaaattacgacagagcgcacgagtacgcgttctctctgggcgccgggctgccgatccctcgcgacggcggaatggtcgacatcgtcgtaagtttcggcagaaggtcggatccgaagtacagcaactacgaggaaaacatcgtanagttgcaacttgggctgaacggcggccgcaactggttccaaaaagacgcgtcaagagagtattga

SEQ ID NO: 1666 - protein, 248 aa, Unknown
  Obtained from environmental sample
  misc_feature (1)..(248): Xaa is any amino acid
MASAILHLIPDHLQSVLYSGGESYSTIATDSSVTGFASNGIRFGVQIPVHEKVTLGFAGEYILPGDGNGSESGEYRRDDDNEVIKSYHKKISVTLSPSMSIGAAYRPSDHWLFAADARSTLWGDAYENDLDTANAVKPEMELGISVGARYVPAANVLSSKYWEKVHYGAGIRYATLPNDKNYDRAHEYAFSLGAGLPIPRDGGMVDIVVSFGRRSDPKYSNYEENIVXLQLGLNGGRNWFQKDASREY

SEQ ID NO: 1667 - DNA, 750 bp, Unknown
  Obtained from environmental sample
  misc_feature (1)..(750): n is a, c, g, or t
atgttaaatgagtatgattgctggctgcagaaaagaataatcgcgccgcctaaggctgcgctggacacggtttatgccgaaaagggcggcgaagtcgcctcacaggcggttgaggaattccgccttggcgttaaacggcttttgggtttttcaccggccgtttattttcctgaggacatggagcgcaaagagcgcggcgtgtttcttggaactattccgtttatggataaaaattttcagcttccagccacagagttagagaccggtggttttacgataaaggttaccgataaacagcttattattgccgggcatgacgagcctggcctcctgtacggggtgttccgttttctagcgctgttggcgctgggggaaattaaaaacggcttcgagataaacgacacgcctgccagccccctcaggatgatcaaccattgggacaatatggatggaactattgagcgcggctatgcggggccttcacttttttttcgcaacggacgctttgactacgaaaagcagcgcatagaagattacgcccgcctgcttgcctcgattggcattaaccgcatttcaatcaataacgtcaatgttcgcagcaacgcaaaactccttatcacccccgagtaccttgatgaggttgccgtgctggcggcgattttccgccccttcggcatcaggcttctggctagcatcaatttcggggcgccctggtcgctgggaaaagctccccaccgccgaatccgttga

SEQ ID NO: 1668 - protein, 249 aa, Unknown
  Obtained from environmental sample
  DOMAIN (7)...(117): Glycosyl hydrolase family 67 N-terminus
  misc_feature (1)..(249): Xaa is any amino acid
MLNEYDCWLQKRIIAPPKAALDTVYAEKGGEVASQAVEEFRLGVKRLLGFSPAVYFPEDMERKERGVFLGTIPFMDKNFQLPATELETGGFTIKVTDKQLIIAGHDEPGLLYGVFRFLALLALGEIKNGFEINDTPASPLRMINHWDNMDGTIERGYAGPSLFFRNGRFDYEKQRIEDYARLLASIGINRISINNVNVRSNAKLLITPEYLDEVAVLAAIFRPFGIRLLASINFGAPWSLGKAPHRRIR

SEQ ID NO: 1669 - DNA, 786 bp, Unknown
  Obtained from environmental sample
  misc_feature (1)..(786): n is a, c, g, or t
ttgagcacggtcgcctccaaaggccgcttgcagacgcataatctaagaatacaaaactcagaactgttcggcgctatggcaaacntgctgaaaaacgaagcgtggcgcgcgcccactctgaacaatattaatatcaattatgagatcaaggacggacgcctgacaattgaaccggtaaagatgaacatagcgcaggcaagtcttgagcttacaggcagccagggactcgatatgtcccttgattacaaggtaaacaccgccgtgcctgtttcaacaataggttccggagccgccgatattttgggcaaaatacccggaggttccaggatcagggaaatcaaggtgacaggattgataagcggcacggtcaccaaacctgtcgtaagccttgacgtcgcagatatggcgggtaacgtcgtcgaaaccgttaaagaaactgtcaaagaaatagtcaaagaacaagttcaagcggtcaaggaacaggcgaaagaagagattgacaaacagataagcgccataatggccgacgctgaaaaacaggctcaaaacatccgtaacaccgccaaacaagccgccgacaaagtacgcaatgaagccgaagccagcgccataaaattggaagacgccgcgaaatcgccccttgaaaaagtagccgccaaagccgccgccaacaaactacgcgacgaaggcaaggccaacgccgctaaactggaacaggaagccgaaagacaagtaacggccattatagacaacgccaaaaagaaagcagacgagctacgcaagtag

SEQ ID NO: 1670 - protein, 261 aa, Unknown
  Obtained from environmental sample
  misc_feature (1)..(261): Xaa is any amino acid
MSTVASKGRLQTHNLRIQNSELFGAMANXLKNEAWRAPTLNNININYEIKDGRLTIEPVKMNIAQASLELTGSQGLDMSLDYKVNTAVPVSTIGSGAADILGKIPGGSRIREIKVTGLISGTVTKPVVSLDVADMAGNVVETVKETVKEIVKEQVQAVKEQAKEEIDKQISAIMADAEKQAQNIRNTAKQAADKVRNEAEASAIKLEDAAKSPLEKVAAKAAANKLRDEGKANAAKLEQEAERQVTAIIDNAKKKADELRK

SEQ ID NO: 1671 - DNA, 807 bp, Unknown
  Obtained from environmental sample
  misc_feature (1)..(807): n is a, c, g, or t
ttgcggctggttatcacatgggaggcgctggaacactcggggccgggccagtatgacgaggcataccttgcgtatctgcggaaactactgcttttggcggaaaaatggggaatttccgtgtttattgacccgcatcaggatgtttggagcaggtggacaggcggcgacggcgcgccggcctggacaatggaaaagctcggcatcgatttgggcaagctggacaaaacaggcgccgcaattacccgccagctttacggcgaactgcacaatggaaagccttttccccgcatgatatggccaagcaactacagccgctacgccgcggcaaccatgttcagcctgttttttggcggaaaaacctacgcccctggcctcctgatagacggcaaaaatgtgcaggactggctgcaggagcattacattgccgctttccgccactgttaccgccgcctgaaaaactgctcagccattgcgggatggggcgttatgaatgagccgcataaaggcttcatcggttacaaagacctgggatacgctgaaagccccacaatgccggtaggccccaggccaagcccctgggacacgatacgcgccgcttcaggatacccgaccgcggtgccggtatactcggccggttcttttggcaagttcagcacaaagcgcgaaattatcaatccgggcgcggaacatctttttaaggaaggattcgcctgcccctggaaacaggccggcgtgtgggatgatacaaacggcgtgccgcgcctgctgcgtaaagaccacttctccatgtttgaagaaggccgctga

SEQ ID NO: 1672 - protein, 268 aa, Unknown
  Obtained from environmental sample
  misc_feature (1)..(268): Xaa is any amino acid
MRLVITWEALEHSGPGQYDEAYLAYLRKLLLLAEKWGISVFIDPHQDVWSRWTGGDGAPAWTMEKLGIDLGKLDKTGAAITRQLYGELHNGKPFPRMIWPSNYSRYAAATMFSLFFGGKTYAPGLLIDGKNVQDWLQEHYIAAFRHCYRRLKNCSAIAGWGVMNEPHKGFIGYKDLGYAESPTMPVGPRPSPWDTIRAASGYPTAVPVYSAGSFGKFSTKREIINPGAEHLFKEGFACPWKQAGVWDDTNGVPRLLRKDHFSMFEEGR

SEQ ID NO: 1673 - DNA, 816 bp, Unknown
  Obtained from environmental sample
  misc_feature (1)..(816): n is a, c, g, or t
atgctaacgaaaacattatcaatcggcggaatgacctgcgccgcctgttccgcacgggtagaaaaggcaatccgcaaacttgaaggcatagaaagcgcaacggtaaacatcgcaacggaaaaagcggtcataatatacgacgccaaaaccctgcgcctttcggcaataaaggaagcgattaccaaagccggttatcaggcgttggaagtttcaaaggacgctgttgatgaagataaactccgcaaggaaaaagaaatcaaagtcttgcggattaaatttatcacagccgcctcgttagggcttcccctgctgtatttcgcaatggccccgatgatacgttgggtttcacttccgttccccaaagccgttgcgcccatgaattttccattgttatacgcattagtgcaattaacgctgaccattcccataatcatagcgggttacaagttttacacggttggtttcaaaaacctgtggcagcgaagcccgaatatggactctcttatcgcaatcgggacttctgcggcaatgctttacagcatttacagcctgttcagaattacaaggggctatttcattgctgtagacgcgctttactttgaaagcaccggagtgattatcgccctcattcttttgggaaaactgcttgaggcaatttccaaaggacgcacgggcgaagcgataaaaaaactcatggggcttgcgcccaagactgctgttattgaagaaaacggcgaagaaaaagaaatccccatcgacgaggtaatccccggcgacataatcatcgtaaaacccnggcgcgaaaatccccgttga

SEQ ID NO: 1674 - protein, 271 aa, Unknown
  Obtained from environmental sample
  SIGNAL (1)...(20)
  DOMAIN (5)...(69): Heavy-metal-associated domain
  misc_feature (1)..(271): Xaa is any amino acid
MLTKTLSIGGMTCAACSARVEKAIRKLEGIESATVNIATEKAVIIYDAKTLRLSAIKEAITKAGYQALEVSKDAVDEDKLRKEKEIKVLRIKFITAASLGLPLLYFAMAPMIRWVSLPFPKAVAPMNFPLLYALVQLTLTIPIIIAGYKFYTVGFKNLWQRSPNMDSLIAIGTSAAMLYSIYSLFRITRGYFIAVDALYFESTGVIIALILLGKLLEAISKGRTGEAIKKLMGLAPKTAVIEENGEEKEIPIDEVIPGDIIIVKPXRENPR

SEQ ID NO: 1675 - DNA, 936 bp, Unknown
  Obtained from environmental sample
  misc_feature (1)..(936): n is a, c, g, or t
gtgtcttctcatattgtcggggattacggcgatagagagaagttggagcggttcgcgaatatggttgacgtcgtcacctacgagtttgagaatgttcccgcggaaagcgtgagttacttatccgaaagattgcttgtctatccctccccaaaagcgctggcgatatcgcgtgacaggttcactgagaaaagcctttttgttgagttgggtattcccacgcctaaatttctcgctgtgggtagccttgacggattgaaatcggcggtcagtgaaatcgggctgcccgcggtgctgaaaacgcgcacgctcgggtatgacgggaagggtcagtcggtcataaaatccggcggagatattgacggcgcgtgggcgcggtcgggcggcgcgccgtgcattctcgaagcttttgttccctttacaagagagataagcgtcgttgccgttaggggccgcgacggcgaggcgcgcttctatccggttggcgagaacacgcactccggcggcatactccgccacacggtttgccgcttgggcgacccgatgcagtcagtcgcggaggggttggcgggccgcttgttggaacactttgattatgtcggcgtcttggcgttggagctgtttgatgtggacggcaagctgatggccaacgagatggcgccgcgtgtccacaataccgggcattggtcgatagagggggcgccggcgagccagtttgaaaaccacgtccgcgccgtcgccggattgccgctgggcggcacggaggcggtctgtcacagcgccatggtcaattttataggcgcgatgccggatgcggcggaggtgttgagggtgaacggggcgcatctgcacgattacgggaaagcggctcgcgcggggagaaagcttgggcacgccacggtctgccgggtgggcaaggaggcggcaaccgtcggctga

SEQ ID NO: 1676 - protein, 311 aa, Unknown
  Obtained from environmental sample
  DOMAIN (58)...(233): ATP-grasp domain
  misc_feature (1)..(311): Xaa is any amino acid
MSSHIVGDYGDREKLERFANMVDVVTYEFENVPAESVSYLSERLLVYPSPKALAISRDRFTEKSLFVELGIPTPKFLAVGSLDGLKSAVSEIGLPAVLKTRTLGYDGKGQSVIKSGGDIDGAWARSGGAPCILEAFVPFTREISVVAVRGRDGEARFYPVGENTHSGGILRHTVCRLGDPMQSVAEGLAGRLLEHFDYVGVLALELFDVDGKLMANEMAPRVHNTGHWSIEGAPASQFENHVRAVAGLPLGGTEAVCHSAMVNFIGAMPDAAEVLRVNGAHLHDYGKAARAGRKLGHATVCRVGKEAATVG

SEQ ID NO: 1677 - DNA, 405 bp, Unknown
  Obtained from environmental sample
  misc_feature (1)..(405): n is a, c, g, or t
gtgataattacactcgcttgtttaattgtaggatgtattccagttgttaaaattgataaggatagaaatttagtcattcgtgacggtgttacttctattggtcataatgcatttactaacaaccaacttacaagtattactgttcctaacagcgttaattctatcggagataaggcatttgctgataatccgctcactagcgtaaatattccagacagtgttaccacatttaacaacgatgtattttcaggagcaagtaacttaacacgcattagcattggtgcaaatgttaatattacagggtctgaagccatagcatttagttttgaagattactatttgctcaataatcggcaagcaggagtttacactttcagtaatggtaaatggaattttcaaatttag

SEQ ID NO: 1678 - protein, 134 aa, Unknown
  Obtained from environmental sample
  misc_feature (1)..(134): Xaa is any amino acid
MIITLACLIVGCIPVVKIDKDRNLVIRDGVTSIGHNAFTNNQLTSITVPNSVNSIGDKAFADNPLTSVNIPDSVTTFNNDVFSGASNLTRISIGANVNITGSEAIAFSFEDYYLLNNRQAGVYTFSNGKWNFQI

SEQ ID NO: 1679 - DNA, 873 bp, Unknown
  Obtained from environmental sample
  misc_feature (1)..(873): n is a, c, g, or t
ttggccgcaaaagggcagagaagaaccggtaaaaggggcagcaacaccaggggagaggataatgtcatctccaacggctctggtattgtggtgaataaggggcaggcagtccttattgttgacaacgggcgcatagcggaattatgcgccgaagaggggcagtacacttacgaccagtcttctgaacccagtattttctacggagggctgggcaaaggcattgttgccgctttcaaaaacatcggggaacgttttaagtacggcggcagtcctggaaaagatcagaggatatattatttcaatacaaaagagataatggggaacaaatacggaactcccgcgcctattccctaccttatagtcgatcccaacattaaccttcgcctaacaatcagcctgcgcgccaacggggagtattcctaccacattatgaatcctctggccttctacgccaatgtaacgggaaacgtagaggacacattcacgcgggataaaatcgacagccagctcaagagcgaaataattaccgttctggggccgtcattggcaaaacttggcgcggggcttgagtatcacatgatttccgcacagacggacaagctggcggaaatactcaacgaggcgctaaccgccaagtggagagaaggccgcggcatagaaattgtcaacttcgggattacctgtaccgccacagaggaagacgaacagcggatcaaacagttgcagacagcggcggtaatgcgcgacccgacaatggccgccgcgtcgctggtgaacgcgcaaagcgacgccatgncgacggcagcgggaaataccggcggcgctatggcaggcttcatgggcatgggtatggcaacatggccggcggcatga

SEQ ID NO: 1680 - protein, 290 aa, Unknown
  Obtained from environmental sample
  misc_feature (1)..(290): Xaa is any amino acid
MAAKGQRRTGKRGSNTRGEDNVISNGSGIVVNKGQAVLIVDNGRIAELCAEEGQYTYDQSSEPSIFYGGLGKGIVAAFKNIGERFKYGGSPGKDQRIYYFNTKEIMGNKYGTPAPIPYLIVDPNINLRLTISLRANGEYSYHIMNPLAFYANVTGNVEDTFTRDKIDSQLKSEIITVLGPSLAKLGAGLEYHMISAQTDKLAEILNEALTAKWREGRGIEIVNFGITCTATEEDEQRIKQLQTAAVMRDPTMAAASLVNAQSDAMXTAAGNTGGAMAGFMGMGMATWPAA

SEQ ID NO: 1681 - DNA, 552 bp, Unknown
  Obtained from environmental sample
  misc_feature (1)..(552): n is a, c, g, or t
atgggatggagcgacagtaaatacaattacaccaagaccgattttatttccgtacaaagggaaggcggtttagggtttgaaaaaataccggtagacgggtcgaaaaagatggacgacgactacatggactccattgaaccttttgattacggcaaactgaaagattttcaaaccgcctacctttcaggctatatcgcggaaaagtatgatgtcagcattgaggaatgtaaagatagggcggtaaaaagaatcaaaaattccgtagaatcccaatttgcgtcatccgtaacgggttatacttcggttagaaaagaacgatccagcgtcaatgttgaagacggtaaggtgacatattctctctttccggtttgggttcttaataccaaatataaagatcaaaactaccaattcataatgaacggccagtcagggcttcttgcgggcaagctgcctgtcgataaaggcaaggttcttaaatacaggctgctttacctgtttggattcggcgcggctttcagcttaatcacctggctgttacagatgtttttataa

SEQ ID NO: 1682 - protein, 183 aa, Unknown
  Obtained from environmental sample
  misc_feature (1)..(183): Xaa is any amino acid
MGWSDSKYNYTKTDFISVQREGGLGFEKIPVDGSKKMDDDYMDSIEPFDYGKLKDFQTAYLSGYIAEKYDVSIEECKDRAVKRIKNSVESQFASSVTGYTSVRKERSSVNVEDGKVTYSLFPVWVLNTKYKDQNYQFIMNGQSGLLAGKLPVDKGKVLKYRLLYLFGFGAAFSLITWLLQMFL

SEQ ID NO: 1683 - DNA, 363 bp, Unknown
  Obtained from environmental sample
  misc_feature (1)..(363): n is a, c, g, or t
ttgcaaattgacaaatccgttacaggcaaacctttaaccattgccaaaaaacgttacaaaaagggaataggcacgcacgcaagcggatttcttagctgggagctaaatggcgaatacgaaaaattaaccgcagttctgggtttagacgaagatgaattttgcagcaacggagttcaaataaaaattattggcgatggaaatttattagcagacacaggaaaattagggcaagggcaggaatatccgttggatatttctttgaaaggcattaaccaactgacttttgaaacagacggccttggagatattggctgcgaccacgtggatatagcggctgcaatgctattcaaacctatcccctga

SEQ ID NO: 1684 - protein, 120 aa, Unknown
  Obtained from environmental sample
  DOMAIN (1)...(117): NPCBM domain
  misc_feature (1)..(120): Xaa is any amino acid
MQIDKSVTGKPLTIAKKRYKKGIGTHASGFLSWELNGEYEKLTAVLGLDEDEFCSNGVQIKIIGDGNLLADTGKLGQGQEYPLDISLKGINQLTFETDGLGDIGCDHVDIAAAMLFKPIP

SEQ ID NO: 1685 - DNA, 342 bp, Unknown
  Obtained from environmental sample
  misc_feature (1)..(342): n is a, c, g, or t
atgcaatttgtgaaagctgcgactgtgcttggcatggggcacgtgagaatttttttcaaggaaattttgccaaacgctttaactcccgttataacgctttttcctttttccataataggtggaatttctgggcttacatctcttgattttttgggctttggcttgcaggctccaacaccttcctggggcgatttgctctctcaaggtcttgcaaatctctacgctccttggattaccattttcacaatactagcactcttcataacccttatgctcgcttcttttataggagagggaataagagatgcctttgaccctaagtcaggggataggtttgaatag

SEQ ID NO: 1686 - protein, 113 aa, Unknown
  Obtained from environmental sample
  misc_feature (1)..(113): Xaa is any amino acid
MQFVKAATVLGMGHVRIFFKEILPNALTPVITLFPFSIIGGISGLTSLDFLGFGLQAPTPSWGDLLSQGLANLYAPWITIFTILALFITLMLASFIGEGIRDAFDPKSGDRFE

SEQ ID NO: 1687 - DNA, 471 bp, Unknown
  Obtained from environmental sample
  misc_feature (1)..(471): n is a, c, g, or t
atgtcagatcggccgagcttaagcaaaggtgtgttctttgcagaaacaaccttgcacgttggtcccggcacttttgaaaacataaaagaaacttcggattttcgacagcacagaatgcacagcgaggaatacgaattaaacgagcaaaatgcaaacatgataaacgaatgcaaaaaaaatggcgggagaataatttgcataggcacaacaagcaccagagttttggaaacggttgcaaacgaagaaggttttgtgaaagccgctagtggcatgacggatatttttatctacccaggttttaaattcaaagcaacagatgctctgcttacaaattttcattggccaaaatcctctttaattctgctggtctctgctttttatggcagggaaaataccttgcaggcttacaaatatgcagttgaaaattcccttaagctctttagctatggagatgggatgttggttatataa

SEQ ID NO: 1688 - protein, 156 aa, Unknown
  Obtained from environmental sample
  misc_feature (1)..(156): Xaa is any amino acid
MSDRPSLSKGVFFAETTLHVGPGTFENIKETSDFRQHRMHSEEYELNEQNANMINECKKNGGRIICIGTTSTRVLETVANEEGFVKAASGMTDIFIYPGFKFKATDALLTNFHWPKSSLILLVSAFYGRENTLQAYKYAVENSLKLFSYGDGMLVI

SEQ ID NO: 1689 - DNA, 906 bp, Unknown
  Obtained from environmental sample
  misc_feature (1)..(906): n is a, c, g, or t
atggtcgcaagaggcgatctcggccaacagctccccatcgagcaaattcccctggcgcaaaaacacattatcaatgtgtgccgcagggcagggaaacctgtcattaccgcgacccaaatgctggactcgatgatacataatccgcgtcctacccgcgcggaactgaccgatgtggcaaacgcgatactcgacggaaccgacgcgatcatgctctcgggcgagaccgctcaagggtcgtatccggtggaagcggtaaaaacaatggataaaatagcgtgcgtcattgagcagtctgacgaattccgtacacgtatgaaaaaactccaccaggaatgccattctgaagcgcataaccagaaagaaaacctcggcatcatcatgtcgcgatcgggagttgaaatcgcgatggcggtaaaggcaaaagcgatagttacgccgacccaaagcggcaataccgcgcgaatcctcagtgtattcaggccgaatgaacctattcttgcagtaacgaccgataatagatctgaacgcattatgcagttatactggggcgttaatacctgcatcagctcgaaagtcgacgattcggaaaccatgatacacaacaccatgaaggttgtttcggagaccggaacggcaggcatatcggataaaatagtactcattgcgggcctgccgcttgaaagcccaaacatgataaatactgtccgcgtcctcattatcgggacggttctcgcgcgttcaaatgccggcggtttcgcaaatcccgccattacccgcgcccagggtaagataatccacgccgcaactcccgaagaagcctgcagaaaaatcacgccttcggggggcggtgaaatacttatttgcgatgtgcttacagaagaatacgcgtcgtctcactcgcgataa

SEQ ID NO: 1690 - protein, 301 aa, Unknown
  Obtained from environmental sample
  DOMAIN (1)...(105): Pyruvate kinase, barrel domain
  misc_feature (1)..(301): Xaa is any amino acid
MVARGDLGQQLPIEQIPLAQKHIINVCRRAGKPVITATQMLDSMIHNPRPTRAELTDVANAILDGTDAIMLSGETAQGSYPVEAVKTMDKIACVIEQSDEFRTRMKKLHQECHSEAHNQKENLGIIMSRSGVEIAMAVKAKAIVTPTQSGNTARILSVFRPNEPILAVTTDNRSERIMQLYWGVNTCISSKVDDSETMIHNTMKVVSETGTAGISDKIVLIAGLPLESPNMINTVRVLIIGTVLARSNAGGFANPAITRAQGKIIHAATPEEACRKITPSGGGEILICDVLTEEYASSHSR

SEQ ID NO: 1691 - DNA, 726 bp, Unknown
  Obtained from environmental sample
  misc_feature (1)..(726): n is a, c, g, or t
atggcagtaaaaggcttatctgaatcaggggcaaaaaagatcttggaggaacgtgaacggggcggagaatttttatcattggatgatttttccaggcgcctcaggctcaatcgggatgatattaccgcgctatgccctgccggtgtgtttgatggcatcgcaaagggtattccccgtccattacaggcacgaaaattattgggagcaaataacggtcaaataaaacaaaagcaagacgaattgtttgccccggggggttcttcttttggaaacaattctaccctttttgcctcgcctcaggaaaaaattacaaagataaccaataatgatttatgggaagaataccgggcattgggctttttacggaaaacacaccccctcgcgttatggaaaaatgaaatattggcggttaagtaccgggtaaaggccctaaatatagtgcaatacattgggcggtctgtaaaaatggtaggttggcctatcacacaaaaggacgtgtggactaaagacggcctcaccatgtgctttttaagcctggaagacgaaacggccctgtatgagactgtcattttccctcaagcctatgatcggtataacaaactcttatttgatcagcggcctttactaatatatggaacggttatgaatgatgaaggggctttatcagtggaaatcagcaggattgacgttttaggcacgcaaagcgccggggaaacttttacataa

SEQ ID NO: 1692 - protein, 241 aa, Unknown
  Obtained from environmental sample
  DOMAIN (154)...(231): OB-fold nucleic acid binding domain
  misc_feature (1)..(241): Xaa is any amino acid
MAVKGLSESGAKKILEERERGGEFLSLDDFSRRLRLNRDDITALCPAGVFDGIAKGIPRPLQARKLLGANNGQIKQKQDELFAPGGSSFGNNSTLFASPQEKITKITNNDLWEEYRALGFLRKTHPLALWKNEILAVKYRVKALNIVQYIGRSVKMVGWPITQKDVWTKDGLTMCFLSLEDETALYETVIFPQAYDRYNKLLFDQRPLLIYGTVMNDEGALSVEISRIDVLGTQSAGETFT

SEQ ID NO: 1693 - DNA, 540 bp, Unknown
  Obtained from environmental sample
  misc_feature (1)..(540): n is a, c, g, or t
atgttttcaacaatactttttattctgtttgcggcggtgtgccttgcaagtgcttttgcgctcttgatttcaaagcaccctataaatggcgcaatggctcttgtgctcaatatgctttcgcttgcgggtatttacacccttgttcacagcactttnttaggcgttctgcaaattttggtttatgcaggcgcggttatgatgctcatagtgtttgtgattatggtactcaacggagcaagagaaacaaggttgccgagaatggataaacttggggctatttctgtttttgcggttttgtgcggagggttgcttttgctctctgctgtttgcaatgtgaatttgccagagaatccagaagccgttactggaagcgttgctatgatttccgaacacctttttgatactagttatagaatctctgtaaatgctcctggcgggtattttattttatttgagattgtcggttttattttgctttctgcaatggttggtgctgtatttttagttaagagaaaaaaattgctaggaaagaatgaataa

SEQ ID NO: 1694 - protein, 179 aa, Unknown
  Obtained from environmental sample
  SIGNAL (1)...(20)
  DOMAIN (13)...(169): NADH-ubiquinone/plastoquinone oxidoreductase chain 6
  misc_feature (1)..(179): Xaa is any amino acid
MFSTILFILFAAVCLASAFALLISKHPINGAMALVLNMLSLAGIYTLVHSTXLGVLQILVYAGAVMMLIVFVIMVLNGARETRLPRMDKLGAISVFAVLCGGLLLLSAVCNVNLPENPEAVTGSVAMISEHLFDTSYRISVNAPGGYFILFEIVGFILLSAMVGAVFLVKRKKLLGKNE

SEQ ID NO: 1695 - DNA, 651 bp, Unknown
  Obtained from environmental sample
  misc_feature (1)..(651): n is a, c, g, or t
gtggatactatttggttaagtgtttcggcgggaagcggcccggaggagtgcgcccatgccgccgcgcttactgtacaggccatgctacgggagacctggacggaacaggatattaagatcagcgttattgaaagcgagaacgcccgtgaaaagggaaacatcaggtcggcgctgcttgccctggagggaaaaggcgcgaaggcctttgccgattcatggacgggcatcatccaatgggtttggcagagctcttaccggccccatcataaacggaaaaactggtttgtgcaggtcaggccctttgtggagcctgaaccgggggaactgttagccttagccgatctgcgttttgaaacggcgagggcgggcggtccgggcggccagcatgtcaataaaacagaaacggcagtccgcgccgtccatatacccacgggaaaaagcgccgttgcaagaggcgagcgctctcagcttatgaacaaaaaacttgccctcgcccggcttgcctctcttttcgaggatgaacaagctgaaaaagaaaagcagtcccgatccgcgctgcggcacagccattgggagcttgaacggggaaacccgctccgcgtctatgacggggaaaccatgaaactgttgaaggagaaaaagcatgactga

SEQ ID NO: 1696 - protein, 216 aa, Unknown
  Obtained from environmental sample
  DOMAIN (102)...(214): Peptidyl-tRNA hydrolase domain
  misc_feature (1)..(216): Xaa is any amino acid
MDTIWLSVSAGSGPEECAHAAALTVQAMLRETWTEQDIKISVIESENAREKGNIRSALLALEGKGAKAFADSWTGIIQWVWQSSYRPHHKRKNWFVQVRPFVEPEPGELLALADLRFETARAGGPGGQHVNKTETAVRAVHIPTGKSAVARGERSQLMNKKLALARLASLFEDEQAEKEKQSRSALRHSHWELERGNPLRVYDGETMKLLKEKKHD

SEQ ID NO: 1697 - DNA, 843 bp, Unknown
  Obtained from environmental sample
  misc_feature (1)..(843): n is a, c, g, or t
atgaaatcaacgctctgtatctccgagtgcggatcgggcaaaacaaagatagggattacctcgcttcatgcgtaccagcaacggcagcaacggaataacgccgatacctgcctggcaaagcactttaatgtggtcctctgcccctcccacatgacgaggaagtgggttcgggagatagaggaatcattacccgaaactttcgccgttattgtgacgagtatcaccgagataaacgccgcctatgaagcatatcaaaaggacaacaagacctgctacatcatcatctcaaaagaaatagcgagggacggttatatgaagcgcccgtccgtgaggtggagtgagaggcgcaagggtttcatctgtccttcatgcaatgagcgcataatgatggagtttatagactgcggctcgaagtatagggtgcccgccgatcagttcttcttcaaaaaggagaataaatcgaaccataaatgcgagcattgcggttctgtgctttggacggcgctcgcgccggaacaccagtcggaatgggtcaaagtatcggatttgggctttgtccaccgcaagatggcccgtcaatacctcgaagccgtggcaaagaaacccgcgctttatgaagagatcgaagctgtcgcggacaatcccgacgggcactatcccaatacaggggcttataggaggttccccttatctacatatatcaagcgccgcatgaaaggcaggattgacggccttatcattgacgagctacataattacaacaacaactcaggccaaggcgacgcgatgggcgaattgtttcaagccgcngaggaaggtggtaggcatgaccccacgtcataa

SEQ ID NO: 1698 - protein, 280 aa, Unknown
  Obtained from environmental sample
  misc_feature (1)..(280): Xaa is any amino acid
MKSTLCISECGSGKTKIGITSLHAYQQRQQRNNADTCLAKHFNVVLCPSHMTRKWVREIEESLPETFAVIVTSITEINAAYEAYQKDNKTCYIIISKEIARDGYMKRPSVRWSERRKGFICPSCNERIMMEFIDCGSKYRVPADQFFFKKENKSNHKCEHCGSVLWTALAPEHQSEWVKVSDLGFVHRKMARQYLEAVAKKPALYEEIEAVADNPDGHYPNTGAYRRFPLSTYIKRRMKGRIDGLIIDELHNYNNNSGQGDAMGELFQAAEEGGRHDPTS

SEQ ID NO: 1699 - DNA, 789 bp, Unknown
  Obtained from environmental sample
  misc_feature (1)..(789): n is a, c, g, or t
gtggatcgctcccacaccggcataggaagccgctatatcgcggacgaaaataccgcttgcagcgatcttgccttagaggcagcaaaaaacgcccttgcgatgtcggcgggttataccgggcaggatacctcggagagggacagagccgcggcgcaggaagccctcagtatagatattatcgttcttgcgacggcgacggcggattatatagggacgccctctacctcatgcatagttcagcataagttaggagcggtaaacgcggccgcaatggatattacggcggcttgcaccggctttgtttacgctatggaaaccgcggccggattgttaagcgtcggaataaaacgtaaacgcgctttggtaataagttcggagattttaacaaaaatggcggactgggacgacaggggaacctgcgtattgttcggggacggcgcgggcgcggtggtgcttgaaaaaaccgacgacaacaaaagaagcggtcttttgcagacgcttttgtatgccgacggctcaggatatgaaagccttattactcgaagaggaggaacgcgcagcccctttaaaattggggaagttgtggaaaaacccagcgttatcgaaatgaacggacaagaggtttataactttgccgttaaagcggtaaccgacactgtagccgcgttgataaaggcgggcgatattaaaatagaagaaatcgcgcgtattgttccgcatcaggctaacgcgcgtattgtacaggcggcggcaaaacggctgcgcgtaccggctgaaaaatttatctaa

SEQ ID NO: 1700 - protein, 262 aa, Unknown
  Obtained from environmental sample
  DOMAIN (224)...(262): 3-Oxoacyl-[acyl-carrier-protein (ACP)] synthase III C terminal
  misc_feature (1)..(262): Xaa is any amino acid
MDRSHTGIGSRYIADENTACSDLALEAAKNALAMSAGYTGQDTSERDRAAAQEALSIDIIVLATATADYIGTPSTSCIVQHKLGAVNAAAMDITAACTGFVYAMETAAGLLSVGIKRKRALVISSEILTKMADWDDRGTCVLFGDGAGAVVLEKTDDNKRSGLLQTLLYADGSGYESLITRRGGTRSPFKIGEVVEKPSVIEMNGQEVYNFAVKAVTDTVAALIKAGDIKIEEIARIVPHQANARIVQAAAKRLRVPAEKFI

SEQ ID NO: 1701 - DNA, 792 bp, Unknown
  Obtained from environmental sample
  misc_feature (1)..(792): n is a, c, g, or t
ttgaagatactggaaaaatcggaagttaattactacaataaattattcggaggaaacatgaggcttgaaaataaaaaggctttaattacgggagcgttaaggggaatcgggaaaacaatagccgatttgtttatcgcggagggagcggaagtttggggactggattataaaacgccggaagatctttctgacagggtttcggcggcaaacggaaaacttcactgggttcagcttgatctttcccggactgcagaaattgagagcgtaattgaaagtacggttaaagaagcgggcggttttgacatacttgtaaacaacgccggcatcacaaaagataatctttctttcagaatgtcccttgaagagtggcaaaaggtattggatattaacctttcagcggcgttctttgtcgcccgcacagtagcgagagacatgatccgcaaacgcgcgggttccattatcaatatggcgagcgttgtcggcatacacggcaacggcgggcaggcgaattattccgcaagcaaagcgggcttaatcggcgtaacgaagagccttgccaacgaagtggcgagccgcggagtgcgcgtaaacgctctcgcgcccggttacatcgagtccgacatgacggcggctgtgcctgaagaagcaagaaaaaaaatgatcgaggttatccctatgaagaggacaggaaagcaggaagacgtcgcgagagcggcgctctttttcgcatccgacgattcttcttatattaccgggcaggtattgcccgtagacggcggaatgtatttttag

SEQ ID NO: 1702 - protein, 263 aa, Unknown
  Obtained from environmental sample
  DOMAIN (27)...(258): NAD dependent epimerase/dehydratase family
  misc_feature (1)..(263): Xaa is any amino acid
MKILEKSEVNYYNKLFGGNMRLENKKALITGALRGIGKTIADLFIAEGAEVWGLDYKTPEDLSDRVSAANGKLHWVQLDLSRTAEIESVIESTVKEAGGFDILVNNAGITKDNLSFRMSLEEWQKVLDINLSAAFFVARTVARDMIRKRAGSIINMASVVGIHGNGGQANYSASKAGLIGVTKSLANEVASRGVRVNALAPGYIESDMTAAVPEEARKKMIEVIPMKRTGKQEDVARAALFFASDDSSYITGQVLPVDGGMYF

SEQ ID NO: 1703 - DNA, 900 bp, Unknown
  Obtained from environmental sample
  misc_feature (1)..(900): n is a, c, g, or t
ttgttcagcgcttctcttgtttcagacgatctaagcgccacgcagattttgattaccctgaacgcggtaaccgcggattttacccgcccggaaatattgcagggtatcgggccaatccgtaaacttgccggcgaactttttgcgggcgaagcgcaggtttattttacgggacagcctattgtcaacgaagttataagcaaatcaattattaccgataaccttctgctgataccgttagttgtcattgtggtgctggcgatgatgcttttttcattcaggcgctttacatttgtcattctgcctcttttaacagtcatcattgcggttgtctggactatagggcttgcggcgctgttaggaataaaactttcggtaattacgacaatactgcctgtaattcttgttgcggtaggaagcgcctacggtatccatattgttacgcactatatggaagatacgcgggaaaaaacattaaatattacggagcaccgcgtattggttttgaatttggtaaaaaaactgattaagccggtatttcttgcggcgctgactacgctggcgggttttgtatcgttctgttttacgccgattgttccgatgagggaattcggttattgcgccggttttggagtactttcatcttttgccgtagcggtattgtttattccttcaatgttcctgcttataggtccgcgcgtcttaaaagagcgaaaaaatgagcaaacggacgaaaacaattttagtaacgctatcgcaggaattttttccggcatagcggagaaaaagatattggtactggttcttgcgtcgcttgccgtgatcatttcgttatacgggctttccaaggttatagttgacaancgcggtagtcgagtttttcagaatgctcggccgatctga

SEQ ID NO: 1704 - protein, 299 aa, Unknown
  Obtained from environmental sample
  DOMAIN (6)...(119): MMPL family
  misc_feature (1)..(299): Xaa is any amino acid
MFSASLVSDDLSATQILITLNAVTADFTRPEILQGIGPIRKLAGELFAGEAQVYFTGQPIVNEVISKSIITDNLLLIPLVVIVVLAMMLFSFRRFTFVILPLLTVIIAVVWTIGLAALLGIKLSVITTILPVILVAVGSAYGIHIVTHYMEDTREKTLNITEHRVLVLNLVKKLIKPVFLAALTTLAGFVSFCFTPIVPMREFGYCAGFGVLSSFAVAVLFIPSMFLLIGPRVLKERKNEQTDENNFSNAIAGIFSGIAEKKILVLVLASLAVIISLYGLSKVIVDXRGSRVFQNARPI

SEQ ID NO: 1705 - DNA, 459 bp, Unknown
  Obtained from environmental sample
  misc_feature (1)..(459): n is a, c, g, or t
ttgtttggtggccttatttttattgtggtgggccttaacatttatcaggcacagcggcgcattgtgctggaacggcgggaagaaatcggccttttgcgggctgtgggggccggtgaccgggcggtaaggcttgtctttgtctgggacggcctcgttatcggtttaacaggcgccggtctggggacggctttggggcttttgatcagctttaacattgccggctttttttccatgctggaaaatgttgttaacgtaatcctgtccttgctaaaccggggagagggttttgcggttttttcccccaccgtattttatattaaagaattaaaggcacgggtgattccccaggaagtgttgctgatttttttcttcggcctcttttccgctttgggggcggcctggtttgcttcgggcagggtctcccgtatcaggcctgcggaggtattgcgttatgaatga

SEQ ID NO: 1706 - protein, 152 aa, Unknown
  Obtained from environmental sample
  DOMAIN (1)...(145): Predicted permease
  misc_feature (1)..(152): Xaa is any amino acid
MFGGLIFIVVGLNIYQAQRRIVLERREEIGLLRAVGAGDRAVRLVFVWDGLVIGLTGAGLGTALGLLISFNIAGFFSMLENVVNVILSLLNRGEGFAVFSPTVFYIKELKARVIPQEVLLIFFFGLFSALGAAWFASGRVSRIRPAEVLRYE

SEQ ID NO: 1707 - DNA, 474 bp, Unknown
  Obtained from environmental sample
  misc_feature (1)..(474): n is a, c, g, or t
atgctggaaaaaattgtaaaaccgcgctttgaaagccttgaaggcgcgggagaagttttaatttcgggcgcgggcttaaaagaaattgttataagtcttgatcaggaaaaactttttaccataggacttcatccgtccgccgtcgccgaagcgcttgcgctgaacgattcgattttctcgggcgggacaggcgtaatcggcagcagggaaataattgtcacggtggacgggcgttacgggcaatctttggacaaggcgcttgtcccgcttggaaacggaaaatttattgagcttgccgatatagccgtaattaccgaacaggaacgggagccggacattctttcgcgcttgaacggcagaaaaacggcgggaatcgctattatgggacggcatgacgccgacctgcgaaaactttcttcagatataaaaaaagaattagccgcccttttccctgctctggattcaccgttttaa

SEQ ID NO: 1708 - protein, 157 aa, Unknown
  Obtained from environmental sample
  misc_feature (1)..(157): Xaa is any amino acid
MLEKIVKPRFESLEGAGEVLISGAGLKEIVISLDQEKLFTIGLHPSAVAEALALNDSIFSGGTGVIGSREIIVTVDGRYGQSLDKALVPLGNGKFIELADIAVITEQEREPDILSRLNGRKTAGIAIMGRHDADLRKLSSDIKKELAALFPALDSPF

SEQ ID NO: 1709 - DNA, 501 bp, Unknown
  Obtained from environmental sample
  misc_feature (1)..(501): n is a, c, g, or t
gtggtaaaagcgtggccgacaagtccacagaccgatgacatattgatgatcgatccgcctccgcccttacgcaggatgggaatggcgtgcttggttcccaggaaaggcccctttacgttgaccgccagcatggtatcaaaattttcagctttcattacctcaataggctccctgatattgataccggcattatttacaagtatgtccaaacggcctgcctgcgtttgtatcgccgccatcgcgtctatccagttttgctcattggtaacatccagcgtaaggaagaatgccttgccgcctttgccgcgaattttctcaacaacctggtttcctacctcggtcttcatatcgccgataaatacaagcgccccttcttcggcaaagcggcaggccattgccgcccccaaaccctgcgccgccccgcttattaaagctatttttcccgcaagccgcanttacgccctctatttccgtacttcgatatgcgccagtttttcgtaa

SEQ ID NO: 1710 - protein, 166 aa, Unknown
  Obtained from environmental sample
  misc_feature (1)..(166): Xaa is any amino acid
MVKAWPTSPQTDDILMIDPPPPLRRMGMACLVPRKGPFTLTASMVSKFSAFITSIGSLILIPALFTSMSKRPACVCIAAIASIQFCSLVTSSVRKNALPPLPRIFSTTWFPTSVFISPINTSAPSSAKRQAIAAPKPCAAPLIKAIFPASRXYALYFRTSICASFS

SEQ ID NO: 1711 - DNA, 474 bp, Unknown
  Obtained from environmental sample
  misc_feature (1)..(474): n is a, c, g, or t
gtgatggcggcggtattgtgttcggggcaattggacagcctctgcgccctgatccttgaagcccaggttttgggcagggataacagcggatttgtgaatgatttacaggatatattggaattcgtccgttcgctgttctccgtcgaatataagcgcgtcccgttaggcgaattccgcattttaggttatgactcaaaagaaatacgggaaagatcccataaccctgaaaagtattttggccgcaagcgccttgtgatgcatcattccatggggccgctgcccttgcgcttgaattttttgcgtacaacagccagggaggccgagcttgcggcggtctccgtcctgcgtgagatagcccgcaatcccaaggccagcgggatacaggatgccgaacactgctacaaggatatagttgaagccttaaacagactttccagtttgttctacatgttaatgtataaataccttctgtag

SEQ ID NO: 1712 - protein, 157 aa, Unknown
  Obtained from environmental sample
  DOMAIN (1)...(157): Cobalamin adenosyltransferase
  misc_feature (1)..(157): Xaa is any amino acid
MMAAVLCSGQLDSLCALILEAQVLGRDNSGFVNDLQDILEFVRSLFSVEYKRVPLGEFRILGYDSKEIRERSHNPEKYFGRKRLVMHHSMGPLPLRLNFLRTTAREAELAAVSVLREIARNPKASGIQDAEHCYKDIVEALNRLSSLFYMLMYKYLL

SEQ ID NO: 1713 - DNA, 957 bp, Unknown
  Obtained from environmental sample
  misc_feature (1)..(957): n is a, c, g, or t
atggcgagctggacgagcattgctgactacacccaggccattaccttaaaccccaactcagcggatgcctataccaaccgtggaattgcgtataaaaataagggcgagttggacaaggctatatctgattacaatcaagccattgccttaaacccaacgttagagcaagcctataacagtcgcggaatcgtatatgactataaaggcgaactggacagggctatagccgactacacccaggccattgccttgaatccgaagtacgcgacagcctataacaatcgtggaattgcgtataaaaataagggcgagttggacaaggctatagccgactacacccaagccattgccttaaaccctaagaatgacatggcctataccaaccgcggatacgcttattacgataaaggcgaactggatagtgcaatcgccgactatacacaggccattgccttaaaccctaatttactgtcctttatcaaccggggaaacgcatataccaagaaaggcgaactggatagagccattgccgactacactcaagccgccattgccgcagacgcaagcgccaatgtcctcgacatcttttttgagtcttgggaattcgcgggcgctttctacaaaacctatcccttccttggcgcggacatggacgaaaacgcccttaaccggaggcacgctaacatcgcccgcgaagccttggccctaagcatcgcaaaagcagaaaaagcccgcgccggtcttggcattcgtggtgtcgctctcatgtcaggtctagtttaccagtactacgcctccctcgactttgagtcccgcttcggtaccaccgatcgcgccttctccgtctccgaaggcttgcgcagtcgcggcttcctggaacagatgggtacagaggcagccctgcgtcttcccggcattgcgccagccgatgcgaaacgcgtacgtgaacttacctga

SEQ ID NO: 1714 - protein, 318 aa, Unknown
  Obtained from environmental sample
  DOMAIN (55)...(88): Tetratricopeptide repeat
  misc_feature (1)..(318): Xaa is any amino acid
MASWTSIADYTQAITLNPNSADAYTNRGIAYKNKGELDKAISDYNQAIALNPTLEQAYNSRGIVYDYKGELDRAIADYTQAIALNPKYATAYNNRGIAYKNKGELDKAIADYTQAIALNPKNDMAYTNRGYAYYDKGELDSAIADYTQAIALNPNLLSFINRGNAYTKKGELDRAIADYTQAAIAADASANVLDIFFESWEFAGAFYKTYPFLGADMDENALNRRHANIAREALALSIAKAEKARAGLGIRGVALMSGLVYQYYASLDFESRFGTTDRAFSVSEGLRSRGFLEQMGTEAALRLPGIAPADAKRVRELT

SEQ ID NO: 1715 - DNA, 453 bp, Unknown
  Obtained from environmental sample
  misc_feature (1)..(453): n is a, c, g, or t
ttgagcgggtttcctgtactgcactttgcctgtcacgggtattttaacagcgagtacccggaactgtcggcgatagtattctctgaggtttcggggctactgacggaaagcacggaagacggttatcttacggtagcggaggcggcgctgttaagactgaacgcgcgcgctgtgatactgtctgcttgcgatacgggtaagagcggcttaaagcgcggtgacggaatggtgggattggtacgctcgctattggtagcgggaagccgcagcgccggagtaagcctgtggccaataagcgatgaagcgacagtcaagtttatggaaggggtataccggcgcgccttaaagaatgggaaaagtttccgcgacgcgtattatgaagtaaagcaggaatttcgccgcggaaaatggagccacccctactaccacgcagcttttgtattgtatgagtaa

SEQ ID NO: 1716 - protein, 150 aa, Unknown
  Obtained from environmental sample
  misc_feature (1)..(150): Xaa is any amino acid
MSGFPVLHFACHGYFNSEYPELSAIVFSEVSGLLTESTEDGYLTVAEAALLRLNARAVILSACDTGKSGLKRGDGMVGLVRSLLVAGSRSAGVSLWPISDEATVKFMEGVYRRALKNGKSFRDAYYEVKQEFRRGKWSHPYYHAAFVLYE

SEQ ID NO: 1717 - DNA, 459 bp, Unknown
  Obtained from environmental sample
  misc_feature (1)..(459): n is a, c, g, or t
atggcaaaaaaaatagcaaagaaaaacaatatggttagagaagctttggagcttttggcaaaagaaaaaaacgttgccatagaagatgtattcactgcttttaaagaatctctcatagccgcagcccgcaaattcatgaagctgcataaaaacatagaggtggatgttgacccagagaccgaagacataaaagttgtgcttagggtagaggttgttgacgatttccccgactacgacccanatctctctcccgaagaagttgagaaaatggacgagcagtatatgcttgaagaagaagcaaaggaatatcaccccgaagctgccgcaggctatatgctggaagttgagctaccttttgagaactacggccgtttagccattcaagaaacacggcagcgggtaaaagcacgtatgggcgatgtggagcgcaccgcgtttttgaattttcagcataaatag

SEQ ID NO: 1718 - protein, 152 aa, Unknown
  Obtained from environmental sample
  DOMAIN (10)...(145): NusA N-terminal domain
  misc_feature (1)..(152): Xaa is any amino acid
MAKKIAKKNNMVREALELLAKEKNVAIEDVFTAFKESLIAAARKFMKLHKNIEVDVDPETEDIKVVLRVEVVDDFPDYDPXLSPEEVEKMDEQYMLEEEAKEYHPEAAAGYMLEVELPFENYGRLAIQETRQRVKARMGDVERTAFLNFQHK

SEQ ID NO: 1719 - DNA, 948 bp, Unknown
  Obtained from environmental sample
  misc_feature (1)..(948): n is a, c, g, or t
atggaagtaataggcagtctgggctggatgtattttaaaatccacaggctgagggagggggaaagacttcttgtttccgccgtagaacgcttcggttataactcggatttttcaatgacgcttggaaccatttactccgatatgtaccgttatgatgacagcaaatattggtacggcaaatcaatcgaatttggagaagaatacaaagacaatgaatatacctctatagcgtggtataacctttcaattctggaatcgcgtttttatctttacgaactttgcatgtacgcgaccgattcggcgataaaattgtataaccgcgcttccggccatcttgcccgcgcagaactcttaaaacaccggttaaaattgacagaagctcaaagggagtgcgagatcgcctatgaaaccgacacttccccgctttctaaattgaggcttgcgcatattttccaaaaatccggccggctggaagaggcgcggctttacgctcaagactgcctaaaagacagtaataattcatggatgttaaatttcggcatagacccggaccgttataaaagagaaattcatcatacgctcgctaaaacatattccggtcttcttaataccgaacggtattgggtatgggaaactccaaaagaaaaaatgttatcgcttttcagaataatctcgtatacgttaaaaagagaagtaaattataaactctacagaaaatactgtcttgccgcggcaaacgcgtacgcgaaaactttttcagataatttcgcagcaagcagcggcgcagcaagcagcggcgcagtaaacagcgatgaaattaatcttgattcacttgcgcaatattacaacgcgtttaaggattatccgcgccgcgctttcacttatcttgataaagncgcgcgttttgaaacaacgctattccggcatcaattcctttttatgatatga

SEQ ID NO: 1720 - protein, 315 aa, Unknown
  Obtained from environmental sample
  misc_feature (1)..(315): Xaa is any amino acid
MEVIGSLGWMYFKIHRLREGERLLVSAVERFGYNSDFSMTLGTIYSDMYRYDDSKYWYGKSIEFGEEYKDNEYTSIAWYNLSILESRFYLYELCMYATDSAIKLYNRASGHLARAELLKHRLKLTEAQRECEIAYETDTSPLSKLRLAHIFQKSGRLEEARLYAQDCLKDSNNSWMLNFGIDPDRYKREIHHTLAKTYSGLLNTERYWVWETPKEKMLSLFRIISYTLKREVNYKLYRKYCLAAANAYAKTFSDNFAASSGAASSGAVNSDEINLDSLAQYYNAFKDYPRRAFTYLDKXARFETTLFRHQFLFMI

SEQ ID NO: 1721 - DNA, 732 bp, Unknown
  Obtained from environmental sample
  misc_feature (1)..(732): n is a, c, g, or t
gtggagttaaagccagacattataaaaatcaatatggattacatccagaacagcgaaaagtcttatcactatcgcgaatatatgcggtctattgccagttttgccgagtcagttggaattgaagtgctatacgaaggcatagaaacgcagcggcagtttgatatctgcctctctttaaagggaaggtattatcaagggttcttggtagctcgccctcaaccttcaatgcgagaggctgaggtaaacaacgccgttttttccgcatctattgaaaacgtatatacatttctgcaaaacgaaataataaaagcagaggccctgcgaaaatccttggatgctgaagttgagcattttttggcagaaaacccgcttgataatgcaaaaaatgactacgatgcgtatctcacaaagctctgcaaggaattatcaaatgtacggttggtttttctgtgtgataggcacggtaatcagctcacctctaacattgtgcagcaacccgaagagcctgcatctggtggtagcaagtgtttgacgaagtataagaataaaaattgggtgtggcgcggatatttctatgaagcgttaaaatctgttgctatgggtcaaaaaagttatatctcacatacctataacgattttgcaaccaaagacaaagttcgtacatattcgtatgcgataagcaatgagatctttttattcgttgatgttgaagagatattaccaatgctataa

SEQ ID NO: 1722 - protein, 243 aa, Unknown
  Obtained from environmental sample
  misc_feature (1)..(243): Xaa is any amino acid
MELKPDIIKINMDYIQNSEKSYHYREYMRSIASFAESVGIEVLYEGIETQRQFDICLSLKGRYYQGFLVARPQPSMREAEVNNAVFSASIENVYTFLQNEIIKAEALRKSLDAEVEHFLAENPLDNAKNDYDAYLTKLCKELSNVRLVFLCDRHGNQLTSNIVQQPEEPASGGSKCLTKYKNKNWVWRGYFYEALKSVAMGQKSYISHTYNDFATKDKVRTYSYAISNEIFLFVDVEEILPML

SEQ ID NO: 1723 - DNA, 450 bp, Unknown
  Obtained from environmental sample
  misc_feature (1)..(450): n is a, c, g, or t
ttgctgttgtggatcttcccgggtttatacggcttttatgtcggaatcagggcggtaagggattttgaagagcgcagcgccaaggtgcaggcggaaatcgacagaatgaccgccgagatcaataacctgaaagttagccaggttaacgcgcaggcccaggggaatgtggagcaggcgttgaggtatgaagcggaagttacaaaaaggtcagatattcttagggaatactacagaacaaaaactgttgaattggacagcataagaaaaagcctgacccagtcgggcgcttttctggaacaagtatacgatgagattcgctatgtcgcggagagcgaagggtacagcatggttttaaaccttaaggaaaacaacggaatagtctggtacaacccgactgtcgatttaaccgacaagatcattaaaaatctgatggacaaagcaaggcgttaa

SEQ ID NO: 1724 - protein, 149 aa, Unknown
  Obtained from environmental sample
  DOMAIN (1)...(144): Outer membrane protein (OmpH-like)
  misc_feature (1)..(149): Xaa is any amino acid
MLLWIFPGLYGFYVGIRAVRDFEERSAKVQAEIDRMTAEINNLKVSQVNAQAQGNVEQALRYEAEVTKRSDILREYYRTKTVELDSIRKSLTQSGAFLEQVYDEIRYVAESEGYSMVLNLKENNGIVWYNPTVDLTDKIIKNLMDKARR

SEQ ID NO: 1725 - DNA, 702 bp, Unknown
  Obtained from environmental sample
  misc_feature (1)..(702): n is a, c, g, or t
gtgtcagataccggaatgggcataagcggcaaacagcaagaactcctgttcaattcctttcaacaagccgatagcagcacgacgcgtaaatacggcggtacggggctgggactcgctatttccaagagcattgttgaaatgatgggcggtaaaatttggatcacatccgagccagagaaaggctctacttttagctttacgatcatggcgaagaaaggcaaaacctctgaaatcatcaatgaaaatgccgccggggacagccgacaagcggaagaaatacctgcagatattaacggcctttttaagggacggtgtattatgttggtagaagatgtggaaatcaaccgtgaaattgtacttgccctgcttgaatcaacactgttggagatagactgcgcggaaaatggcgaacaggccgtacgcatgttcagtgaagacccgaacaagtacgagttaatttttatggatgtgcagatgcccgaaatggacggctacgaggcgacgcggcgtatccgttcgctggatacccctaagggtaaaaccgtccctatagtggccatgaccgctaacgcgttccgtgaaaatgtagaacaatgccttgcggccggcatggacgatcatatcgggaaaccgattgattctgaaaaaatcatagaaaagctgtgcgtttatttactgtcgcgcacgggtgacagatactaa

SEQ ID NO: 1726 - protein, 233 aa, Unknown
  Obtained from environmental sample
  DOMAIN (1)...(71): Histidine kinase-, DNA gyrase B-, and HSP90-like ATPase
  misc_feature (1)..(233): Xaa is any amino acid
MSDTGMGISGKQQELLFNSFQQADSSTTRKYGGTGLGLAISKSIVEMMGGKIWITSEPEKGSTFSFTIMAKKGKTSEIINENAAGDSRQAEEIPADINGLFKGRCIMLVEDVEINREIVLALLESTLLEIDCAENGEQAVRMFSEDPNKYELIFMDVQMPEMDGYEATRRIRSLDTPKGKTVPIVAMTANAFRENVEQCLAAGMDDHIGKPIDSEKIIEKLCVYLLSRTGDRY

SEQ ID NO: 1727 - DNA, 372 bp, Unknown
  Obtained from environmental sample
  misc_feature (1)..(372): n is a, c, g, or t
atgcggggttatcttcagattgacgaaaagaaactggacgcggcgattgaacagcatcttcccgcagtcaagcagttgttcggctccgacacaacgggcgacctgattgtagactcaggcgtcgcttttaacatggacagtctctccaggccttttgtggaaaccggcggaatcatagcgcttaaaacaggcaccctggattcgcgaatcgcccaggacagaaggcgcatagacactatggaccgccagcttgccgccaaggaagccgagctcaaggctcaatacagccgcatggaaagcgccttcgcgcgcatggagcagatgacatcgtctctggaaaacttcagccgtcaaaacagtaacaacaggtaa

SEQ ID NO: 1728 - protein, 123 aa, Unknown
  Obtained from environmental sample
  misc_feature (1)..(123): Xaa is any amino acid
MRGYLQIDEKKLDAAIEQHLPAVKQLFGSDTTGDLIVDSGVAFNMDSLSRPFVETGGIIALKTGTLDSRIAQDRRRIDTMDRQLAAKEAELKAQYSRMESAFARMEQMTSSLENFSRQNSNNR

SEQ ID NO: 1729 - DNA, 867 bp, Unknown
  Obtained from environmental sample
  misc_feature (1)..(867): n is a, c, g, or t
gtgcatttagacaggtttttgggaaatttcaaggctatacaggagaagatagggccgaggcatatatgcgttccggtaaaagccgatgcctacggtcacggcgcggtggatatcgcccaccaaagccttgccgccggagcattctgcctcggggttgcgggtgttcaggagggagcggagctgagaaaaggggaaatatccgcgcctattctggttttttcccaatctctgccctctgaaatccccgaaattatcaagaatggactgtcaccgctggtttctgacggtgattttatcgaaatgcttgccaaaaccgcggctgaagcgggaattcggctccccgtccacctgaaaattgacacaggtatgggccgggtgggctgtgcgccctcctctgccccctctttggctaaaaaaatcgccgcctctaccgctcttgaatacgccggaaccgcaacccacctggctgtgtcggactccacaaccccggaagaccacgcatatacggaacaacagatcaccaggttcagggaagcgctggagcaaatacggggggcgggcgttgatccgggcattgtccatgccgcgaattcgggcgcaatcgccctgcatcctgatgcctggtttgacatggtacggcccggaattatcctctacggatataaccttactggaaccccttccccgaaggttgagccggtaatggaacttcggaccaatgtcgccctgatcaagctgataaaaaaaggcgaaaccgtatcctatggccgcacatggactagtcctcatgacacggtaatcgccgttctgcctgtcggctatgccgacggcctgccccggctggtaagtacaaatggcaggcggtaa

SEQ ID NO: 1730 - protein, 288 aa, Unknown
  Obtained from environmental sample
  DOMAIN (234)...(288): Alanine racemase, C-terminal domain
  misc_feature (1)..(288): Xaa is any amino acid
MHLDRFLGNFKAIQEKIGPRHICVPVKADAYGHGAVDIAHQSLAAGAFCLGVAGVQEGAELRKGEISAPILVFSQSLPSEIPEIIKNGLSPLVSDGDFIEMLAKTAAEAGIRLPVHLKIDTGMGRVGCAPSSAPSLAKKIAASTALEYAGTATHLAVSDSTTPEDHAYTEQQITRFREALEQIRGAGVDPGIVHAANSGAIALHPDAWFDMVRPGIILYGYNLTGTPSPKVEPVMELRTNVALIKLIKKGETVSYGRTWTSPHDTVIAVLPVGYADGLPRLVSTNGRR

SEQ ID NO: 1731 - DNA, 780 bp, Unknown
  Obtained from environmental sample
  misc_feature (1)..(780): n is a, c, g, or t
ttgccgcttgagcctgagtttatccggaacgaagacgggaacgagaagcaggattgcgagcggaatgcggcgaaacgctatcttgagaggaaaggggaacgcttaagggggctcaaaccgacgtttttaggggatgatttgtatgcgtgccattcgatatgcgccaagatactggatatggggatgagtttcatattcacatgcagagacgaaagccatccgtggatagcggaacaggtgaagtactcgccgatggaagggcgcgtgcgcagtgaatggaacggaaggaaccaccttgaataccggtacgcatgggtaaacggcatagaaaaccgggccgaaggagagaagctttcggtgaattacctgagcctcaagatatggaacaaggagaaggatgaaatcacctatagcaacagttggataacgaacaaaccggtgactgccgatacggcagcgtttttggcacattgcgcccgtacccgctggaagatagaaaacgagtataacaacgtgctgaaatgccgggggtacaatctggagcacaatttcggacacgggcaagagcatgcggcggatatatattgccttttgaacatattggcatttttgtttcacagcatacaggacgcccttgatgaagattaccaggccgcgcggaaatccttcggcaggcgggatgcttttttctgggctttacgctatgaaatatgccgctatctgcatgacgactggtctttgttcttcctcaccgtcgccggtcaagctccggacggttga

SEQ ID NO: 1732 - protein, 259 aa, Unknown
  Obtained from environmental sample
  misc_feature (1)..(259): Xaa is any amino acid
MPLEPEFIRNEDGNEKQDCERNAAKRYLERKGERLRGLKPTFLGDDLYACHSICAKILDMGMSFIFTCRDESHPWIAEQVKYSPMEGRVRSEWNGRNHLEYRYAWVNGIENRAEGEKLSVNYLSLKIWNKEKDEITYSNSWITNKPVTADTAAFLAHCARTRWKIENEYNNVLKCRGYNLEHNFGHGQEHAADIYCLLNILAFLFHSIQDALDEDYQAARKSFGRRDAFFWALRYEICRYLHDDWSLFFLTVAGQAPDG

SEQ ID NO: 1733 - DNA, 345 bp, Unknown
  Obtained from environmental sample
  misc_feature (1)..(345): n is a, c, g, or t
ttgggagctcatttaaaaacaaactggcaatacaaaatttctatatttcaaaatatgcgtatctccacctttgaaaaagactgcatagtaaatgcaataactgcttgcgacccagaagctaaaatttggctttttggttctcgggcagacgattcaaaaaaaggtggagatattgatattggcatattatcagaaaaaatagatttcaaaaagaaattaaatataaactctagcatttgcgaaaaaataggcgaacagaaaatagatttggttgtttctaaaacaggagatacagccttttttaaatatgcggttaaagaagaagggattttactaaatgactga

SEQ ID NO: 1734 - protein, 114 aa, Unknown
  Obtained from environmental sample
  misc_feature (1)..(114): Xaa is any amino acid
MGAHLKTNWQYKISIFQNMRISTFEKDCIVNAITACDPEAKIWLFGSRADDSKKGGDIDIGILSEKIDFKKKLNINSSICEKIGEQKIDLVVSKTGDTAFFKYAVKEEGILLND

SEQ ID NO: 1735 - DNA, 336 bp, Unknown
  Obtained from environmental sample
  misc_feature (1)..(336): n is a, c, g, or t
gtggaaaactactgcgacgcgcctgtcctggttgacacaaaaaccggggagctntgctatgaaagctcctggtactacatcgggcatttcagccgttttatacggcccggagcgcaaaggatagcgcttaatgtcagcccgtacatggttccggcggccatagacgggcgcgtggggaacatgatggaattctgcgcgtttaagaacagcgacggttccaaaattcttgtggcgatgaaccgcaccgaagccgatatggtgtacgagttgtgcgacccggcctcaaataccgcgctgcgatgcccgccaagggggatacagacattggttttttaa

SEQ ID NO: 1736 - protein, 111 aa, Unknown
  Obtained from environmental sample
  misc_feature (1)..(111): Xaa is any amino acid
MENYCDAPVLVDTKTGELCYESSWYYIGHFSRFIRPGAQRIALNVSPYMVPAAIDGRVGNMMEFCAFKNSDGSKILVAMNRTEADMVYELCDPASNTALRCPPRGIQTLVF

SEQ ID NO: 1737 - DNA, 348 bp, Unknown
  Obtained from environmental sample
  misc_feature (1)..(348): n is a, c, g, or t
atgaagatagaggatgcctacaaggtaaggccggaagaccttgttgaaaaactgggcggcctgccctcatacaagatccattgctccgtgttaggcgacaaggcccttcgcgccgccattgacgactacctcgccaaaaccggaagatcgggattgttccaggaagcggtcaccgagatttgtcattgtctgagcatcaccgacaaggacattgaaaacgccttccaaaacggcgcccgcagttgggaagatttgcagcaggcaaccaagatcggcaccgtttgcggaaactgcaaaacaaaagcgctggatctgctgcacggcctggaacacatctacgggatgtaa

SEQ ID NO: 1738 - protein, 115 aa, Unknown
  Obtained from environmental sample
  DOMAIN (58)...(110): BFD-like [2Fe-2S] binding domain
  misc_feature (1)..(115): Xaa is any amino acid
MKIEDAYKVRPEDLVEKLGGLPSYKIHCSVLGDKALRAAIDDYLAKTGRSGLFQEAVTEICHCLSITDKDIENAFQNGARSWEDLQQATKIGTVCGNCKTKALDLLHGLEHIYGM

SEQ ID NO: 1739 - DNA, 492 bp, Unknown
  Obtained from environmental sample
  misc_feature (1)..(492): n is a, c, g, or t
atgattcatgacttatccgaacaggatttttcacaacttggaatcaatgaaaatgattttaaagtgattaacgcaaacgaatcttccgctccgtgtatggggtgctttaattgctggtttgaaactcccggtaattgtaaaataaatgattgtctgcaaaacatcggttcagtaatgggaaatagcgaagaaacggtaataataagccagaattgttatggcggatatagtgaacagataaagaaaatacttgaccgcagcgtttcggcaagtactccattttttacttatcgttcatggaaaataaggcacgtaaaaagatatgaaactaatcggaaacaactgacggtgattctatatgatggttttcctgaaatggaagcaaaaacagcgcaattaatggtggaggcaaaccggaccaacatgggttttaaaaaagttaaactttacatgataaatcatattgatgaaatagggctggtattaaaatga

SEQ ID NO: 1740 - protein, 163 aa, Unknown
  Obtained from environmental sample
  misc_feature (1)..(163): Xaa is any amino acid
MIHDLSEQDFSQLGINENDFKVINANESSAPCMGCFNCWFETPGNCKINDCLQNIGSVMGNSEETVIISQNCYGGYSEQIKKILDRSVSASTPFFTYRSWKIRHVKRYETNRKQLTVILYDGFPEMEAKTAQLMVEANRTNMGFKKVKLYMINHIDEIGLVLK

SEQ ID NO: 1741 - DNA, 561 bp, Unknown
  Obtained from environmental sample
  misc_feature (1)..(561): n is a, c, g, or t
atggcccgtaagaaccttattaaaggattcaagcgccccaaaggtattacatttgagcatggcgaacttaattccagttatggcaagttcagcgcaagcccatttgaacccggattcggcacaactatcggcaataccctgcgcaggatactcctttcctcaattcagggatacgcgataaccggggtaaaaatttactcatacaacgccgaaggcgtgtcccacagcatctccagcgaattcgagatgatcccgaatatcatcgaggatacgcttgaggtgattaataatcttaaacagatgcgggtgaagctgcctgatgatgttgagactgacaccttgttatatgaattttccggcaaacaggaagtaaaaagcggaatgtttgacagaccggggcaggttgatgttgtaaacaaggaccttcatataatgaccctgatggacaacgccaggatagagctggaagtccagattgaccttggcaggggttatgtgccatccgaagtaaacgaacgctttattgacgtaatcggaaccataattctggacgcgatctaa

SEQ ID NO: 1742 - protein, 186 aa, Unknown
  Obtained from environmental sample
  DOMAIN (24)...(97): RNA polymerase Rpb3/Rpb11 dimerisation domain
  misc_feature (1)..(186): Xaa is any amino acid
MARKNLIKGFKRPKGITFEHGELNSSYGKFSASPFEPGFGTTIGNTLRRILLSSIQGYAITGVKIYSYNAEGVSHSISSEFEMIPNIIEDTLEVINNLKQMRVKLPDDVETDTLLYEFSGKQEVKSGMFDRPGQVDVVNKDLHIMTLMDNARIELEVQIDLGRGYVPSEVNERFIDVIGTIILDAI

SEQ ID NO: 1743 - DNA, 576 bp, Unknown
  Obtained from environmental sample
  misc_feature (1)..(576): n is a, c, g, or t
atgctcaagaatattaccgggcaggacgcagcccttcttttgatgagaaacaattccattaacgatgtttctattgagccagtcgctggttcgcttacagatcattacgatccgggcgctaaaaagctgcgtctttctgaacctgtgtacgcccagccgtcaatcgcggcagtgggggtagcggcccatgaaaccggccacgccatccagcacgccaaaggctacggtcccttggcgctgcgaagcaccctggtaccggtagcaaacatcggctcttcccttgggccttggcttgccattgcgggcataggtttgtcttttccaattttgctaaacctcggcatccttctttttggaggcgctgttcttttttatataattaccctgcctgtggaattcaacgcgtcagccagggctctggcaatattacggagcaacagcgtacttacccaggaagaactcaaaggggtaaaaaaggtgcttaccgccgcagctctcacttacgttgcttcggcgctttccgcgatcatgaaccttctcaggctgattcttttatcaagaagtcgaaggcgctaa

SEQ ID NO: 1744 - protein, 191 aa, Unknown
  Obtained from environmental sample
  DOMAIN (2)...(190): Putative neutral zinc metallopeptidase
  misc_feature (1)..(191): Xaa is any amino acid
MLKNITGQDAALLLMRNNSINDVSIEPVAGSLTDHYDPGAKKLRLSEPVYAQPSIAAVGVAAHETGHAIQHAKGYGPLALRSTLVPVANIGSSLGPWLAIAGIGLSFPILLNLGILLFGGAVLFYIITLPVEFNASARALAILRSNSVLTQEELKGVKKVLTAAALTYVASALSAIMNLLRLILLSRSRRR

SEQ ID NO: 1745 - DNA, 327 bp, Unknown
  Obtained from environmental sample
  misc_feature (1)..(327): n is a, c, g, or t
atgatccccgcgaattcgctggaaggggtgcatattttctttccggatccctggccgaaaaaacgccaccacaagaggaggctgatacagcggccttttacagattgtatcgcccaaaaactgcggcagggagcgtatatttacatggtcagcgactggcttgactacgctaattgggcaatggaagcgttaaccaatactgaatgtttggttaacgaatatgatggtttcgctttaccgcaatcatggcggccccagacaagttttgaaaaaaagggtcttgacaagaaacatgaaataaaggaattgtttttcaggcggagctaa

SEQ ID NO: 1746 - protein, 108 aa, Unknown
  Obtained from environmental sample
  DOMAIN (2)...(108): Putative methyltransferase
  misc_feature (1)..(108): Xaa is any amino acid
MIPANSLEGVHIFFPDPWPKKRHHKRRLIQRPFTDCIAQKLRQGAYIYMVSDWLDYANWAMEALTNTECLVNEYDGFALPQSWRPQTSFEKKGLDKKHEIKELFFRRS

SEQ ID NO: 1747 - DNA, 672 bp, Unknown
  Obtained from environmental sample
  misc_feature (1)..(672): n is a, c, g, or t
atgcgtgacagattggccgagaatgggcaaagccgacgcgatggttggcggcgttgtaacacaaccggcaatgtgctgagggcaggtctttccattatcgggactgttaaaggactgaaaaacgcctcgtcctgttttgttatggcgggcctcgatcccaattggggcgtggacggcaccctgatcttctctgattgcgcggtaataccggctccgctgcccgaacaactggcggatatcgcggaaagcgccgccaattcctgccgtgaattcctggacgcggagcctgtcgtggcgcttatgtccttttcaaccaaaggttcagccgagcatgaaaatgttaccaaggtacagaccgccgttaaaattctgaaagacagaaatgtacaatttacttttgacggcgaactgcaggctgacgccgcgcttgttccttcggttaccgatcagaaagcgcccagcagcccggtaaaaggcaaggttaacaccctggttttcccggatctcggcgcgggcaatattggctataagctggtacagcgccttggcaatgcccaggctttcggtcctttcctccagggtttcgcaaaacccataagcgatctttcccgcggcgcctccgtagacgatatcgtaacaacctgcgccgttacattatcgcgtgcgaagtaa

SEQ ID NO: 1748 - protein, 223 aa, Unknown
  Obtained from environmental sample
  DOMAIN (2)...(219): Phosphate acetyl/butaryl transferase
  misc_feature (1)..(223): Xaa is any amino acid
MRDRLAENGQSRRDGWRRCNTTGNVLRAGLSIIGTVKGLKNASSCFVMAGLDPNWGVDGTLIFSDCAVIPAPLPEQLADIAESAANSCREFLDAEPVVALMSFSTKGSAEHENVTKVQTAVKILKDRNVQFTFDGELQADAALVPSVTDQKAPSSPVKGKVNTLVFPDLGAGNIGYKLVQRLGNAQAFGPFLQGFAKPISDLSRGASVDDIVTTCAVTLSRAK

SEQ ID NO: 1749 - DNA, 702 bp, Unknown
  Obtained from environmental sample
  misc_feature (1)..(702): n is a, c, g, or t
ttgacgccgatgcccgccagacgcgcgggatctctttgtcaccaggtcgtttccgcgggtgttgccgccggtctggtaaagggtgccgcctcgaagctgcaggaaaaaggctacggccccggcaagcccgctaacctggccttggtttcttccgccagaaccgacgccaaccagcaggactggctggctgagatcaaaaaacttctggcaacgtcgcagtacaactggattgtcatcaggaacgaagccaccgatgtttactatcccggtccggatgaaaccaccactcagtcacagagcggaacccttatcggacggatgggacccaacgccaaccagattcaggcggccatcggactcacgtccatggcaactccggcgctcggttcccaattccaggcagccgcccggaagcccgacgcgacaagaatcgttcttaccggccttgctacaccgaacgcgattaaagcctacatcaaaaacgcgaccaaccccatggacaacggggtaatctgggattgcatggatctcggctatcttgccattcaggcagcataccagcttgcccgcggaaccatcaccaccaattcggcttcctttacagccggacggctcggcaaccgcagcatcaccaaccagatgatcgtcctcggcgacgccatggtttttgacgttaccaacgtggaccggtataactactaa

SEQ ID NO: 1750 - protein, 233 aa, Unknown
  Obtained from environmental sample
  misc_feature (1)..(233): Xaa is any amino acid
MTPMPARRAGSLCHQVVSAGVAAGLVKGAASKLQEKGYGPGKPANLALVSSARTDANQQDWLAEIKKLLATSQYNWIVIRNEATDVYYPGPDETTTQSQSGTLIGRMGPNANQIQAAIGLTSMATPALGSQFQAAARKPDATRIVLTGLATPNAIKAYIKNATNPMDNGVIWDCMDLGYLAIQAAYQLARGTITTNSASFTAGRLGNRSITNQMIVLGDAMVFDVTNVDRYNY

SEQ ID NO: 1751 - DNA, 846 bp, Unknown
  Obtained from environmental sample
  misc_feature (1)..(846): n is a, c, g, or t
atgctctctaccgttaataatgcgcttaacgtatttgcaaatcctaaaattaagcgcaacaaccaaaatagcgaattctatataaatgaatttgccgaaacggacaagcctataactttatatttgacaatcgattatgggatggtacacaccattgccccgttaatacggctatttgtaacccttttttcccgccgctttacttcgggcgaaacggacgcaaatgccaggaaatttaaggttccgctcctttttatccttgacgaatttgacaagctcgggcggatggacgaactggaaatgaacatgggaattcacaacgggtttgggatccactatatgctgatttaccaatcgctaaaccagctggataaaatatacaccaaagaccatgctttccttgcccattgccggaatagcgtgttctttacgcccggcacaggggagtatgcaagcgcggagctaataagcaaaatctgcgggagggaatctttctcaaaagcgaatatcagctattccggcaaccgcggggcaatgggtttcaataacgccagcctaagcagccaggatcaggagaggaacttaatcaacgcggatgaaataatgaaacttcctcttgataactttattcttctatgccagggtttacccccatacatcggcaagaaaaatgtttactatgaggatcctgtattcatggcacgctgccataaccccaagacaggcgccaatccgcccgctttcgctaccagggacgaagcggttaaacaggctgncagcacaatnaaaaagatacaggggcgcagatggtacgcaactggaaatgcttctgagacagggacatag

SEQ ID NO: 1752 - protein, 281 aa, Unknown
  Obtained from environmental sample
  misc_feature (1)..(281): Xaa is any amino acid
MLSTVNNALNVFANPKIKRNNQNSEFYINEFAETDKPITLYLTIDYGMVHTIAPLIRLFVTLFSRRFTSGETDANARKFKVPLLFILDEFDKLGRMDELEMNMGIHNGFGIHYMLIYQSLNQLDKIYTKDHAFLAHCRNSVFFTPGTGEYASAELISKICGRESFSKANISYSGNRGAMGFNNASLSSQDQERNLINADEIMKLPLDNFILLCQGLPPYIGKKNVYYEDPVFMARCHNPKTGANPPAFATRDEAVKQAXSTXKKIQGRRWYATGNASETGT

SEQ ID NO: 1753 - DNA, 819 bp, Unknown
  Obtained from environmental sample
  misc_feature (1)..(819): n is a, c, g, or t
gtggaggatatgtcgggcaatcaggcgattgttattcgcaatctcaaatttttaaaggcaagggcggcttccgagattgcgatcatcaatccgttgtccggcataacccactgcgggacggctgtcgtatcgggaagaattaccggcgcggtaattcccgaaagcgtcgaattgatgctgaataaggtaaagcataccgatgtcgaagtaaacagatacggggttttccgttatgaactgcccgattatttcgtctatgaggacgggagcgtcggtatctccgtggcgtttcaaacttcttcaggcgaatgggtcgcatcccatgaaaacttattaacggttgaaaagttcgggccggtgctggatattaacagccacaaagacggggatgtaataaccggccgcccctggctttcaggaagcgcctatatgttccgcccccccggcgaaatagtcaccaggcaaataaaaacattatacggagttgcaaaagttgaggttagttttgacaacgggcgcagttttttgccggcaaagggcaccggtgactggaaattccgcctggaaaccagccaaatggagatgggcatactgccgattattgttaaggcgacttttttcaatgatgatattgccgtgcgccgtatattgcttatagtggatccgcaggccccgacagtaaaaaccatgggccctgttgagaacagcgcgtaccggactacgataaaggtgtttggttccacccttgatgactatgagatggacagcgtggaagtgagcctgcgtccgggaaacaagatcggatttcctcgccgataa

SEQ ID NO: 1754 - protein, 272 aa, Unknown
  Obtained from environmental sample
  misc_feature (1)..(272): Xaa is any amino acid
MEDMSGNQAIVIRNLKFLKARAASEIAIINPLSGITHCGTAVVSGRITGAVIPESVELMLNKVKHTDVEVNRYGVFRYELPDYFVYEDGSVGISVAFQTSSGEWVASHENLLTVEKFGPVLDINSHKDGDVITGRPWLSGSAYMFRPPGEIVTRQIKTLYGVAKVEVSFDNGRSFLPAKGTGDWKFRLETSQMEMGILPIIVKATFFNDDIAVRRILLIVDPQAPTVKTMGPVENSAYRTTIKVFGSTLDDYEMDSVEVSLRPGNKIGFPRR

SEQ ID NO: 1755 - DNA, 861 bp, Unknown
  Obtained from environmental sample
  misc_feature (1)..(861): n is a, c, g, or t
ttgatcgacggcggccgagatctggtttacagaacttttttcaatactattccacagggagacggcctattcctcctgcgtatctatgacaaccgccgtatcgcgtatcctgacaagccgggaccggtggaagtgcgcgacgatacatttgacgggccgggggaattgttcagaattaagcttgaaaaggacggtcttaccgccgcggcgaaagcggcggcgcaggcggcgcaggttgtttttattgccggcaacgacccgatgatcaatgggcgcgaaagcgttgacaggccaagtcttgaccttccgccccggcaggaagaaatgatccgccgcgttctcgccgccaactccaaaaccgtactggtaattctttccggctatccttatacctgcaaaaatatcgcggctgacattcccgcgattctctggatggcccacggaatacaggaaaccggaaacgggttagccgacatcctgggcggcgcctgctctccggcgggaaggctgccccttacctggtacgaagatgaaaagcagctcccccccatgatggaatacgatattatttccgccggttctacgtatcagtattttaccggggaagcgctgtttccattcggccacggcctgagttacagcaattttgaatatacgcagcttgtcatagacaagcgcgcggccggagaaaatgaaattattaatgtttctttcaaattaaaaaacacaggttctgttgaagcggacgaagtcccccagatgtatgttgcggtttccggttccagcccgcacaaacgcgccctgaaaagcttgaaaggttttacccggctttcactgaaacccggcgaggaaaaaacataa

SEQ ID NO: 1756 - protein, 286 aa, Unknown
  Obtained from environmental sample
  DOMAIN (23)...(215): Glycosyl hydrolase family 3 C terminal domain
  misc_feature (1)..(286): Xaa is any amino acid
MIDGGRDLVYRTFFNTIPQGDGLFLLRIYDNRRIAYPDKPGPVEVRDDTFDGPGELFRIKLEKDGLTAAAKAAAQAAQVVFIAGNDPMINGRESVDRPSLDLPPRQEEMIRRVLAANSKTVLVILSGYPYTCKNIAADIPAILWMAHGIQETGNGLADILGGACSPAGRLPLTWYEDEKQLPPMMEYDIISAGSTYQYFTGEALFPFGHGLSYSNFEYTQLVIDKRAAGENEIINVSFKLKNTGSVEADEVPQMYVAVSGSSPHKRALKSLKGFTRLSLKPGEEKT

SEQ ID NO: 1757 - DNA, 774 bp, Unknown
  Obtained from environmental sample
  misc_feature (1)..(774): n is a, c, g, or t
atgaattcctgggctattgagggcatgaaggagacctataaacgcaccggcgtttcttttgatcaatattattttgagagcgatacatggcagttgggcaaggaagaagtgctgaaaggtctggagagcgggcttttttaccgcgagcctgacggcgcggtagccgtcgatttgagcgcggaaaaccttgacaagaagatcctccttagaagcgatggcacttcgatttatataacacaggattttggaaccgcgatcaaccgtcacagggactggccctttgacaggctcatctatgttgtcggctccgagcagcagtaccatttcaaggtgcttttcaccctgcttgaaaaaatgggttatagttgggcgaagaacctctaccacctttcctacggcatggtaaaactccccgaaggcaagatgaaaagcagggagggaaccgtagttgacgccgacgaccttatcgacagcctgcgggacatggcccttgccgagattaaggaaaaagagcgcgaggaaaaagtcggcgaccccgccgaagtcgcggaaaaaatcgccctgggggcattgcattattaccttctgcaggccagcccttcaaaggacatgatgttcgatcccaaagagtcgctttcgtttaacggcaatacaggcccgtatttgcagtacatgggggcgaggatttcgtcgttacggaagaaaggggagtggggacagggaaaacattacaatgaacaattaacattaacaatgatttattttctctcttga

SEQ ID NO: 1758 - protein, 257 aa, Unknown
  Obtained from environmental sample
  DOMAIN (1)...(208): tRNA synthetases class I (R)
  misc_feature (1)..(257): Xaa is any amino acid
MNSWAIEGMKETYKRTGVSFDQYYFESDTWQLGKEEVLKGLESGLFYREPDGAVAVDLSAENLDKKILLRSDGTSIYITQDFGTAINRHRDWPFDRLIYVVGSEQQYHFKVLFTLLEKMGYSWAKNLYHLSYGMVKLPEGKMKSREGTVVDADDLIDSLRDMALAEIKEKEREEKVGDPAEVAEKIALGALHYYLLQASPSKDMMFDPKESLSFNGNTGPYLQYMGARISSLRKKGEWGQGKHYNEQLTLTMIYFLS

SEQ ID NO: 1759 - DNA, 873 bp, Unknown
  Obtained from environmental sample
  misc_feature (1)..(873): n is a, c, g, or t
ttggtagatttacaccccgaatttattactcatgcaaaatatttacaggaatacgccggctttcctgtttacggaaatacaaggcaggaatatcttgcttcaggagaagcgtatttttataaactgcttgaggaattaaaaaaagcccaaaaatatatttatcttgaattctttatacttaacgaagggctgatgttcaattcagtcctaaagatactggaaagaaaagcggcggaaggtcttgatgtaaggttaatgtacgatgatctcggctgtttctttacgcttccgccggacttcaataaaaatttggaaaaaaaaggaattaaaacatttatttttaatcctttcaggccggttgtttcatcgctgcagaataaccgcgaccacagaaaaattatttccatagacggaaaagttgcgttcacaggagggctaaaccttgcggatgagtatatcaatgtagttgaacgtttcggtcactggaaggatgcggcaataatgctcgaaggggacggcgcatgggctttaaccctgatttttctgcagatgtggaatcttggcacaaagacgaaggatgattatacgtcattttatccgtggaaagacaatgcaattgagcatacagccgtaggtgtcgcggacggctttgaaacatggggttatgtacagccttatgcggacagtcctattaacagtgaaaatgtaggtgaacacgtatatataaagattattaatcaggcaaaaaagtatgtttatatcaatacgccctatttaattgtagatgacaatcttctttccgcgctcactctggcggcaaaaagcaggcgtcgatgtacgcataattacgccccaccgctggataaaggatag

SEQ ID NO: 1760 - protein, 290 aa, Unknown
  Obtained from environmental sample
  DOMAIN (125)...(152): Phospholipase D Active site motif
  misc_feature (1)..(290): Xaa is any amino acid
MVDLHPEFITHAKYLQEYAGFPVYGNTRQEYLASGEAYFYKLLEELKKAQKYIYLEFFILNEGLMFNSVLKILERKAAEGLDVRLMYDDLGCFFTLPPDFNKNLEKKGIKTFIFNPFRPVVSSLQNNRDHRKIISIDGKVAFTGGLNLADEYINVVERFGHWKDAAIMLEGDGAWALTLIFLQMWNLGTKTKDDYTSFYPWKDNAIEHTAVGVADGFETWGYVQPYADSPINSENVGEHVYIKIINQAKKYVYINTPYLIVDDNLLSALTLAAKSRRRCTHNYAPPLDKG

SEQ ID NO: 1761 - DNA, 579 bp, Unknown
  Obtained from environmental sample
  misc_feature (1)..(579): n is a, c, g, or t
gtgatgcggatgtgtgcattccgctcagtgggaatgactgtaagtcaggcagtgcctcttgtgcgtatatcgggcggaggcgctcttgaaattaaattaagcatagcggaacgatttatttccagaatggcgatgaatcagccttgcgaaattacactcgatgcgtggcccggtgaaatattccgaggcagtataagtgaagtatcgccgacagtcgatttggcgtcgcgcacaatggaaatacgcatcaatgtcagagacaacagttccaaattaaaaccgggaatgttcgctaaagtacgggttattacggaacggaaagacaacattgtaaaaattcccgctgcggctgtaattaaaagattcggcgaacaatttgtttatgtcatagcaaaagacgatcaaggcaatgacattgtaagaaaaaagattattgaaccaggcattttaattgataacgtaatggaaattcaaagcggacttgaagcttccgacgaaatagtaatcagagggcagacattgttagacgacggttcaagagtaaatataattgagcgtcttacgccgttaggagaataa

SEQ ID NO: 1762 - protein, 192 aa, Unknown
  Obtained from environmental sample
  SIGNAL (1)...(17)
  misc_feature (1)..(192): Xaa is any amino acid
MMRMCAFRSVGMTVSQAVPLVRISGGGALEIKLSIAERFISRMAMNQPCEITLDAWPGEIFRGSISEVSPTVDLASRTMEIRINVRDNSSKLKPGMFAKVRVITERKDNIVKIPAAAVIKRFGEQFVYVIAKDDQGNDIVRKKIIEPGILIDNVMEIQSGLEASDEIVIRGQTLLDDGSRVNIIERLTPLGE

SEQ ID NO: 1763 - DNA, 423 bp, Unknown
  Obtained from environmental sample
  misc_feature (1)..(423): n is a, c, g, or t
ttggacggaaattccgcggtattcggacaaacaggatcagccaaccgggagcaaggatgttcccgtccacattcaaggaggatcattatgatcatcaatcacaacctgagcgcaatgtttgcggacaggtccctcaaagtaacccaggtttacttaaacaaagacatggaaaaactttcctcgggtattcgtatcaaccgtgccggcgatgacgcgtcgggactggcggtttccgaaaaaatgagaagccagatacgaggtcttaaccaggcatctaccaacgcgcagaacggaatctccttcattcaggtagcagaaggttatctccaggaaacccaggacattgttcagcgtttaagagaactgtcggttcaagcggcaaacggcatctacactgaagaagacagaatgacattcaggtag

SEQ ID NO: 1764 - protein, 140 aa, Unknown
  Obtained from environmental sample
  DOMAIN (56)...(138): Bacterial flagellin N-terminus
  misc_feature (1)..(140): Xaa is any amino acid
MDGNSAVFGQTGSANREQGCSRPHSRRIIMIINHNLSAMFADRSLKVTQVYLNKDMEKLSSGIRINRAGDDASGLAVSEKMRSQIRGLNQASTNAQNGISFIQVAEGYLQETQDIVQRLRELSVQAANGIYTEEDRMTFR

SEQ ID NO: 1765 - DNA, 792 bp, Unknown
  Obtained from environmental sample
  misc_feature (1)..(792): n is a, c, g, or t
atgactgaacgcggtttgctggatttaagcatttctcttttgccggacttgaaaataacggataaacttctgttatcgcaagcctttgacaacgaagaaaaattgtttgtacaatcaagagaaaacatagaagaaatccttaaccgcgcgttacccgctttttgggatataaccgaaattcatgagaaagcgggacgtattgacacaatgtgccgaatgcgctctattaattgggtatcatgggctgacgcggattacccgccgttgttacgggaatcctatgatccgcctgttgtgcttttttacaaggggaaacttcccaaccccgaaaaatcattgttgggaatggtaggaacaagacacccaagcccgcaagccgccgaacaggcgtataaaattgcgggtaacatcggcaaggctggaatatccgtaatatccggtcttgctttgggaattgacgcaatgtcccaccgcggcaatctgattggcaacgcgcccggatacgcggtacttggatcgggcatcgacgaagtatatccgtctgtgaacagaccgttggcaaaacggatattggattcaggcggcgcgcttatttccgagtatcctccgggagtgcatcctactaaatggacgtttcccgcgcgtaacagaatcattgccgccatgtcgcgcggtgtgctgatagttgaagctcccgaanaatcgggagcgttaatcacggcggcttttgcgctggatctgggaagagacctgtgggtcgcttccggcgattacttgagaacgcgagtttga

SEQ ID NO: 1766 - protein, 263 aa, Unknown
  Obtained from environmental sample
  DOMAIN (70)...(261): SMF family
  misc_feature (1)..(263): Xaa is any amino acid
MTERGLLDLSISLLPDLKITDKLLLSQAFDNEEKLFVQSRENIEEILNRALPAFWDITEIHEKAGRIDTMCRMRSINWVSWADADYPPLLRESYDPPVVLFYKGKLPNPEKSLLGMVGTRHPSPQAAEQAYKIAGNIGKAGISVISGLALGIDAMSHRGNLIGNAPGYAVLGSGIDEVYPSVNRPLAKRILDSGGALISEYPPGVHPTKWTFPARNRIIAAMSRGVLIVEAPEXSGALITAAFALDLGRDLWVASGDYLRTRV

SEQ ID NO: 1767 - DNA, 636 bp, Unknown
  Obtained from environmental sample
  misc_feature (1)..(636): n is a, c, g, or t
gtgcatcatgccgcaggacgcgcaaaagagggcttccagcacgaaatccctgtcggaaacggcatccatggaattgccgaacacctcgtcaaagcccagttcctccgccaccgcatggggattcagcggatagaccgtgccggccaaggcgcccgcgcccagcggcgatacgcgcacccggcgcaggcagtcctccatgcgcgcgacatcgcgccgcaacatccaggcataggccagcagatgctgccccagggaaaccggctgtgcgggctgcatatgcgtgtagccgggcaaaatatcctcgacatgctcagacgcccggtccgcaaacaccccggccagcaggcaggcgagcttgcgccattcctgtacacgttcggagacaaacagacggaaagtcaaggccacctgatcattgcggctgcgtccggtatgcagtttcttgccgacatcgcccgccagttccgtcagacgcgcctcaatattcatgtgcacgtcctcaagttcccgcttccagacgaaacggccctgctccacttcctcccgcacccgatcaagtcccctgacgagcgcctccgcctccgccgggctgatatcccctgtgcgccgagctgcgcnggcgataatccnnnntaa

SEQ ID NO: 1768 - protein, 211 aa, Unknown
  Obtained from environmental sample
  misc_feature (1)..(211): Xaa is any amino acid
MHHAAGRAKEGFQHEIPVGNGIHGIAEHLVKAQFLRHRMGIQRIDRAGQGARAQRRYAHPAQAVLHARDIAPQHPGIGQQMLPQGNRLCGLHMRVAGQNILDMLRRPVRKHPGQQAGELAPFLYTFGDKQTESQGHLIIAAASGMQFLADIARQFRQTRLNIHVHVLKFPLPDETALLHFLPHPIKSPDERLRLRRADIPCAPSCAGDNPX

SEQ ID NO: 1769 - DNA, 678 bp, Unknown
  Obtained from environmental sample
  misc_feature (1)..(678): n is a, c, g, or t
atggacaaggaaattgaaagcgcactaagcgcagcggcaggcgcgggcggcgatgttatcgaagacattcaaacagaaacctcggaaaccatggttcccgaaatagaaacagcccctgccagacgatcctacggccgcagcggcggcgagggccgaaggggcagggggcgcgaccgtgacagggacagggagccggctgaaaaggaatttgttgaaaagctggtaaagctgaaccgtaccgcaaaggttgtaaagggcggccggcgcttttcgttctccgccctgacggttatcggcgaccgcaaaggcaatgtcggttacggctttggcaaggccaacgacgtttcagaggcaatacgcaagagcatagacaaggcaaagcgcaacatggtgaaactgccggtgataaaaggcacgattccccacgaggtaaccgggtacttcaaagcttcgcaggtgctgcttaagccggcgcgttcgggaacggggatcatcgccggagggccggtgcgcgctattatggaagccggcggcgttaccgatatactttcaaagtcaatcggcgcggcgagccagtacaacgtggtcaaggcgaccttcgactgtatcagcaggatgatggacgcaaagacgatagcgaaaaacaggggcaagtccctgaaagagctgtnggggtga

SEQ ID NO: 1770 - protein, 225 aa, Unknown
  Obtained from environmental sample
  DOMAIN (144)...(217): Ribosomal protein S5, C-terminal domain
  misc_feature (1)..(225): Xaa is any amino acid
MDKEIESALSAAAGAGGDVIEDIQTETSETMVPEIETAPARRSYGRSGGEGRRGRGRDRDRDREPAEKEFVEKLVKLNRTAKVVKGGRRFSFSALTVIGDRKGNVGYGFGKANDVSEAIRKSIDKAKRNMVKLPVIKGTIPHEVTGYFKASQVLLKPARSGTGIIAGGPVRAIMEAGGVTDILSKSIGAASQYNVVKATFDCISRMMDAKTIAKNRGKSLKELXG

SEQ ID NO: 1771 - DNA, 861 bp, Unknown
  Obtained from environmental sample
  misc_feature (1)..(861): n is a, c, g, or t
atggctaatcccatttntggattgttcagagtaaaggaactcagggagcggatcctctttaccgcggccatgctgatcgtgttcagaatcggcgcggtgtttcccatacccggaatcaacgtccgggaactttccgcttatttcctttcgcagtcgaattcagggaatcccatagtcgattacctggactttttcgccggcggcgcgttttccaatttttcggtgttcatgctgggaatcatgccgtatatctccatgtcgattatcatgcagctgctgcttatcgtgtttcccagcctgaagaaaatttcgcaggaagacgggggccgcaaaaaaatccagcaatggcagcgttacgggaccgtcgtggtctgccttatacagtcattcgccgttacccagtacgcgaaaagcatttccgccagcgtgccgaatctgcttaatataggaatgctgccctttacattcatcgccatgcttaccgtcaccaccggaaccatgttcctcatgtggattggcgagcagataaccaagcggggaataggcaacggcatatcgctcctgatcttcgccggcatcgtcgcgcgtcttccacacgcggtctgggaacttggcggcagggtgcgcgacgggcagctgaacctggtgtttgtaatcgtggtactgctgatgtttgtggctgtagtcgctctggtagtgtttgagcagcagggccagcgcaagatacccgttaattacgccaaacgggtggtcggaaggaaaatgtacggcgcccagaacacctatatacctttcaagatcaacccgtcaggcgtcattccggtaatttcgcctcgtcgatcctcactcgtgccgatctga

SEQ ID NO: 1772 - protein, 286 aa, Unknown
  Obtained from environmental sample
  DOMAIN (74)...(286): eubacterial secY protein
  misc_feature (1)..(286): Xaa is any amino acid
MANPIXGLFRVKELRERILFTAAMLIVFRIGAVFPIPGINVRELSAYFLSQSNSGNPIVDYLDFFAGGAFSNFSVFMLGIMPYISMSIIMQLLLIVFPSLKKISQEDGGRKKIQQWQRYGTVVVCLIQSFAVTQYAKSISASVPNLLNIGMLPFTFIAMLTVTTGTMFLMWIGEQITKRGIGNGISLLIFAGIVARLPHAVWELGGRVRDGQLNLVFVIVVLLMFVAVVALVVFEQQGQRKIPVNYAKRVVGRKMYGAQNTYIPFKINPSGVIPVISPRRSSLVPI

SEQ ID NO: 1773 - DNA, 786 bp, Unknown
  Obtained from environmental sample
  misc_feature (1)..(786): n is a, c, g, or t
gtgcggggacaggtcagcgcgaaagaagtcgatgtcgacgaaaaaataatctggcactggggcgcaatgacctcgcttccgagagccgcgcttgagtcaatgtactttcgcggggaactcgttatccatcataaaacaggcatgatcaagagctacgctttcgcgaaagatcttttgccagccgaaattttgagcgcgccttctcccttcaagacagaagaggagcggcaagcatggcttgtaaaacgccgtatcggctctgtgggaatgttatggaataagacaagcgacgcgtttttggggtcaaggttgaagccagcccagcgcgcggcggcgttccgaaaactgcttgcggacggcgagatcttcgaggccagcgtgaagggcataaaagagccgttttacatccgcgaagacgaacgcgccgagtttgaagaagccctttcaggcaaggaatatcaggccagacccgagttcatcgcgccgcttgacaacctcttatgggacaggttgctgattgaagcgcttttcggtttcgtttacagatgggagatatacacaccgcagcaaaagcgtaaatacggcccttacacgctgccgtttctgtacggcgataatttcgcggggcgcgtttacataacgcgcaggggcagagcgcttctaattaacaagatttggacagaaaacggaaaaccattaacaggcaagattaaggccgcgttcgaggaatgcgcgaagcgtttcgcggactttaacgactgcgaaagaatcgaaaagcaaaaatag

SEQ ID NO: 1774 - protein, 261 aa, Unknown
  Obtained from environmental sample
  DOMAIN (3)...(261): Protein of unknown function (DUF1006)
  misc_feature (1)..(261): Xaa is any amino acid
MRGQVSAKEVDVDEKIIWHWGAMTSLPRAALESMYFRGELVIHHKTGMIKSYAFAKDLLPAEILSAPSPFKTEEERQAWLVKRRIGSVGMLWNKTSDAFLGSRLKPAQRAAAFRKLLADGEIFEASVKGIKEPFYIREDERAEFEEALSGKEYQARPEFIAPLDNLLWDRLLIEALFGFVYRWEIYTPQQKRKYGPYTLPFLYGDNFAGRVYITRRGRALLINKIWTENGKPLTGKIKAAFEECAKRFADFNDCERIEKQK

SEQ ID NO: 1775 - DNA, 822 bp, Unknown
  Obtained from environmental sample
  misc_feature (1)..(822): n is a, c, g, or t
atggcgatgtataacatctcgtggcagtcgttttttcccgaagtagtggacataaaggatcgtaaccgtgttctgacaatgcgttctcacatggatgtttttataagcatacccctgccgctgctggtcggtacaattttactgcacactgcggcaggcaggggaaaaatcaccgttcatcaatgtttttatttttttgccgctctgtttctggtactgacggcaataaattaccgccgcattaaagccgttcggcctgccgcgccgaagcgtgtttccttttttgaaacaaaaaaagccgtaaaaagccttttatataacaaacagtatttgctgttcatcgccgccgcgctgttcttttacatgatgtggcattttgactggactctgtattttatcggacaggtaaattatctgaaaatgaatgagtttcaaattggacttacgacgcttggctcgacaacagcccagtttataacaatgcgtttctggagccgtataaatgaaaaacacggcgtagtgcttccggttactttaggcattttggggttaagcctttgtcccattgtgatgatcatctcaaccggtttgcctgtctctatagctccttttgtttttctgccgttacacgcgatagtcagtctcccgcttgcgactactactttgaatatgctccaatgccttttacaggtggcggacgaagaataccgcagtttctcaatctcggtttacacctgccttgtatgcctgtcaaacgcagtaatgccggtggcgggcattgccctttaccgcgcgctggcgggacaggctcggccaatctga

SEQ ID NO: 1776 - protein, 273 aa, Unknown
  Obtained from environmental sample
  misc_feature (1)..(273): Xaa is any amino acid
MAMYNISWQSFFPEVVDIKDRNRVLTMRSHMDVFISIPLPLLVGTILLHTAAGRGKITVHQCFYFFAALFLVLTAINYRRIKAVRPAAPKRVSFFETKKAVKSLLYNKQYLLFIAAALFFYMMWHFDWTLYFIGQVNYLKMNEFQIGLTTLGSTTAQFITMRFWSRINEKHGVVLPVTLGILGLSLCPIVMIISTGLPVSIAPFVFLPLHAIVSLPLATTTLNMLQCLLQVADEEYRSFSISVYTCLVCLSNAVMPVAGIALYRALAGQARPI

SEQ ID NO: 1777 - DNA, 525 bp, Unknown
  Obtained from environmental sample
  misc_feature (1)..(525): n is a, c, g, or t
atgcccaccacacgcagatgtatgcttgaattttccgtggagcgtgattctaagataataaaaagttacttctgccttaatgatgccattatttcttacacggatatagcgaaacttattaaacttaacgcgcatatcgcaggcacggagttagtctcttacagggcggatgggattattgtcgcgacccccacaggttcgacagcttattccatgtcggcgggaggacccattttagaccctgaaatggaagcgttgatacttagtccaatctgcccgtttacgctttcaaacaggccttttgtgcttccttcgaagcagacggttacgataaccgtcgttgaagagcaaagatcgggcgtaattttgatggttgacggacaggacaccttcccacttgaatgtaaggataaagttcatattaaacaggccccttttggcgcggaattaatttttaacggacgctcaatttattatcaggccttaaggacgaaacttttctggtcaggggatgcgaatgcttga

SEQ ID NO: 1778 - protein, 174 aa, Unknown
  Obtained from environmental sample
  DOMAIN (2)...(154): ATP-NAD kinase
  misc_feature (1)..(174): Xaa is any amino acid
MPTTRRCMLEFSVERDSKIIKSYFCLNDAIISYTDIAKLIKLNAHIAGTELVSYRADGIIVATPTGSTAYSMSAGGPILDPEMEALILSPICPFTLSNRPFVLPSKQTVTITVVEEQRSGVILMVDGQDTFPLECKDKVHIKQAPFGAELIFNGRSIYYQALRTKLFWSGDANA

SEQ ID NO: 1779 - DNA, 843 bp, Unknown
  Obtained from environmental sample
  misc_feature (1)..(843): n is a, c, g, or t
ttgccaaattcaaacacagataaaataatgtcccagctctccgaaagaggggtgcaagttgatgaatggggcggcaatgtgagctgcgtgaaaatatccgttaaaaccggcgagggcatagagaaattgctggaaacccttgctcttgaatccgaggttttggaattaaaggcaaaccccgatgccagcgcaagaggtgcggttatagagagccgccttgatgctggcaaaggaacaatagccacaattttggttcaaaacggaacgctacgcattcgcgacttctttgtatgcggaaactatagtggaagagttcgcgccttgtttaacgagcggggcgagattttaaaagaagcagggccaagcacgccttgccaggttctgggtttttctggcactccgcaagcaggcgatgatttagttgttgtggagagtgagcaagacgcctctgaaattgcggtaaagcgtcagcaagccgctcacgaaagagccttgcgtttccgtgagcgcatgtctttggaacaggcttacgatgccgccaagtccggcagcatatccgagctaaacctgctcataaaaacagatgtggctggttcttgcgaagcgttggcggagtctttggcaaacctctccaacaacgaggtgaaaattaaaattatccgcaggggcgttggcgcaatcaacgatgacgatgtgtatttggcatccatgtccaatgctattataatagcgttccatttaatgccatcccattccataagggaattagcggaagcagagggcgttgaaataaaaacatacagagttatatacgatgccataaacgaagtaaggggcgcatag

SEQ ID NO: 1780 - protein, 280 aa, Unknown
  Obtained from environmental sample
  DOMAIN (78)...(141): Elongation factor Tu domain 2
  misc_feature (1)..(280): Xaa is any amino acid
MPNSNTDKIMSQLSERGVQVDEWGGNVSCVKISVKTGEGIEKLLETLALESEVLELKANPDASARGAVIESRLDAGKGTIATILVQNGTLRIRDFFVCGNYSGRVRALFNERGEILKEAGPSTPCQVLGFSGTPQAGDDLVVVESEQDASEIAVKRQQAAHERALRFRERMSLEQAYDAAKSGSISELNLLIKTDVAGSCEALAESLANLSNNEVKIKIIRRGVGAINDDDVYLASMSNAIIIAFHLMPSHSIRELAEAEGVEIKTYRVIYDAINEVRGA

SEQ ID NO: 1781 - DNA, 444 bp, Unknown
  Obtained from environmental sample
  misc_feature (1)..(444): n is a, c, g, or t
gtggaaaacggcggcggacttctggttgcgcatagcggcattgtggcaggagagcagactgaagccctcaaccggctgattggatgccgctttatctatcaccctaacgcatgtcccgttactgtccagccaattaagccccatccaattaccgaaggagtggggatgttttgtgaaactgacgaacattaccgccttgttattattaccggggacgcggacatattaatagcgtcttattcaccgccgcagggcgaggcggataaatatcaggaggatccttataacaacacgcctgcgtggatctgccctgcgggatatgtgcgcacacatggtaaggggcgcgtatgcgtccttacgccgggacatcttttacccgtatggctcaacccgcaataccggcggacaattgccaacgcgataaaatggtgcgccggtcaatag

SEQ ID NO: 1782 - protein, 147 aa, Unknown
  Obtained from environmental sample
  misc_feature (1)..(147): Xaa is any amino acid
MENGGGLLVAHSGIVAGEQTEALNRLIGCRFIYHPNACPVTVQPIKPHPITEGVGMFCETDEHYRLVIITGDADILIASYSPPQGEADKYQEDPYNNTPAWICPAGYVRTHGKGRVCVLTPGHLLPVWLNPQYRRTIANAIKWCAGQ

SEQ ID NO: 1783 - DNA, 579 bp, Unknown
  Obtained from environmental sample
  misc_feature (1)..(579): n is a, c, g, or t
atgggcaataggtttttgggaaggaaaataaaaaaagctttcaaaatagccggtatcgtttttattgctgtcattttaatggcagttgtattcgcgtacgcgaatgcgcgagataagcatcctcactatacgctggatttgaatataaagtcggcaggcgacgcgtcgcttatggcaggatttgcggcagttacaattacatctgaaatccccgaccgttggcacgacaacgatggtaattcaaggtacgaacccaataaaggcgatacttacgacgaccttaacggtaacggtaaatttgacgcttactggattgccggctttgggtacaaaagagccgccaacgggatacacgacgacttgtgggcgcgaactatggtgattgacgacggaacaacgcgcatcgctgtggtgtcacttgacctggttggatttttccattcggaagtaattgatattcgcaagatgctaccagtagactcaggcatcacttatttgacagtggcgtccacgcatactcacgaagcgccggatatgatgggtatttggggcagttcgtatgtgaaaaggcggcgttaa

SEQ ID NO: 1784 - protein, 192 aa, Unknown
  Obtained from environmental sample
  SIGNAL (1)...(28)
  misc_feature (1)..(192): Xaa is any amino acid
MGNRFLGRKIKKAFKIAGIVFIAVILMAVVFAYANARDKHPHYTLDLNIKSAGDASLMAGFAAVTITSEIPDRWHDNDGNSRYEPNKGDTYDDLNGNGKFDAYWIAGFGYKRAANGIHDDLWARTMVIDDGTTRIAVVSLDLVGFFHSEVIDIRKMLPVDSGITYLTVASTHTHEAPDMMGIWGSSYVKRRR

SEQ ID NO: 1785 - DNA, 633 bp, Unknown
  Obtained from environmental sample
  misc_feature (1)..(633): n is a, c, g, or t
atggcagtctatcaccaatacggttactctgncggcgcggcaacgcctatcgcgggaatcattgccatggccgcggctcttatggtggtacgccagaccttcgctggcaagcgcattctggaagtccttctcatgacgccttntgcgataccgggcacccttttgggtatttcctacattcttgcctttaacaagccgcccctcttgctggtggggactgcggcaatcatagtcataaactacgtggtgcgggaactcccggtgggccttgaaaccggggccgcaaatctgcgccagattgacaaatccatagaggaagctgcccaggatctgggggcggatatgtccaaggtctttacttctgtggtgcttcccctgatacggcccagttttttaaccagtatgtcttatacctttgtacgttccatgaccgcggtgagcgctattatctttttgatctccgccaggtggtatcacctgacggtgcagatatataacttctccgaaaatctgcgtttcggcatggccagcgtactttcaatggtgcttatcgtcattgtgctggccgctttcggcgtgatgcagcttatggtccgggaccgcggcattaatgccaaaaatatttcacgatag

SEQ ID NO: 1786 - protein, 210 aa, Unknown
  Obtained from environmental sample
  DOMAIN (2)...(203): Binding-protein-dependent transport system inner membrane component
  misc_feature (1)..(210): Xaa is any amino acid
MAVYHQYGYSXGAATPIAGIIAMAAALMVVRQTFAGKRILEVLLMTPXAIPGTLLGISYILAFNKPPLLLVGTAAIIVINYVVRELPVGLETGAANLRQIDKSIEEAAQDLGADMSKVFTSVVLPLIRPSFLTSMSYTFVRSMTAVSAIIFLISARWYHLTVQIYNFSENLRFGMASVLSMVLIVIVLAAFGVMQLMVRDRGINAKNISR

SEQ ID NO: 1787 - DNA, 885 bp, Unknown
  Obtained from environmental sample
  misc_feature (1)..(885): n is a, c, g, or t
ttggcagatttaggtcaaggcaaaaacagaatgggtggctcaatagcttgcgaagtgttcaaccaaataggcgacgaggttccagatgcagatgctgaaatcttgaaacaattttttaacgcagttcaaaccctaaacgcagaaaacaaaattctagcctaccacgaccgttccgatggagggctattcacaactctgactgagatggcttttgctgggcacgtgggggtggagttggaatggaaaacctttgaatttctctttaacgaagaattaggtgccgttttgcagattagagaaaacgatttagaagctgcctgcaagttattcccatttgagaaaatcggaaaattaacaaatggcttttgcttacagataggcaactacagaaaaaatttattcaaactgagaaaaatctggagcagaacctcttttgaaataacaaaactccgcgacaacccaacctgcgcaaaacaggaatacgaatggaaatgtagcaaacaaggcaaaggcataaaacataaaataaaaaccatataccgcataccccaaattccaaaccccaaaaaacccctcatcgcaattcttcgcgagcaaggcgtaaacggcgaagtggaaatggcggcggcatttgacagagctggattcaaagccatagatgttcacacgggcgatattataaatgggaaaattgatttaagcgaattttctggactagtggcttgcggtggttttagctatggagatgttttaggggcaggggaaggctgggcaaagagcattttgttcaacgaaagggcgcgtgatgtttttcaaaattctttgagagaaaagatactttctctcttggggtttgcaacggntgcccaatgctttccaacttga

SEQ ID NO: 1788 - protein, 294 aa, Unknown
  Obtained from environmental sample
  DOMAIN (2)...(129): AIR synthase related protein, C-terminal domain
  misc_feature (1)..(294): Xaa is any amino acid
MADLGQGKNRMGGSIACEVFNQIGDEVPDADAEILKQFFNAVQTLNAENKILAYHDRSDGGLFTTLTEMAFAGHVGVELEWKTFEFLFNEELGAVLQIRENDLEAACKLFPFEKIGKLTNGFCLQIGNYRKNLFKLRKIWSRTSFEITKLRDNPTCAKQEYEWKCSKQGKGIKHKIKTIYRIPQIPNPKKPLIAILREQGVNGEVEMAAAFDRAGFKAIDVHTGDIINGKIDLSEFSGLVACGGFSYGDVLGAGEGWAKSILFNERARDVFQNSLREKILSLLGFATXAQCFPT

SEQ ID NO: 1789 - DNA, 705 bp, Unknown
  Obtained from environmental sample
  misc_feature (1)..(705): n is a, c, g, or t
atgtccgtttttcctagtggaacagaactgcttgcggttttggaaaaggaatccaaattgccgggtacggctgtgaatttgagcctcctcaggcaattcattaaagaagcaactccagaacaggtagcactttgcctaactgttttagatacaaagccagatgcaaactcacctgctacctttgttgcgatgtgcggagtggctgcttctgccaatatagatgtttttagaaaagccgcaaacagcagcaattggagaataagagaagctgcggtttttggcttgcaaaatctgggtttaaaagaccctgaaaagctttattcggtttttgattcatgggaaaacgcaaacctgctggaaaaaaggtgcatagcggcaacgctctgcgaaccggctcttataaaaacaaaagaaaatgcagaaaaaattctaggtattctgaaagaatatatggaaattatagagttagagaaaaatgtgaaaagcgaagaatatagggtattcaaaaaagctatgggatactgcataagcgtagctatagaagccaatccagaaaagggaaaagaatgctttgaggagtggatgcgctctccaagcctagaaatccgctgggttttaagcgaaaacctaaagcacgaccggcttcgcaaaatggattccgaatgggtggatgcccaaatagaattcttaagcgatgtggaatag

SEQ ID NO: 1790 - protein, 234 aa, Unknown
  Obtained from environmental sample
  misc_feature (1)..(234): Xaa is any amino acid
MSVFPSGTELLAVLEKESKLPGTAVNLSLLRQFIKEATPEQVALCLTVLDTKPDANSPATFVAMCGVAASANIDVFRKAANSSNWRIREAAVFGLQNLGLKDPEKLYSVFDSWENANLLEKRCIAATLCEPALIKTKENAEKILGILKEYMEIIELEKNVKSEEYRVFKKAMGYCISVAIEANPEKGKECFEEWMRSPSLEIRWVLSENLKHDRLRKMDSEWVDAQIEFLSDVE

SEQ ID NO: 1791 - DNA, 831 bp, Unknown
  Obtained from environmental sample
  misc_feature (1)..(831): n is a, c, g, or t
ttgtcgatgccgtttttcctgcggaaaaacaccgcgattagcggatttttatcactttaccgtcagggattagtgcgcttaagttttgacaaggggcaagttgatgtttcgctcgttctcgttcccggttcgggaagcggcgtaaatcttgtgaactccgttcttgttgagacaagagacaggcctaataaccgtatttacggaagccaggacaacagcagaatttttatcagcgccggcaatactgttatttcggttaacacttctgataacagcgtcagcgaaatgtccggacaggacaagctttggatcatttccgcggacggaatcaaggaaaaaaatacgtttaatgcgtgggtagtaagcgagcgcggaagagttacccttgtaaacggcgatttggagcccgcgcagggtttccccgttcttacggggattaggctttcagccgcgcccgcggcgtataacggcaagctatacctttgcgatgaagacggaaaagttcactctgtagacgctaacggcgctcaaaaaatctgggaaacgacatttatttctccattgcgctcgcctccttcttttattaccgcaaaggtaaaaacaggagaaatccattacgccgcggtttatcccaagagctttttcggcgagctttggcttcttgacacggacgggaagctccttcccgaatggcccgcgcagttaatgagagttgatgaagacggctttaccgcanatgcgggaattagttttggatcgcctattttagtttcgcttaacaccatgtgcacacagcgtttngtagccagtccggcgacttttttgttctga

SEQ ID NO: 1792 - protein, 276 aa, Unknown
  Obtained from environmental sample
  misc_feature (1)..(276): Xaa is any amino acid
MSMPFFLRKNTAISGFLSLYRQGLVRLSFDKGQVDVSLVLVPGSGSGVNLVNSVLVETRDRPNNRIYGSQDNSRIFISAGNTVISVNTSDNSVSEMSGQDKLWIISADGIKEKNTFNAWVVSERGRVTLVNGDLEPAQGFPVLTGIRLSAAPAAYNGKLYLCDEDGKVHSVDANGAQKIWETTFISPLRSPPSFITAKVKTGEIHYAAVYPKSFFGELWLLDTDGKLLPEWPAQLMRVDEDGFTAXAGISFGSPILVSLNTMCTQRXVASPATFLF

SEQ ID NO: 1793 - DNA, 366 bp, Unknown
  Obtained from environmental sample
  misc_feature (1)..(366): n is a, c, g, or t
ttgccgtgcttcgtgcgcgaatcgacgctttactgcggcgcggtttcccatattggcagcaaggcgttttctggcgattttatattcgattttgaagccatgcgctttgaaaagagcggtcaagacgtggaattatcgaaaacggaagcgcgtcttttgcagctgcttttcgcgaacaaagggcagaccctgacccgcgaacgggcgctttcggcaatatggcctgacggcatggagtatgttgacgaaaacgcgctgtccgtggctgtcaggcgactccgcgcgaaactggaaaacgacccatcgaatccgcagtttatcaaaaccgttcatggcatcgggtataaatgggcggcgagcctgtga

SEQ ID NO: 1794 - protein, 121 aa, Unknown
  Obtained from environmental sample
  DOMAIN (40)...(117): Transcriptional regulatory protein, C terminal
  misc_feature (1)..(121): Xaa is any amino acid
MPCFVRESTLYCGAVSHIGSKAFSGDFIFDFEAMRFEKSGQDVELSKTEARLLQLLFANKGQTLTRERALSAIWPDGMEYVDENALSVAVRRLRAKLENDPSNPQFIKTVHGIGYKWAASL

SEQ ID NO: 1795 - DNA, 849 bp, Unknown
  Obtained from environmental sample
  misc_feature (1)..(849): n is a, c, g, or t
gtgctgaaagcacaggaagaaatgcgcctgagcgatccccaactgtattccgcaattgagctttcggcatcgcatataaaacgcttttgccggaaacagcgggaacaatttaacgattttgaatatgaaatggaaaaaggccttgttacaggccagcgggtaatccctgtgcagagggcggcggtttacgttccggggggacgtttccctttgttttcatctgttatgatgtgccttctccccgcgttctgcgcgggagtggaagaagtgctgcttgcatcgccgccggaggaagacgggattccggacagaaagatacttgccgccgccgcaattacagcggaaatagccgcaggaaagcttcgtgtttttgctataggcggcgcacaggcaattgccgctatggcactgggaacggaatcaattcctcgcgtcgatttaatcgccggaccgggtaacaaatacgtggcggcggccaaacggcttttatacggcgaagtgggtattgattttatcgcggggccgtctgacgtgcttgtaatcagcgataattccacaacggcggacattgcacaaaacgcaaatttaatcgcggctgatatgatcgcccaagcggaacacgatccagacgcgcgcgcgagggcgctgctcccgtccggggagcttgcggaaaaaattataaaggctgttgaagtacagctcgctaatcttccaacggcggaaaacgcccgctcttcactagaatcaggcggcctaattattgtttataaagaaaaagaggaagccgttcgcattgcaaataccatcgcccctgagcatctggagctctcgtgccgctcggccatctga

SEQ ID NO: 1796 - protein, 282 aa, Unknown
  Obtained from environmental sample
  DOMAIN (2)...(282): Histidinol dehydrogenase
  misc_feature (1)..(282): Xaa is any amino acid
MLKAQEEMRLSDPQLYSAIELSASHIKRFCRKQREQFNDFEYEMEKGLVTGQRVIPVQRAAVYVPGGRFPLFSSVMMCLLPAFCAGVEEVLLASPPEEDGIPDRKILAAAAITAEIAAGKLRVFAIGGAQAIAAMALGTESIPRVDLIAGPGNKYVAAAKRLLYGEVGIDFIAGPSDVLVISDNSTTADIAQNANLIAADMIAQAEHDPDARARALLPSGELAEKIIKAVEVQLANLPTAENARSSLESGGLIIVYKEKEEAVRIANTIAPEHLELSCRSAI

SEQ ID NO: 1797 - DNA, 672 bp, Unknown
  Obtained from environmental sample
  misc_feature (1)..(672): n is a, c, g, or t
atggagccggatattaccgaaaacgccgccctgctggatgccttaatcggcgtatgggaacggaatttcctgggttatccctacacggcgatactgccctatagccagggcctttcccgcttccccgcccatttgcagcagcttgacatggaatccaacggcaagcaggtaaaccgcgacgggcagccgattgcgtatgacacggggccggtggtctttggcgagccgggaaccaatgggcaacattcgttctaccaactgcttcatcagggaaccagcataatccccctgcaatttatcggctttgccctcagtcagcggggcgctgatgtaattgtggacggttcctccagtcaaaccaaactcaacgcgaatcttgtcgcgcagatagtcgcctttgccaaagggcagattaatgattccgacctgaacaagaatttccccggagggcggccttccagccttatttacggacagtcgctgacacccgcagtattgggcagtcttcttgcccattttgagaacaagataatgttccagggctttgtgtggaacatcaacagttttgatcaggaaggggtgcagttgggcaagatactcaccaaaaaggtgcttgccggcaagtcaggcgattccgcgctggatgcgtacagtaagatactggggatgtaa

SEQ ID NO: 1798 - protein, 223 aa, Unknown
  Obtained from environmental sample
  DOMAIN (1)...(222): Phosphoglucose isomerase
  misc_feature (1)..(223): Xaa is any amino acid
MEPDITENAALLDALIGVWERNFLGYPYTAILPYSQGLSRFPAHLQQLDMESNGKQVNRDGQPIAYDTGPVVFGEPGTNGQHSFYQLLHQGTSIIPLQFIGFALSQRGADVIVDGSSSQTKLNANLVAQIVAFAKGQINDSDLNKNFPGGRPSSLIYGQSLTPAVLGSLLAHFENKIMFQGFVWNINSFDQEGVQLGKILTKKVLAGKSGDSALDAYSKILGM

SEQ ID NO: 1799 - DNA, 738 bp, Unknown
  Obtained from environmental sample
  misc_feature (1)..(738): n is a, c, g, or t
atgatccttgataaaacatctgacggtgaacgaaggataataatggcaagtcaggcggaactgaaagacggcggcaacgatgaaggccttagtctggaactggaaaatgcctttgtccagtcatcaaaagaaattgtcagggaagattatgattatgcttccgctgattttttaaaatactggatatcaaatgaagatattattcaggctgttatgagcgtaagccccagagaaatgagctcaagggacgttcgtaaggcggtaaaggaaaaaaccattggcgttggcatacgggcaaatgaaagaaaaggaaaacttgttgtacaggcagctggtttggaaaatattttaagaaaaggtccttcgggagaatcatggagtcgcaaacagtcaagtattacaaattttcaacgtgaaacacagatccttgccggaatatacaaagatcgttcgcttaccatacatataattgaatattataaaaaattttcagttccctttggagctttcttctttgtatttttggctgtttcccttggcttaatggcaaagaagagcggacagacagtcgggtttatttttggcaatattatcgcggttatatactggtcgatgctttttataggacagacaatgggtttacgcgttgggactcctccattctggtcaatgtggcttccgaatatactatctcttgctatagggctggttttggcgataatcaggataagcaaatga

SEQ ID NO: 1800 - protein, 245 aa, Unknown
  Obtained from environmental sample
  misc_feature (1)..(245): Xaa is any amino acid
MILDKTSDGERRIIMASQAELKDGGNDEGLSLELENAFVQSSKEIVREDYDYASADFLKYWISNEDIIQAVMSVSPREMSSRDVRKAVKEKTIGVGIRANERKGKLVVQAAGLENILRKGPSGESWSRKQSSITNFQRETQILAGIYKDRSLTIHIIEYYKKFSVPFGAFFFVFLAVSLGLMAKKSGQTVGFIFGNIIAVIYWSMLFIGQTMGLRVGTPPFWSMWLPNILSLAIGLVLAIIRISK

SEQ ID NO: 1801 - DNA, 591 bp, Unknown
  Obtained from environmental sample
  misc_feature (1)..(591): n is a, c, g, or t
gtgattgagcggtacgaggtcggcgagcgggaagcggaggagaggagtttaaggatcgcgttggcggccgtcaaataccagctgatgaagatcgacatagctaaaaatatggtgtttgacccgaaaaacgcgatcagctttgagggcgacaccggcccgtatctgctgtacagtttcgccagggagtcgtggataataaggaaagtggggcggtcgttgtcggtggatgcttgtattgataataatcatgataataatgttgataaacccgtaggggcgaactgtgttcgcccgcccgttgacagatcgcaactgcctgaaagctctgagccgggggaggtcaagttgataaaaaaaatcgcgttcttcccggatgccgtgggctttgcttataacagattatcaccctcagttatcgcgaactacgccttggatctggagcagctgttcaccgagttctatcattcaaaccaagtgatagggagcgggggagcggtggaaaaattcagggtcaacctagtggcggcgttccggtcggtgatgcgccggtgcttggaattgatgggtatggaagcgattgaagagatgtaa

SEQ ID NO: 1802 - protein, 196 aa, Unknown
  Obtained from environmental sample
  DOMAIN (55)...(196): DALR anticodon binding domain
  misc_feature (1)..(196): Xaa is any amino acid
MIERYEVGEREAEERSLRIALAAVKYQLMKIDIAKNMVFDPKNAISFEGDTGPYLLYSFARESWIIRKVGRSLSVDACIDNNHDNNVDKPVGANCVRPPVDRSQLPESSEPGEVKLIKKIAFFPDAVGFAYNRLSPSVIANYALDLEQLFTEFYHSNQVIGSGGAVEKFRVNLVAAFRSVMRRCLELMGMEAIEEM

SEQ ID NO: 1803 - DNA, 426 bp, Unknown
  Obtained from environmental sample
  misc_feature (1)..(426): n is a, c, g, or t
ttgaacaatatcaccgccagagacatagcgcagatgatcgatcattctcttttaaatccgaaattcacccggcaggaagttgaagcgggctgccgtcttgcctcggagtattgctgcatcacagtctgcgtgaaaccgtgcgacgtccgtctcgcttacggcatattaaaagataccaaagtgattaccaccagcgtcatagggtttccccacggcagtaatattacggaaataaaagtgctggaagcaagacgcgctattgaggaaggctgcggggaagtggatatggtgatgaacataggccgctttctctcaggcgattacagcctggtacaggacgatatagcggcagttagcgaggaagttcacaaggcaaaagccgttctgaaagttattcggaaaacgcctatctctcggccgatctga

SEQ ID NO: 1804 - protein, 141 aa, Unknown
  Obtained from environmental sample
  DOMAIN (8)...(139): DeoC/LacD family aldolase
  misc_feature (1)..(141): Xaa is any amino acid
MNNITARDIAQMIDHSLLNPKFTRQEVEAGCRLASEYCCITVCVKPCDVRLAYGILKDTKVITTSVIGFPHGSNITEIKVLEARRAIEEGCGEVDMVMNIGRFLSGDYSLVQDDIAAVSEEVHKAKAVLKVIRKTPISRPI

SEQ ID NO: 1805 - DNA, 573 bp, Unknown
  Obtained from environmental sample
  misc_feature (1)..(573): n is a, c, g, or t
atggatgatgaattctataaactcacggttaatcgcttcttaaattatgtccgcttttggaccacaagcgacagacacaacatagatacgccttctactccaggccaatgggatcttgcaaaagcacttgtcgaagaactaaaaggtatgggcgttaaagacgtaacgctcaccgatcattgttatgtgatagcccggctgccagcaagcacggggaaggaaaaactccctactgtgggattccttgcccacctcgatactgctgcagatgttaccggcaaggatgtgaaggcgtgtctggttgaaaattacgatgggaaacctatagacctgggctgcggccaaagccttgatcccgctttggatccggcgcttgctacccataagggcaaagcaataatccatacagatggaagcacccttttgggcgctgacgataaggccgggattgccattattatgggagccgctgaataccttttaaatcacactgaaattgaccatggcccattggagcttattttttctcccgacgaagaaaccggcaaggggcttccctcgtgccgattctga

SEQ ID NO: 1806 - protein, 190 aa, Unknown
  Obtained from environmental sample
  misc_feature (1)..(190): Xaa is any amino acid
MDDEFYKLTVNRFLNYVRFWTTSDRHNIDTPSTPGQWDLAKALVEELKGMGVKDVTLTDHCYVIARLPASTGKEKLPTVGFLAHLDTAADVTGKDVKACLVENYDGKPIDLGCGQSLDPALDPALATHKGKAIIHTDGSTLLGADDKAGIAIIMGAAEYLLNHTEIDHGPLELIFSPDEETGKGLPSCRF

SEQ ID NO: 1807 - DNA, 522 bp, Unknown
  Obtained from environmental sample
  misc_feature (1)..(522): n is a, c, g, or t
atgtcgaaaaacagtaaacttgtcgaagtcgccttcaaaggcgaacgcaaggcgatattcaaagacaagaacgaactcgacatcgtcgagggcgagtacatcgtcgtggaagccgagcgcggccaagatatgggcaaggcctcgtgcgtaggctccttggtcaagctcaagcgcggcaagggcgaaacgcgcggcgtcgtccgcaaagcccaggatagcgacctcgaagcccttaagagaaaccaagaacgcgaaaaatccgcctttaaagtctgccgcgacaaaatcaaacactacaaactcgatatgaagttggtcgacgtggagatgcagttcgacggcggcaaaataacgttttacttcaccgccgcccagcgcgtggacttccgcgaacttgtcaaagacttggcctccgtctaccgcacccgcatagaactgcgtcaaataggcgtccgcgacgaagccaaacgcataagcggctgcggggtctgcggccgcaaacagtgctgcagcgcgttttga

SEQ ID NO: 1808 - protein, 173 aa, Unknown
  Obtained from environmental sample
  DOMAIN (62)...(149): PSP1 C-terminal conserved region
  misc_feature (1)..(173): Xaa is any amino acid
MSKNSKLVEVAFKGERKAIFKDKNELDIVEGEYIVVEAERGQDMGKASCVGSLVKLKRGKGETRGVVRKAQDSDLEALKRNQEREKSAFKVCRDKIKHYKLDMKLVDVEMQFDGGKITFYFTAAQRVDFRELVKDLASVYRTRIELRQIGVRDEAKRISGCGVCGRKQCCSAF

SEQ ID NO: 1809 - DNA, 861 bp, Unknown
  Obtained from environmental sample
  misc_feature (1)..(861): n is a, c, g, or t
gtgcagaatgtctgggcaattgaattccttggccgcggcataaagggccgtatcgcaagcgcggcggacgcgcccctgggcgagagtccgtgtatcaagtgcggccagtgttccgcccattgccctgttggggccatttacgaaagggacgacaccgtaaaggtctgggccgccctgcagaaccccaactgccacccggtggtgcagatcgcgccggcggtgcgggttgccctggcggaagaattcggcctgccacccggaacggtttttaccaaaaaaatctatgccgccttgaggcgtcttggctttaaaactgtttttgacaccaacttttccgccgaccttacgattatggaagaaggcacggagctggtgaaacgccttaccgaaaaaggcggtgacattccacttattacaagctgctgtccggcctgggttgactacatggaaaaatatttcgcggatatgatccccaacttctctaccgcgaaaagtccccagcagatgatgggagccatgatcaaggcgtactgggcggagaaagcctctgtagaccctgaaaaggttttttctgtctctgtgatgccctgtactgccaaaaagtgggagactcaccgaaataatgacatgaagagcgcgggtcatggctgggatgtggatatagccataactaccagggagctggcccggatgatcaagcaggcagggattgaaattctgaaactgcctgacgaagaagcggataacccgatggggccgtataccggcgccggaaccatttttggcgcgacaggcggggtaatggaagccgccgtaagaagcgcgtattttttggtaacaaaaaagaactgggcgatgtga

SEQ ID NO: 1810 - protein, 286 aa, Unknown
  Obtained from environmental sample
  DOMAIN (24)...(47): 4Fe-4S binding domain
  misc_feature (1)..(286): Xaa is any amino acid
MQNVWAIEFLGRGIKGRIASAADAPLGESPCIKCGQCSAHCPVGAIYERDDTVKVWAALQNPNCHPVVQIAPAVRVALAEEFGLPPGTVFTKKIYAALRRLGFKTVFDTNFSADLTIMEEGTELVKRLTEKGGDIPLITSCCPAWVDYMEKYFADMIPNFSTAKSPQQMMGAMIKAYWAEKASVDPEKVFSVSVMPCTAKKWETHRNNDMKSAGHGWDVDIAITTRELARMIKQAGIEILKLPDEEADNPMGPYTGAGTIFGATGGVMEAAVRSAYFLVTKKNWAM

SEQ ID NO: 1811 - DNA, 867 bp, Unknown
  Obtained from environmental sample
  misc_feature (1)..(867): n is a, c, g, or t
ttggatggtttcgttccccccgcttatggtctcatagacgctcttggcgtcgtccaggcctgcccgcagttggtctatgtgcgccatcttgaccgtgtcgccaacgtggatggccccggcgtctggtgcctcctgacccgtcatcaggcggagcagcgtggtcttgcccgcgccgtttggccccacaacgcccagtatcgcggcgcgcgggacgcggaaggagaggctttcaaacagcgccttttcgccgtaggccttggacactttgtcgaactccaccactgtgtcgccaaggcgcggccctgggggtatgtatatctccaggtccaattccctttccttggcgtcctggccggccaggctctcgtagtccgctatcctggccttgctctttgtgtgcctgcccttgggcgtcatgcgaatccactccagctcgcgctccagggtcttctgccgcttcgcgtcctgcttttcctccagcgccagcctgttcctcttctgctccagccaactggagtagttgcccttccaggggacgccctcgcccctgtcgagctccagaatccactcggcgacgttgtccaaaaagtagcggtcgtgggtgacggcgatgaccgtgcccttgtagtcccgcaggtgcctctccagccaggccaccgtctcggcgtcgaggtggttcgtcggctcgtccagcagcagaatgtcgggcttctgtatcagcagcctgcacagcgccacgcggcgcctctcgccgcccgaaagcacctttatcggcgtgtccggcggggggcagcgcagcgcgtccatcgcctgctccagcctggagtccaggtcccagcagtccgcggcgtctattttttcctgtag

SEQ ID NO: 1812 - protein, 288 aa, Unknown
  Obtained from environmental sample
  misc_feature (1)..(288): Xaa is any amino acid
MDGFVPPAYGLIDALGVVQACPQLVYVRHLDRVANVDGPGVWCLLTRHQAEQRGLARAVWPHNAQYRGARDAEGEAFKQRLFAVGLGHFVELHHCVAKARPWGYVYLQVQFPFLGVLAGQALVVRYPGLALCVPALGRHANPLQLALQGLLPLRVLLFLQRQPVPLLLQPTGVVALPGDALAPVELQNPLGDVVQKVAVVGDGDDRALVVPQVPLQPGHRLGVEVVRRLVQQQNVGLLYQQPAQRHAAPLAARKHLYRRVRRGAAQRVHRLLQPGVQVPAVRGVYFFL

SEQ ID NO: 1813 - DNA, 585 bp, Unknown
  Obtained from environmental sample
  misc_feature (1)..(585): n is a, c, g, or t
atgtttaaatcattattaaagacactgtacaaatgtctaaatttttgtttaagcaaattgggatttattcttgtacgtggtagaataaatgtggattacaccgtcttgccatataatgtagaatataaatccacgcctgaagacaccaataaaatgttggcacatatagggcacgtttggaataattatggaaatgatgagacgtactggtcagtactggcgtcagatacatttctgaaaaagcgtctcgacgataaaaatattgacaaattttactcaacaggaaaagaaacattaaaacaaatcgaaaatacattaaaaagatgcggagaatgggaaaaattaaacagactggattgcatggaatacggatgtggcgttggacgtgttacaatacaactgaaggatttgtttcanaatgtaacgggccttgatatttcacaaggccatctttcgttgctgcaacaacgtatagacagtttaggaataaagaatataaaattacaaaaagtcaattcgttagacgatttgnagaaattgcccaagtatgattttatttttacggtaanttgtattacaacataa

SEQ ID NO: 1814 - protein, 194 aa, Unknown
  Obtained from environmental sample
  misc_feature (1)..(194): Xaa is any amino acid
MFKSLLKTLYKCLNFCLSKLGFILVRGRINVDYTVLPYNVEYKSTPEDTNKMLAHIGHVWNNYGNDETYWSVLASDTFLKKRLDDKNIDKFYSTGKETLKQIENTLKRCGEWEKLNRLDCMEYGCGVGRVTIQLKDLFXNVTGLDISQGHLSLLQQRIDSLGIKNIKLQKVNSLDDLXKLPKYDFIFTVXCITT

SEQ ID NO: 1815 - DNA, 804 bp, Unknown
  Obtained from environmental sample
  misc_feature (1)..(804): n is a, c, g, or t
atgccggcattcccgagaagaagaaacattgacgccggggaacgggctttcgcgtacgccaaagcctgcgggatcattggcaaatcttttgtcggaaagcgaatctccgtgttgggaaggcttaacgcgctcgccgaattcgggcggctggtttttcctgaagcgtcgcatgaacttcccggaagggaactgatggtcgatcttgaaagacggcttttacagcgtacaatacggcacatactcgccgtgatcaattcatatacaaacccgccggagctgctggtacgccagcttggttcctgcgagtacgccgaccttaaaacctgcctgcaccacattgccgccgataaaccgatcccccagatgttatgcgacattggaaaatacggaaccgtgcgttttcaggcgtatccggatctaaaggcgatgttaagcggcaccgaatttgagtttatcctttcaaaagaccttaaagccgccgatttcgagctaacctcactggaagcggagcttgatttacagtattacaccctgcttatgaaaagcctccaatgccttcctgccgaggatcgtcttcttgcccatcgaatacttgccgaggaaatctccctgcgtaactgtgtttgggcgctgcggctgcgtacctatnttgagaaaacaacggaagaaacggaaaagtatcttatgaaccctggaatacccccatgccctcctgtggaaatccccggggatatacccccccgtttttcatctcaaacaaacgcggccttccgaaaatatctcccctgcccnaggagcctatga

SEQ ID NO: 1816 - protein, 267 aa, Unknown
  Obtained from environmental sample
  misc_feature (1)..(267): Xaa is any amino acid
MPAFPRRRNIDAGERAFAYAKACGIIGKSFVGKRISVLGRLNALAEFGRLVFPEASHELPGRELMVDLERRLLQRTIRHILAVINSYTNPPELLVRQLGSCEYADLKTCLHHIAADKPIPQMLCDIGKYGTVRFQAYPDLKAMLSGTEFEFILSKDLKAADFELTSLEAELDLQYYTLLMKSLQCLPAEDRLLAHRILAEEISLRNCVWALRLRTYXEKTTEETEKYLMNPGIPPCPPVEIPGDIPPRFSSQTNAAFRKYLPCPRSL

SEQ ID NO: 1817 - DNA, 681 bp, Unknown
  Obtained from environmental sample
  misc_feature (1)..(681): n is a, c, g, or t
gtgatcttcggcgaagccgggatccccgacaggcttgccaggaatgtcgcagcttcggccctggaaagccctgcctttgttatggagctcctcgttatcttacagcaagatccgtttacctattacctggttgataagcagcaccccctgcctgacggctacgaacctgacgatttggtttccctgcaagccgggctttaccgtcttgaccagagcggtcttaggctgcgaaaaatggcagtcgacgctttgcaggaaatggcctcagctgcggccaaagatggaattgcttttgtaataggctcgacttaccgttcggcggcctatcaggctcaggtttacgaacgggctgtgaacgcttacggcaaagaaaccgccgatcgcgaatccgcccaaagcggcaaaagccaacatcagcttgggttgactgtggacttttccccgattgacgacgctttcgccgcaactccggcctgcaaatggctaaaggaaaacgcaagccgcttcggctggtcgctttccttccctgacggctacgaggaaataaccggctaccgctgggaaagctggcattaccgcttcgtgggtaaagacttggccgcgttcatcgataattattttgacggtatccaacaatacgcgcttcaattcattcacgcctggcaagagcaggcggaataa

SEQ ID NO: 1818 - protein, 226 aa, Unknown
  Obtained from environmental sample
  DOMAIN (73)...(197): D-alanyl-D-alanine carboxypeptidase
  misc_feature (1)..(226): Xaa is any amino acid
MIFGEAGIPDRLARNVAASALESPAFVMELLVILQQDPFTYYLVDKQHPLPDGYEPDDLVSLQAGLYRLDQSGLRLRKMAVDALQEMASAAAKDGIAFVIGSTYRSAAYQAQVYERAVNAYGKETADRESAQSGKSQHQLGLTVDFSPIDDAFAATPACKWLKENASRFGWSLSFPDGYEEITGYRWESWHYRFVGKDLAAFIDNYFDGIQQYALQFIHAWQEQAE

SEQ ID NO: 1819 - DNA, 633 bp, Unknown
  Obtained from environmental sample
  misc_feature (1)..(633): n is a, c, g, or t
atggaaggcgatgcgtttggtggtatcagaaaaaagatactggaaaatatcggggatattcgtaaagtaagcgtagagtatcttgcctatgtaattatcgatgctattgttgatgaatattttcttacaatagaccatcttgaagaagacattgagggcttcgaagatcgttcggcaaaaacaaacgatgaaacgtttatcgatgaaatactggataccaaaaagtaccttttacagataaagcgggctattttacccttaaggaattgcttaaataaaatcacccaccaggagaattttttccagtcagataagctaaaaccctttttgcaagacttgagcgaaaatattaatcacgcgctagtaaccgttgataattttcgcgagtggctatcaagcattatggaacaaaatttatccattgtgtcttatcagacgaataatgtaatgaaggtattgacagttatttccacaatatttatccctttgacttttattgtgggcatttatggcatgaacttcgataatatgcccgagctaagatatgggccggcgtacttcattgttttgggcattatgggtcttattgcgttagtaatgctgtttctttttaaaatataccactggttttag

SEQ ID NO: 1820 - protein, 210 aa, Unknown
  Obtained from environmental sample
  DOMAIN (1)...(210): CorA-like Mg2+ transporter protein
  misc_feature (1)..(210): Xaa is any amino acid
MEGDAFGGIRKKILENIGDIRKVSVEYLAYVIIDAIVDEYFLTIDHLEEDIEGFEDRSAKTNDETFIDEILDTKKYLLQIKRAILPLRNCLNKITHQENFFQSDKLKPFLQDLSENINHALVTVDNFREWLSSIMEQNLSIVSYQTNNVMKVLTVISTIFIPLTFIVGIYGMNFDNMPELRYGPAYFIVLGIMGLIALVMLFLFKIYHWF

SEQ ID NO: 1821 - DNA, 312 bp, Unknown
  Obtained from environmental sample
  misc_feature (1)..(312): n is a, c, g, or t
gtgggcaagaacatcggcgccgaacttgaaaccgaccgcgccgaggccgacaagaagatcgcccaggcaaaggccgaggagcgccgcgccatggccatcgccgccgaacaggagatgaaggccaaggtgcaggagatgcgggccaaggtcgtggaggccgaggctcaggtgcccatggccatggccgaagcattcagaaacggaaacctcggtataatggactactataagatgaaaaacgtggcggccgatacccaaatgagagagaccatcggcggccgcggaccgcagagcgacggaaataagggttga

SEQ ID NO: 1822 - protein, 103 aa, Unknown
  Obtained from environmental sample
  DOMAIN (1)...(95): Protein of unknown function (DUF1432)
  misc_feature (1)..(103): Xaa is any amino acid
MGKNIGAELETDRAEADKKIAQAKAEERRAMAIAAEQEMKAKVQEMRAKVVEAEAQVPMAMAEAFRNGNLGIMDYYKMKNVAADTQMRETIGGRGPQSDGNKG

SEQ ID NO: 1823 - DNA, 567 bp, Unknown
  Obtained from environmental sample
  misc_feature (1)..(567): n is a, c, g, or t
ttgaacggggaggaatgtgcaataaaaaaaccgcggcaggcggttcaccccagcctggcttatctcagcgaagaccggcagggcaagggcattgtgcaaggctttaaccttccccagaacattacccttatatcactgaaggaatacatacaggggatttttatcaacaaaaaggcggaagtgaaaaaaaccgaagaatacaccaaaactttccgtatcattgcggcttcacagaaaatggcgctgcgttttctttccggcggcaatcaacagaaggtctatctttcacgctggctggatacgaaaccttcaatacttatccttgatgaaccgaccaggggcattgatgtcagcgccaaacacgaaatctatgagttcattcatcatttggcggaacagggtatttcctgctgggtgatttcctcggaactggaggaaattatcggcctatgcagcagggtatatgtgatgaaagaaggcgcacttacgggctgcctggaaggggatcatattaacgaagaagaactcatgttccatgctacgggaattaaagggagtcaaatttga

SEQ ID NO: 1824 - protein, 188 aa, Unknown
  Obtained from environmental sample
  DOMAIN (18)...(160): ABC transporter
  misc_feature (1)..(188): Xaa is any amino acid
MNGEECAIKKPRQAVHPSLAYLSEDRQGKGIVQGFNLPQNITLISLKEYIQGIFINKKAEVKKTEEYTKTFRIIAASQKMALRFLSGGNQQKVYLSRWLDTKPSILILDEPTRGIDVSAKHEIYEFIHHLAEQGISCWVISSELEEIIGLCSRVYVMKEGALTGCLEGDHINEEELMFHATGIKGSQI

SEQ ID NO: 1825 - DNA, 618 bp, Unknown
  Obtained from environmental sample
  misc_feature (1)..(618): n is a, c, g, or t
atgtcaagaccggtaactattttttcaggacagtgggcggatctgccctttgagaaattctgcgagaaggtgaaatcctttggctacgatggtatcgagattgcctcctggggcgatcacctcgatttaaaaaaagctgccactgatcccagctatgctgagggacgcaaggcaattctaaaaaaacacggtctaaaaacctgggctatcagcgcccatttgtctggtcaatgtgtgggtgataactgggatccccggttggatggtttcgcgccttcgtctctatcgggcaaacctgaggaaatccgtaactgggcaattcaggagctgaagtactcggcggctgcggcaaagaacatggacgttaaagtcgtgactgggtttatgggaagccctatttgggcttattggtactctttcccccagaccaccgaaaagatggttgacgacgcattcaagaaggtcgtagaactctggactccgattttcgatgaatttgataaatataacatcaaattcgccctggaagtacatcccacagaaatcgcctttgattactataccgcggagcggctgcttaaggatttaataccgaaaaaccctgggtttcaattttga

SEQ ID NO: 1826 - protein, 205 aa, Unknown
  Obtained from environmental sample
  DOMAIN (21)...(205): Xylose isomerase-like TIM barrel
  misc_feature (1)..(205): Xaa is any amino acid
MSRPVTIFSGQWADLPFEKFCEKVKSFGYDGIEIASWGDHLDLKKAATDPSYAEGRKAILKKHGLKTWAISAHLSGQCVGDNWDPRLDGFAPSSLSGKPEEIRNWAIQELKYSAAAAKNMDVKVVTGFMGSPIWAYWYSFPQTTEKMVDDAFKKVVELWTPIFDEFDKYNIKFALEVHPTEIAFDYYTAERLLKDLIPKNPGFQF

SEQ ID NO: 1827 - DNA, 552 bp, Unknown
  Obtained from environmental sample
  misc_feature (1)..(552): n is a, c, g, or t
atggcaactgggtggtatgttctccatacttattctgggtatgagaaaaaaatagaaaagactatccggatgatgaccgggacgggagaactggacaaagaagttgtccgggatgtaaaggttccttccgaagaggtggtcgaagtccgtgacggcaaaaaacgcactcagacccgaaaattcctgcccggctatattcttgtcgaaatggatttacccaacgaggagcagcaatggaaactcacctgctccacgatcaaaaaaatcaatggggttacaggttttgtaggcacccccgcaaataaaaagcccagtcctctttcgggagatgaagcccggggcatacttcagaaatcaggcgaaatgaaaggcgagcggcctgtcagggcgcgtcagtctttttctgccgggggacaggtaaagatcatagatggccccttcgagtcttttacgggaaccatcgaagatgtgaatcaagaaaagaacaaactcaggggtatggtcggcatttttggccaaatacgccggttgaagttgatcttttacaggtga

SEQ ID NO: 1828 - protein, 183 aa, Unknown
  Obtained from environmental sample
  DOMAIN (134)...(171): KOW motif
  misc_feature (1)..(183): Xaa is any amino acid
MATGWYVLHTYSGYEKKIEKTIRMMTGTGELDKEVVRDVKVPSEEVVEVRDGKKRTQTRKFLPGYILVEMDLPNEEQQWKLTCSTIKKINGVTGFVGTPANKKPSPLSGDEARGILQKSGEMKGERPVRARQSFSAGGQVKIIDGPFESFTGTIEDVNQEKNKLRGMVGIFGQIRRLKLIFYR

SEQ ID NO: 1829 - DNA, 450 bp, Unknown
  Obtained from environmental sample
  misc_feature (1)..(450): n is a, c, g, or t
atgtcaatgattcccatcattactacaagtaactgctcgacaatcagcggccaaaaaagggtaaacaggcgcttgttgttccaatccgcaacgggcaaaactacgggcgtatccataggagaactgcgcgccacaggctcgacggaagcggtgggaaatagtttatctgccaattattactccttgaaaatttgccgtttcttaatatcaacagtttacgttttttatgttatattaacaagtatggcgtgtttgtttgattatattaaatggcggggagatttagattttaatgtatctccttttaatccggtggataatattatttttttgcagctcgcataccttaccctcgacggaattgttccctcacccgaaagacatgaggggattagcatcgctcttgncgntagggtttataatgaaaaatcaagccagcccgggttttaa

SEQ ID NO: 1830 - protein, 149 aa, Unknown
  Obtained from environmental sample
  misc_feature (1)..(149): Xaa is any amino acid
MSMIPIITTSNCSTISGQKRVNRRLLFQSATGKTTGVSIGELRATGSTEAVGNSLSANYYSLKICRFLISTVYVFYVILTSMACLFDYIKWRGDLDFNVSPFNPVDNIIFLQLAYLTLDGIVPSPERHEGISIALXXRVYNEKSSQPGF

SEQ ID NO: 1831 - DNA, 378 bp, Unknown
  Obtained from environmental sample
  misc_feature (1)..(378): n is a, c, g, or t
atgaataatagaggagagtcctactccctattccctactccccatttctgctataatgcaagtatgaaaatagacgattcgcgggtaaaaataaatctcgccgagcttgcaggcgctctggcagggacggatgatccgggattgatcagggactttttatactgccttttgacgcctgccgaaatagcggacattgccgcgcgctgggcgctggtaaaggaactgaaacgcagaaccccgcaaagggagatcgccaaagacctgggcatttcactctgcaagataacacggggatccaaggaactaaaaaagccggattcggcttttcagcggatgttggctaatcaggagagcggaccggcatggcagaaaatataa

SEQ ID NO: 1832 - protein, 125 aa, Unknown
  Obtained from environmental sample
  DOMAIN (31)...(117): Trp repressor protein
  misc_feature (1)..(125): Xaa is any amino acid
MNNRGESYSLFPTPHFCYNASMKIDDSRVKINLAELAGALAGTDDPGLIRDFLYCLLTPAEIADIAARWALVKELKRRTPQREIAKDLGISLCKITRGSKELKKPDSAFQRMLANQESGPAWQKI

SEQ ID NO: 1833 - DNA, 810 bp, Unknown
  Obtained from environmental sample
  misc_feature (1)..(810): n is a, c, g, or t
gtgagtagtgttctgggtatattccncaagagtattcttgaaagtttggggttttctttccttgtcgcggtagtcgtatttattatatgggcctatcatgacgtttcaaaggttattccggtgatctcaatgtatgccctggccctgtaccgtatcctgcctgcgatacaccggatgctgctaaatgttaataatattatctatttacaaaaatgtatggaaggcgtagaagagagtctgcgccagccggtagagaaagagggagacgcgccgcttgagtttaaaagttttatccgtctggaagatatcaattacaggtatataaccggtaatgaggtaattaccgatgtctcactcgaaattaaaaagggtgaaaatatagccattaccggggaaagcggcagcggtaaatcaactctggttgatattatcataggtattcacaagccgcttttcggtaaagtttatattgatgaaaccgtaatcacagatgataatatccgttcatggcgaaaaaaaataggatatataccgcaaagcatctacctttttgacggaacagtcgcagaaaatgtttcttttggttctgaacctgacgaagaaaaggtaaagagagccctgcaaatggcaaatatatgggattttctcgcgacaaaagacggcggtgaaaccatggtaggtgaagggggcattcaattaagcggcggacagcagcagcgcatcggcatcgcccgcgccctgtacgatgatcccgacgtgctggtactcgacgaagccacctccgctctgataccgctcggccgattctga

SEQ ID NO: 1834 - protein, 269 aa, Unknown
  Obtained from environmental sample
  DOMAIN (124)...(267): ABC transporter
  misc_feature (1)..(269): Xaa is any amino acid
MSSVLGIFXKSILESLGFSFLVAVVVFIIWAYHDVSKVIPVISMYALALYRILPAIHRMLLNVNNIIYLQKCMEGVEESLRQPVEKEGDAPLEFKSFIRLEDINYRYITGNEVITDVSLEIKKGENIAITGESGSGKSTLVDIIIGIHKPLFGKVYIDETVITDDNIRSWRKKIGYIPQSIYLFDGTVAENVSFGSEPDEEKVKRALQMANIWDFLATKDGGETMVGEGGIQLSGGQQQRIGIARALYDDPDVLVLDEATSALIPLGRF

SEQ ID NO: 1835 - DNA, 759 bp, Unknown
  Obtained from environmental sample
  misc_feature (1)..(759): n is a, c, g, or t
atgctaatatcattaacaagcgcaatatggatatggggcgttttcgacgtgcggtataatacgatgaatccggagattcgtttcatgcctcccggcattgaacatccgcttggaacggacaattttggcagggacgttctgctgagaataatcgccggctcaaggcataccatcgtcctcgcgatctgcgttgtcgccggggctgttatactgggaagcgcgttagggcttttcgccggttattcaggcggtatccgcgatgaaattgtcatgcgccttatggacgcggtaagctcgtttccggggattctttttgcccttgtaatggtcgcggtttttggcaacagccagtttaccctttttaccgccctgctgattctctttgtccccagttttacccgcattatacgaagcgggacattgcagtacaggaacgccgattttattttggctgagcgtttacttggagttggcggcgcgagaatcgtattcatccatatattgccgaaccttgcgacgcaattactaccggccgcggtcctcggactttccaacgcgattctcgcagagtccgccatgagctatctgggattggggattcagccgcctgagccaagctggggaaggatgctttccgaatcgcagaactatcttgtcaacgcgccctggtgcgccctcgctcctgggatcttcatcatgctgacggtcattggcttccactgccttggcgacggactccgccgtcattttggagattag

SEQ ID NO: 1836 - protein, 252 aa, Unknown
  Obtained from environmental sample
  DOMAIN (54)...(251): Binding-protein-dependent transport system inner membrane component
  misc_feature (1)..(252): Xaa is any amino acid
MLISLTSAIWIWGVFDVRYNTMNPEIRFMPPGIEHPLGTDNFGRDVLLRIIAGSRHTIVLAICVVAGAVILGSALGLFAGYSGGIRDEIVMRLMDAVSSFPGILFALVMVAVFGNSQFTLFTALLILFVPSFTRIIRSGTLQYRNADFILAERLLGVGGARIVFIHILPNLATQLLPAAVLGLSNAILAESAMSYLGLGIQPPEPSWGRMLSESQNYLVNAPWCALAPGIFIMLTVIGFHCLGDGLRRHFGD

SEQ ID NO: 1837 - DNA, 489 bp, Unknown
  Obtained from environmental sample
  misc_feature (1)..(489): n is a, c, g, or t
gtggcgtcaaccttaggaatatgctggggaggcttggcgctcgccaaatacttgnggatagacaaaacatccagcgccaaaaagatttcgggcgtcttcaaaacggtaaacctaaaccgcgaccaccgcataaccggagaaatggacgactggttctggtgtccgcagagccgtcactccggcatagacgacacggtgcttgaaagagaacgggacaacggcaaaataaacctgctggcccacgcggaaggcgccggctacgtaatcttcgaaagctccgacaccagatttttaatacatttgggccacccggagtacgaacccgtccgcttggttgaagagtacaaccgcgacgcggcaaagggaagagccgacgtagatccgcccaaaaatgtagacttggaaaatccggcaaatttatggagatcgcataggacggaattctttacacagtggattaagtatttgcatgattctacgtcgtattga

SEQ ID NO: 1838 - protein, 162 aa, Unknown
  Obtained from environmental sample
  DOMAIN (1)...(162): Homoserine O-succinyltransferase
  misc_feature (1)..(162): Xaa is any amino acid
MASTLGICWGGLALAKYLXIDKTSSAKKISGVFKTVNLNRDHRITGEMDDWFWCPQSRHSGIDDTVLERERDNGKINLLAHAEGAGYVIFESSDTRFLIHLGHPEYEPVRLVEEYNRDAAKGRADVDPPKNVDLENPANLWRSHRTEFFTQWIKYLHDSTSY

SEQ ID NO: 1839 - DNA, 756 bp, Unknown
  Obtained from environmental sample
  misc_feature (1)..(756): n is a, c, g, or t
atgttatattttttcaataataacgaaaatattattgcagtaaaagcagtaaatacattgacttccggtgacatatcgaaacttgaatggcttaccggcgggacttttcttgagacatccgaaatcgcaggatggtttgttggaccacgtcgcgaaatgataacgccatggagctcaaatgccgtagatatcaccgtgaacatgaacataaaaggaattgaacgcatagaaaaatttatttctgttattcctccaaaatcgcacgttccgcaaaactacgacccaatgttgcaacaactgtatgaaaatctgacttgcgacatctttaccatagaccgtaaacccgaccctgtacaatatgtagatgacatcgctgcatacaaccgacaggaaggtttggcactcaactctaacgaaatagattatctcgaaagtttgcagaaaaaactcggacgtatgcttaccgacagcgaaatattcggtttttcgcaagtaaattcggaacattgccgccacaaaatttttaacggacagtttgttattgacggtcagctcaaaccactgtccctgtttgatatgataaaacggacatcggaggctaatcctaaccgtatcgtttcggcatacaaagataactgtgcgtttatagaaggaccgaatatagaacgtttcacgccggcgtgcggcgaccatccgagctatttcggcatacacaaccaggatgtagtaatatcaaatgaaagccgaaacacataa

SEQ ID NO: 1840 - protein, 251 aa, Unknown
  Obtained from environmental sample
  misc_feature (1)..(251): Xaa is any amino acid
MLYFFNNNENIIAVKAVNTLTSGDISKLEWLTGGTFLETSEIAGWFVGPRREMITPWSSNAVDITVNMNIKGIERIEKFISVIPPKSHVPQNYDPMLQQLYENLTCDIFTIDRKPDPVQYVDDIAAYNRQEGLALNSNEIDYLESLQKKLGRMLTDSEIFGFSQVNSEHCRHKIFNGQFVIDGQLKPLSLFDMIKRTSEANPNRIVSAYKDNCAFIEGPNIERFTPACGDHPSYFGIHNQDVVISNESRNT

SEQ ID NO: 1841 - DNA, 582 bp, Unknown
  Obtained from environmental sample
  misc_feature (1)..(582): n is a, c, g, or t
ttgatgtttgagtttcttgcagtcacaaaccgcagtctttgttcccaagggaacggcgtgtacgttaacgcacagttcttggcgcaaatcgaaaagatcgccgcctcgggggtaaaggcccttgttttaagggaaaaagatctttcattgaaagattatattgatcttgccagggatgtccttgagatttgtaccggcagagaagttcgctttattgttcacggcttgccccaggcagccctggagctggggtgcccttatcttcatctgccctgggcggtgtttcaggaaaattgtctaagttcagaccctccccctttatggaaagaaaaaaacgttctttctttcggggtttctgttcataatacggaagaagcgaagcttgccatagcccagggagcttcatggcttattgggggccatatttataccacaaaaagcaaagacggccttgaaggaaggnggccggaattccttgaggaactctgtaagttgtcctctgtccctgtgtacggaattgggggcattaatgaaaataacatagccgcgattgtaaaaacggcgtggcgggagcttgcctga

SEQ ID NO: 1842 - protein, 193 aa, Unknown
  Obtained from environmental sample
  DOMAIN (5)...(192): Thiamine monophosphate synthase/TENI
  misc_feature (1)..(193): Xaa is any amino acid
MMFEFLAVTNRSLCSQGNGVYVNAQFLAQIEKIAASGVKALVLREKDLSLKDYIDLARDVLEICTGREVRFIVHGLPQAALELGCPYLHLPWAVFQENCLSSDPPPLWKEKNVLSFGVSVHNTEEAKLAIAQGASWLIGGHIYTTKSKDGLEGRXPEFLEELCKLSSVPVYGIGGINENNIAAIVKTAWRELA

SEQ ID NO: 1843 - DNA, 873 bp, Unknown
  Obtained from environmental sample
  misc_feature (1)..(873): n is a, c, g, or t
ttgctggacggcaaacggcgctttgagttcatagcccaagtcagcaacgcggcggttcgcaaagctcttggcatgggcataatcgaactcagcggcgccctagagctgctcctgagcttccccgaaaaagcctcaaagaggtggaatgacgaggagttcggcctcttggccaaaatcgagcacgagttctacaacctgcgcaaagcgcacggcctctgggatttcgccgatctgatctgcggcgcgcttgaactgttcgccgaatacccggacatcgcaaacgattggagcgcccgcttcgacgccgttttggtcgacgagttccaagatacaaaccccatgcagatagagatgctggacgtactgctgcgttccggagcaagcctatacgccgtcggcgacgacgatcaggcgatatacggttttcggggcgcggacatcaggcccataagaaatttcacgacacgtttcagagatgcggcgattgtcaagctgcagatcaactaccgcagcgtgaactcgatactcgattgcgccaacaaactgtgggccgacaaaccggcggagtacaggaagaggctcgtaagcggtctgaaaccccagccgaccggttgccgcaaacccaaaacgatgcgcttcgggacgcaagccaaggcgctggagtggatattgggcagggcgcgttttattgagcgtcgggagaagatacctatagggtcgatggccgtattatttcgtatcaacgatacgctggcgtctgtggagagtcactacaagagtatgggcttgacagatgataaaatcccgcaactgctgaccgtccacgcgagcaagggctggagatccggtgtctctcggccgaatctgacctag

SEQ ID NO: 1844 - protein, 290 aa, Unknown
  Obtained from environmental sample
  DOMAIN (5)...(289): UvrD/REP helicase
  misc_feature (1)..(290): Xaa is any amino acid
MLDGKRRFEFIAQVSNAAVRKALGMGIIELSGALELLLSFPEKASKRWNDEEFGLLAKIEHEFYNLRKAHGLWDFADLICGALELFAEYPDIANDWSARFDAVLVDEFQDTNPMQIEMLDVLLRSGASLYAVGDDDQAIYGFRGADIRPIRNFTTRFRDAAIVKLQINYRSVNSILDCANKLWADKPAEYRKRLVSGLKPQPTGCRKPKTMRFGTQAKALEWILGRARFIERREKIPIGSMAVLFRINDTLASVESHYKSMGLTDDKIPQLLTVHASKGWRSGVSRPNLT

SEQ ID NO: 1845 - DNA, 753 bp, Unknown
  Obtained from environmental sample
  misc_feature (1)..(753): n is a, c, g, or t
gtgagaatattgggagataggttaacgtatataatgtctgttactgattatctgcaaatttcaacaggaagcgtcgtggcggttgtcggatgcggcggcaaaacttctcttgtggagcttgtggcggacaaactccgtgacaaaaaagtgctggtttcaactaccacaaaaatttttcccccgaaaatggaatgtatcacgttatgcgaaacgttacagcaatgtgaaaaacatgagccgaaggaaggcattcaatgttttgggttgctgaatacggcaagcgggaagctggaagctttgcctgaatcttttctcgcggaattaattccccgctacgatgttgttcttctggaagccgacggttcccgcgggctgttctgcaagggttggctggcaaacgagcctgtggttccctgttactgtacgcacacggtaggggttgtcacaatgaacgcgctgggtaaggcggctgaagaaaccacagttcaccggttgccggaatttctggcgctgacggggctgggggagggtgacgcaatcaccgtacaggcgctggaggcaatggtctgcgcccccacgggaatgttcaaaaacagcgcgggacggcggtatcttctggttaatcaggtcgaggatgatacgactgcgcgtgctgcgttgtcttttttgcaaacaatacaagaaaaatatcccaaccgtttcgcaaaactgcttttgggaagcgttcatcgtgacgcatggcaggaggtgtaa

SEQ ID NO: 1846 - protein, 250 aa, Unknown
  Obtained from environmental sample
  misc_feature (1)..(250): Xaa is any amino acid
MRILGDRLTYIMSVTDYLQISTGSVVAVVGCGGKTSLVELVADKLRDKKVLVSTTTKIFPPKMECITLCETLQQCEKHEPKEGIQCFGLLNTASGKLEALPESFLAELIPRYDVVLLEADGSRGLFCKGWLANEPVVPCYCTHTVGVVTMNALGKAAEETTVHRLPEFLALTGLGEGDAITVQALEAMVCAPTGMFKNSAGRRYLLVNQVEDDTTARAALSFLQTIQEKYPNRFAKLLLGSVHRDAWQEV

SEQ ID NO: 1847 - DNA, 534 bp, Unknown
  Obtained from environmental sample
  misc_feature (1)..(534): n is a, c, g, or t
atgatctgtggcggcagcatggccggttttggaaatgttttgggcagtcaggcaaacctgtgcatcttcggcggcggccacattgctcaaagccttgcgcggatagccgcccactcaggtttttttgtcaccgttgtggaagaccgtcccgaattcgcctccagctttgggcatatccgctatgtggtttgcgggccggaagaatacgcggcaaccgatccggctgcggcttcggattacgcggtcatttgcacgcggggccataaaactgacgctgaggcgctccgttactgccttacaaaaaagtgtaattacattggcatgattggcagtgaaaaaaaagttgcctcgctttttgataacctgcgcgccgaaggcgtggcgcgggcggaacttgaccgcatctacgcccccatcgggcttgacattgccgataccctgcccgctgaaatagcggttgccattcttgcagaaatcctgctggtaaaaaataaaggcaaactgcggcacaagaagttgaaatttgaggaatga

SEQ ID NO: 1848 - protein, 177 aa, Unknown
  Obtained from environmental sample
  misc_feature (1)..(177): Xaa is any amino acid
MICGGSMAGFGNVLGSQANLCIFGGGHIAQSLARIAAHSGFFVTVVEDRPEFASSFGHIRYVVCGPEEYAATDPAAASDYAVICTRGHKTDAEALRYCLTKKCNYIGMIGSEKKVASLFDNLRAEGVARAELDRIYAPIGLDIADTLPAEIAVAILAEILLVKNKGKLRHKKLKFEE

SEQ ID NO: 1849 - DNA, 654 bp, Unknown
  Obtained from environmental sample
  misc_feature (1)..(654): n is a, c, g, or t
atgcgttccaaagaaaacgcgcaggattaccgctattttcccgagcctgatcttctgcctcttcacattgacgacgcgtggatagagaacgttaaagcatttatgcctgaactcgctcagcaaaagcgcgagcgctatgtccgcgactggggcatttccgaatccgcggctgtcgttcttacagttcacaaaaagatttccaacttgttcgagatcgtctcacaaaaaagcaatcagccgcaggaagccgcgaatttgatcacgggcgaaattatgcggctgatgaacaacgcaaatctgcttcccgaagacctttctatagacgcggacaaattatctgctctcatcggttttgtcgcgagcggaaaaattaaccgcgccgcgtacaaagagacagtcgaagcggtatttaaggacaatgttgatcctgaaaaatatatcgcggaaaagggattgatgatggtcagcgacgacaacgccgtaatggaagcggtaaaagctgtgttagcggaaaatgccggcgtcgttgattcatggcgcggcggaaaaacgcaggtgttcggtttcctgatgggacaggttatgaaaaaactgggcaagggcggaaatccggagatcgctaagaaggcgctggaagaggcgttgaaagaataa

SEQ ID NO: 1850 - protein, 217 aa, Unknown
  Obtained from environmental sample
  DOMAIN (1)...(66): PET112 family, C terminal region
  misc_feature (1)..(217): Xaa is any amino acid
MRSKENAQDYRYFPEPDLLPLHIDDAWIENVKAFMPELAQQKRERYVRDWGISESAAVVLTVHKKISNLFEIVSQKSNQPQEAANLITGEIMRLMNNANLLPEDLSIDADKLSALIGFVASGKINRAAYKETVEAVFKDNVDPEKYIAEKGLMMVSDDNAVMEAVKAVLAENAGVVDSWRGGKTQVFGFLMGQVMKKLGKGGNPEIAKKALEEALKE

SEQ ID NO: 1851 - DNA, 543 bp, Unknown
  Obtained from environmental sample
  misc_feature (1)..(543): n is a, c, g, or t
atgatcgccgagtatagcagttgtccttactgccgcacggtcattctggacgaaacccttagccgccgcgtcagcctgggatcgggtaccagcgcccgggtcgtggaaaaaaagtggttcgtcctgccgcccgcagaggaatggtactaccgccgttggaacctggactacaaaccccttccaccggagggttccggtactcaggaattttcaggtttgcaaaccctggccctcttcaaccccgaaccgggcagccaggtctacattcccagggatctggacggcagggaaggaagaatcgtcttttccgccgcccttcgtgaagaagggccccttcgggaagaagggacccttcgagaagaagggacccttagggaagggggaatcatttactggcacctggacggagattatcttggcgccactttgacctaccacgagatggaagcccggcctggcccgggcccccatgtcctgaccctggtggacgccaggggcaatacccttacacggcgctttacggttttggaaaccggcggctaa

SEQ ID NO: 1852 - protein, 180 aa, Unknown
  Obtained from environmental sample
  DOMAIN (62)...(173): Penicillin-Binding Protein C-terminus Family
  misc_feature (1)..(180): Xaa is any amino acid
MIAEYSSCPYCRTVILDETLSRRVSLGSGTSARVVEKKWFVLPPAEEWYYRRWNLDYKPLPPEGSGTQEFSGLQTLALFNPEPGSQVYIPRDLDGREGRIVFSAALREEGPLREEGTLREEGTLREGGIIYWHLDGDYLGATLTYHEMEARPGPGPHVLTLVDARGNTLTRRFTVLETGG

SEQ ID NO: 1853 - DNA, 300 bp, Unknown
  Obtained from environmental sample
  misc_feature (1)..(300): n is a, c, g, or t
atgcagttcaaagcaggggctacggtggtgtcccttaggcgtaccgggggcattgccacttttcatcagctcaataattattttaacctggcccggatgatcattaccccaggggtttattgggatattatccacggcaacaccgccgaagaagtgatggaagaccaggagggcctccagatcatggaagtccagggccggaacatggcctggctcatgaaaaccctggctgcgggaatgaatgcggttccccttccgcctcctttgaccgaacggaaacggacgaattttattcattga

SEQ ID NO: 1854 - protein, 99 aa, Unknown
  Obtained from environmental sample
  misc_feature (1)..(99): Xaa is any amino acid
MQFKAGATVVSLRRTGGIATFHQLNNYFNLARMIITPGVYWDIIHGNTAEEVMEDQEGLQIMEVQGRNMAWLMKTLAAGMNAVPLPPPLTERKRTNFIH

SEQ ID NO: 1855 - DNA, 558 bp, Unknown
  Obtained from environmental sample
  misc_feature (1)..(558): n is a, c, g, or t
atgcagaattttgcaaacagatgtatgccaaatacgtggtccaaagtacaaatagtccagaataatatatatcaaaggcataattggaggttacagatgaatatatcagaactttgggctgaaaatgcagaatttgtgcttagggtctgcgagcgttttgtgaaaaatccggctatggcaaaagatattcgccaagaggttttttttaaaatactcagcagcacggaaacttttaaagaccagtctgctgtgaaaacttggctctattcaataacatatcactgttgcgtggactattttagaacaaggagaaagcaaaagcaaattgaggaagaatggttactccaaggaggtctttttttgagagacagccaatctcccgtatggactgttggcaaggcttcggaaatgccctgccctatttcgcagttatttgttgaacttgtttttggcgaaggctggagcacagacgaagtagccgcagtctttgggttcagcaagggatatgtcaacaaaaaaatacaagaaggcatagaccagttgcagaattctatttaa

SEQ ID NO: 1856 - protein, 185 aa, Unknown
  Obtained from environmental sample
  DOMAIN (38)...(106): Sigma-70 region 2
  misc_feature (1)..(185): Xaa is any amino acid
MQNFANRCMPNTWSKVQIVQNNIYQRHNWRLQMNISELWAENAEFVLRVCERFVKNPAMAKDIRQEVFFKILSSTETFKDQSAVKTWLYSITYHCCVDYFRTRRKQKQIEEEWLLQGGLFLRDSQSPVWTVGKASEMPCPISQLFVELVFGEGWSTDEVAAVFGFSKGYVNKKIQEGIDQLQNSI

SEQ ID NO: 1857 - DNA, 630 bp, Unknown
  Obtained from environmental sample
  misc_feature (1)..(630): n is a, c, g, or t
atgcttatccttatagtcggggctctcatccttacgcgcagactaaaagaggtccccaccggccctcagagccttttggaaacagcggtcgagtttctggataatttcgccaaaaaccagttcggctctttcgcaaaatacctcggcccctacatgggcgccctcttcctgttcctgcttgtcgcgaatactataccggttttatcgcccctgccgctgaaagcatttggacgcgagtttattccgctttttgaaatccgccccccaacaagggacatcaatgtaacggcggcgcttgcggtaatttcaattctgctcgttcttttctgcgggttcgcggcgcgcgggtttacaggctggttcaaaaaactcctgcagccaatttcgtttatgcttcccttcaatatcatggaatacggaacgcggcttatctcgcttgccctgcgcttattcggaaatatgttgggcggctatgtgctgatgagcatgatcgagggcctgcttccgctcgcgcttcccgttattttttcgctctatttcgatttctttgacggattgattcaggcggctatttttgtatttctcaccagcctctatatcggagaggcggttaaagttaacgaggaatga

SEQ ID NO: 1858 - protein, 209 aa, Unknown
  Obtained from environmental sample
  DOMAIN (1)...(202): ATP synthase A chain
  misc_feature (1)..(209): Xaa is any amino acid
MLILIVGALILTRRLKEVPTGPQSLLETAVEFLDNFAKNQFGSFAKYLGPYMGALFLFLLVANTIPVLSPLPLKAFGREFIPLFEIRPPTRDINVTAALAVISILLVLFCGFAARGFTGWFKKLLQPISFMLPFNIMEYGTRLISLALRLFGNMLGGYVLMSMIEGLLPLALPVIFSLYFDFFDGLIQAAIFVFLTSLYIGEAVKVNEE

SEQ ID NO: 1859 - DNA, 300 bp, Unknown
  Obtained from environmental sample
  misc_feature (1)..(300): n is a, c, g, or t
ttgccggttttatcagtcgcggcgttggggaaattttcatgtttttccatgtccgttacggtgataagccctttaagtctgccctcgttatccaccacgggaagtttttcaatacggaattccgcgaatttatcgcgcgccttttctacggtcggctctccttccaccacgattacttcctccgtcattactttaacgacgggaagggaatcgtcgcggcaaaaacgaaggtcgcggtttgtaattattccttttaattttccgttaccgtccacaaccggaacaccggatacgccgtaa

SEQ ID NO: 1860 - protein, 99 aa, Unknown
  Obtained from environmental sample
  misc_feature (1)..(99): Xaa is any amino acid
MPVLSVAALGKFSCFSMSVTVISPLSLPSLSTTGSFSIRNSANLSRAFSTVGSPSTTITSSVITLTTGRESSRQKRRSRFVIIPFNFPLPSTTGTPDTP

SEQ ID NO: 1861 - DNA, 651 bp, Unknown
  Obtained from environmental sample
  misc_feature (1)..(651): n is a, c, g, or t
atgatgacacggcaggagacagcattttacgcgcttgaagccttgaaaaaagccggagccggcaaggttgcctgtaaggtgagtaccgggcgcaaggatgagtttaatgtagaagccaacaaattttcattgttgcgcaccctcttcaataatgagctgtcgataaaggcgattaaagatggccggaaaggggtaatcggaattaacaaactggacaaagattctgttaacgaagcggtagcaaactgcattgccatgaccaaatccgcgctgcccgatgaagcggaggatattgccgaaaagggcgaaaacaagtcgttcgatcaaacttgcggcggcccgaatatggacaaactcttttccagaacaaaagaatttgtcgatcaaaccggaagcgaatttccgaagatagtgcttgaaggtctgatttcggattttaacagtgtcgagaccacctacgtaaacagtaacggagtggaattcaactcctcatctgaattttatgacatacaaaccatgttctcggcgaaagacggagggaaatcctcgtcctttaacggttacttcgcgagaattaagtcgcttgacactccctttatggagcttgatatgcacccggcattactggacggatcttcaaagtccctttaa

SEQ ID NO: 1862 - protein, 216 aa, Unknown
  Obtained from environmental sample
  misc_feature (1)..(216): Xaa is any amino acid
MMTRQETAFYALEALKKAGAGKVACKVSTGRKDEFNVEANKFSLLRTLFNNELSIKAIKDGRKGVIGINKLDKDSVNEAVANCIAMTKSALPDEAEDIAEKGENKSFDQTCGGPNMDKLFSRTKEFVDQTGSEFPKIVLEGLISDFNSVETTYVNSNGVEFNSSSEFYDIQTMFSAKDGGKSSSFNGYFARIKSLDTPFMELDMHPALLDGSSKSL

SEQ ID NO: 1863 - DNA, 462 bp, Unknown
  Obtained from environmental sample
  misc_feature (1)..(462): n is a, c, g, or t
gtgcgccgtaatcgtggccaccgcccgcgccttgaagtacaacggcggcgtccccaagagcgagttgaacaacgaaaatatcgacgccctaaaaaaaggcatagcgaacctgcaagtccacatcgagaacatccgaaagttcggcgtcccgcctatcgtggcggtaaaccgcttccataccgacacccaagccgaattgacggccatacaagatttctgcgccggcatgggcgtccccgcgccggtctccgaggtcttcgccaaaggcggcgagggcggaatcgaactcgcgcgaaaggtctgcgagacgatagagaagcaagacggcgcgaaaacgttcgccccgctctacagcaactccgcgacgctgaaagaaaaaatcaacaccatagccaaggaaatctaccgcgccgacaacgtaatatacagagcgcaagccgagaaagccgtcaaggagattga

SEQ ID NO: 1864 - protein, 153 aa, Unknown
  Obtained from environmental sample
  misc_feature (1)..(153): Xaa is any amino acid
MRRNRGHRPRLEVQRRRPQERVEQRKYRRPKKRHSEPASPHREHPKVRRPAYRGGKPLPYRHPSRIDGHTRFLRRHGRPRAGLRGLRQRRRGRNRTRAKGLRDDREARRRENVRPALQQLRDAERKNQHHSQGNLPRRQRNIQSASRESRQGD

SEQ ID NO: 1865 - DNA, 645 bp, Unknown
  Obtained from environmental sample
  misc_feature (1)..(645): n is a, c, g, or t
atggatagaatagcggagacagagagaaatacaaaagaaaccgaaatatttatttccctgaatattgacggcaagggcaacgctaaattggattaccctgtcggatttatgtcccatatgattaaaacatttgcacgtcacggcttattcgacattgaaatatgcgcgaaaggcgacattgaagttgatcagcaccacattgttgaagatgccggcattgtacttggtcaatgttttgcaaaagcgttaggtgacaaacgcggcattacccgcaacggaaactgcctttttcctatggatgaaactcttgcccgcgccgccgtagatttaagcggcaggccttttttgtattttgacggacagctttcaggttctccgttaatttcaacggagggcggaaaagaatacaactttcaaaccgacgttatcgaagatttttggcaaggttttgtaagcgcggcgggctgtaacctgcatttggaaattcttcgcggcagaagcgatcaccacaagattgaagcgctctttaagtccgccgcccgcgctcttcgtgccgcctgtgaaattgacgaacgcgcaaaagatttaatcccctcaacaaaaggctcattgcccggaattgactcatccggagttcttgtgtga

SEQ ID NO: 1866 - protein, 214 aa, Unknown
  Obtained from environmental sample
  DOMAIN (34)...(184): Imidazoleglycerol-phosphate dehydratase
  misc_feature (1)..(214): Xaa is any amino acid
MDRIAETERNTKETEIFISLNIDGKGNAKLDYPVGFMSHMIKTFARHGLFDIEICAKGDIEVDQHHIVEDAGIVLGQCFAKALGDKRGITRNGNCLFPMDETLARAAVDLSGRPFLYFDGQLSGSPLISTEGGKEYNFQTDVIEDFWQGFVSAAGCNLHLEILRGRSDHHKIEALFKSAARALRAACEIDERAKDLIPSTKGSLPGIDSSGVLV

SEQ ID NO: 1867 - DNA, 843 bp, Unknown
  Obtained from environmental sample
  misc_feature (1)..(843): n is a, c, g, or t
atggattatcaaaaaattgaggtcatttccacagctacattaaccgctatgcaacacataaagcagggttttatcctgttagatacagataataattacctgtcttccaatcccgctgccgcgacaatgcttccagaaatcataaaacttgcaaagggagaatcaatatattcaacaaaaaactggcctgaagaacttattatagaggaaagcaataatcctatagaattctctactaccggcgacagtagatttttcaaagccggtatcagtccggtcttgaataaagatgacgttcttatagccagaattattctgattacggacattaccgacaatgtaaagtttgtgaaagatttggaaatggccgcctacacagacgcccttaccggactttataacagaaaacattttacagaacttgcagaaacggaaattcaaagatccgccaggacgagccacttactatatttggcaatgctggattttgatttttttaaagcaattaacgatacccacggacaccccgccggagacttggttttaaaaacaatcgcgggagttatccgaaaaaatattcgttcctatgatttgctttgccgttatggaggcgaagaatttgttttaatgcttgaggttaataatgaaaaggaagttttcgatgttgcgganaggattagaaaggacataaaacgtaccgttatgaactacgagggagtcgagctaaaaattacctgtagtataggtctggcgagattccttgaaaacgatactctggaaacttccataaagaaagccgatgatgccctctacgccgcaaanaagcgggacgcgatcaggtaa

SEQ ID NO: 1868 - protein, 280 aa, Unknown
  Obtained from environmental sample
  DOMAIN (120)...(280): GGDEF domain
  misc_feature (1)..(280): Xaa is any amino acid
MDYQKIEVISTATLTAMQHIKQGFILLDTDNNYLSSNPAAATMLPEIIKLAKGESIYSTKNWPEELIIEESNNPIEFSTTGDSRFFKAGISPVLNKDDVLIARIILITDITDNVKFVKDLEMAAYTDALTGLYNRKHFTELAETEIQRSARTSHLLYLAMLDFDFFKAINDTHGHPAGDLVLKTIAGVIRKNIRSYDLLCRYGGEEFVLMLEVNNEKEVFDVAXRIRKDIKRTVMNYEGVELKITCSIGLARFLENDTLETSIKKADDALYAAXKRDAIR

SEQ ID NO: 1869 - DNA, 903 bp, Unknown
  Obtained from environmental sample
  misc_feature (1)..(903): n is a, c, g, or t
ttgtatcaaaaagccgacaagctcgcgcaggggttcaaaaaagttaccgtcgtcgagcttgacagcaaggaagatcacgacgactacgacggcgactatatcgtcgacgagaaagcgcgcaccgcgacgcttctgccgtcgggcgtgaagaaagccgaaagttatttcggcgtcgaaaacctcatggactccgaaaacctcaccttgctccaccacgtcaatcaggcgataaaagcgcgcgggattatgaagtcagacgttgattatgtcgtcaaagacggggaaataataatagtggacgagttcacggggcggcttatgctcgggcggcgtttcaacgaggggttgcaccaagctatcgaagccaaggagaacgtcaaggtgaaaagcgagtcgaaaacgctcgcgaccatcactttccagaattttttccgcctttacgcgaaactttcgggaatgaccggcaccgccatgaccgaggaagccgagtttcgcggaatatacagcctcgacgtcgtcgaaatcccgactaatatgccctgtatccgcgccgatcaggacgaccgcgtatacaaaaccgaaaacggcaagttcacggccgttatagagcagatcgaggagtgccacgctaagggtcagcctgttttggtcggcaccatttctatcgagaaatccgagcatttatcgaagcttttaaagaaaaaaggcgtgaagcacgaagtcttaaacgcgaaaaatcacgcccgcgaagccgagatagtcgctcaggcgggcaagaaaggcgcggtaacggtctcgaccaacatggcgggacgcggaaccgacattatgctcgggggcaacgccgagtatctcgcccgcgctcaaatgcgcaaaaacggcattgaggaagacgttatttga

SEQ ID NO: 1870 - protein, 300 aa, Unknown
  Obtained from environmental sample
  DOMAIN (12)...(165): SecA DEAD-like domain
  misc_feature (1)..(300): Xaa is any amino acid
MYQKADKLAQGFKKVTVVELDSKEDHDDYDGDYIVDEKARTATLLPSGVKKAESYFGVENLMDSENLTLLHHVNQAIKARGIMKSDVDYVVKDGEIIIVDEFTGRLMLGRRFNEGLHQAIEAKENVKVKSESKTLATITFQNFFRLYAKLSGMTGTAMTEEAEFRGIYSLDVVEIPTNMPCIRADQDDRVYKTENGKFTAVIEQIEECHAKGQPVLVGTISIEKSEHLSKLLKKKGVKHEVLNAKNHAREAEIVAQAGKKGAVTVSTNMAGRGTDIMLGGNAEYLARAQMRKNGIEEDVI

SEQ ID NO: 1871 - DNA, 429 bp, Unknown
  Obtained from environmental sample
  misc_feature (1)..(429): n is a, c, g, or t
atgctcggatttctcgatagaaatggtgccgaccaaaacaggctgacccttagcgtggcactcctcgatctgctctataacggccgtgaacttgccgttttcggttttgtatacgcggtcgtcctgatcggcgcggatacagggcatattagtcgggatttcgacgacgtcgaggctgtatattccgcgaaactcggcttcctcggtcatggcggtgccggtcattcccgaaagtttcgcgtaaaggcggaaaaaattctggaaagtgatggtcgcgagcgttttcgactcgcttttcaccttgacgttctccttggcttcgatagcttggtgcaacccctcgttgaaacgccgcccgagcataagccgccccgtgaactcgtccactattattatttccccgtctttgacgacataatcaacgtctga

SEQ ID NO: 1872 - protein, 142 aa, Unknown
  Obtained from environmental sample
  misc_feature (1)..(142): Xaa is any amino acid
MLGFLDRNGADQNRLTLSVALLDLLYNGRELAVFGFVYAVVLIGADTGHISRDFDDVEAVYSAKLGFLGHGGAGHSRKFRVKAEKILESDGRERFRLAFHLDVLLGFDSLVQPLVETPPEHKPPRELVHYYYFPVFDDIINV

SEQ ID NO: 1873 - DNA, 597 bp, Unknown
  Obtained from environmental sample
  misc_feature (1)..(597): n is a, c, g, or t
ttgacagatatcgagcagtccgtaatggaaggaattatagtccgtattctgggaaatatgcgcgaagcgtggacgacggttatcgacctgcgcccgcgcttgggacagatcgacaccaaccctcagttcgcgcagattgttccgcctacggaaatggtcgtccttgtaacattggaaaccaaagtaggagatgtggaaggcatgatgaacttctgtattccctaccttactatagagcccattatcagcaaattgtccgcccagttctggtattcatcggtacggcgcaacgctactacagagaacctcaatgtactaaaggagaagcttacaacggtcgatgttaatataacagccgaaatcggaaagattaatgttcctgtaagggacgttctttccttacagataggggatgtaatacggctctacaatacacgcatcggcgatccctattcattaaatatcggctcaaggaaaaagtttctgtgccgccccggcgtacttggaaagaaaatggcggtgcagattacgcagaagattgccgagcttggacaggaagaatttgaagagctcgtatctgaaggagatgaattatga

SEQ ID NO: 1874 - protein, 198 aa, Unknown
  Obtained from environmental sample
  DOMAIN (1)...(85): Flagellar motor switch protein FliM
  misc_feature (1)..(198): Xaa is any amino acid
MTDIEQSVMEGIIVRILGNMREAWTTVIDLRPRLGQIDTNPQFAQIVPPTEMVVLVTLETKVGDVEGMMNFCIPYLTIEPIISKLSAQFWYSSVRRNATTENLNVLKEKLTTVDVNITAEIGKINVPVRDVLSLQIGDVIRLYNTRIGDPYSLNIGSRKKFLCRPGVLGKKMAVQITQKIAELGQEEFEELVSEGDEL

SEQ ID NO: 1875 - DNA, 651 bp, Unknown
  Obtained from environmental sample
  misc_feature (1)..(651): n is a, c, g, or t
gtgcaaaattctatacagcttaagaagggttttggcgataaagagcaggaaaaaccggaaagcagtaaaacagaccccgacacctacaggattattttctccttttcaaagcaggacgacgctgtttttcatcctcaccttgggcttttggaaattttctcgatggcctttttaagggcgggcattcctgttatttatacgcagggattcaatcccttaccaaaactggaaatcgcttcgccgctttccttgggcattaaggccagttctgagattgcgactattgatacggacgggtacttttctgccgaacaatttaaaaagaaccttaataatttttttcctgaaggtttgcagattgtcgaagcgatgaacgtctttattccatcgggtggtaaaaaacattcgctttcgtctcttctgtggggttatgtgtatgcaggggaagacagtgaaaaggaaattgtagaagcgaaagaagaaaagtcttaccgcgaagcaaggattggctctgcgggaagtatatacagcctggaaaggctttcgcttattgccagcttgaatggagcgaaggataaatctggaggggcttcctactttgaggtttacaggtcgctatatcctaaaaccggagaagagaggaagccatag

SEQ ID NO: 1876 - protein, 216 aa, Unknown
  Obtained from environmental sample
  misc_feature (1)..(216): Xaa is any amino acid
MQNSIQLKKGFGDKEQEKPESSKTDPDTYRIIFSFSKQDDAVFHPHLGLLEIFSMAFLRAGIPVIYTQGFNPLPKLEIASPLSLGIKASSEIATIDTDGYFSAEQFKKNLNNFFPEGLQIVEAMNVFIPSGGKKHSLSSLLWGYVYAGEDSEKEIVEAKEEKSYREARIGSAGSIYSLERLSLIASLNGAKDKSGGASYFEVYRSLYPKTGEERKP

SEQ ID NO: 1877 - DNA, 315 bp, Unknown
  Obtained from environmental sample
  misc_feature (1)..(315): n is a, c, g, or t
atgagggaaacatacaaaaaatgtttaaaaggcgatttaaatacagtgctggattttatcagacttgcgcataaaacgggcgtccatattgaaattactactcttgttgtacccgaccttaatgattcagcggacgaattggacgccgccgcgcaatttatcgcaagtgtggacagtaaaatcccctggcacctgacagcctatcatcccgattaccgctggaatgcgcctccgacagaccccgcctttttaaaacatactgccaaagaagccgaaaagaaattatctcacgttcatacaggcaatataagataa

SEQ ID NO: 1878 - protein, 104 aa, Unknown
  Obtained from environmental sample
  misc_feature (1)..(104): Xaa is any amino acid
MRETYKKCLKGDLNTVLDFIRLAHKTGVHIEITTLVVPDLNDSADELDAAAQFIASVDSKIPWHLTAYHPDYRWNAPPTDPAFLKHTAKEAEKKLSHVHTGNIR

SEQ ID NO: 1879 - DNA, 537 bp, Unknown
  Obtained from environmental sample
  misc_feature (1)..(537): n is a, c, g, or t
atgacaggatcngccgagatggcggcgggctggtctgttgaaaaaataaaaaaagcagtcagcgcaatagcgcctgttgtccgtataatgccgaacacgccggcattgattggaaagggaatgatcgctcttgcggcttcaccggaagttcaaaaaacacagattaccgttttggaacaatttctcgcgggagcaggcattatagatagaattgatgaaaatttaatagatgccgtgacagctctttcaggctcagggcccgcattcgtctatctctttattgaagcattggctgacggaggcgttcgaactggacttcccagagataaggctcttcgttacgccgcccagactgtggccggagcggcggcaatggttaaagaaacagaaaaacatccgggtgaattaaaggatatggtaacatcacccggcggaacaacaatcgtgggaattacagcgcttgaaagcggagctttccgggggactgtaataaaagctgtagaagccgcatggcagcgcgccgtagaattgggctaa

SEQ ID NO: 1880 - protein, 178 aa, Unknown
  Obtained from environmental sample
  DOMAIN (3)...(162): NADP oxidoreductase coenzyme F420-dependent
  misc_feature (1)..(178): Xaa is any amino acid
MTGSAEMAAGWSVEKIKKAVSAIAPVVRIMPNTPALIGKGMIALAASPEVQKTQITVLEQFLAGAGIIDRIDENLIDAVTALSGSGPAFVYLFIEALADGGVRTGLPRDKALRYAAQTVAGAAAMVKETEKHPGELKDMVTSPGGTTIVGITALESGAFRGTVIKAVEAAWQRAVELG

SEQ ID NO: 1881 - DNA, 723 bp, Unknown
  Obtained from environmental sample
  misc_feature (1)..(723): n is a, c, g, or t
atggcgattgatactctgaaagagatgttctcatacgcgttcctcgtccgcgccgtggtcgtcggtttgctggtctcgctctgcgccgcgttgctcggggtcagtctggtgttgaagcgatactcgatgatcggcgacggtctctcccacgtaggattcggcgcgttggcaatcgccaccgcgctccacaccgcaccgcttgtcgtatcgattcccatagttgtattagcggcgtttctgcttctgcgtataagcgagaacagtaaaatcaaaggcgacgccgcgatagcgctgatatccacgagttcgctcgccgtaggcgtattagtagtatcgctcacaacgggaatgaacacggatgtctgcaactatatgttcggcagtattcttgtaatgagtcataacgatgtaatactatctataatcctagcggcaatagtgttgacgatgttcgtcttcttctacaacaaaatattcgcagtaacgttcgacgagaatttcgccaaggccaccggagttaagaccggtctgtacaatatgatgatcgctttcctcaccgcgattaccatagtattgggaatgaggatgatgggcgcgctgttgatctccagcctgatcatcttcccggcgctaacgtcaatgcggctatgcaagaaattcaaaagcgtaacgatatgctcggctatagtatcggtaacatgctttttcacccggcgtgggtaa

SEQ ID NO: 1882 - protein, 240 aa, Unknown
  Obtained from environmental sample
  DOMAIN (11)...(238): ABC 3 transport family
  misc_feature (1)..(240): Xaa is any amino acid
MAIDTLKEMFSYAFLVRAVVVGLLVSLCAALLGVSLVLKRYSMIGDGLSHVGFGALAIATALHTAPLVVSIPIVVLAAFLLLRISENSKIKGDAAIALISTSSLAVGVLVVSLTTGMNTDVCNYMFGSILVMSHNDVILSIILAAIVLTMFVFFYNKIFAVTFDENFAKATGVKTGLYNMMIAFLTAITIVLGMRMMGALLISSLIIFPALTSMRLCKKFKSVTICSAIVSVTCFFTRRG

SEQ ID NO: 1883 - DNA, 795 bp, Unknown
  Obtained from environmental sample
  misc_feature (1)..(795): n is a, c, g, or t
atgactcttcatctactttatatcgatcccgctacggggagcatgcttttttcaattattataacagcaacggcgactgtttatttcttattccgggctttgtttatcaaattaaaatttcttctctccggcggcaggataaggcaggagactaaaaataaatttgtcatctatgccgaagacaaacggtattggtccctctttaagccagtcgttgatgaatttgaaaaacgcggcattgacctcctctatttgacatcttccaaggacgatccggtttttgaagccggcttacagaaaacaaaagcggagtttataggagaaggcaataaagcgttcgccaaacttaattttctttcagccgaattggtcctttcaacaactcccggacttgacgtgtaccagtggaaaagatcaaaaacagttaaacattacagccaccttcttcattcggcggatgaaccgatcaaatatgaattgttcggtatagactactatgattcaattctggtaaccggcggcgattatcaggcaagtgatatacggaaacttgaaaaaatacgcggcctgccggaaaaacaggtcgttaccgtgggatgcccctacctggatgtatttgccgaaaaaatcgccctgcttcccaaagaagaaaatcatgtttttacggttctggtttcaccttcatggggaaaatccgccctgctttcaaaatacggtgaagaactgcttgatcccctggtaaaaacncggctggcggattattgtgcgtccgcatccccagtctcttcaggttga

SEQ ID NO: 1884 - protein, 264 aa, Unknown
  Obtained from environmental sample
  misc_feature (1)..(264): Xaa is any amino acid
MTLHLLYIDPATGSMLFSIIITATATVYFLFRALFIKLKFLLSGGRIRQETKNKFVIYAEDKRYWSLFKPVVDEFEKRGIDLLYLTSSKDDPVFEAGLQKTKAEFIGEGNKAFAKLNFLSAELVLSTTPGLDVYQWKRSKTVKHYSHLLHSADEPIKYELFGIDYYDSILVTGGDYQASDIRKLEKIRGLPEKQVVTVGCPYLDVFAEKIALLPKEENHVFTVLVSPSWGKSALLSKYGEELLDPLVKTRLADYCASASPVSSG

SEQ ID NO: 1885 - DNA, 474 bp, Unknown
  Obtained from environmental sample
  misc_feature (1)..(474): n is a, c, g, or t
atgatgcattcttacgcggataacctttccaccgactatccgggcgcttccgttcatgcgggcctgcttatggcaataggcgcctctgtaagcgccccggggatcggaaccgccctggcttacgccctgaacggaaaattccctgtagccaaatcgtggtgcgctacggtacttttgccctatgtaatggaaaaactggtcgcttcaaggccggaaaaaatggctagagccgtatccctgatgggggaagcgaccgaaagcgtctcgacctccgaagcggccaacatggctgtggatatgatacgcagccacatgggccagttaaaggtacctgccaggcttaaagattttaacctgtcccttgaccggctggttccggcggcggaagcggccagagaaatggaatttgtcgcctcatctccctggaccgtaacatcggaagacgcttacgatttattaaaacaggctttttaa

SEQ ID NO: 1886 - protein, 157 aa, Unknown
  Obtained from environmental sample
  misc_feature (1)..(157): Xaa is any amino acid
MMHSYADNLSTDYPGASVHAGLLMAIGASVSAPGIGTALAYALNGKFPVAKSWCATVLLPYVMEKLVASRPEKMARAVSLMGEATESVSTSEAANMAVDMIRSHMGQLKVPARLKDFNLSLDRLVPAAEAAREMEFVASSPWTVTSEDAYDLLKQAF

SEQ ID NO: 1887 - DNA, 843 bp, Unknown
  Obtained from environmental sample
  misc_feature (1)..(843): n is a, c, g, or t
ttgcgttattttgtacggcttgccgcgccgattatgcttgtcgcgtttatagcggcgattatatcaaatgtcgcgcaagtaggttttttgtttaccacaaagcctattgttcccgatttttcaaaagtacttcccaaaatagggcagtacttcaagcgaattttttcagtggacggaatttacaattttattaaatcgatagccaagatggcgattatcgggtttgtggcttttattctgatctattcggaaaaggacaaactgttaaggcttcaggaaacaggcatcatgatgggtcttactacagtatctacaatcgcaattaagatgctgatcatttcggctcttttgctggttgccttgtcgataccggatttattatttcaacgatggcgtttcagggaacgtaaccggatgaccagatatgagataaaagaagaacagaaaatgtacgaagcggatccgcagatacagggcaggatacgcagccgcttccgggaattgttaaggcagaatatcaggacgtctgtgcctaaagcggatgtggtagtaacaaacccgacccaccttgccgtggcgattcagtatgatcagagttacatggaagggccgatgattgtcgccatgggcgaggatgaaatggccgcgaggatcangcagattgcgcangagaatgacgtgccgctggtggaaaacaaacctcttgcgtgggctttgtaccgcgacccgaaaatcgacgctggggatattatccccagggagtactggagtactgtagcgcttgtattaagcaaagttgggtacttgaatgaggaaaaaacgcgcaggaagatgaacgcgtaa

SEQ ID NO: 1888 - protein, 280 aa, Unknown
  Obtained from environmental sample
  SIGNAL (1)...(24)
  DOMAIN (1)...(267): FlhB HrpN YscU SpaS Family
  misc_feature (1)..(280): Xaa is any amino acid
MRYFVRLAAPIMLVAFIAAIISNVAQVGFLFTTKPIVPDFSKVLPKIGQYFKRIFSVDGIYNFIKSIAKMAIIGFVAFILIYSEKDKLLRLQETGIMMGLTTVSTIAIKMLIISALLLVALSIPDLLFQRWRFRERNRMTRYEIKEEQKMYEADPQIQGRIRSRFRELLRQNIRTSVPKADVVVTNPTHLAVAIQYDQSYMEGPMIVAMGEDEMAARIXQIAXENDVPLVENKPLAWALYRDPKIDAGDIIPREYWSTVALVLSKVGYLNEEKTRRKMNA

SEQ ID NO: 1889 - DNA, 534 bp, Unknown
  Obtained from environmental sample
  misc_feature (1)..(534): n is a, c, g, or t
gtgggcgggggagtccactattttgagccgccttgtgaaacgacgcccgatctcgtgtactccatctcggccaccacgcgcaaaccgcgcgcaggcgagacggacggggtgcactacttctttatgaccaaggaagagttcgaggccaaagccgccgggaacgagttcgccgagtggcagcaggtgttcggcaactactacggcaccccgcgcgcctttatcgactcggtgacggccggcggacgccacattcttatggacatagacgtctacgggaaaaagaagttcgattcggcgtatccggaggccgtggggatactgatcgttccgccgtctatggaggagctggagacgaggcttagggcgcgcggcaccgacgacgaggagacgatacggctgcggctagataaagcccgcaccgagatggagttcgcccgctccgagggcaagtacgagtacgagatcgttaacgacgatctggagaccgcggaggccgagacggcggcgctgataaggacgattatcggcggatga

SEQ ID NO: 1890 - protein, 177 aa, Unknown
  Obtained from environmental sample
  DOMAIN (26)...(130): Guanylate kinase
  misc_feature (1)..(177): Xaa is any amino acid
MGGGVHYFEPPCETTPDLVYSISATTRKPRAGETDGVHYFFMTKEEFEAKAAGNEFAEWQQVFGNYYGTPRAFIDSVTAGGRHILMDIDVYGKKKFDSAYPEAVGILIVPPSMEELETRLRARGTDDEETIRLRLDKARTEMEFARSEGKYEYEIVNDDLETAEAETAALIRTIIGG

SEQ ID NO: 1891 - DNA, 942 bp, Unknown
  Obtained from environmental sample
  misc_feature (1)..(942): n is a, c, g, or t
ttgatggcgagctgggggttctgcccttggcgacagtgcggaatgcgtttgcccgcaaagatcggcgcggccgggattgcggttttttcggttattgtcggcattacggcgacgctggccgagccggcagtggtggtgcttcagaatcagggaggcgttatccccgcatggaacgccccgcttttatacctgctgttaaacaggggcactacgtggcttgtggcggccattgccataggagtggggctgtcggtggtgctgggagtgtaccgtttcatgttcggttggggttttaagccgccggtgtttattattatccccattcttctggcgctgagctgcgtatttgacatgaaccccatccttcgccctttggtgaaccttgcctgggacgcgggaggggcggctaccggcgcggttacggtgccgattatccttgcgcttggtttgggcgtgtcaaaaaccggcggaaaatccaatagatccggcggccttggcctggttacccttgcctcggctctgcctgtcgccggagttctcctggtggcgcttctgctcagcccgaaagtcccaatgccttccgacgcggcaacgttcttttccgccgaatcgggacagagagaaaaggccgtttatgtcgccggctcggaagagaaactgatcaaaattgcgaataacgcggttaataccggggatctttccatagtggactttgccatgtgtttcccggaaaaaaccatacaggcccaggagagtcaggacaagctgtcggtgttcgcccctgaatcgtttctggactacctcaggatcgcgctgatggccgttgtgcctcttgccctggtgctgatcatttccattgccattattgcaagagatcgaattctttactctgatattatcgttttgggattagtatttactacttttgggaatttaccttaa

SEQ ID NO: 1892 - protein, 313 aa, Unknown
  Obtained from environmental sample
  DOMAIN (4)...(187): Protein of unknown function (DUF1538)
  misc_feature (1)..(313): Xaa is any amino acid
MMASWGFCPWRQCGMRLPAKIGAAGIAVFSVIVGITATLAEPAVVVLQNQGGVIPAWNAPLLYLLLNRGTTWLVAAIAIGVGLSVVLGVYRFMFGWGFKPPVFIIIPILLALSCVFDMNPILRPLVNLAWDAGGAATGAVTVPIILALGLGVSKTGGKSNRSGGLGLVTLASALPVAGVLLVALLLSPKVPMPSDAATFFSAESGQREKAVYVAGSEEKLIKIANNAVNTGDLSIVDFAMCFPEKTIQAQESQDKLSVFAPESFLDYLRIALMAVVPLALVLIISIAIIARDRILYSDIIVLGLVFTTFGNLP

SEQ ID NO: 1893 - DNA, 354 bp, Unknown
  Obtained from environmental sample
  misc_feature (1)..(354): n is a, c, g, or t
atgacatttgatatcagcaaagcaaggatctttatccgccctggctacacggatttacggaaagcagtaaacgggctttcagtaatggtagaacaacagatggcaggggaaccttttagcgggaacgtttatttattttgcaacagggggcggaagctgctaaaagcgctgtggtgggacaggaacggattttggctgagccagaaaaggcttgaaaaagacaagttcccctggcctgagacagatgaagaagcgagggaattaagcgcggaagaactgtcaatgcttttaagcgggatagattttttcaaagcgcacaagagcctttttacaaaaatgtctcggccaatctga

SEQ ID NO: 1894 - protein, 117 aa, Unknown
  Obtained from environmental sample
  DOMAIN (6)...(117): IS66 Orf2 like protein
  misc_feature (1)..(117): Xaa is any amino acid
MTFDISKARIFIRPGYTDLRKAVNGLSVMVEQQMAGEPFSGNVYLFCNRGRKLLKALWWDRNGFWLSQKRLEKDKFPWPETDEEARELSAEELSMLLSGIDFFKAHKSLFTKMSRPI

SEQ ID NO: 1895 - DNA, 885 bp, Unknown
  Obtained from environmental sample
  misc_feature (1)..(885): n is a, c, g, or t
atgctcccgtctgccgtgccggtcattcctcttccgccgcttgaatctgataaatttccaaaagactgggaaataaaacttgaaatcgaaatgagggcggcaaaatacagccgtcaaaccaggattcattatatttattttaatcgtttcctatgccattaccttcaaaagttcccggaggaaattcaatcatacgacatcaagctatttctggcagcagtcgaaaaaggcagggattattcggcggcaacattgaatctggctttaagcgcaataaaatttttttatacaagagttttaccaaaggacatagtaaaggaacaacaccgcccgcggcaggacaaacgccttcccgtggtactgtcaaagggggaaataaaaaaagtttttatggcggaaacaaatattaaacaccgccttcttttaatgatggtatacgcgtcgggtttgcgggtcagcgaggtagtaagccttaaaaggcgggacgtggacatcgccagagaaacaatcaacatccgctccggcaaagggcgaaaagaccgaaatacgcttatatcggcaacggttatcaacgcgcttgcggaatattatgcccggtacaatgttacggactggcttttcagcggggcggatccgggcaaacatttaagcatacgttccgcccagcatatatttgagcacgcgctcaaaagggtaaaaattgaaaaggccgcctcgcttcacagcctgcgtcattcattcgccacccacctgttggaaagcggaaccgacatccgctacattcaggagctgcttggccatgcttcaatcctaaccaccgaacgctacacccatgtagcagttcgcaaaaaactgtctatcaccagccctcggacacgaagataa

SEQ ID NO: 1896 - protein, 294 aa, Unknown
  Obtained from environmental sample
  DOMAIN (130)...(286): Phage integrase family
  misc_feature (1)..(294): Xaa is any amino acid
MLPSAVPVIPLPPLESDKFPKDWEIKLEIEMRAAKYSRQTRIHYIYFNRFLCHYLQKFPEEIQSYDIKLFLAAVEKGRDYSAATLNLALSAIKFFYTRVLPKDIVKEQHRPRQDKRLPVVLSKGEIKKVFMAETNIKHRLLLMMVYASGLRVSEVVSLKRRDVDIARETINIRSGKGRKDRNTLISATVINALAEYYARYNVTDWLFSGADPGKHLSIRSAQHIFEHALKRVKIEKAASLHSLRHSFATHLLESGTDIRYIQELLGHASILTTERYTHVAVRKKLSITSPRTRR

SEQ ID NO: 1897 - DNA, 699 bp, Unknown
  Obtained from environmental sample
  misc_feature (1)..(699): n is a, c, g, or t
atgcttatcatcggtggcgtggcattctttctgatcaagtcggatttgtacaagctggttaatttgcataaagcaggtgtctggctgggccttacaaccgtcgcctcgcttgccatccgcctgattatcatatgcgccatcctgctcctgctcctgtcaataccggatattttgttccagcgctggcgtttcagggaaaagaataaaatgtccaagcaggaaatgaaagaagaaatgaaaatgtacgagggagacccgcagattcggagcaggatacgcagccgcttccgtgacctccttaagcagaatatagccgaggcggttccccgcgccgatgttgttgtcaccaacccgacccattatgccgtggcgcttgagtaccacagggaaacaatgcccgacggccccatggtcacggcaaaaggcgccgacgaggctgccgcgcgaattagaaaactggcgcaggaaaacggcgtcccgatggtggaaaacaaacttcttgcccggaatttgtacaaggaagtagaagttggggactatgttccccaggcgtacctaacggtggttgcgacgatattggtgaaggtaatgcatattaacgaattgcggcgcaaggccaaatcggttgagacagctaaagctgccgaagccgcggcagatgaagctgcaagagaagagctttacggagttggcgcatga

SEQ ID NO: 1898 - protein, 232 aa, Unknown
  Obtained from environmental sample
  DOMAIN (1)...(197): FlhB HrpN YscU SpaS Family
  misc_feature (1)..(232): Xaa is any amino acid
MLIIGGVAFFLIKSDLYKLVNLHKAGVWLGLTTVASLAIRLIIICAILLLLLSIPDILFQRWRFREKNKMSKQEMKEEMKMYEGDPQIRSRIRSRFRDLLKQNIAEAVPRADVVVTNPTHYAVALEYHRETMPDGPMVTAKGADEAAARIRKLAQENGVPMVENKLLARNLYKEVEVGDYVPQAYLTVVATILVKVMHINELRRKAKSVETAKAAEAAADEAAREELYGVGA

SEQ ID NO: 1899 - DNA, 954 bp, Unknown
  Obtained from environmental sample
  misc_feature (1)..(954): n is a, c, g, or t
gtggacatcacgatagcccccgcctcgtcatatacattctcaagactgccatcgggatatacccaacggtttccgcgtaccataaccctctccaatagcggcaaccagcctaccgggaatttgacggtaaaactgaccggaaccaacagcagcagctttgaatttgactccgcctccaataccgtaatcaacagccttgcggccggcggacttggtgttggacaatcggtgtcccttgcggtaatgcccaaagccggacttgcggcgggaacttatagcgccacggtaaatatcaccgggggaaacggcatcggcgccagttatgccataagcgttacggtatcgagtcagccggctggccccgcctatatagggattacctcggatgtgcattatggccgaaacgaagagagttccaatactacccccaatttatttgaaacatggatgaacaagcttaaaacacgttataccaatcttgattatatgctgttctgcggcgataacggcagcgcgtacgcgccgggacttactttctggacgaatgtacaatccataatttctctttccgacaagtttgccccgtcttttgtactcaatcagaacatatttataaccggcaaccatgaatggcaaaacactgccggcggcgcactgttggctaattggaataacgctacagtgcaaagcgtaatcccccggctcaacattgaacacaacgaggccgtaaggacaagcacttatgccatatacgcgtttgggccaaaaccggaaacccagccgcctacaactttccaggaattcacgacggcaaacagggcggatctcagcgcataccttgccacagcgccaaccgatatcccaataattatcctgactcatttcccgcttcactgcattccagaatccggttcctctccctccaagaggtataccgaatngcaagcgatatga

SEQ ID NO: 1900 - protein, 317 aa, Unknown
  Obtained from environmental sample
  misc_feature (1)..(317): Xaa is any amino acid
MDITIAPASSYTFSRLPSGYTQRFPRTITLSNSGNQPTGNLTVKLTGTNSSSFEFDSASNTVINSLAAGGLGVGQSVSLAVMPKAGLAAGTYSATVNITGGNGIGASYAISVTVSSQPAGPAYIGITSDVHYGRNEESSNTTPNLFETWMNKLKTRYTNLDYMLFCGDNGSAYAPGLTFWTNVQSIISLSDKFAPSFVLNQNIFITGNHEWQNTAGGALLANWNNATVQSVIPRLNIEHNEAVRTSTYAIYAFGPKPETQPPTTFQEFTTANRADLSAYLATAPTDIPIIILTHFPLHCIPESGSSPSKRYTEXQAI

SEQ ID NO: 1901 - DNA, 912 bp, Unknown
  Obtained from environmental sample
  misc_feature (1)..(912): n is a, c, g, or t
ttgccgttcattgggactatagggagcagccagcaacaagggccccctcaagccggggcaggccagcaaggccagcggcaacagccaaacgccggtgcgggacagcagggcggtcaacggcaacagcccggtgccggggggcccggggcgggacagcaaggcggggcgcagaatgcccgaggggcgcgtaacgccatcacggtgagggttacgccggtaatccgggataccattgaaaagacattaataataaacggagacgttctcgcccggaaccaggtttcaatatatccggcggttgcaggaaagctcgttgatgtcaggcttggtataggggaccaggtgaaccggggcgccgtagtggctatggtggatccttccaggccgggggaggtttattcccgcaattcggtggtttccaccgtttcgggaaccgttttgcaggcgccgtttaccgtgggcgataccgttacaacccagtccgcgctgtatgtggtgggggacctttcggccctgcgggtcgagacctttgtgccggagcgtttcgtctcagccgtgaagccggggctgaacgcgcaggtgcggtttgagggaatcccacttgaaacattttacgcggtaatcgacgaggtaaacccggtgctggacccggcaagccgaaccctgcggatacgcctccgctttgtggatcgagccaccgggcgcaacagcacagacccgcgaatcaaggcgggaatgttcgctaccgtcagcctggtaaccaactcaaggacaaacgtgccggttatcccaagggcttgtgccatcaacacctacggctcatggattgtgtttactgttgatgagaacaacatcgcccggcggcacacggtggaacttggccttgaagcgaagatctgttttgagtgttaa

SEQ ID NO: 1902 - protein, 303 aa, Unknown
  Obtained from environmental sample
  misc_feature (1)..(303): Xaa is any amino acid
MPFIGTIGSSQQQGPPQAGAGQQGQRQQPNAGAGQQGGQRQQPGAGGPGAGQQGGAQNARGARNAITVRVTPVIRDTIEKTLIINGDVLARNQVSIYPAVAGKLVDVRLGIGDQVNRGAVVAMVDPSRPGEVYSRNSVVSTVSGTVLQAPFTVGDTVTTQSALYVVGDLSALRVETFVPERFVSAVKPGLNAQVRFEGIPLETFYAVIDEVNPVLDPASRTLRIRLRFVDRATGRNSTDPRIKAGMFATVSLVTNSRTNVPVIPRACAINTYGSWIVFTVDENNIARRHTVELGLEAKICFEC

SEQ ID NO: 1903 - DNA, 888 bp, Unknown
  Obtained from environmental sample
  misc_feature (1)..(888): n is a, c, g, or t
atgacggcggaggaactgttcagcattgaccagatcaggcggctgacggtcaggacggtgaatcttcccgcctcgggggccgcgcaggcgaaccgctcccaggtagtgcgcctggaggatgttgccgatataaacctgggctacaacgacaacgcttcccgggtctatgtgaacgaccagagcggcgtgtacattcaggtaacgagcgaaaacgacagcaatcaggtaaaggtttcggacaacgtacatgccgcccttgatgaaataaacgcgtcccttccccagggcattactctggaagtgctttccgacaacacttccctgatcagggcgactcttaaacaggtatacacaaacgccttccagggcgcgagccttgccatgctcatactgctgctgttccttcgcaattttaagggaactttgattatcggactggccattccgatttcgatcctccttacccttatgtgcatgtccattttcggttttaccttaaaccttcttaccatgaccgggcttatcatggggttgggcatgaccatggacgcgtccatcgtaattctggaaaatgtccacagctaccgcgagcggggcgcaaaggccgaaatcgccgccattctgggaagccgcgaaatgtttcgggccattattgcttccagcgccaccaccatgtgcgtgtttatccccctgatcatttataaaaacactctgaagcaaatgggcttgttattcagcgaccttatttttacggtggtaatttccctggccgcttccctggcggtagccgttacccttgttcccagcctctgcggttccattcttccgctgaatacccgcaaacagaagcctctaaaaaccgccttttccgcaaaattgacgacataa

SEQ ID NO: 1904 - protein, 295 aa, Unknown
  Obtained from environmental sample
  misc_feature (1)..(295): Xaa is any amino acid
MTAEELFSIDQIRRLTVRTVNLPASGAAQANRSQVVRLEDVADINLGYNDNASRVYVNDQSGVYIQVTSENDSNQVKVSDNVHAALDEINASLPQGITLEVLSDNTSLIRATLKQVYTNAFQGASLAMLILLLFLRNFKGTLIIGLAIPISILLTLMCMSIFGFTLNLLTMTGLIMGLGMTMDASIVILENVHSYRERGAKAEIAAILGSREMFRAIIASSATTMCVFIPLIIYKNTLKQMGLLFSDLIFTVVISLAASLAVAVTLVPSLCGSILPLNTRKQKPLKTAFSAKLTT

SEQ ID NO: 1905 - DNA, 381 bp, Unknown
  Obtained from environmental sample
  misc_feature (1)..(381): n is a, c, g, or t
ttgctggaacgctatgtcggaagagtccacagggtggctctggccgtcgtttatcacgcagcggatgttgaccaccggaaagccgatgaggctgcctttttttaccgcttccttaaagcccttgtcgcaggatgggacaaattccgtggggattgtgccgcccttgatgttgtcaacgaactcgtagtcgcccgaggcgaacggttccatatagcctgccacttttccgaactggccagcgccgccggtttgctttttatgggtgtagttataatcggcgcgctgggtgattgtctccctgtacgcgacctggggctttccgacctccacttcggcgttgtattcccttcgcatcctttctatataaacttccaggtgtaa

SEQ ID NO: 1906 - protein, 126 aa, Unknown
  Obtained from environmental sample
  misc_feature (1)..(126): Xaa is any amino acid
MLERYVGRVHRVALAVVYHAADVDHRKADEAAFFYRFLKALVAGWDKFRGDCAALDVVNELVVARGERFHIACHFSELASAAGLLFMGVVIIGALGDCLPVRDLGLSDLHFGVVFPSHPFYINFQV

SEQ ID NO: 1907 - DNA, 357 bp, Unknown
  Obtained from environmental sample
  misc_feature (1)..(357): n is a, c, g, or t
gtggcaattcgctttaaacaaatgacacaagcagatgcagagggtttttatgcggaacacgttggcaaaggatttttcgcagagcttgccaagttcatgacctctggtccttctgttcagcttgtgctcgcaggcgaaaacgccattgcaaaagttcgtgccattaacggcgcaacaaatccagaaaaggcagaacccggcaccatacgctacgactgggcaacctcaatgacagaaaacgcagtgcattcctccgatggcacagaaagcgcggcacgagaaatagccttctggttcaagcccgaagaaatttttgaatacagcgcaatggatcagagagcaaagtctgtcctctaa

SEQ ID NO: 1908 - protein, 118 aa, Unknown
  Obtained from environmental sample
  DOMAIN (1)...(104): Nucleoside diphosphate kinase
  misc_feature (1)..(118): Xaa is any amino acid
MAIRFKQMTQADAEGFYAEHVGKGFFAELAKFMTSGPSVQLVLAGENAIAKVRAINGATNPEKAEPGTIRYDWATSMTENAVHSSDGTESAAREIAFWFKPEEIFEYSAMDQRAKSVL

SEQ ID NO: 1909 - DNA, 882 bp, Unknown
  Obtained from environmental sample
  misc_feature (1)..(882): n is a, c, g, or t
ttgcaggtgtcaaaatttgcaggagtacggacancgcgggattatgttgattggaacgccacggcgcggattggcgacccaagcgggaaatccgagatacggaatatgcttggtgccgacactgtgaccaaaaatacgaaggggattgagcaggcgattaagcggtttataaccccgtggaagttcgtttacaatgcggattggacaaataacatcgattggtggacgtttatgagcaacgtcgggagccagttcaacgtcgcggagatgcttgccaaagattgttacaaggaccgcattggtaagggacttacgattatggagatgggatatatgcttatgcaggcgcacgattatgtgtggcttaatcgggagtacgcgtgtactttgcaaatcggcgggagcgaccaatgggcgaatattacggccggggtggaacttgggcgaaaaaaggctgtggagggcggcaaggacagggggcttatgatggcgatgtgttggccgcttttgaccaacgcggacggcaagaaaatgggcaagaccgagaagggggcgttatggcttgaccccgaaaagacaagcccgtacgagttttatcaatattttgtcaatgttgacgaccgcgatgtggaacggcttttgacgttttttacgatgctcccgattcaagagattaggcagatgtgcggcggtgatatcattgcggcaaagaagtttttggcgtttgaggtcaccaagatggtccacggagaggcggcggcggaaggggcacgagaggccggggagaaactttttggcggcgcgggcacgggtgacgcgggggcggattgccccgccgaaacggttaaggcggcgcgggggcgaatatctcggccgatctga

SEQ ID NO: 1910 - protein, 293 aa, Unknown
  Obtained from environmental sample
  DOMAIN (1)...(266): tRNA synthetases class I (W and Y)
  misc_feature (1)..(293): Xaa is any amino acid
MQVSKFAGVRTXRDYVDWNATARIGDPSGKSEIRNMLGADTVTKNTKGIEQAIKRFITPWKFVYNADWTNNIDWWTFMSNVGSQFNVAEMLAKDCYKDRIGKGLTIMEMGYMLMQAHDYVWLNREYACTLQIGGSDQWANITAGVELGRKKAVEGGKDRGLMMAMCWPLLTNADGKKMGKTEKGALWLDPEKTSPYEFYQYFVNVDDRDVERLLTFFTMLPIQEIRQMCGGDIIAAKKFLAFEVTKMVHGEAAAEGAREAGEKLFGGAGTGDAGADCPAETVKAARGRISRPI

SEQ ID NO: 1911 - DNA, 327 bp, Unknown
  Obtained from environmental sample
  misc_feature (1)..(327): n is a, c, g, or t
atgatgaatattaaggaaattcttgcacagaatttgaaggaaaacaggcagcgtctcggaattacccagtcggaactggcggaacgggccggcatgtctactcaatatcttgcaatgattgaaatagccagaaaattcccaaccgccgatattctggaacggctggcggcggcattggtcataaatccacatgagttgttttctgtcgcggtttcacctgaacaggctttggaaacactgcaacggacgatttttgatatatggatcgggcaatggaacatgctttggacaagctatagaaaagcggtacaagaaagtcttttataa

SEQ ID NO: 1912 - protein, 108 aa, Unknown
  Obtained from environmental sample
  DOMAIN (12)...(66): Helix-turn-helix
  misc_feature (1)..(108): Xaa is any amino acid
MMNIKEILAQNLKENRQRLGITQSELAERAGMSTQYLAMIEIARKFPTADILERLAAALVINPHELFSVAVSPEQALETLQRTIFDIWIGQWNMLWTSYRKAVQESLL

SEQ ID NO: 1913 - DNA, 417 bp, Unknown
  Obtained from environmental sample
  misc_feature (1)..(417): n is a, c, g, or t
ttggcggtaaagaggggggacttgatacttattgtcgcggactcaaaacgaactgtggcaaacaagacgctgggtgcggtgcgtgcaaaactcggcagggaactcggcctttgcgatccgaaaaaatttgaatttgtttggattgtcgatttcccgatgttcgagttcaatgacgatgagaaccgttgggaagcggcgcaccacatgttcacgtggccgcaaaccaaataccacgaaacaatggaaaaagatccgggagccgtcaagggagacttgtacgaccttgttctcaacggctgggagcttgcgtcaggttcaatcagaattcacgatagcgagctgcagaaaaaagtttttaaaattgttggcttgaaaagtcgaggaagcggagagagaaattttcggctttttgactga

SEQ ID NO: 1914 - protein, 138 aa, Unknown
  Obtained from environmental sample
  DOMAIN (1)...(135): tRNA synthetases class II (D, K and N)
  misc_feature (1)..(138): Xaa is any amino acid
MAVKRGDLILIVADSKRTVANKTLGAVRAKLGRELGLCDPKKFEFVWIVDFPMFEFNDDENRWEAAHHMFTWPQTKYHETMEKDPGAVKGDLYDLVLNGWELASGSIRIHDSELQKKVFKIVGLKSRGSGERNFRLFD

SEQ ID NO: 1915 - DNA, 615 bp, Unknown
  Obtained from environmental sample
  misc_feature (1)..(615): n is a, c, g, or t
ttgggaccaatgggcgaagggcgttcaatttacccaagctataaaccaagggtgaattttagcgaaatggattgcttaacatacatagaacatgttttggctcttgcctattctaaagattacgatgattttttcaataaattgcaaaaaattcgttacaaaaacggagttatagattacaacaggcgcaaccattttttaatagcggactggcttctctataatcaactgaaggttgaaagcgaagatttgaaaatcggcaattttttgctctttgaaaaagaaatcaataaaaagaaatttttcaatgacccaaatatggtaaatccaaaagtgagcattccgtttttgccaaaagaaaaagccataatttatgcagatacggtgaatttcgcaagagacaccatttttggcattgccattttgagtgatttgccagggctagatgctgcgcacacaggttttgctgttggcagcagcaaaaaaaatggcttgatgtttcgccatgcttcgcaattaaagggaaaagttatagaacagcctttgtctgaatttctaaaaacaacaaaaattaaaacaccgggaatttcattctttatatttgaagagaactga

SEQ ID NO: 1916 - protein, 204 aa, Unknown
  Obtained from environmental sample
  DOMAIN (2)...(202): Protein of unknown function (DUF1460)
  misc_feature (1)..(204): Xaa is any amino acid
MGPMGEGRSIYPSYKPRVNFSEMDCLTYIEHVLALAYSKDYDDFFNKLQKIRYKNGVIDYNRRNHFLIADWLLYNQLKVESEDLKIGNFLLFEKEINKKKFFNDPNMVNPKVSIPFLPKEKAIIYADTVNFARDTIFGIAILSDLPGLDAAHTGFAVGSSKKNGLMFRHASQLKGKVIEQPLSEFLKTTKIKTPGISFFIFEEN

SEQ ID NO: 1917 - DNA, 360 bp, Unknown
  Obtained from environmental sample
  misc_feature (1)..(360): n is a, c, g, or t
atgctttttacgcagaagaagctgttggatcgcgagcttgttttagccgacgtgtttgaaagggaaaatatcatgagtaccagcatgggatacggaatagttattccccacgcgaaaaccgatggtgttaaagatacggttgtggcggtgggtattaaaaaagagggaattattcttgatccgtcggacagccaaccgtcccgtctttttatactggaagtttcccccagaaaagacggtcctcatttgcaattcctttcggcgttaggtgccattttaagggacgagaatattcgtcaggctctgattaatgctaaatccgtggaagaagcggctaatttattgcataataagagataa

SEQ ID NO: 1918 - protein, 119 aa, Unknown
  Obtained from environmental sample
  DOMAIN (1)...(118): Phosphoenolpyruvate-dependent sugar phosphotransferase system, EIIA 2
  misc_feature (1)..(119): Xaa is any amino acid
MLFTQKKLLDRELVLADVFERENIMSTSMGYGIVIPHAKTDGVKDTVVAVGIKKEGIILDPSDSQPSRLFILEVSPRKDGPHLQFLSALGAILRDENIRQALINAKSVEEAANLLHNKR

SEQ ID NO: 1919 - DNA, 930 bp, Unknown
  Obtained from environmental sample
  misc_feature (1)..(930): n is a, c, g, or t
ttgatgaattcaaactgtaaaaattacgaaaaggcggtttcaagtctttatctcaaaaaaaacctggatatataccttaccggctcaaatgcctatattctctcaggcgaacttgctaccaaactcactgcccgttacattgagattgatttacttccgctttcttttgaggaatacagtgaagcggtgaaaatccccgacaagcgggaacgttttaatcaatatttgaacagaggcgcattcccttatgcaacccgttttacggacaattctttggcgcacagccaatatttagaaggggtttataacactgttctggttaaagatgttatgacaaataaaaacttaaaagatataacccttattaaatcaataacaagttttttggccgacaatgtgggaagtcctgtttcagcaaataaaatcgccaatacgttaagctccggcggccgccccacaagttcagttacggttgatacttatttggaagcgctttgtgacgcataccttttctataaagtcaatcggtatgacattaaaaggaagatgcaccttaaatccgaaagcaaatattacatttgcgacacgggcttacgaaatatgatattgggaacaacaaataaagatatcggacaccagatagaaaatatcgtttttttggaactattaaggcgcgggtacacaattaatatcggtaaatcaggacggggtacggaggttgattttgtcgctgtccgtaacaataaacctgagtattatcaggtttccgcgtcggtgttagacgaaaacacattgaaacgggaacttacgccgtttaagcaaattaatgacaactaccccaaatgccttatcacaatggacgattttacaggcgataatgaaagcatacagcangtccatttgattgactggctgtataagtcaaattaa

SEQ ID NO: 1920 - protein, 309 aa, Unknown
  Obtained from environmental sample
  misc_feature (1)..(309): Xaa is any amino acid
MMNSNCKNYEKAVSSLYLKKNLDIYLTGSNAYILSGELATKLTARYIEIDLLPLSFEEYSEAVKIPDKRERFNQYLNRGAFPYATRFTDNSLAHSQYLEGVYNTVLVKDVMTNKNLKDITLIKSITSFLADNVGSPVSANKIANTLSSGGRPTSSVTVDTYLEALCDAYLFYKVNRYDIKRKMHLKSESKYYICDTGLRNMILGTTNKDIGHQIENIVFLELLRRGYTINIGKSGRGTEVDFVAVRNNKPEYYQVSASVLDENTLKRELTPFKQINDNYPKCLITMDDFTGDNESIQXVHLIDWLYKSN

SEQ ID NO: 1921 - DNA, 873 bp, Unknown
  Obtained from environmental sample
  misc_feature (1)..(873): n is a, c, g, or t
gtgcttctcgacaagcagatgcccgtaaagagcggcaacgtcacgttggacgagataaaggccatccggcccaacctaccggtcgtcatgctgaccggctatcagcacagcgccgaaatcgcgatgggaaaacgctacgaggcctacctcactaagcccatcgatcccggcaaactgctcattgcttgtcaacaaatattggacgccgggcatggcgcctcccgcaagctcgccgacaggtatttgcgcggttatacggagatgtcggcgcgcgccggcggcgttctcggcgtctccgattggatgggcctctatcactcgcttgtcaaatgggatattgagctggaggggattacaagcgacgcggtgagccggatgcacaccgggctgaagtccgattgcggcaaaaagttttgcgactacgccgccgagaattacacggactgggtgcgcggcggggacgaccatccgccgatgcacgtcgatgtattgaagagggtcgtggagccggaactatcgcttgggcgcagcgtgcttatgattgtgctcaatggtatgcggcttgatcaatttctctgtatggagccggagctcaggagaaatttctcggtgagcgggatgaagctcatgtcgctgcttcccaccttgtcaaatttttgcgtcacggcgctcgccgccggttactatccggacgaggcggctgaggcggagcccgggatatttgaggcggcggcggccgatcccatcgtgatgaagcgtctgatgcgccgcgggctggagcgtgccggcgctgcgcgngtgaagacgctttacgcgtcggccgacgggtcgaaacggtcggcggcacgtgcggntcggcgatangagcgatga

SEQ ID NO: 1922 - protein, 290 aa, Unknown
  Obtained from environmental sample
  misc_feature (1)..(290): Xaa is any amino acid
MLLDKQMPVKSGNVTLDEIKAIRPNLPVVMLTGYQHSAEIAMGKRYEAYLTKPIDPGKLLIACQQILDAGHGASRKLADRYLRGYTEMSARAGGVLGVSDWMGLYHSLVKWDIELEGITSDAVSRMHTGLKSDCGKKFCDYAAENYTDWVRGGDDHPPMHVDVLKRVVEPELSLGRSVLMIVLNGMRLDQFLCMEPELRRNFSVSGMKLMSLLPTLSNFCVTALAAGYYPDEAAEAEPGIFEAAAADPIVMKRLMRRGLERAGAARVKTLYASADGSKRSAARAXRRXER

SEQ ID NO: 1923 - DNA, 738 bp, Unknown
  Obtained from environmental sample
  misc_feature (1)..(738): n is a, c, g, or t
gtgttacggacgcggcagattgattgtgattaccttgcgaccggccattatgcccgtgccgaacaggattctgtttccggccgctttcttctgcgaaaagccgttgaccccaaaaaagatcaaagttatgtgctgtactgccttacccagcagcagcttgaacgcgcccgcttccctttgggagaattgtcaaaacagcaggtgcggaaaatcgccgaagaaaaaaaattgaccaccagcgcgaaaggtgaaagccaggacatctgttttgttcccgacggcgattacggcaattttattgaagcgtataccggcaaaacctggccgccgggggacatcattgaccttgaaggaaaaatcataggcaggcatcggggcatcatccgttatacgataggccaaaggcgcggtctgggtgtcgccgccaatatccccgtctatgtcgccggaaaatcagttgcacataacatcgttaccttggggccggattccagcctttaccaaaaaagcctgagcgccaaaaacatcaatcttatcgcctgcgcccgcattgaaaagccgttgcgcgtaacggtaaaaacccgctaccttcagacagaacaggccgccaccgccgaacaaaccggcgaggatgagttacacatagaatttgattctccgcagcgggcgattactcccggacaggcggcagtactgtatgatggcgacattgtggtgggcggcggaacgatagtgtaa

SEQ ID NO: 1924 - protein, 245 aa, Unknown
  Obtained from environmental sample
  DOMAIN (1)...(244): tRNA methyl transferase
  misc_feature (1)..(245): Xaa is any amino acid
MLRTRQIDCDYLATGHYARAEQDSVSGRFLLRKAVDPKKDQSYVLYCLTQQQLERARFPLGELSKQQVRKIAEEKKLTTSAKGESQDICFVPDGDYGNFIEAYTGKTWPPGDIIDLEGKIIGRHRGIIRYTIGQRRGLGVAANIPVYVAGKSVAHNIVTLGPDSSLYQKSLSAKNINLIACARIEKPLRVTVKTRYLQTEQAATAEQTGEDELHIEFDSPQRAITPGQAAVLYDGDIVVGGGTIV

SEQ ID NO: 1925 - DNA, 942 bp, Unknown
  Obtained from environmental sample
  misc_feature (1)..(942): n is a, c, g, or t
ttgcaaaaagcgaacgggttgtgggacttttccgatttaatttgcggcgggctgaggctgttctccaaataccccgatatcgccgacgattgggcaaaacgctttgatgtcgttcttgtcgatgagttccaagacacgaacccgatgcaaatcgatatgctcgacgtgcttctgcgcttcggggcgagcctatacgccgtgggcgacgacgatcaggcgatatacggcttcaggggcgcggacataaggcccatacggaacttcacgacgcgcttcaaagacgcggctatcgtaaaattgcagatcaattaccgcagtataaacgcaatactggactgcgccaacagattgtgggcggataaaccggcggagtataggaaggtgttggtaagcgggttaaatccgcagcctacgggctgccgcaaacctaagacgatgcgtttcggggcgcaggcgcaagcgcttgagtggatattgggaagggcgcggttcattgagcgccaagagaagatacctatcgggtctatggcgatattgtttcgcataaacgacacgctgaccgcggcggcgggtcattacaagagcatgggattgacggatgataaaatcccgcaactgctgaccgtccacgcgagcaagggtttggagtatccggcggtcttcttgtgcgacttggaggagggcgtcttcccgcactatagaatgcggaaggagaggcgcatacatacctggtttgagttgctgaaggcgctggtcaagccggcgccgaaaccggatgccgacgaggcgcgggattgcgatattgaggaggaactgcggctgttctacgtaggtgtgacgcgggcgcagcggtacctgtttctcgtgacgacgtctaagaaaccgttttacgggcgggagatgaagttcaggccgtcgcggtttttgcggttggttaggtag

SEQ ID NO: 1926 - protein, 313 aa, Unknown
  Obtained from environmental sample
  misc_feature (1)..(313): Xaa is any amino acid
MQKANGLWDFSDLICGGLRLFSKYPDIADDWAKRFDVVLVDEFQDTNPMQIDMLDVLLRFGASLYAVGDDDQAIYGFRGADIRPIRNFTTRFKDAAIVKLQINYRSINAILDCANRLWADKPAEYRKVLVSGLNPQPTGCRKPKTMRFGAQAQALEWILGRARFIERQEKIPIGSMAILFRINDTLTAAAGHYKSMGLTDDKIPQLLTVHASKGLEYPAVFLCDLEEGVFPHYRMRKERRIHTWFELLKALVKPAPKPDADEARDCDIEEELRLFYVGVTRAQRYLFLVTTSKKPFYGREMKFRPSRFLRLVR

SEQ ID NO: 1927 - DNA, 822 bp, Unknown
  Obtained from environmental sample
  misc_feature (1)..(822): n is a, c, g, or t
atgttacgttacggaatcccctcctatcgcttaccgcgtgaaacccttgatgaagaaataaatgtcattaaatcactcggcgtggaaattatttataacaaggaattcggcaaagatattaccgtaagtagtttacgcgccgcagatttcaacgcgattcttttggcgattggttcgcaaaaaggatacccgttaggtgttgacggtgagaaagactgcccccatgtattaatcggcgttgatttcctaggctctgttacaaggggcaaacagcccgactttaatggcaaaaaaatagccgttgtcggcggtggcaataccgcgatggactgcgtaagaaccgccatccgtcttggcgctgaaaatgtcaaacttatttaccgcagaacaattgccgaaatgcccgccgatgaagcggaaattgaagaagcccaattggaaggcattgaatttttagtgttgaataatccgttaagcgtttcagagagcggcggtaaggtgacaatgaaacttaccaaaatggaacttggcgaaagcgacgcgtcgggcagaagatcaccgcgccctgtcgccggatcggaatacaatatcgaagttgattatgtaatttccgccatcgggcaaactcaggatttatcttttataaatagcgaatgtaatgtttccactaaccgcgattgtctggttattgacaaaaacacaagcatgaccggcattggcggcgtgtttgccgcangagacggagtaacgggacccaagaccgccatcatggcgatagccggcggaaaaaaagcgctatggccatgtcccagtatatgttag

SEQ ID NO: 1928 - protein, 273 aa, Unknown
  Obtained from environmental sample
  DOMAIN (98)...(207): Pyridine nucleotide-disulphide oxidoreductase
  misc_feature (1)..(273): Xaa is any amino acid
MLRYGIPSYRLPRETLDEEINVIKSLGVEIIYNKEFGKDITVSSLRAADFNAILLAIGSQKGYPLGVDGEKDCPHVLIGVDFLGSVTRGKQPDFNGKKIAVVGGGNTAMDCVRTAIRLGAENVKLIYRRTIAEMPADEAEIEEAQLEGIEFLVLNNPLSVSESGGKVTMKLTKMELGESDASGRRSPRPVAGSEYNIEVDYVISAIGQTQDLSFINSECNVSTNRDCLVIDKNTSMTGIGGVFAAXDGVTGPKTAIMAIAGGKKALWPCPSIC

SEQ ID NO: 1929 - DNA, 426 bp, Unknown
  Obtained from environmental sample
  misc_feature (1)..(426): n is a, c, g, or t
atggcgattaaccgtgccgcgatgaaggcgctggatacgatcaaaacgcagggtaaaataattctgttattcccggcaggaacccgttaccgcccctgggatccgtcgaccaaaaaaggagtacgcgagatcgattcatatatccatactttcgactatatgtgctgcattgcgcttaacggcctgttactccatgtacagcaaaccgatatgatgaacgatgtggtgtccagggatattgtacgggtcaccgccggcccggtttattcatgcgccgaattccgcgggaaggcgcgtaaggaagctgagtccgccggtgttgaagacaaaaaacaggccgttgttgacgcgatcatggcggaattggaacgtctgcataatgaagccgaagataaaaggagaaaactgctggaggtgaaaatatga

SEQ ID NO: 1930 - protein, 141 aa, Unknown
  Obtained from environmental sample
  misc_feature (1)..(141): Xaa is any amino acid
MAINRAAMKALDTIKTQGKIILLFPAGTRYRPWDPSTKKGVREIDSYIHTFDYMCCIALNGLLLHVQQTDMMNDVVSRDIVRVTAGPVYSCAEFRGKARKEAESAGVEDKKQAVVDAIMAELERLHNEAEDKRRKLLEVKI

SEQ ID NO: 1931 - DNA, 849 bp, Unknown
  Obtained from environmental sample
  misc_feature (1)..(849): n is a, c, g, or t
atgatcgccatgatcatgggcgcgggtttgaatatagtccttgacccgattttcatttttattttcaaatggggcgtccagggcgcggcctgggcgactatcatctcgcaggccgcttcaatgatatggatactgagttttaccatgggcaggaaggcggttattaaacttaagccgcggactataaagccctcgcttgccatcgtctttcagatcatgtctttcggctccgccccgtttttgcttcagtttgtaatgtccggcgtccagcttttgtacaatacaagcatgggctggtacggcgcagccgggcttggaatagccaacggcggcgacatagccctttccggcatgaacataggcggcgccattatgatgctgatactcatgccgatattcgggatcaaccagggggcccagcccatactggggtataattacggggcaaaacaattcagacgcgtgctgcgcgcctaccttggcgctgtagccgccggtactttgatatgtacggtagggtttgccgtgggccagctgttctccgggcagttagtcagggtattcgcgccggagggaagcgccaagctgatggaatttgccccgcgcgccatacggacaatgatgatccttttgcccaccgcgggctttcagataatttcaacgaatctttttgtggttacaggccgcccaaaaatttcgattttcctctccatgctgcgccagtgccttgccctcattccctgtatgctgatattcggccgtatttggggtttatggggagtggtcgccgccgcgcctgtggccgatggtttttcgttattcgtcaccggcacaatgatatttttttga

SEQ ID NO: 1932 - protein, 282 aa, Unknown
  Obtained from environmental sample
  DOMAIN (79)...(250): MatE
  misc_feature (1)..(282): Xaa is any amino acid
MIAMIMGAGLNIVLDPIFIFIFKWGVQGAAWATIISQAASMIWILSFTMGRKAVIKLKPRTIKPSLAIVFQIMSFGSAPFLLQFVMSGVQLLYNTSMGWYGAAGLGIANGGDIALSGMNIGGAIMMLILMPIFGINQGAQPILGYNYGAKQFRRVLRAYLGAVAAGTLICTVGFAVGQLFSGQLVRVFAPEGSAKLMEFAPRAIRTMMILLPTAGFQIISTNLFVVTGRPKISIFLSMLRQCLALIPCMLIFGRIWGLWGVVAAAPVADGFSLFVTGTMIFF

SEQ ID NO: 1933 - DNA, 957 bp, Unknown
  Obtained from environmental sample
  misc_feature (1)..(957): n is a, c, g, or t
atggttgaccttgccgctgcggaagcaagggctatgggcagcgattatctgggtacggaacatctcctgtttgccgcaatgaaggaacaggattccagcgtccagttatttttaagcaaaaaagcaattgatgtggatttactgagggttgttgtccagactacctttaccccgccgcaggccgcgagggacgagggtgattatatatcagctaacggctgcccgtcgtattttattcatcgtgaccgccagtcaaagtaccaggggcagcacacggacagggcaaaagtcaggccggcgtcttaccccgtgcttacccctacactggataatttctcccgcgatctgaccgcgtttgcgaaatccggcaaactcgatccggtaatcggcagggaaaaagagatgaaccgtattgtgaggatactcgccaggcgggcaaaaaacaaccccatcctggtgggggagccgggtgtcggcaagactgccattgtcgaaggccttgcccagttgtttgtttccggaaacgcgccggaaactctttcgggcaaacgcatactttcccttgacatgggttcaatagtcgccggaaccaagtaccggggcgaatttgaagaaaggataaaaaaaatcaccagggaaattacacaggccggaaacattattctctttattgatgagatacataccataatcggggcgggaggggctgaaggaacaatcgacgcttccaatatgcttaaacccggcctttcccgaggcgacatacagtgcataggggcgactacgcttgccgaataccgcaagcactttgaaaaagaccccgcccttgaacgccggttccagactattcttgtcgaggaaaccagcgtagaagagacccctgcaatactccacggcatccggaaaaatacgaagaccaccctaaagtatcatacaccgacgcagctgtcaagatga

SEQ ID NO: 1934 - protein, 318 aa, Unknown
  Obtained from environmental sample
  DOMAIN (149)...(288): ATPase family associated with various cellular activities (AAA)
  misc_feature (1)..(318): Xaa is any amino acid
MVDLAAAEARAMGSDYLGTEHLLFAAMKEQDSSVQLFLSKKAIDVDLLRVVVQTTFTPPQAARDEGDYISANGCPSYFIHRDRQSKYQGQHTDRAKVRPASYPVLTPTLDNFSRDLTAFAKSGKLDPVIGREKEMNRIVRILARRAKNNPILVGEPGVGKTAIVEGLAQLFVSGNAPETLSGKRILSLDMGSIVAGTKYRGEFEERIKKITREITQAGNIILFIDEIHTIIGAGGAEGTIDASNMLKPGLSRGDIQCIGATTLAEYRKHFEKDPALERRFQTILVEETSVEETPAILHGIRKNTKTTLKYHTPTQLSR

SEQ ID NO: 1935 - DNA, 618 bp, Unknown
  Obtained from environmental sample
  misc_feature (1)..(618): n is a, c, g, or t
gtggtcttcgtatttttccggatgccgtggagtattgcaggggtctcttctacgctggtttcctcgacaagaatagtctggaaccggcgttcaagggcggggtctttttcaaagtgcttgcggtattcggcaagcgtagtcgcccctatgcactgtatgtcgcctcgggaaaggccgggtttaagcatattggaagcgtcgattgttccttcagcccctcccgccccgattatggtatgtatctcatcaataaagagaataatgtttccggcctgtgtaatttccctggtgattttttttatcctttcttcaaattcgccccggtacttggttccggcgactattgaacccatgtcaagggaaagtatgcgtttgcccgaaagagtttccggcgcgtttccggaaacaaacaactgggcaaggccttcgacaatggcagtcttgccgacacccggctcccccaccaggatggggttgttttttgcccgcctggcgagtatcctcacaatacggttcatctctttttccctgccgattaccggatcgagtttgccggatttcgcaaacgcggtcagatcgcgggagaaattatccagtgtaggggtaagcacggggtaa

SEQ ID NO: 1936 - protein, 205 aa, Unknown
  Obtained from environmental sample
  misc_feature (1)..(205): Xaa is any amino acid
MVFVFFRMPWSIAGVSSTLVSSTRIVWNRRSRAGSFSKCLRYSASVVAPMHCMSPRERPGLSILEASIVPSAPPAPIMVCISSIKRIMFPACVISLVIFFILSSNSPRYLVPATIEPMSRESMRLPERVSGAFPETNNWARPSTMAVLPTPGSPTRMGLFFARLASILTIRFISFSLPITGSSLPDFANAVRSREKLSSVGVSTG

SEQ ID NO: 1937 - DNA, 819 bp, Unknown
  Obtained from environmental sample
  misc_feature (1)..(819): n is a, c, g, or t
ttgacggaaatccttccatacaaccgtcttttcaacagccccatttccgagggagccattgtaggcgcgggcgtgggttacgcgctgtccggcggcagagcggttgtggaacttatgtactgcgactttatgggccgcgccggggatgaaattttcaatcaggcgtcaaagtggcagtcaatgtcagcgggtcttttaaaaatgccgctcgtagtgcgggtttcggtcggcaataaatacggcgcgcagcacagccaggactggagcgcaatgaccgcccacattcccggcctgaagtcctattttcccgccacgccctacgacgcgaaaggaatgttaaatctggcgctgcgcggaaccgatccggtgatcttctttgaaagccagcttctctacgacataggcgaacaatttgaaaaaggcggcgtgcccgaaggctattacgaagttacggaaggagagccggtcgtccgcaaacagggcaacgacctgaccatcgccaccatcggggcaaccctctacatggccatgaacgcggcaaaaaaacttgaaagccaattcggcctttcaacggaagtgattgatctccgtttcatcaacccgctgaattacgaaaaaataattgagtcggtaaagaaaaccggaaagctcctgttggccagcgacgccgccgagagggggtcattcctccatacagttgcgagtaacgttcagactatagcctttgattatctggacgcgcctgttgctgtaatgggaagccgcaactggatcaccccggcggctgaaatggaacatctgtacttccccccaggttga

SEQ ID NO: 1938 - protein, 272 aa, Unknown
  Obtained from environmental sample
  DOMAIN (1)...(134): Transketolase, pyridine binding domain
  misc_feature (1)..(272): Xaa is any amino acid
MTEILPYNRLFNSPISEGAIVGAGVGYALSGGRAVVELMYCDFMGRAGDEIFNQASKWQSMSAGLLKMPLVVRVSVGNKYGAQHSQDWSAMTAHIPGLKSYFPATPYDAKGMLNLALRGTDPVIFFESQLLYDIGEQFEKGGVPEGYYEVTEGEPVVRKQGNDLTIATIGATLYMAMNAAKKLESQFGLSTEVIDLRFINPLNYEKIIESVKKTGKLLLASDAAERGSFLHTVASNVQTIAFDYLDAPVAVMGSRNWITPAAEMEHLYFPPG

SEQ ID NO: 1939 - DNA, 837 bp, Unknown
  Obtained from environmental sample
  misc_feature (1)..(837): n is a, c, g, or t
gtggaaaatatgtttgtcaaagcgtctgtatccgacgagcttgaagaaaaagccgtgaccgaaaaaatcaaagaaatagcagagtacataaaagaagatcgccgttttttaatgagggtcttaaaaaacatagagccggcggaaggaaagaattatcttgcaacacattcggtgcgtacgaccatactttcaatgataatcggcacataccttaaactgccaacataccgtttgatagagcttggagtcgccgcccttatgcatgaagcgggaatgttaaaattaccgtcaaatatttatttaagccagagggctcttaatcccgtagagcagaaagcaatcgccacgcaccctattctgggttacactatgcttaaatcttttaactttccgcttcccgtttgtttagccgcgcttgaacatcatgaacgcggaaacggaaatggttatccacgaagactgcccaacgaaaaaataagtctgtattcaaaaataatagccgttacgtgctcatacgaagcgttaagttccaagcgtccgcacaaagaagcaaaagacggttacacgggaatgttagagcttttaaagaatgaaggaaaacaatacgacgatacagtcgtaaaagcgcttgttctgtgtctgtcgatttatccaatcggtctttatgtgcttttatcaaacggaaagaaagggcaggttgtggacgtaaatcccgaaaatccccgtttcccgattgtacaaatttttgacgagttcacacccgacgggaaaataaaaacagtacaaaccgctcccgatgtacttacgattgtacgtccgcttaacgcaacgagatag

SEQ ID NO: 1940 - protein, 278 aa, Unknown
  Obtained from environmental sample
  DOMAIN (53)...(175): HD domain
  misc_feature (1)..(278): Xaa is any amino acid
MENMFVKASVSDELEEKAVTEKIKEIAEYIKEDRRFLMRVLKNIEPAEGKNYLATHSVRTTILSMIIGTYLKLPTYRLIELGVAALMHEAGMLKLPSNIYLSQRALNPVEQKAIATHPILGYTMLKSFNFPLPVCLAALEHHERGNGNGYPRRLPNEKISLYSKIIAVTCSYEALSSKRPHKEAKDGYTGMLELLKNEGKQYDDTVVKALVLCLSIYPIGLYVLLSNGKKGQVVDVNPENPRFPIVQIFDEFTPDGKIKTVQTAPDVLTIVRPLNATR

SEQ ID NO: 1941 - DNA, 417 bp, Unknown
  Obtained from environmental sample
  misc_feature (1)..(417): n is a, c, g, or t
atgcccccgtcaaacgaatttgccgaaagaatcaggagacagatcgtggagagcggtcttgacacgcggtataagctgggcgcctacgagtttgtcattgggggcattgatttctgcgtcgctaagattggggagaagcggcacgttaccgggccggagctgtccaaggcgctgctgatgctggctcacaggcagttcgggccgatggcgaggagcgttttgaggcactggggggtgagggccacaagcgatctcgggagtatcgtttacaatatgataagggtggggattttggataagcgtccggaggattcgctggatgatttcaacgacgtgattgacattgacgcgttgtttggggcgatagagtattttcaagttgacagggaatatataagaaggtttgagggggtttga

SEQ ID NO: 1942 - protein, 138 aa, Unknown
  Obtained from environmental sample
  misc_feature (1)..(138): Xaa is any amino acid
MPPSNEFAERIRRQIVESGLDTRYKLGAYEFVIGGIDFCVAKIGEKRHVTGPELSKALLMLAHRQFGPMARSVLRHWGVRATSDLGSIVYNMIRVGILDKRPEDSLDDFNDVIDIDALFGAIEYFQVDREYIRRFEGV

SEQ ID NO: 1943 - DNA, 444 bp, Unknown
  Obtained from environmental sample
  misc_feature (1)..(444): n is a, c, g, or t
atgaaaatacacgaaatagctgaatggtttttaattgcggacgaagacgctgtttcggccaatatacttaataaagagaataatttgggtaattcatactatcattgctcacaggctgttgaaaaatatttaaaaagttatttagttgccaatgatataaaaatcaataaagatcataatatatcagaaattttaatgagatgtattaatattgacaattcttttaccgaaatattgtctgaatgtaataaaatgacattatccattaaaaacctgcgttatccgggaagaataattcctacaaaggaaaatatagaagacgcttttcttttgatagataaaataaaaaaattaagaccgatacatgagttatataataatattatcgacaaatacggagataattggaaggatgttttatataataatattgcaaatatttaa

SEQ ID NO: 1944 - protein, 147 aa, Unknown
  Obtained from environmental sample
  DOMAIN (6)...(118): HEPN domain
  misc_feature (1)..(147): Xaa is any amino acid
MKIHEIAEWFLIADEDAVSANILNKENNLGNSYYHCSQAVEKYLKSYLVANDIKINKDHNISEILMRCINIDNSFTEILSECNKMTLSIKNLRYPGRIIPTKENIEDAFLLIDKIKKLRPIHELYNNIIDKYGDNWKDVLYNNIANI

SEQ ID NO: 1945 - DNA, 399 bp, Unknown
  Obtained from environmental sample
  misc_feature (1)..(399): n is a, c, g, or t
ttgtttaacaaagtgccccctgccaaggcagagaaaagcgattggcgcccctctgtaaccggtacgcaaacaacgaaggcttattttcttgagattaagcttcccggccttattgaagaaaactttgaagtccaaattgaagaccgcattctgactattcaaaccatacctgacggggttagagacggaaccaaaaaagggagggtaatgtcattttcaaccggcagcaagaaaaacgccaatcccataaaaaacaggattctgcctttcaggaaaatttacaggctgccaaaagacgcggattcccgcgggatttcagcgttgttctgcgatggcgttctttcattggagattaacaagaaattgaatgtatcccagattacagggcatatgctataa

SEQ ID NO: 1946 - protein, 132 aa, Unknown
  Obtained from environmental sample
  DOMAIN (20)...(128): Hsp20/alpha crystallin family
  misc_feature (1)..(132): Xaa is any amino acid
MFNKVPPAKAEKSDWRPSVTGTQTTKAYFLEIKLPGLIEENFEVQIEDRILTIQTIPDGVRDGTKKGRVMSFSTGSKKNANPIKNRILPFRKIYRLPKDADSRGISALFCDGVLSLEINKKLNVSQITGHML

SEQ ID NO: 1947 - DNA, 777 bp, Unknown
  Obtained from environmental sample
  misc_feature (1)..(777): n is a, c, g, or t
atgaaagataagaacataaatgaaatcttaacaactcctgaaaaaaatcatctgcaagatgaatataatcagtattctcaaatacgccattcaattataaatgatatgaaaatacaggtagacggcatccttacttctttggactcccatcctgtcgtaagcggcaggattaaaaacttttccagtttcttttctaaatatatacgtctcttaaaaaacggcgaaaaaaaacctgtaattacagaccttatgggcgtcagggttatctgcccttttatcgaggatttacaagccgctgaagaattatttaaagacaattttgatgtaattgaacgtgaaataaagggacattattcatttcaggagttctgttatgaatcaactcaccttttaatcaagataccacaaaccttgattgataaatacggcaatccgggtacagacataattgagatacaaatacgtaccattttgcaggatgcttgggctgaagttgaacatgagcttgtttacaaagccgaattcagtccttttgacgaacctatgaaaagaaaactcgccgcggtaaacgctagcctttctttggcggacatgatttttcaggaaatacgcagttatcagcgaaaatacagcanagaaatggacaaaaggcggcaaagtttcttccaaaagatagaagaatcgacagacaatcttttgtttgaaggagaaaatgtaaaatccgcctctcccgncgctgaaaataaaaaccgccaaaattacgacggatttacatga

SEQ ID NO: 1948 - protein, 258 aa, Unknown
  Obtained from environmental sample
  DOMAIN (55)...(174): Region found in RelA / SpoT proteins
  misc_feature (1)..(258): Xaa is any amino acid
MKDKNINEILTTPEKNHLQDEYNQYSQIRHSIINDMKIQVDGILTSLDSHPVVSGRIKNFSSFFSKYIRLLKNGEKKPVITDLMGVRVICPFIEDLQAAEELFKDNFDVIEREIKGHYSFQEFCYESTHLLIKIPQTLIDKYGNPGTDIIEIQIRTILQDAWAEVEHELVYKAEFSPFDEPMKRKLAAVNASLSLADMIFQEIRSYQRKYSXEMDKRRQSFFQKIEESTDNLLFEGENVKSASPXAENKNRQNYDGFT

SEQ ID NO: 1949 - DNA, 591 bp, Unknown
  Obtained from environmental sample
  misc_feature (1)..(591): n is a, c, g, or t
ttgggagtgcgcggaatagcggagttaattacagtacccgggtttcaaaatgtggattttgccgacgtggaaacaattatgaaaggaaaaggacaggcccttctgggaattggttccggaaaaggcgaaaaccgcgctctggacgccgtagccaacgccattgacaatcccctccttgaagataccaatatagacggagctacaaacattcttgtaaatattaaagctccaaacaatcttaaaatggtggaaattcaaaacatacttaaaaccattaaagacaagtgcgatcaggacgttcatattattcacggtattcataaggacaatacgcttaacgacagtattcaaattacggtaattgccacgggttttgatggcgcccgcagtaatgagaataaaacaccggccgttaaaaaaacgatagaaaaagacttatttgatatctcaaaatacgctcaaaaacaagaacataaacaaaaagaatatttaccgtttttacccgcaaaagattttcaaactgatttggatgttccgaccgcgtatagaaatcaaagtttaaacaaaggggataacattaattttggataa

SEQ ID NO: 1950 - protein, 196 aa, Unknown
  Obtained from environmental sample
  DOMAIN (17)...(144): Tubulin/FtsZ family, C-terminal domain
  misc_feature (1)..(196): Xaa is any amino acid
MGVRGIAELITVPGFQNVDFADVETIMKGKGQALLGIGSGKGENRALDAVANAIDNPLLEDTNIDGATNILVNIKAPNNLKMVEIQNILKTIKDKCDQDVHIIHGIHKDNTLNDSIQITVIATGFDGARSNENKTPAVKKTIEKDLFDISKYAQKQEHKQKEYLPFLPAKDFQTDLDVPTAYRNQSLNKGDNINFG

SEQ ID NO: 1951 - DNA, 321 bp, Unknown
  Obtained from environmental sample
  misc_feature (1)..(321): n is a, c, g, or t
atgggaaatcatgtccatttcctaataaaaccagggcctggagcatcgctttcaaaaataatgcaatggcttttaggagtttttgcccaattgtggaataaaaaacacggtttatctggtcatttatggggggacaggtttttttctcgaataatttcaggaattttggattttttaagggtattttcatacattgaccaaaatcctgttgccgcaggtttagcagatcgttccgagcaatgggagtacggcggggcctggcatcaaaaaaacaggattaacgatatcattgaattaattgattctgcggctcctgaatag

SEQ ID NO: 1952 - protein, 106 aa, Unknown
  Obtained from environmental sample
  DOMAIN (1)...(47): Protein of unknown function (DUF1568)
  misc_feature (1)..(106): Xaa is any amino acid
MGNHVHFLIKPGPGASLSKIMQWLLGVFAQLWNKKHGLSGHLWGDRFFSRIISGILDFLRVFSYIDQNPVAAGLADRSEQWEYGGAWHQKNRINDIIELIDSAAPE

SEQ ID NO: 1953 - DNA, 369 bp, Unknown
  Obtained from environmental sample
  misc_feature (1)..(369): n is a, c, g, or t
gtgtttttccataagaaccctccaaataaagtgcaatcagctgcttttcagaaagccggagagggacagaccttttctggtattggtactataagagtttctactaccgatgcccagccgggaatggtgattatttttgtttcatttatttactacccggatgacgtggctttttctgaagaattggctctccgcgtaaaggatttcagacaaataattgttgactattttagtctttcttcagtatctgagcttcgtgagttgcacgaagacgacataaaatcagaattattgcttcgtttcaattcaattctgcggcttggacaaattgagacaatatatttcggtgattttatgattattgggtaa

SEQ ID NO: 1954 - protein, 122 aa, Unknown
  Obtained from environmental sample
  misc_feature (1)..(122): Xaa is any amino acid
MFFHKNPPNKVQSAAFQKAGEGQTFSGIGTIRVSTTDAQPGMVIIFVSFIYYPDDVAFSEELALRVKDFRQIIVDYFSLSSVSELRELHEDDIKSELLLRFNSILRLGQIETIYFGDFMIIG

SEQ ID NO: 1955 - DNA, 699 bp, Unknown
  Obtained from environmental sample
  misc_feature (1)..(699): n is a, c, g, or t
gtgagcgtttggaaggacaagaccttcatatgctttcaactccacttatttgcgttgaaaatgccatttctctggggaggtctgtcccctttagccgctatggacgaaaccagaaaaattgcagtcgaatgcaaactgccgattcatcttgacggtgccagaatctttaatgccgcgacggcgctggattgtaatgtgatggaaatagcatcaatggcagattcggtcatgttttgcctttccaagggactatgcgcacctgtgggttctctccttacaggtaagaaggaatttatcgaaaaagcacgatataaaagaaagataatggggggaggtatgcgtcaggctggtatcttagctgccgctggtatcattgctcttgagggacagacccaaagactaaaagaagaccacatcagagcaaaaaacattgctcgtggacttgctaaaatcccaggaattatcatcaaacccaaggaaacagaaataaacatggtgtttttcacttggccacaagcagaagatgaaaaaatagccgctaatataaccaaaactttcaaaaagcataaaattatcattaaccctccagaaaagggggtattcagatttgttacccattactggataggcgatgccgaagtggaagcaatactggccgcttcaagggatgcatttgatagcgagggacagacccgttga

SEQ ID NO: 1956 - protein, 232 aa, Unknown
  Obtained from environmental sample
  DOMAIN (1)...(171): Beta-eliminating lyase
  misc_feature (1)..(232): Xaa is any amino acid
MSVWKDKTFICFQLHLFALKMPFLWGGLSPLAAMDETRKIAVECKLPIHLDGARIFNAATALDCNVMEIASMADSVMFCLSKGLCAPVGSLLTGKKEFIEKARYKRKIMGGGMRQAGILAAAGIIALEGQTQRLKEDHIRAKNIARGLAKIPGIIIKPKETEINMVFFTWPQAEDEKIAANITKTFKKHKIIINPPEKGVFRFVTHYWIGDAEVEAILAASRDAFDSEGQTR

SEQ ID NO: 1957 - DNA, 462 bp, Unknown
  Obtained from environmental sample
  misc_feature (1)..(462): n is a, c, g, or t
atgttgagacaagtttttatttcgttgggaacaaatatagaacctcgcgaggaaaggctggctcgggctagggagttgctgagagctgaggagccgctgtgttggcaggagagcggaatttatgagaccgagccttggggggaaacttgccaggctaagttcttgaaccaggcggttgggtttcaatcggagagagccccgcaaaagctcttgaaactttgcaaaggtatagaagaaaaaatgggtaggcaaaaaagggataaatggaaggaaagggagatagatttggatctattgtattgcggttcttctataacaaatgatgaagacttaacgctcccacacccctacattgcacaaagggaatttgtccttaaccccctcttagatattgcgccgaatttcatagacccgcagagtgggaaatcagttagggaaatgctggagcaattacaccactaa

SEQ ID NO: 1958 - protein, 153 aa, Unknown
  Obtained from environmental sample
  DOMAIN (6)...(132): 7,8-dihydro-6-hydroxymethylpterin-pyrophosphokinase (HPPK)
  misc_feature (1)..(153): Xaa is any amino acid
MLRQVFISLGTNIEPREERLARARELLRAEEPLCWQESGIYETEPWGETCQAKFLNQAVGFQSERAPQKLLKLCKGIEEKMGRQKRDKWKEREIDLDLLYCGSSITNDEDLTLPHPYIAQREFVLNPLLDIAPNFIDPQSGKSVREMLEQLHH

SEQ ID NO: 1959 - DNA, 306 bp, Unknown
  Obtained from environmental sample
  misc_feature (1)..(306): n is a, c, g, or t
atgcaaataccttctgtttccgcaatgcaagccagttcgttgagactcgatatcagcgcgcacgatgtggctaacataaatacgcccggtttttcgcaaagccgcccggtgcagtcttcgctaaaacccggaacacagatatctgcaattcaaaaaatagcaccaccttcgccggagttctctgcaacggacttggcagaagagcgagttgagcaaatcaaaagcgaaaaagactttgccgcaaacgcagcggttatcaaaacccaagacaaaatgctcggcgaagtggtgaatttagtggtgtaa

SEQ ID NO: 1960 - protein, 101 aa, Unknown
  Obtained from environmental sample
  DOMAIN (61)...(99): Domain of unknown function (DUF1078)
  misc_feature (1)..(101): Xaa is any amino acid
MQIPSVSAMQASSLRLDISAHDVANINTPGFSQSRPVQSSLKPGTQISAIQKIAPPSPEFSATDLAEERVEQIKSEKDFAANAAVIKTQDKMLGEVVNLVV

SEQ ID NO: 1961 - DNA, 603 bp, Unknown
  Obtained from environmental sample
  misc_feature (1)..(603): n is a, c, g, or t
gtggaagaggaacctaacattgtgaaccgaatagacactgccattatttccgaagatttaaaaaaagcaaaactcgcttccccagacttcataattgcctttatgcactggggtactgaatacgataatatgcaaaaccaatggcaaaaagactttgctcaatttttggcaacaaatggcgttaatctaattgtcggtagccatccgcacgtagtgcagccatttgataaagtttacgtcccaagcacacgtgactctgtacccgttatgtattcccttggcaattttttttcaaatcagagaaatcgctatacagatggggggataatctttgaagtgaatttgcaaaaaggcagcagagctggcagaagaggcggggtaaattacaagacagatattgtaagctatggctatatgccgttttgggtttataggtatagcaaaaacggcggcaacgtattccgtttattgcctgagtgcaaaaaatatcaagctgcctgtaaggaatataaaatcaacccaacagataaagctgcgatggagttattttttgacgataccaaaaaacttttgcacaacttgcctattataaatccttactga

SEQ ID NO: 1962 - protein, 200 aa, Unknown
  Obtained from environmental sample
  misc_feature (1)..(200): Xaa is any amino acid
MEEEPNIVNRIDTAIISEDLKKAKLASPDFIIAFMHWGTEYDNMQNQWQKDFAQFLATNGVNLIVGSHPHVVQPFDKVYVPSTRDSVPVMYSLGNFFSNQRNRYTDGGIIFEVNLQKGSRAGRRGGVNYKTDIVSYGYMPFWVYRYSKNGGNVFRLLPECKKYQAACKEYKINPTDKAAMELFFDDTKKLLHNLPIINPY

SEQ ID NO: 1963 - DNA, 882 bp, Unknown
  Obtained from environmental sample
  misc_feature (1)..(882): n is a, c, g, or t
gtggggttttccctgcttattgcggcggtaatgttttttatcagaatatatcaggacgcttccgcggctattccgatattttctatgtatgcactcgcgttttaccgcatactcccctcaatttaccgtatgctgcaaaatctaggcgaaatttcttattttcataaaacgctcgacagcgtaagtgaaaatttacatcaacagcatgaaaatgaagaatcagcgccggtggattttaaccgctctatttcccttgataatatcagttttagttacttgaacggaacagaaataataaacggagtatctttttcaattaaaaaaggagaaaaaatcgccataaccggcgaaagcggcggcggtaaatcaacgttaattgacattattatcggcatacataagcctgtttccggaaaaataattattgatgatactgctttaaccgataaaaatatccgctcatggcggatgaaaatcggatacattccgcaaagcatttatctgtttgacggaactgtagcggaaaatgtctcttttggctcaataccggatgaaaacaaaataataaaagcgcttcaaagggctaatatatgggatttcctttcacaaaaagaaggcataaaaacctgcgtaggagacgacggcatccagctgtcgggaggtcagcagcagcgtattggaatcgcgcgcgccttgtacgatgacccggaaattctggtccttgacgaagccacatcctcgcttgacaacgagaccgaaaaaaaaatcatggatgaaatatataatgtaagtgaaaataaaaccttaattgttatagcgcacagactaagcactgtagaacactgcgacagaagaattcgtatgaaaaaggaaaaattataa

SEQ ID NO: 1964 - protein, 293 aa, Unknown
  Obtained from environmental sample
  SIGNAL (1)...(22)
  DOMAIN (109)...(291): ABC transporter
  misc_feature (1)..(293): Xaa is any amino acid
MGFSLLIAAVMFFIRIYQDASAAIPIFSMYALAFYRILPSIYRMLQNLGEISYFHKTLDSVSENLHQQHENEESAPVDFNRSISLDNISFSYLNGTEIINGVSFSIKKGEKIAITGESGGGKSTLIDIIIGIHKPVSGKIIIDDTALTDKNIRSWRMKIGYIPQSIYLFDGTVAENVSFGSIPDENKIIKALQRANIWDFLSQKEGIKTCVGDDGIQLSGGQQQRIGIARALYDDPEILVLDEATSSLDNETEKKIMDEIYNVSENKTLIVIAHRLSTVEHCDRRIRMKKEKL

SEQ ID NO: 1965 - DNA, 432 bp, Unknown
  Obtained from environmental sample
  misc_feature (1)..(432): n is a, c, g, or t
atgacagatcgccgagaacgccttcgcgctaccttccgcagtttcttcgtgttgaactccgtagtattcccgatacggtcgatctcagccttaagctgtttgacctcggcctgcagttccgtcctatccgagtccgtgttcgtatcgttggccgactgcaccgccagttcgcgtatcctctgtaagatggagtgcgtctcgcccagcgcgccttcagccgtctggatcagggatatggtgtccgaagagtttttggacgccatgttgaggccttttatctgggctctcattttttcggagatcgccaaccccgcggcgtcgtctccggcgcggttgattctgaagccgctggagagtttctccatcgatttcgatccgtcagactcggatatgcccatctggcggtgtgtgttcattgcggccacattgtga

SEQ ID NO: 1966 - protein, 143 aa, Unknown
  Obtained from environmental sample
  misc_feature (1)..(143): Xaa is any amino acid
MTDRRERLRATFRSFFVLNSVVFPIRSISALSCLTSACSSVLSESVFVSLADCTASSRILCKMECVSPSAPSAVWIRDMVSEEFLDAMLRPFIWALIFSEIANPAASSPARLILKPLESFSIDFDPSDSDMPIWRCVFIAATL

SEQ ID NO: 1967 - DNA, 696 bp, Unknown
  Obtained from environmental sample
  misc_feature (1)..(696): n is a, c, g, or t
atgacggacgctcactgtcatccctgggatcttctggattttgaaaaatgcgcggaagaagaacgccggaaaacgggaaccgcagccgccgccagcgcctggaacagggagcagttcgagtaccacgaaggcctcgcgaaaaaagccaaagaagacggtgcgccgcctttattttgctgttttgccctgcatccccagctttcagctgaggaaaattattctccgtccggaaacatcgaagttcttttttcgcttgcggcagaagccagactcgacgcggtgggagaaacaggctttgatttatacgataaaatgtttaaagccgctgaaagtatccaggatgaaatgttcgtcagccaccttgacgcggcgttacagtggaaattgccgatgattctacatgtaagaaaagcgatgcacaaaattttcccgtttgcgcgccaactaaaaaaattgccgtcagttgtttttcattcatggcccggaaccagattggaggctgaagccatactaaaaaaaggcataaacgcttatttttcttttgggacggcggtgttaaaaaaacacaaggagacaattgcttcggcaggcattcttccggcgaacaggatacttttggaaaccgacgctccgtaccagccgcttatgggaaaaaatattcccatggcgggaattgggtcagaatgctctgtatag

SEQ ID NO: 1968 - protein, 231 aa, Unknown
  Obtained from environmental sample
  DOMAIN (1)...(226): TatD related DNase
  misc_feature (1)..(231): Xaa is any amino acid
MTDAHCHPWDLLDFEKCAEEERRKTGTAAAASAWNREQFEYHEGLAKKAKEDGAPPLFCCFALHPQLSAEENYSPSGNIEVLFSLAAEARLDAVGETGFDLYDKMFKAAESIQDEMFVSHLDAALQWKLPMILHVRKAMHKIFPFARQLKKLPSVVFHSWPGTRLEAEAILKKGINAYFSFGTAVLKKHKETIASAGILPANRILLETDAPYQPLMGKNIPMAGIGSECSV

SEQ ID NO: 1969 - DNA, 813 bp, Unknown
  Obtained from environmental sample
  misc_feature (1)..(813): n is a, c, g, or t
ttggtattaaaatccataaaggcggatgttctaagcggaacatggaagggaattgaacaagccatatcggatagccgcttcgctttaatcgtgggtgccggaaacgcgccgcttcttgcatatatttataaaacgcttaaagcgctggtttggggtaatagcggcgggatcaggcaggtttttgagggggcagtaccgtctgtgaaaacgtcggacgaagagtcctgttacacaggttttcaagctcaaatgcagactaacttgacggctttttatattggcagccgaaaaaacgacgcggcatcggaaactgtccgaggggttctgcttcttaatcgcgatctggtagatgacaaggtcccggcttacaggcttttttctcttttaaatttatcaaggcagcgcattgccgacgcaatggaatatatttcttttgcgctggaacaggccgagaaagccggacaacaggatgaaatagttctttcctgttattttgcttcttctatccatttgctcaatggaaatttgtccagatctctgcgctttgccgaaagggcggaagaaaccgcgttttctattgaatatgtaaactggggcatgagggcaaggtttcttcgcgccaggctttattttgagattggccgctacggtgaggctctggatatttttgagtctatttcctatgaaagcggaacggagatggcaagtaccgttgaggcatggatctacagaacgaggactttttcgggtttcttttcgtctctgaaagaaaacgccgaatcctccggggctgacgccaaaattttgaaatag

SEQ ID NO: 1970 - protein, 270 aa, Unknown
  Obtained from environmental sample
  misc_feature (1)..(270): Xaa is any amino acid
MVLKSIKADVLSGTWKGIEQAISDSRFALIVGAGNAPLLAYIYKTLKALVWGNSGGIRQVFEGAVPSVKTSDEESCYTGFQAQMQTNLTAFYIGSRKNDAASETVRGVLLLNRDLVDDKVPAYRLFSLLNLSRQRIADAMEYISFALEQAEKAGQQDEIVLSCYFASSIHLLNGNLSRSLRFAERAEETAFSIEYVNWGMRARFLRARLYFEIGRYGEALDIFESISYESGTEMASTVEAWIYRTRTFSGFFSSLKENAESSGADAKILK

SEQ ID NO: 1971 - DNA, 906 bp, Unknown
  Obtained from environmental sample
  misc_feature (1)..(906): n is a, c, g, or t
atggccgagaatgcgcttttgttatactattattccttttatattcatctttttaaaaaggagcaggataagcctattactgaaatagatttaaagagtcacactaaaatatttttattatcaatatctgctttattcttacttattggattggtgattccttcctctttaattgcttcatctgttcaagaattttcatttattggaaattataaaagtccttttctttttataaataatgcgcttttgcagtcgttcggcttattaataattttaccgcttagcatatatttccttttttctcaaagcattaagaataagatggcgctattcgccgctgtctctgtatgtgttgcaatggttaacgtgtttctgtttccgggtaattatggttttatttctataatctttacttttgtacaaagtttaaaatccggtataataaatagtattttgaacctgtctgttatttctataggaataattataatattgttactgttttataaatttaagaaaatattaatatcaggtctgataataattatatgtgattttttaatatttggattattcaatatcgtaaaaataaataaagattttaaatcgtttgatgtacaactcgcaagtgaaaaaaaaataaatgatgagcctgtttacaggttttctgctacgggaaaaaatgttctggttataatgctggatagggcgataaacggttatattccgtatatttttgaagaaaaacccgagcttcttaattcttttgacggctttacctggtataaaaatactgtttcttttggagggaatacatattttggaatgcctggtatttttggcggatatgaatatacgcctcttgaaatgcaaaaagaaaagataagcttcttgttnaagatataa

SEQ ID NO: 1972 - protein, 301 aa, Unknown
  Obtained from environmental sample
  misc_feature (1)..(301): Xaa is any amino acid
MAENALLLYYYSFYIHLFKKEQDKPITEIDLKSHTKIFLLSISALFLLIGLVIPSSLIASSVQEFSFIGNYKSPFLFINNALLQSFGLLIILPLSIYFLFSQSIKNKMALFAAVSVCVAMVNVFLFPGNYGFISIIFTFVQSLKSGIINSILNLSVISIGIIIILLLFYKFKKILISGLIIIICDFLIFGLFNIVKINKDFKSFDVQLASEKKINDEPVYRFSATGKNVLVIMLDRAINGYIPYIFEEKPELLNSFDGFTWYKNTVSFGGNTYFGMPGIFGGYEYTPLEMQKEKISFLXKI

SEQ ID NO: 1973 - DNA, 804 bp, Unknown
  Obtained from environmental sample
  misc_feature (1)..(804): n is a, c, g, or t
gtggttagaggtgcagaccaactaattcctgtggatgtatttatcccgggctgcccgccaagaccagaggctttgtttcagggaattttgaaattgagggaaaaaatccgctcaacagaatccagcagtaacccttggaaagagggcaaaataagagaaaaagacgatggcgaccgctggacagaggcagcgcatgcctgggcagaacttgaaaaaatcaaagacgaagagatgaaagccgcaagagaggaattcaaggaaaaaaatcccgactataaatccacattcaaacccaaacctctcccaaaagaggatttgccactcgtggggagagtgccagaaattcaagttgggcgttcaaaagaaaatattttaaagaaagttcaagagaaattcccctatataacagatgaaaaagaactatccgttaaaaaagaagactggattgagttcgcaaaatttttgcaaagcgaattgaactgcgattatctaatagacgttgtggcagcagactggactgagcattttgacgttattctgcaaactatgagcttgaatgaggggcacaaaatttttgcaaaatgcagtctgccaaagccggaaaacaaagaggaacttccagcaattccaagccttacagaaatttacccagctgcggaatggaaagagcgcgaagtttacgatatgtttggaatttcctttgaaggacatccagatttgcgccgcattttcacagaagacaattttgagggctggcccctccgcaaggattttacagattcaagtatgattagcagaccctaa

SEQ ID NO: 1974 - protein, 267 aa, Unknown
  Obtained from environmental sample
  DOMAIN (197)...(266): Respiratory-chain NADH dehydrogenase, 30 Kd subunit
  misc_feature (1)..(267): Xaa is any amino acid
MVRGADQLIPVDVFIPGCPPRPEALFQGILKLREKIRSTESSSNPWKEGKIREKDDGDRWTEAAHAWAELEKIKDEEMKAAREEFKEKNPDYKSTFKPKPLPKEDLPLVGRVPEIQVGRSKENILKKVQEKFPYITDEKELSVKKEDWIEFAKFLQSELNCDYLIDVVAADWTEHFDVILQTMSLNEGHKIFAKCSLPKPENKEELPAIPSLTEIYPAAEWKEREVYDMFGISFEGHPDLRRIFTEDNFEGWPLRKDFTDSSMISRP

SEQ ID NO: 1975 - DNA, 858 bp, Unknown
  Obtained from environmental sample
  misc_feature (1)..(858): n is a, c, g, or t
ttgattcgcaatatcgcccgcgctgacttcacgattaaaagcggcgggaatgatgttgttgatggccccatttataatctattccaaaaaccaaataattttcaaagccgctttgatctgtggaaggaaaccgcagcttggtggcatttagagggggaagttttttggtggttcgggccggattacgcagccggaataccaaaagagatttatgtactagaccctagaaaaatgaggcatgagggagaattaaggggaggggtagattttgggttttggaatgcgccgcgccgctggttttataattctggcacagaactaatacctattctatctgacgaaattgtatactttagggaattcaacccctggaaccctgctcgcggtgtaaatccccttctctctttggctctggaacttgagcaggatttttacgctaataaagccaattcaatcctgttaaagaataatgccattccacaaggcttgctaaaaacagaccagacgcttaggccggaagaagctgacgcattggaacggcgatgggaaagcaaatacggacaagttaaagccgggcgcaggattgcggtactcggaaagggaaccagctttgaggctctttcgttcaatcctgatgtaataaaattatttgagctaaagaaatggaacctatacaccattctcgcaaaattcggaattccacctcgcgttgccaatatctctgacaggtcaactgcattatccggcaaagacacaagcgaacagcacagcgcattttggaaatatacgcttatcccaattttgaaacaatttgagcaaattcttgaaaacgcattttttattagggtttggtcttaa

SEQ ID NO: 1976 - protein, 285 aa, Unknown
  Obtained from environmental sample
  DOMAIN (4)...(277): Phage portal protein
  misc_feature (1)..(285): Xaa is any amino acid
MIRNIARADFTIKSGGNDVVDGPIYNLFQKPNNFQSRFDLWKETAAWWHLEGEVFWWFGPDYAAGIPKEIYVLDPRKMRHEGELRGGVDFGFWNAPRRWFYNSGTELIPILSDEIVYFREFNPWNPARGVNPLLSLALELEQDFYANKANSILLKNNAIPQGLLKTDQTLRPEEADALERRWESKYGQVKAGRRIAVLGKGTSFEALSFNPDVIKLFELKKWNLYTILAKFGIPPRVANISDRSTALSGKDTSEQHSAFWKYTLIPILKQFEQILENAFFIRVWS

SEQ ID NO: 1977 - DNA, 513 bp, Unknown
  Obtained from environmental sample
  misc_feature (1)..(513): n is a, c, g, or t
atgatctaccgcaccgcccaccgcgccacctaccgcaacatcaacgacaacctgggcctggtcagctaccgcatcgcccagctcaccagccaggcggcctcggaaaggcgcatcaacaccccctcggacgacccgaccggcgcggcccgggtgctgggcacccgctcgaccctttcggccatcacccaataccgcaccaacatggccgtctccgacctctggctctccgaatcgggcagcgccgcccaaaccatcaaggaggtcctggacaaaatctataccctggccgaacagggggccaccgacacctacagcgccgcccagcgcgaagccatcctcaccgaggtcgagggctggttccagcagatcctccagaccggcaacaccaagatcggcgattcctacatcttctccggccagaaggtcagcacccagtccttcgccgcccaggtcgaggcccangaaagtcaggccggctgccagattccccggactggaccggaaaggtcctga

SEQ ID NO: 1978 - protein, 170 aa, Unknown
  Obtained from environmental sample
  DOMAIN (29)...(164): Bacterial flagellin N-terminus
  misc_feature (1)..(170): Xaa is any amino acid
MIYRTAHRATYRNINDNLGLVSYRIAQLTSQAASERRINTPSDDPTGAARVLGTRSTLSAITQYRTNMAVSDLWLSESGSAAQTIKEVLDKIYTLAEQGATDTYSAAQREAILTEVEGWFQQILQTGNTKIGDSYIFSGQKVSTQSFAAQVEAXESQAGCQIPRTGPERS

SEQ ID NO: 1979 - DNA, 867 bp, Unknown
  Obtained from environmental sample
  misc_feature (1)..(867): n is a, c, g, or t
atgtttttggaactcgcaaacatcacggcatttaccgcaaacagaaatgaaaatgaacctatcgtcatagctggcggaccagcaatggcaaacccaatgcctatagcagatttttttgactgcctctgcataggagacggcgaaatcttggcacccaaggcacttcgcataattggcgagtcaaaaaaggctggcaaaaacaaagcggaaattttagagcaaatagcaaaattggaaggcttttacgtgccggcaattcacaaagaaataaaatccgttaaaagaacataccttgaaaaactcgcaaaagacctttttccaacgaaaaatttaatagcaaatatgccgcttgtgcatgaccgcttttgcgtggaagtgatgcgcggttgcacacaaggttgccgcttttgccaagcgggatattggtacagaccaactagggaattagatgcagacgatgttttggacattgccaaagaagggttaaaagccactggcgaccgccagcttgggcttttatcgctttccaccgcagactattcccctgttgaaaaaatgcttgactcctttattgaagacccatttttcaaaaacatagacgtatctttgccctcgcttagggttagcagttttggcagtagccttgcaaataaggtttatgcgctcaaaggcgggcgtagcgctacgctcgctcccgaaagcggttccgagcggctccgaaaattcataaacaaaaccataacaaatgcagatattgaagttgcaacacaaagcgcatttcaaaagcgggttcaacaaaataaaactatatataatggtaggctttcccaccgaaacagaagaagacattcaagactggtgaaatga

SEQ ID NO: 1980 - protein, 288 aa, Unknown
  Obtained from environmental sample
  DOMAIN (124)...(287): Radical SAM superfamily
  misc_feature (1)..(288): Xaa is any amino acid
MFLELANITAFTANRNENEPIVIAGGPAMANPMPIADFFDCLCIGDGEILAPKALRIIGESKKAGKNKAEILEQIAKLEGFYVPAIHKEIKSVKRTYLEKLAKDLFPTKNLIANMPLVHDRFCVEVMRGCTQGCRFCQAGYWYRPTRELDADDVLDIAKEGLKATGDRQLGLLSLSTADYSPVEKMLDSFIEDPFFKNIDVSLPSLRVSSFGSSLANKVYALKGGRSATLAPESGSERLRKFINKTITNADIEVATQSAFQKRVQQNKTIYNGRLSHRNRRRHSRLVK

SEQ ID NO: 1981 - DNA, 441 bp, Unknown
  Obtained from environmental sample
  misc_feature (1)..(441): n is a, c, g, or t
atggtttgtctatgtatccaccttattgacaaaccttatttaggaggtgttatgatatctattatgattgttgatgactccagaattatgagaaatacagtaaaaggcgttttttcgggaataacagccaattgtagatttattgaagccaaagacggagaggaagcattagagctgttggaagccgaaaccatccatctgatactgcttgactggaatatgcccaaattatcgggaatcgattttcttaaacaggtcagggcaatagataaatataaggatttgccgataatcatggtaaccagtgaggccgccaagtttaacgttatagaagcgttaaaaaacggcgccactgattatgtcaccaaaccgataaaccttgaacttttcaagagtaagttggaaaaacttaatttattcaggacgaaaatatggaactga

SEQ ID NO: 1982 - protein, 146 aa, Unknown
  Obtained from environmental sample
  DOMAIN (19)...(135): Response regulator receiver domain
  misc_feature (1)..(146): Xaa is any amino acid
MVCLCIHLIDKPYLGGVMISIMIVDDSRIMRNTVKGVFSGITANCRFIEAKDGEEALELLEAETIHLILLDWNMPKLSGIDFLKQVRAIDKYKDLPIIMVTSEAAKFNVIEALKNGATDYVTKPINLELFKSKLEKLNLFRTKIWN

SEQ ID NO: 1983 - DNA, 483 bp, Unknown
  Obtained from environmental sample
  misc_feature (1)..(483): n is a, c, g, or t
atggaactgaaagattttgttggaccctttgtagaggttactgtcactaccttcagagattttgtcggtattgaagcgattccgaaacagccgtattatcttgagccggaaaaagagtttgactgggatatttcttctgttatcggtttttccggtgcggtccgaggggctgtgattatttccatgagagccgaacttgcaatgaaactgaccgacacaatggtcgggccccctcatacggagatagacgccgatgtaacagatgttatcggagaaatagtaaacatcattgccggaaatataaaacccaaagtgccaaacggagacaagatagtaatatccattcccacgattatcaagggaagcaatatttctttcgtatggcctaacaagcagacgcgaacattgtgtattccccacaaagtttatgaaaatgattttttccatcttctggtagccattgaaatgctggatggaatgtag

SEQ ID NO: 1984 - protein, 160 aa, Unknown
  Obtained from environmental sample
  misc_feature (1)..(160): Xaa is any amino acid
MELKDFVGPFVEVTVTTFRDFVGIEAIPKQPYYLEPEKEFDWDISSVIGFSGAVRGAVIISMRAELAMKLTDTMVGPPHTEIDADVTDVIGEIVNIIAGNIKPKVPNGDKIVISIPTIIKGSNISFVWPNKQTRTLCIPHKVYENDFFHLLVAIEMLDGM

SEQ ID NO: 1985 - DNA, 570 bp, Unknown
  Obtained from environmental sample
  misc_feature (1)..(570): n is a, c, g, or t
ttgccgcaccaaaacacgttatcatttttcgaaagagcatttgtaaaactaggtattccaataaaattcagcgaaggatttagccccaaaccacgcatagcaaacacaggtgcattgccgctgggcttggaatctctttgcgaggttatttccattgagcttttggaaaaactggatttggagaataaaaaagcagagcttgtgaaaagtataaacgaaatattcccgcaaggtttagaaattgtttcaatagaacccctgcaaacaaaactctccgcgcaatttccaaaatctgtagattactgcatggcaggagaatacccaagcgggttagtgcaaaaaaaggagagaaatgaacttcctgtggttttaaatcacagggggcaaagcataaatttaaatgagcatattctttcaattaccgaagctgagaatgccctgcacatcacggttaaatgcaacgagcaaggtgccaccgcaagtcctttcacaatatacagcggcctgttgaacataagcgagcaagaagccagagcattgaatatagtgaagataaatatcagtacctaa

SEQ ID NO: 1986 - protein, 189 aa, Unknown
  Obtained from environmental sample
  misc_feature (1)..(189): Xaa is any amino acid
MPHQNTLSFFERAFVKLGIPIKFSEGFSPKPRIANTGALPLGLESLCEVISIELLEKLDLENKKAELVKSINEIFPQGLEIVSIEPLQTKLSAQFPKSVDYCMAGEYPSGLVQKKERNELPVVLNHRGQSINLNEHILSITEAENALHITVKCNEQGATASPFTIYSGLLNISEQEARALNIVKINIST

SEQ ID NO: 1987 - DNA, 876 bp, Unknown
  Obtained from environmental sample
  misc_feature (1)..(876): n is a, c, g, or t
gtgccgatttttagcaccgatataaaggactccaaaaatgcccatcccggaaagcgttttaccgaaataacctacattaaaggtatttggggcatgatccagacggacgctcttgaattcctgcggcgcaggatacggccttacgaactgcagaaaggggaaaccgataaaattgtcgaaaacgcctttgtcgaaattttcgaagggcttgcgaaacgcggcatacctggctcgaacgtcgcgtttaagaaagcgatgaacgatttgtgcgccgtccgctatgaccgttcaaaaccgcgggacctggtttttattcagggagagtactatttaacttttcatccgggttcaaactttgagattgaaaattatcttgaaaaaaacggaatggaagtgattttgcccaggatgaacaccgtttaccgtcatctgtttctgcagcattcccttgccgagatgaaagaattcaaagtgcgccttcctttgtatgacaatttattcgcccgcatcggcaataaaattatggatatagccgaaaaatatgttgataaaatcgcctcgaagcatcccctgtatgagcctgaaatttcgcttgaagacgcggcaaaatacagcgacgatataatacatcattcgatattgtcgggcgaatccttccttatcgccgcccatactctgcatcacgccgaaaaagggatccgttcatttattatactccagcctttcggctgcctgccgaatcatatctgcgggcggggggtgataaaaagaatcaaggaactgcatcccgacattcaaattctgccgcttgattacaagcctgacgtaagttttgcccatatcgaaaacagaatacagatgctgctgatgaattga

SEQ ID NO: 1988 - protein, 291 aa, Unknown
  Obtained from environmental sample
  misc_feature (1)..(291): Xaa is any amino acid
MPIFSTDIKDSKNAHPGKRFTEITYIKGIWGMIQTDALEFLRRRIRPYELQKGETDKIVENAFVEIFEGLAKRGIPGSNVAFKKAMNDLCAVRYDRSKPRDLVFIQGEYYLTFHPGSNFEIENYLEKNGMEVILPRMNTVYRHLFLQHSLAEMKEFKVRLPLYDNLFARIGNKIMDIAEKYVDKIASKHPLYEPEISLEDAAKYSDDIIHHSILSGESFLIAAHTLHHAEKGIRSFIILQPFGCLPNHICGRGVIKRIKELHPDIQILPLDYKPDVSFAHIENRIQMLLMN

SEQ ID NO: 1989 - DNA, 522 bp, Unknown
  Obtained from environmental sample
  misc_feature (1)..(522): n is a, c, g, or t
atgcatccagagttttacaacgaaaaaagtgatttgtcttcgataataagggtctcgcttttatttcatctaacggttataggcattttgatagcgatagtgttgtttaagccggaaaaagaaagtccgcccgccattcctttttttgaaatggtaaatgtgatgcctgtgcctgctccaaagccaaccccgccggagccggtgcccgaacctgaaattcctgagcctatctctgaacctataccagaacccgtgccggcgcccgttccagaacccgctcccaaacccacacccacaccagaacctaccccaacccctgttcctaaacccgttccaactcccgaaccggttaagccagaacccgtccctgagccagcaaagcccgctcccgccgcagctatggatatgcctatggacttgccatctgatataaagaacaaggatatgaatatgccgactattagaaccttgggtgatattatgatgggacccacactgcaagcgtatttaacaggcttgtaa

SEQ ID NO: 1990 - protein, 173 aa, Unknown
  Obtained from environmental sample
  misc_feature (1)..(173): Xaa is any amino acid
MHPEFYNEKSDLSSIIRVSLLFHLTVIGILIAIVLFKPEKESPPAIPFFEMVNVMPVPAPKPTPPEPVPEPEIPEPISEPIPEPVPAPVPEPAPKPTPTPEPTPTPVPKPVPTPEPVKPEPVPEPAKPAPAAAMDMPMDLPSDIKNKDMNMPTIRTLGDIMMGPTLQAYLTGL

SEQ ID NO: 1991 - DNA, 528 bp, Unknown
  Obtained from environmental sample
  misc_feature (1)..(528): n is a, c, g, or t
atgcaccgaagatttttttcccttggcgatttccgttccagagggcggattgaaattttgatatataagctttacaagcctgttaaatacgcttgcagtgtgggtcccatcataatatcacccaaggttctaatagtcggcatattcatatccttgttctttatatcagatggcaagtccataggcatatccatagctgcggcgggagcgggctttgctggctcagggacgggttctggcttaaccggttcgggagttggaacgggtttaggaacaggggttggggtaggttctggtgtgggtgtgggtttgggagcgggttctggaacgggcgccggcacgggttctggtataggttcagagataggctcaggaatttcaggttcgggcaccggctccggcggggttggctttggagcaggcacaggcatcacatttaccatttcaaaaaaaggaatggcgggcggactttctttttccggcttaaacaacactatcgctatcaaaatgcctataaccgttagatga

SEQ ID NO: 1992 - protein, 175 aa, Unknown
  Obtained from environmental sample
  misc_feature (1)..(175): Xaa is any amino acid
MHRRFFSLGDFRSRGRIEILIYKLYKPVKYACSVGPIIISPKVLIVGIFISLFFISDGKSIGISIAAAGAGFAGSGTGSGLTGSGVGTGLGTGVGVGSGVGVGLGAGSGTGAGTGSGIGSEIGSGISGSGTGSGGVGFGAGTGITFTISKKGMAGGLSFSGLNNTIAIKMPITVR

SEQ ID NO: 1993 - DNA, 459 bp, Unknown
  Obtained from environmental sample
  misc_feature (1)..(459): n is a, c, g, or t
atgactgaaatgaaaaaaacagaattattgaaagtaaatttgaatgctttgaacaaaagcatgagttggctttcgtattcttattctatttgcaaaggaataggcataaaagacgatttttctgcacaggaattaacagaatttgaatctttaactgcaaggtttgccagaacaatagatttgttcataaataaaagccttcgctgtttatacaaggttgaattggaagacccgggtacggttatagaccagctcaacaaagcggaaaaaagagaaataatagaatccgcagaaatatggaaaaaaataaaagaactccgaaactcaatagcccacgactatgatattgataattttacaagcgaaatattcaagccttcgttggaatatacaccaatagtagaaaagtctatagttgctttaaattcttattgcgaaaaatatttgaatcaaatataa

SEQ ID NO: 1994 - protein, 152 aa, Unknown
  Obtained from environmental sample
  misc_feature (1)..(152): Xaa is any amino acid
MTEMKKTELLKVNLNALNKSMSWLSYSYSICKGIGIKDDFSAQELTEFESLTARFARTIDLFINKSLRCLYKVELEDPGTVIDQLNKAEKREIIESAEIWKKIKELRNSIAHDYDIDNFTSEIFKPSLEYTPIVEKSIVALNSYCEKYLNQI

SEQ ID NO: 1995 - DNA, 453 bp, Unknown
  Obtained from environmental sample
  misc_feature (1)..(453): n is a, c, g, or t
atgactgaaacggaaaaaacagaattattgaaagtaaacttgaacgctttgaacaaaagcatgggttggcttttgcattcttattctatttgcaaagaaataggcataaaagacgatttttccgcacaggaattaacagaatttgaatctttaactgcaaggtttgcccgaacaatagatttgttcataaataaaagccttcgcagtttatacaaggttgaattggaagaccctggtacggttatagatatactcaacaaagcggaaaaaagggaaataatagaatccgcagaaatatggaaagaaataaaagaattgcgaaacacaatagcccacgactatgatattgataattttacaagcgaaatattcaagccttcgttggaatatacaccaatagtagaaaaatctatagttgctttaaattcttattgcgaaaaatatttgaattaa

SEQ ID NO: 1996 - protein, 150 aa, Unknown
  Obtained from environmental sample
  misc_feature (1)..(150): Xaa is any amino acid
MTETEKTELLKVNLNALNKSMGWLLHSYSICKEIGIKDDFSAQELTEFESLTARFARTIDLFINKSLRSLYKVELEDPGTVIDILNKAEKREIIESAEIWKEIKELRNTIAHDYDIDNFTSEIFKPSLEYTPIVEKSIVALNSYCEKYLN

SEQ ID NO: 1997 - DNA, 447 bp, Unknown
  Obtained from environmental sample
  misc_feature (1)..(447): n is a, c, g, or t
ttgctaaatgccgaagaaaatttgatttttgggcaagcaactgcggctataaaatttctgcaaaaattatttgaaaaaaattcgagcaacaaaaaagtntgctatctgctcgcaaaagccaaagttatggctggcaaaaaagaagatgcaaaaactttattgcaaaacataaaggaaggcgatgatttttacaacgaatcaaaatccctcttggaactgatggaattttacgaagatgccgcacccccttacgacaaggcttataaattggcatctcaaaacaaatacaaagaagctctggactcatttttagaacttattgaaaacaagcaagacaaagaaggcaaggcgaaaaaagctatgataacgttgttctctgttcttggtcccaagcacgagctaacttgggagtatagggcaaaactcaataggttgatttatatttaa

SEQ ID NO: 1998 - protein, 148 aa, Unknown
  Obtained from environmental sample
  misc_feature (1)..(148): Xaa is any amino acid
MLNAEENLIFGQATAAIKFLQKLFEKNSSNKKVCYLLAKAKVMAGKKEDAKTLLQNIKEGDDFYNESKSLLELMEFYEDAAPPYDKAYKLASQNKYKEALDSFLELIENKQDKEGKAKKAMITLFSVLGPKHELTWEYRAKLNRLIYI

SEQ ID NO: 1999 - DNA, 585 bp, Unknown
  Obtained from environmental sample
  misc_feature (1)..(585): n is a, c, g, or t
atgaaaatcacttttgaaataattaaaatgtcgctaggcgaccctgttaccatagctgtacttttaattttatgttgtttttcgctatttgcttggggaataataataacaaaattcctctcccttaagagcaaaatgagcacaaatattcgtttttacaaaacttttgagcatataaaacattttgcggaggtggagagtttttttgcggcagcgcccaagtgcccgcttagattcataacaggcgctgtgctagaagaggcgagaaatttaagcccctttgttagcgttgaaacccttggtccgcgctcagaaatgctagaagacaccatacagcgcgaggtggaggcttgcagaatgatagacgatggcaaactctcttttttggcaatggcttccaatgtttcgccgttttttgggctttttggaaccgtttggggcattatgcagtctttttacgaaattggaatgcacggctcggcagatttgagcgttgttgccccgggcatagcggttgctttagtgaccacagttgccggtcttatagcggccattccagcctccatgcatctcggcngaatctga

SEQ ID NO: 2000 - protein, 194 aa, Unknown
  Obtained from environmental sample
  DOMAIN (73)...(193): MotA/TolQ/ExbB proton channel family
  misc_feature (1)..(194): Xaa is any amino acid
MKITFEIIKMSLGDPVTIAVLLILCCFSLFAWGIIITKFLSLKSKMSTNIRFYKTFEHIKHFAEVESFFAAAPKCPLRFITGAVLEEARNLSPFVSVETLGPRSEMLEDTIQREVEACRMIDDGKLSFLAMASNVSPFFGLFGTVWGIMQSFYEIGMHGSADLSVVAPGIAVALVTTVAGLIAAIPASMHLGXI

SEQ ID NO: 2001 - DNA, 906 bp, Unknown
  Obtained from environmental sample
  misc_feature (1)..(906): n is a, c, g, or t
atgcggatctggctggacgcggcgcgcatggccaagctgggcctgaccccgggcgacatcatcacggccttgaaccggcagaacatccaggccgtggtgggcgaggtgggggcgcccccgaccaacggccggcaggaactccacttcaccttgaacgcccggggccgcctcatcacccccgacgagttcggcgatatcatactccgaaccggcccgggcgggctcttgcgcctccgcgacctcgccgacatcgaactgggctccgccaactacagcgtgacggccttcttcaacggcctgccggccagcggcatcatggtcagccaatcggccggctccaacgccgtggaggtggtcaaccgcttgaacgccaccctggaggagatgagccgccgctttccccccggcctggcctacgatacggtcttcgacgccaccacctttgtccgggcctccatctacaaggtccaggaaaccatagtcatagccttcttcctggtggtgggggtggtctatcttttcctgggccagtggcggaccaccctgatacccatggtcgcggtgccggtctccctggtgggcaccttcgccgccctctgggccgtgggcttttcagccaacaccatttccctcctggccctggtcctggccatcggcctggtggttgacgacgccatcgtggtggtggagaacgtggagcggctcatcgagcaggagggcctgcccccgcgggaggcggccataaaggccatggaggagatcaccgggcccatcgtggccatcaccttggttcttctctcggttttcgtgccggtggccttcatccccggggtttccggcaagctataccagcagttcgcggtgaccatctccctctccaccttcatttcggcgtcaacgccctga

SEQ ID NO: 2002 - protein, 301 aa, Unknown
  Obtained from environmental sample
  misc_feature (1)..(301): Xaa is any amino acid
MRIWLDAARMAKLGLTPGDIITALNRQNIQAVVGEVGAPPTNGRQELHFTLNARGRLITPDEFGDIILRTGPGGLLRLRDLADIELGSANYSVTAFFNGLPASGIMVSQSAGSNAVEVVNRLNATLEEMSRRFPPGLAYDTVFDATTFVRASIYKVQETIVIAFFLVVGVVYLFLGQWRTTLIPMVAVPVSLVGTFAALWAVGFSANTISLLALVLAIGLVVDDAIVVVENVERLIEQEGLPPREAAIKAMEEITGPIVAITLVLLSVFVPVAFIPGVSGKLYQQFAVTISLSTFISASTP

SEQ ID NO: 2003 - DNA, 375 bp, Unknown
  Obtained from environmental sample
  misc_feature (1)..(375): n is a, c, g, or t
atgaaggtggagagggagatggtcaccgcgaactgctggtatagcttgccggaaaccccggggatgaaggccaccggcacgaaaaccgagagaagaaccaaggtgatggccacgatgggcccggtgatctcctccatggcctttatggccgcctcccgcgggggcaggccctcctgctcgatgagccgctccacgttctccaccaccacgatggcgtcgtcaaccaccaggccgatggccaggaccagggccaggagggaaatggtgttggctgaaaagcccacggcccagagggcggcgaaggtgcccaccagggagaccggcaccgcgaccatgggtatcagggtggtccgccactggcccaggaaaagatag

SEQ ID NO: 2004 - protein, 124 aa, Unknown
  Obtained from environmental sample
  misc_feature (1)..(124): Xaa is any amino acid
MKVEREMVTANCWYSLPETPGMKATGTKTERRTKVMATMGPVISSMAFMAASRGGRPSCSMSRSTFSTTTMASSTTRPMARTRARREMVLAEKPTAQRAAKVPTRETGTATMGIRVVRHWPRKR

SEQ ID NO: 2005 - DNA, 321 bp, Unknown
  Obtained from environmental sample
  misc_feature (1)..(321): n is a, c, g, or t
ttgcccgcgaaaacggcggctgcgtgcttggctccccgccttgcgatatggatgcttaaagaagccgatttaaaagttttcctttacgccgatgcccaaataagggccgcgcgcattgtaaacagggaaggcggccggttggaagaagttgctgattttacagaaaaacgcgacaggcaggaccacgagcgttatctgggcctttataaaattgataccgatgattacagttttgcggatatggtaattgataccggaatacatacgccggaagaaattacggatttgattgtcaaaaaagcgcaaacaatagtagaataa

SEQ ID NO: 2006 - protein, 106 aa, Unknown
  Obtained from environmental sample
  misc_feature (1)..(106): Xaa is any amino acid
MPAKTAAACLAPRLAIWMLKEADLKVFLYADAQIRAARIVNREGGRLEEVADFTEKRDRQDHERYLGLYKIDTDDYSFADMVIDTGIHTPEEITDLIVKKAQTIVE

SEQ ID NO: 2007 - DNA, 513 bp, Unknown
  Obtained from environmental sample
  misc_feature (1)..(513): n is a, c, g, or t
gtgccaaacaggacaatgatcgaaaaacgtccgttatatgtaaacgcacgttcccgtatcggtcattgggaaatagatacggctatatccagacagagcaaagcggcgataatggttttagcggaacgtcgcacaagatacattattattaaaaaactattagcaaaaacagcatttgaaatgcataacgctactgtaaaaagcttaaaagattttgctccaaatgttagacaaagtatcacgtatgataatggcactgaaaacgctttacatgaacgcacgaataataaattgcaaactaaatcatatttttgtaacccttatcatagttgggaaaaaggaacagttgaaaatcttattggtattatcagaagattctatcctaaaaagactgactggaaaaatattacacaatgggacttgaataaagtcgcgagattcattaataatagacctatgaagctgttaggcttcaaaacgccttatcaggttttcgttgcacttgctacttga

SEQ ID NO: 2008 - protein, 170 aa, Unknown
  Obtained from environmental sample
  DOMAIN (15)...(166): Integrase core domain
  misc_feature (1)..(170): Xaa is any amino acid
MPNRTMIEKRPLYVNARSRIGHWEIDTAISRQSKAAIMVLAERRTRYIIIKKLLAKTAFEMHNATVKSLKDFAPNVRQSITYDNGTENALHERTNNKLQTKSYFCNPYHSWEKGTVENLIGIIRRFYPKKTDWKNITQWDLNKVARFINNRPMKLLGFKTPYQVFVALAT

SEQ ID NO: 2009 - DNA, 723 bp, Unknown
  Obtained from environmental sample
  misc_feature (1)..(723): n is a, c, g, or t
gtgcttatgaacatagctaagaatttatccctttcaaaaaataaaaaaggagaagctaattttcagtttggcaaagaacaaaattatatatcttacataaaagacagtttcaaagaccctcgcaaatttgggcaggaatataaaaaagattttttgtttgcggcaaattcagcggctagaatagactcaaaaattttgcaggtagaagcctctattgcagatgccgagcaaaaaataaatatatggaatagcgaaggtttacaagtttgcgacaatagagccagaaccagattttctgtaaatgcaacagcaggcgaagattcagaacgagcatctgcgcacgaaggtcccggtgcgcttggcggctttgaatttatggataacttgcctgttaaagaattatcaagatcttgtgcagaaagagctttgagaatgttaaaagctccttatgtaaaaggcgggcaaatgcccgttattatgggaaacgcttttggcggtgttatttttcacgaagcctgcggccacccgctggaaacggaatccgtgcgcaggcaggcaagccccttttgcggaaaattgggagagaaagtagcacaagacgtgctaagtgccattgacgatggaactttgagcggagcgtggggaagccttgaaattgacgatgagggtaccccaacacaaaaaactgtgttgattgaaaacggaattntgaaaattttttga

SEQ ID NO: 2010 - protein, 240 aa, Unknown
  Obtained from environmental sample
  DOMAIN (3)...(240): Putative modulator of DNA gyrase
  misc_feature (1)..(240): Xaa is any amino acid
MLMNIAKNLSLSKNKKGEANFQFGKEQNYISYIKDSFKDPRKFGQEYKKDFLFAANSAARIDSKILQVEASIADAEQKINIWNSEGLQVCDNRARTRFSVNATAGEDSERASAHEGPGALGGFEFMDNLPVKELSRSCAERALRMLKAPYVKGGQMPVIMGNAFGGVIFHEACGHPLETESVRRQASPFCGKLGEKVAQDVLSAIDDGTLSGAWGSLEIDDEGTPTQKTVLIENGIXKIF

SEQ ID NO: 2011 - DNA, 861 bp, Unknown
  Obtained from environmental sample
  misc_feature (1)..(861): n is a, c, g, or t
gtgggcgaagcaagcggaatgtccggctgtaacgtgaagccgcgcctctttctgggcattcacgcgcataacgacgcggacatggcaagcgcgaacacgctggccgccgtgcgggccgggtgccgccacattcagggtaccctcgtcggctttggggaacgctgcgggaacgcgagcctcgcggcggtgatgccgagccttgagctcaagctgggttaccgctgcctgcctcccggaaaactggagcgcctttcggaagccgtcaggaaggtggcggaaatagcaaacgttgcgcttccggggaacatgccctatgtggggaacttcgcctttgcccacaagggcggcatgcacagcgacggcattttaaaggcgcgttcttctttcgagcacatcgatccctccagggtggggaacgaccggcatttcctcatgagcgaggtgggcgggcgttcggccatcgcggagcgggtgaagaagcttgagccttccattacaaaggatcatccggtgactgcggccctggcgcagaaactgaagaacatggaagcccagggctggcagtttgagggggccgacggcagttttgacatcctcgtgcgccgggaactggggcggtacaagccgcttttcagcattgaggcgtaccgggtggtgagcgagcatcccaccggggaaaccatctcctgttcccacgcgtgggtcaaggtgctggtggacggcagggaggaaatcgccgccgcggaaggggacgggccggtgaacgccctggacggcgcgctccgcagggccctgcggtatttctacccggtactggaaccaggtgcggctttcggactacaaggtcctcggccgatctga

SEQ ID NO: 2012 - protein, 286 aa, Unknown
  Obtained from environmental sample
  DOMAIN (190)...(280): LeuA allosteric (dimerisation) domain
  misc_feature (1)..(286): Xaa is any amino acid
MGEASGMSGCNVKPRLFLGIHAHNDADMASANTLAAVRAGCRHIQGTLVGFGERCGNASLAAVMPSLELKLGYRCLPPGKLERLSEAVRKVAEIANVALPGNMPYVGNFAFAHKGGMHSDGILKARSSFEHIDPSRVGNDRHFLMSEVGGRSAIAERVKKLEPSITKDHPVTAALAQKLKNMEAQGWQFEGADGSFDILVRRELGRYKPLFSIEAYRVVSEHPTGETISCSHAWVKVLVDGREEIAAAEGDGPVNALDGALRRALRYFYPVLEPGAAFGLQGPRPI

SEQ ID NO: 2013 - DNA, 894 bp, Unknown
  Obtained from environmental sample
  misc_feature (1)..(894): n is a, c, g, or t
ttgatggataaaattctctttacccatcgcgccgggagcctcgctgccgaggggcgtataatttgggattttcgtttgccacgtgcgctggctgcaacgctcgcaggtgcttcgctctctctgagcggcttgttgctgcaaagcatattcagaaatccgcttgcaggcccctttgtgctgggcataagctccggtgcttcgcttggcgttgcgctttttttgctggcagggtttgggcttggttcgctgggcttgctctccgcagcggctttgggtgcaatggcggtgctagcctttatagccctgttctcaaaattcatctccagcaacgctgggcttttggtgctgggtttgatgattggatattttgcggatgccgttgtttccatcttgatgcacagcacaaacacagcggctctgcgtggctttatatcttggggatttggttcctttggcaggcttcgctgggaggaattgccttactttgcaatttgcattttgctgggaataattttatccgttttttgcataaagtacttaaacgctatagccctcggcgaagatagtgctaaaagtttaggcataaatgttaagcaaaaacaactcctttcgcttttggcggcagcagttttggcggcggcagcaacttctttttgcggccccataggttttataggaatggcaactccacacttggcaaggggatttttcaattcggataatcagagagttttaatccctgcttcgcttttgtccggtgcgttgctcgcacttgtggctgggcttttgtcgcagggtttgtggggtatgccttctttgccgctcaacgctgttgccagcttaatgggcgctccggttgttatatgggtgttgctgcccaaaatacaccgctag

SEQ ID NO: 2014 - protein, 297 aa, Unknown
  Obtained from environmental sample
  DOMAIN (5)...(293): FecCD transport family
  misc_feature (1)..(297): Xaa is any amino acid
MMDKILFTHRAGSLAAEGRIIWDFRLPRALAATLAGASLSLSGLLLQSIFRNPLAGPFVLGISSGASLGVALFLLAGFGLGSLGLLSAAALGAMAVLAFIALFSKFISSNAGLLVLGLMIGYFADAVVSILMHSTNTAALRGFISWGFGSFGRLRWEELPYFAICILLGIILSVFCIKYLNAIALGEDSAKSLGINVKQKQLLSLLAAAVLAAAATSFCGPIGFIGMATPHLARGFFNSDNQRVLIPASLLSGALLALVAGLLSQGLWGMPSLPLNAVASLMGAPVVIWVLLPKIHR

SEQ ID NO: 2015 - DNA, 435 bp, Unknown
  Obtained from environmental sample
  misc_feature (1)..(435): n is a, c, g, or t
gtgtttgtgctgtgcatcaagatggaaacaacggcatccgcaaaatatccaatcatcaaacccagcaccaaaagcccagcgttgctggagatgaattttgagaacagggctataaaggctagcaccgccattgcacccaaagccgctgcggagagcaagcccagcgaaccaagcccaaaccctgccagcaaaaaaagcgcaacgccaagcgaagcaccggagcttatgcccagcacaaaggggcctgcaagcggatttctgaatatgctttgcagcaacaagccgctcagagagagcgaagcacctgcgagcgttgcagccagcgcacgtggcaaacgaaaatcccaaattatacgcccctcggcagcgaggctcccggcgcgatgggtaaagagaattttatccatcaaaaacgctatctccgcaactcattga

SEQ ID NO: 2016 - protein, 144 aa, Unknown
  Obtained from environmental sample
  misc_feature (1)..(144): Xaa is any amino acid
MFVLCIKMETTASAKYPIIKPSTKSPALLEMNFENRAIKASTAIAPKAAAESKPSEPSPNPASKKSATPSEAPELMPSTKGPASGFLNMLCSNKPLRESEAPASVAASARGKRKSQIIRPSAARLPARWVKRILSIKNAISATH

SEQ ID NO: 2017 - DNA, 486 bp, Unknown
  Obtained from environmental sample
  misc_feature (1)..(486): n is a, c, g, or t
atgacgaattattacgaaaaagaatttgaaacactgccacgtgagattcttgaacgattgcaactcgaaagactgcaaacgcttttgggatatgtttatgaaaaatgcgatttttaccacaaaaagctggatgaagcaggcattaagccaacagatataaaaaacctgagcgatttgaaaaaacttcctttcaccacaaaacaagacttgcgcgacaattacccttatggtatgttcagtgccccaatgaacgatatagttcgtgtccacgcatcaagcggcacaacgggcaaacttactgtggcgggctatacacaaaacgatatagatatatggtctgctgtgatggcacgtgcgtttatggcaggcggttgctcgcatagcagcataattaacgttgcttatggctatgggttatttacaggcgggcttgagtgcgcattatggcagcgaactcctcggcgcgcttaccatacctgcctctag

SEQ ID NO: 2018 - protein, 161 aa, Unknown
  Obtained from environmental sample
  misc_feature (1)..(161): Xaa is any amino acid
MTNYYEKEFETLPREILERLQLERLQTLLGYVYEKCDFYHKKLDEAGIKPTDIKNLSDLKKLPFTTKQDLRDNYPYGMFSAPMNDIVRVHASSGTTGKLTVAGYTQNDIDIWSAVMARAFMAGGCSHSSIINVAYGYGLFTGGLECALWQRTPRRAYHTCL

SEQ ID NO: 2019 - DNA, 708 bp, Unknown
  Obtained from environmental sample
  misc_feature (1)..(708): n is a, c, g, or t
atggacgatcagggcgttctgatgctgacgggttacgcgtggggccgcggttatgtgaaacacagccttgaaaaactggggattgggacgcgagagctgcgttatctgaaattcaagtcggcggcggaaacatacacgcgggattcgctgtcggaagccgacaggacgcaatacggcgaaatactggacgacatgatgcagcttgcccacgacacggtatacgcggcgcgctcctggaatacaggtgaatttaacagaatcattaaccatgaatttatgttctccgcaaaaaacgcgctggcgaggggcctggttgatcgcagcggcaggaaagacgccgtgcttgaggctgtcagggaaatttcagacggtaacgcggccggattatttttactgtacggagacgcggaatcgagcttaacggggagcaaatttccctataaaccggccaaacagggaggcttgttctccaagccgcccgtaatagccgtgataaacgccaatggcgtgaccgatatggaacggggcgtagccgcgtggaccctggccgccacaatcagagaggtatccgaaagaaggcgggtcaaggcgattgtactgcggattaactcgcccggcggaagcgccgaagccgccgactatgtcgccgaggcaataaaagccgccaaagaacgggttccggtggtgggtccactcggccgattctga

SEQ ID NO: 2020 - protein, 235 aa, Unknown
  Obtained from environmental sample
  misc_feature (1)..(235): Xaa is any amino acid
MDDQGVLMLTGYAWGRGYVKHSLEKLGIGTRELRYLKFKSAAETYTRDSLSEADRTQYGEILDDMMQLAHDTVYAARSWNTGEFNRIINHEFMFSAKNALARGLVDRSGRKDAVLEAVREISDGNAAGLFLLYGDAESSLTGSKFPYKPAKQGGLFSKPPVIAVINANGVTDMERGVAAWTLAATIREVSERRRVKAIVLRINSPGGSAEAADYVAEAIKAAKERVPVVGPLGRF

SEQ ID NO: 2021 - DNA, 657 bp, Unknown
  Obtained from environmental sample
  misc_feature (1)..(657): n is a, c, g, or t
atggaaaaaaattacgttttgatccgggacaagataccgganccgcaagaattatttgcgggatttggaaagacaattttcatatcaaagaataattcccgaaggcgaacgaatttgaattttgagggaacaaatcttttaatggcgttaaaaacaaataccactctctctgtgcaatntacggaaaactccggtgtaagacgcactcttttgttttccgctcttcccactaaggtagacgatcttatcattcaggaaaatgcgcgccgtgaaactcagtttatgacaatttataatcagggtcccgtgttttcaagcaataactacggaaccattacgcttttacagacgggagattttacatggacaggatatgatcttcttgtccctcagattatcccgcaggaaactaaaggcggcggacgaatcagcatggatctttatatttcgccgtcttacgaagaaaggtacaacggcgcttttactcttacttttaccgataccagacaaaataacactatttattttttatatgcgcttgataatcagggattgcgccttgaagttgttcccgattacggtatagagaatattaccgttatgcgaagatcgccgtctcctgtagttttatattttttcacggacactcctcattaa

SEQ ID NO: 2022 - protein, 218 aa, Unknown
  Obtained from environmental sample
  misc_feature (1)..(218): Xaa is any amino acid
MEKNYVLIRDKIPXPQELFAGFGKTIFISKNNSRRRTNLNFEGTNLLMALKTNTTLSVQXTENSGVRRTLLFSALPTKVDDLIIQENARRETQFMTIYNQGPVFSSNNYGTITLLQTGDFTWTGYDLLVPQIIPQETKGGGRISMDLYISPSYEERYNGAFTLTFTDTRQNNTIYFLYALDNQGLRLEVVPDYGIENITVMRRSPSPVVLYFFTDTPH

SEQ ID NO: 2023 - DNA, 582 bp, Unknown
  Obtained from environmental sample
  misc_feature (1)..(582): n is a, c, g, or t
atgatattcgtactgaccgtatcatcattatcaacactattattaacgacattcgtactaaccgtatcatcagtatcaacaatctccatgtcaatgatatcggccataatagtatcagcggtaataacaatggcttcacccttatcaacggcgtttgcaatcatcttatccgtaccgacgacagcggcgtcgcccttatcggcaacgtcgccgtccttatcaacggctttcgtattaatgatttcattaataatagcggccgcctcatccacatcaacaacatccgcggtaacgactgtatcctcaatatcaacaatattcttaccaataatattagtaccgctgacattacgatcaccatcatcattatcattaccgacatcaatactaacatccatatcaacatccacatcaacatcaacaatatccgcgctgatgatattggtactgatagttgtatcatccgtattaacgatattagtactgacagtatcattattaattacattcgtgctgaccgtatcagtattaacgacattcgccttaacttcatcctccggcttcgcgtacagtttcccgtaa

SEQ ID NO: 2024 - protein, 193 aa, Unknown
  Obtained from environmental sample
  SIGNAL (1)...(24)
  misc_feature (1)..(193): Xaa is any amino acid
MIFVLTVSSLSTLLLTTFVLTVSSVSTISMSMISAIIVSAVITMASPLSTAFAIILSVPTTAASPLSATSPSLSTAFVLMISLIIAAASSTSTTSAVTTVSSISTIFLPIILVPLTLRSPSSLSLPTSILTSISTSTSTSTISALMILVLIVVSSVLTILVLTVSLLITFVLTVSVLTTFALTSSSGFAYSFP

SEQ ID NO: 2025 - DNA, 606 bp, Unknown
  Obtained from environmental sample
  misc_feature (1)..(606): n is a, c, g, or t
gtgaggaaggtatcggaactcgccgtgtttatggccaatatcatgccgcatatcccggtaaagggatcggcgtttgaggggcttgagcgtgttaccaatatggagatatccgcgctgcgcaaagattgcggcgcgtacgtaaagcagatgtcgcactgccgccagtgtcgctccgatgccgtcggaatgctgnaagacgaccggtcgatagagttcggcggcgacgccgccgccgataaggcggagacgggcaaacgcatgcgcttcgccgtagccactaagagcggcgcgattgtggacatgcacttcggccacgtgagcgagttctacatatacgagagcgacgcgtcgaacacgcgcttcgtggaaacgcgcaaggtcggcaaatattgcaacgggcccgaatgcaccggcaaggaggacaaatgggaaccgattatccgagccgtcgaggactgcgttgcggtgctcgccatgcggataggccccacgccggaaaaacgattgaaagaaaaaggcattgacgccattatgacttatgacaaagttgaaaccgccgtcgctcgcgcggcaaaagaaaggagtactgtccatggtatcgcctaa

SEQ ID NO: 2026 - protein, 201 aa, Unknown
  Obtained from environmental sample
  DOMAIN (95)...(192): Dinitrogenase iron-molybdenum cofactor
  misc_feature (1)..(201): Xaa is any amino acid
MRKVSELAVFMANIMPHIPVKGSAFEGLERVTNMEISALRKDCGAYVKQMSHCRQCRSDAVGMLXDDRSIEFGGDAAADKAETGKRMRFAVATKSGAIVDMHFGHVSEFYIYESDASNTRFVETRKVGKYCNGPECTGKEDKWEPIIRAVEDCVAVLAMRIGPTPEKRLKEKGIDAIMTYDKVETAVARAAKERSTVHGIA

SEQ ID NO: 2027 - DNA, 492 bp, Unknown
  Obtained from environmental sample
  misc_feature (1)..(492): n is a, c, g, or t
gtgctggtccgctcacaggttaccaggttcaagaagatccgtttccgtacccacgaaaacattggatacggcgacattgatctgccggaagaggaaatgcaaacgcgctgccttgtcctgctctttgagccggaaagcgccgggggaaaggctgtggtcgcgatggacgagcaggaaacaggcgcggctctttccggcatcgggacattgatacgaaacatcgcgcccgtgtttctgctgtgcgatccccgcgatttgggcattgccgagcgcgtgcgggatccccatttcggcgttcccgccctgtacatttacgacaaataccccggcggtaccggtcttgccgaaagccttgcccatcgcatcgaaacgctgtgcattgccatcagcgaagccctccggcgctgcccctgtaagtccggctgtccctcctgcgtcggccccggtgggaacaagccggcaacggcggggttattaaaggccctgtgctaa

SEQ ID NO: 2028 - protein, 163 aa, Unknown
  Obtained from environmental sample
  misc_feature (1)..(163): Xaa is any amino acid
MLVRSQVTRFKKIRFRTHENIGYGDIDLPEEEMQTRCLVLLFEPESAGGKAVVAMDEQETGAALSGIGTLIRNIAPVFLLCDPRDLGIAERVRDPHFGVPALYIYDKYPGGTGLAESLAHRIETLCIAISEALRRCPCKSGCPSCVGPGGNKPATAGLLKALC

SEQ ID NO: 2029 - DNA, 315 bp, Unknown
  Obtained from environmental sample
  misc_feature (1)..(315): n is a, c, g, or t
ttgcttgagacggtcagcaaacaggaaactgccgttcccctgcttatggacaaggcatatgcggactttgctacccggtttacggcatggaatttgcgttttcaacctgttgttccgcctaaaacaaacatgaaagaccagtgggaatacgataaagaattatacaaaaaacgcaatgagatagagcgtttctttcgtagattgaaagcctttagagccgtattcacccgatatgacaaacttgacatcatgttttcaggtacaattcttttcgcgtctatcattatacttttacgttgtgcgaacacgccctag

SEQ ID NO: 2030 - protein, 104 aa, Unknown
  Obtained from environmental sample
  misc_feature (1)..(104): Xaa is any amino acid
MLETVSKQETAVPLLMDKAYADFATRFTAWNLRFQPVVPPKTNMKDQWEYDKELYKKRNEIERFFRRLKAFRAVFTRYDKLDIMFSGTILFASIIILLRCANTP

SEQ ID NO: 2031 - DNA, 444 bp, Unknown
  Obtained from environmental sample
  misc_feature (1)..(444): n is a, c, g, or t
atgacagaatcgagatcgcttttcagattgaaacccggcgcgcaccatagaccagcaagtataacgggtaaatctgcttatggcattaaaggggcaagttccaagcaaggattgttgagcgatattcttccaaaccaagacaagatttttgcgctaacaggatataagccaacttggttccgtgccggcactgcaaattacgaagataaagcaatgcaagagattcttgcgcttgggcttaaaattgcaggctttgcgataaatgcagactatggtgcaacggcatccaagaaaaccattgaaaaatccgtagccaaagctcgttcaggcgatataatcctcgctcacatgaaccgcccagaatccgaaactgccgcaggtttaatgtactcacttcctaaaatgaaaagtttgggatacaagtttgaaaaactccctgattaa

SEQ ID NO: 2032 - protein, 147 aa, Unknown
  Obtained from environmental sample
  misc_feature (1)..(147): Xaa is any amino acid
MTESRSLFRLKPGAHHRPASITGKSAYGIKGASSKQGLLSDILPNQDKIFALTGYKPTWFRAGTANYEDKAMQEILALGLKIAGFAINADYGATASKKTIEKSVAKARSGDIILAHMNRPESETAAGLMYSLPKMKSLGYKFEKLPD

SEQ ID NO: 2033 - DNA, 951 bp, Unknown
  Obtained from environmental sample
  misc_feature (1)..(951): n is a, c, g, or t
ttgtcgaaggagaaccttgtatgccaccacaaattttacgatcccaacaggaagctcaaacaaaaaaccctttcatacgaggcgaagctgcggtcgaggggttattacaagggggacggggctatatttgatttctacaagaagcgcctgccgattgcggcgtccgtacacgatctgaacaaggcgataaggtccgcaggaaatgataaatttctgtatatgcgcgaagaggatataattgaggaatcaatcccgaaagaggctcacgcttaccccgaccacgtcaacatcggcaatcagaatttcgcgctgaaatacgcctttgccccggggaatgaagacgacggcgtgactttggcgctgccgcaaaaggttttgccgtttattgctaaggagacgataggatggcttcttccggcgttgtggccggcgcagataaagagcttattgcagcagctgccgcgcagtcaacgaaaaatatttgtaccgataggcgaggcggcgcaaaagcttgccgataacatcacggcgccgcccgcgacatataaatcgttcgcggaggaattgtcatcggctatcaaaaaaatttacggtattgatattgatcccgcattgttagactccgataagacggatccgcacttggatttgaaaattgaggtaagggacgagaagaatgatgtcgtcgccaaaggcaggagtggcgaactgtttagacggatgaacgataccgctgtggttggcggtacggatgctaatacaggtataaacgatataaccggcgcatccgttaatacggcggcaggctcgccttgggacggcgctttcgcgtcataccggaaatcgggtcttgtatcatggccggacgaggacttgaacaaaccgcttgacatcggttcgaacaagggcggtttcgcggttcgcgggtatccggcgtctcggccaatctga

SEQ ID NO: 2034 - protein, 316 aa, Unknown
  Obtained from environmental sample
  misc_feature (1)..(316): Xaa is any amino acid
MSKENLVCHHKFYDPNRKLKQKTLSYEAKLRSRGYYKGDGAIFDFYKKRLPIAASVHDLNKAIRSAGNDKFLYMREEDIIEESIPKEAHAYPDHVNIGNQNFALKYAFAPGNEDDGVTLALPQKVLPFIAKETIGWLLPALWPAQIKSLLQQLPRSQRKIFVPIGEAAQKLADNITAPPATYKSFAEELSSAIKKIYGIDIDPALLDSDKTDPHLDLKIEVRDEKNDVVAKGRSGELFRRMNDTAVVGGTDANTGINDITGASVNTAAGSPWDGAFASYRKSGLVSWPDEDLNKPLDIGSNKGGFAVRGYPASRPI

SEQ ID NO: 2035 - DNA, 387 bp, Unknown
  Obtained from environmental sample
  misc_feature (1)..(387): n is a, c, g, or t
ttgggcaaaggcggacagcttgtgcgttccgccggaacaagcgcccttatcgccgcgaaagaaggcgattatgtgacaattaaaatgccctccggcgaaatgagaatggttttcaaaaaatgttacgcgacaatcggtaacgtaggcaacgaagaccacatgaacgtaacttatggaaaagcgggccgcaaacgctggctgggagtgcgccccacggtgcgcggtatggttatgaaccctgtggatcacccgcacggcggcggcgaaggaaagaacaagggcgttcaccctgttaccccctgggggcagccgacaaagggatacaagacccgcaaaaaacacaaaccgtcttcaaggtttattgttagcaggggcaagaagaaatag

SEQ ID NO: 2036 - protein, 128 aa, Unknown
  Obtained from environmental sample
  DOMAIN (2)...(104): Ribosomal Proteins L2, C-terminal domain
  misc_feature (1)..(128): Xaa is any amino acid
MGKGGQLVRSAGTSALIAAKEGDYVTIKMPSGEMRMVFKKCYATIGNVGNEDHMNVTYGKAGRKRWLGVRPTVRGMVMNPVDHPHGGGEGKNKGVHPVTPWGQPTKGYKTRKKHKPSSRFIVSRGKKK

SEQ ID NO: 2037 - DNA, 348 bp, Unknown
  Obtained from environmental sample
  misc_feature (1)..(348): n is a, c, g, or t
gtgttttttgcgggtcttgtatccctttgtcggctgcccccagggggtaacagggtgaacgcccttgttctttccttcgccgccgccgtgcgggtgatccacagggttcataaccataccgcgcaccgtggggcgcactcccagccagcgtttgcggcccgcttttccataagttacgttcatgtggtcttcgttgcctacgttaccgattgtcgcgtaacattttttgaaaaccattctcatttcgccggagggcattttaattgtcacataatcgccttctttcgcggcgataagggcgcttgttccggcggaacgcacaagctgtccgcctttgcccaatgntaa

SEQ ID NO: 2038 - protein, 115 aa, Unknown
  Obtained from environmental sample
  misc_feature (1)..(115): Xaa is any amino acid
MFFAGLVSLCRLPPGGNRVNALVLSFAAAVRVIHRVHNHTAHRGAHSQPAFAARFSISYVHVVFVAYVTDCRVTFFENHSHFAGGHFNCHIIAFFRGDKGACSGGTHKLSAFAQX

SEQ ID NO: 2039 - DNA, 339 bp, Unknown
  Obtained from environmental sample
  misc_feature (1)..(339): n is a, c, g, or t
gtgccccaaaagcgaaaaaaaacattatttttcaaaaaatatgatgatttctgcggcgttttggagaaaaaacaggcttccgatatttcgcccttaacccgccaatcctgctggcacattatgagggatttgcccgtcttgataaacggagatgtccccatgtgcagagaggctctttcagcgctaaagggcgaaaaaaaggatatacttggaaatgtatttgcggactcacttgaaactatctggcaaaacggggataaatactacaaggaacaatgcatgaaagaatacacagggctttgcgcggggtgcgatgaatactatacctacaatttttaa

SEQ ID NO: 2040 - protein, 112 aa, Unknown
  Obtained from environmental sample
  misc_feature (1)..(112): Xaa is any amino acid
MPQKRKKTLFFKKYDDFCGVLEKKQASDISPLTRQSCWHIMRDLPVLINGDVPMCREALSALKGEKKDILGNVFADSLETIWQNGDKYYKEQCMKEYTGLCAGCDEYYTYNF

SEQ ID NO: 2041 - DNA, 309 bp, Unknown
  Obtained from environmental sample
  misc_feature (1)..(309): n is a, c, g, or t
atgccgggcgaagagctgtcgaccgacatcggccaattcgagcttgcgcgtttcatcaaccccgccggcctgcgctccttaggcggcaacctatacgccgtctcagacgcgagcggagtcccgatcatcaacctgcccggcgaagagggcgcgggaacgttgttgcatagatacgtagagtcgtccaacgtccagatcgttgacgaaatggtaaatatgatcgcggcgcagagggcgtacgaaatcgtttcgaaggcgataactacaagcgaagagatgttacaaatagcgaataatttgaaacgttaa

SEQ ID NO: 2042 - protein, 102 aa, Unknown
  Obtained from environmental sample
  DOMAIN (62)...(100): Domain of unknown function (DUF1078)
  misc_feature (1)..(102): Xaa is any amino acid
MPGEELSTDIGQFELARFINPAGLRSLGGNLYAVSDASGVPIINLPGEEGAGTLLHRYVESSNVQIVDEMVNMIAAQRAYEIVSKAITTSEEMLQIANNLKR

SEQ ID NO: 2043 - DNA, 630 bp, Unknown
  Obtained from environmental sample
  misc_feature (1)..(630): n is a, c, g, or t
atgcgcaaggcaggagccttttttttaatactgctttttggttttaccctgctttacgcgcaggaagcgcctccgtcggacaatccgcctgacggcttgcctgacggtgattgggatttctacaatccggattcctatactcaaggcgatcaaactttcattatttctcttttaacagtatttcccgtagtttttattaaccagggaaacgtattgaataataattttaatcccccggtgggcggggccggttccttgtcatataattattattttaacaacaatatttttttggggggggaagtcaacgggtctttcattcccacaatgggaaataatatgtactacgggatatttttaggagcgagaaccggatatcaattcaatatttggaggcttgaatttcccttaaatataactttgggcatgtcgtggcaccagtttttaaatttcaaaaattattgtttttttataaaaggaggagggtcggcttatttcaggtataacgccgagtggtcattcggaataaactcaaactggtattggattccccagagaacaagcgaaccctcaaaaaacgtttacggaaacatggtagatttactgttgtccgtacgttatcatttttaa

SEQ ID NO: 2044 - protein, 209 aa, Unknown
  Obtained from environmental sample
  SIGNAL (1)...(20)
  misc_feature (1)..(209): Xaa is any amino acid
MRKAGAFFLILLFGFTLLYAQEAPPSDNPPDGLPDGDWDFYNPDSYTQGDQTFIISLLTVFPVVFINQGNVLNNNFNPPVGGAGSLSYNYYFNNNIFLGGEVNGSFIPTMGNNMYYGIFLGARTGYQFNIWRLEFPLNITLGMSWHQFLNFKNYCFFIKGGGSAYFRYNAEWSFGINSNWYWIPQRTSEPSKNVYGNMVDLLLSVRYHF

SEQ ID NO: 2045 - DNA, 591 bp, Unknown
  Obtained from environmental sample
  misc_feature (1)..(591): n is a, c, g, or t
gtgctttttgagtggagccctgaacagattattgaacaaatgaagacgtcagggcttcggggcaggggaggagcgggtttccccacctggttaaagtgggatctagcccggaaagcccaaggagatgcgaaatacgtaatctgcaatgccgatgaaggagacccgggggcctacatggatcggtccatcattgaaggggatccccattcggtgatcgaagggatgatcaccgcgggcaaagccataggggctaaccatggttttgtgtacattcgcgcggaatatcccctggcaatagagcgcctcaaaatagccctggcccaggcccaggaatacggccttttaggcaagaatattcttggctctggttttgattttgatattgagatacgcctgggcgccggcgcgtttgtctgcggtgaggaaactgccctcatcaaatccgtggaaggaaccaggggtatgcccgtacccaagccgcctttccccgcgaacaaggggctctggcaaaaaccgactattataaataacgtggaaaccttggccaacgtaccgcttatcactaataaaggcggggcttggcttgcntag

SEQ ID NO: 2046 - protein, 196 aa, Unknown
  Obtained from environmental sample
  DOMAIN (2)...(196): Respiratory-chain NADH dehydrogenase 51 Kd subunit
  misc_feature (1)..(196): Xaa is any amino acid
MLFEWSPEQIIEQMKTSGLRGRGGAGFPTWLKWDLARKAQGDAKYVICNADEGDPGAYMDRSIIEGDPHSVIEGMITAGKAIGANHGFVYIRAEYPLAIERLKIALAQAQEYGLLGKNILGSGFDFDIEIRLGAGAFVCGEETALIKSVEGTRGMPVPKPPFPANKGLWQKPTIINNVETLANVPLITNKGGAWLA

SEQ ID NO: 2047 - DNA, 576 bp, Unknown
  Obtained from environmental sample
  misc_feature (1)..(576): n is a, c, g, or t
gtggcaagatcaaggttcgtactttcccgcaatgccaatccccttacgggtaagcctgagatagagatactcgatccgaacaggaccgtccgtattgaccgtcttgaagaaggagtttggtactggacggtggaagcgcaaactcccgaaggagtcaatatcagcgcccaaacgccccggcagctgcgagttctgcccattccccttcttcctgcgccttcgtatcgccagcctgccgaaggttacagtgtgggcatagatgaagtgaaaaaggtaactatcgaatttaactggacacaagtacagggggcaaacgcttatatattcacaatttatcaggaaaccaacggcggacggcggcaaattatgcaaacagggccggaaaactttacttcatggacaacggacgttataacccttggacgtggaaatttcatctggcgcatagaagcggtaaacgtggggcggaacaatgtaattgaacagcatggtaatcccgcggaaagccgttttgtcgtggacgttccccgagcgggacccgtaaagataattagcggaccggaggattggccatga

SEQ ID NO: 2048 - protein, 191 aa, Unknown
  Obtained from environmental sample
  misc_feature (1)..(191): Xaa is any amino acid
MARSRFVLSRNANPLTGKPEIEILDPNRTVRIDRLEEGVWYWTVEAQTPEGVNISAQTPRQLRVLPIPLLPAPSYRQPAEGYSVGIDEVKKVTIEFNWTQVQGANAYIFTIYQETNGGRRQIMQTGPENFTSWTTDVITLGRGNFIWRIEAVNVGRNNVIEQHGNPAESRFVVDVPRAGPVKIISGPEDWP

SEQ ID NO: 2049 - DNA, 510 bp, Unknown
  Obtained from environmental sample
  misc_feature (1)..(510): n is a, c, g, or t
gtggtcgaggaactggatccccggcctggccaccccaatgttgggatcaattcggacataggctgttattcgctgggcgccgcgccgccgtaccaagtccccgaaagcatagtctgcatgggcgcgtcggtgggcatggcaaaaggcgcggctgacgcgggactgctttacagcgtcgccgtaataggcgactcaacgttcatccattccggcataaccgcccttatcgacacggttgcgtctaacacccccatgacccttatcatacttgacaactccatcgtggcgatgacgggctgccagccgaccatggttccctcggaaaatctccgcagtctgcttctcggctgtggggtaaaacaggaacacctgcttgaactggaagcgaaaaagcagcttattgatgaaaacgccgcgaagttaaaaaaagaaatggaataccgcggtctttccgtggttgtattcaaacgcgagtgcctggaagccgcgaggaaactaaagaaaaaataa

SEQ ID NO: 2050 - protein, 169 aa, Unknown
  Obtained from environmental sample
  DOMAIN (19)...(155): Thiamine pyrophosphate enzyme, C-terminal TPP binding domain
  misc_feature (1)..(169): Xaa is any amino acid
MVEELDPRPGHPNVGINSDIGCYSLGAAPPYQVPESIVCMGASVGMAKGAADAGLLYSVAVIGDSTFIHSGITALIDTVASNTPMTLIILDNSIVAMTGCQPTMVPSENLRSLLLGCGVKQEHLLELEAKKQLIDENAAKLKKEMEYRGLSVVVFKRECLEAARKLKKK

SEQ ID NO: 2051 - DNA, 639 bp, Unknown
  Obtained from environmental sample
  misc_feature (1)..(639): n is a, c, g, or t
gtgcctgtgccggacagccgggcggaccgcctggccgagctggtcaagccgcagaaaaccatgtacgccgccgtggatttcatcgacatcgcgggccttgtgcgcggcgccaacaagggtgaaggactgggcaaccggttccttgccaatatccgtgaatgcacggccattgtggaagtagtgcgctgctttgacgacgaaaacatcgcccatgtggacggcggcgttgaccctgtgcgggacatggaaaccattgctacggagcttttgctggccgacatggaaagtctcggcaaaaagttggaacgcctgcacaagcaggtcaaaggcgacaaagaactcgccagggccatggaagaatgcacaaaactgctggctcatcttgacggcggcaatcccgcctcgtcctttcccctgcccgaacacaacgaacctttccggcaggtttggcaggaactgtccttgctcaccgccaaaaaaatcatctattgcgccaacgtggatgaggccggcctgacggaggacaataggcatgttcaagccttgaaaaagtcggcggactcgcgccgggctgaaacggtcaaaatctgcgccagacttgaggaagagctgcaagggctgccggaagccgaccaataa

SEQ ID NO: 2052 - protein, 212 aa, Unknown
  Obtained from environmental sample
  misc_feature (1)..(212): Xaa is any amino acid
MPVPDSRADRLAELVKPQKTMYAAVDFIDIAGLVRGANKGEGLGNRFLANIRECTAIVEVVRCFDDENIAHVDGGVDPVRDMETIATELLLADMESLGKKLERLHKQVKGDKELARAMEECTKLLAHLDGGNPASSFPLPEHNEPFRQVWQELSLLTAKKIIYCANVDEAGLTEDNRHVQALKKSADSRRAETVKICARLEEELQGLPEADQ

SEQ ID NO: 2053 - DNA, 825 bp, Unknown
  Obtained from environmental sample
  misc_feature (1)..(825): n is a, c, g, or t
ttgtgnnnnnnnnnggcacgcatcagatcggccgagtgttcgggtacggcattgggggcttatatctatgatgaagtccacattttgcccgcgcctgtatttcgcgtaacggcggaattgcaggcggtcagacgtttggggcttaccgcgactttaatccgcgaagacggcgcggaggacgcggtattcagcctggtaggcccgaagcgttacgacgtaccatggaaggagcttgagggcaaaggctggatcgccgaggcggtctgcacggaaatccgcattgatcttcctgaggatctgaagattccttatgccgttgcttcacagcgtgagaagtaccgcatcgccagcgagaacccgttaaaggaggaaattgtaacccagttaatcgaaaaccacggcgacgaccagattctcgtcatcggtcaatacctttcccagctcgattcgctggcgaaactgcttaaagtgcccctgataaccggaaaaacacctaacgctgagagggagaggatttacggcgaatttaagcggggagaaatcaggatcatcgtggtttccaaggtcgccaactttgccattgatctgccggacgcttcaatggcgattcaggtttcaggttccttcggctcgcggcaggaagaggcgcagcgcctggggcgcattctgcggccaaaagacaaagacgcgaaacaccataacgctctgttttttacccttgtctcgcgttacacagtagaagaagatttcgcggcaaaccgtcataaatttctggccgagcagggttataaatactccattcaacactggaatacgacaaaatga

SEQ ID NO: 2054 - protein, 274 aa, Unknown
  Obtained from environmental sample
  DOMAIN (154)...(226): Helicase conserved C-terminal domain
  misc_feature (1)..(274): Xaa is any amino acid
MXXXXARIRSAECSGTALGAYIYDEVHILPAPVFRVTAELQAVRRLGLTATLIREDGAEDAVFSLVGPKRYDVPWKELEGKGWIAEAVCTEIRIDLPEDLKIPYAVASQREKYRIASENPLKEEIVTQLIENHGDDQILVIGQYLSQLDSLAKLLKVPLITGKTPNAERERIYGEFKRGEIRIIVVSKVANFAIDLPDASMAIQVSGSFGSRQEEAQRLGRILRPKDKDAKHHNALFFTLVSRYTVEEDFAANRHKFLAEQGYKYSIQHWNTTK

SEQ ID NO: 2055 - DNA, 558 bp, Unknown
  Obtained from environmental sample
  misc_feature (1)..(558): n is a, c, g, or t
atgaaaaaggcaattatcgcgtttgtttttattctggcgggggtaagcgccttcgcgcaaaacggggtaataaaagaattaagcggacaggtggaattaaaaagggctggttccgcggcatttgccgcggcgaaagccggagacactgtaaatcaggacacgattgtctccacgggttttaagagtaccgcgctgattgaagtgggaagcaccgttattaccgtgcgtcctttaacgcgcttaactttaacggagatacgcgcttcagcggatagcgaaaccctgaacgtgagcttacagaccgggcgtgtaagggtagacgttaatccgcccacgggagcgaaggcttcgatggctgtaagcagcccgagctcaaccgcttcggtgcgcggtacgagttttgagtttgatacccaaagcctctatgtaatcagcgggaacgtggcattcgagggagtaaggggagaagcgacggttatatcggcgggatacaacaccacgacggatcagagcgggagcgcggtaaatcccctcgcctttggctcttccgcttantag

SEQ ID NO: 2056 - protein, 185 aa, Unknown
  Obtained from environmental sample
  SIGNAL (1)...(19)
  misc_feature (1)..(185): Xaa is any amino acid
MKKAIIAFVFILAGVSAFAQNGVIKELSGQVELKRAGSAAFAAAKAGDTVNQDTIVSTGFKSTALIEVGSTVITVRPLTRLTLTEIRASADSETLNVSLQTGRVRVDVNPPTGAKASMAVSSPSSTASVRGTSFEFDTQSLYVISGNVAFEGVRGEATVISAGYNTTTDQSGSAVNPLAFGSSAX

SEQ ID NO: 2057 - DNA, 684 bp, Unknown
  Obtained from environmental sample
  misc_feature (1)..(684): n is a, c, g, or t
atgcaggttgcccagcagctttacgaagggattaatatcggctctacccgcgtcggccttatcacctatatgaggacggattcggtgcgggtatccgaaacggcacttggagagcttagggaatggcttggcaagaactaccccaaagagcttcccgaaaaagcgcttgagtatacctccgggaaaaaagcccaggacgcgcacgaggcgatacgcccgacttatgtgagctatacgccggattcggtcgccgagtacctgaaccgcgaccagttaaggctgtacacgataatctgggaacgctttgtttcaagtcagatgacaaatgccaaaacccgcaccgtcagcgtagaaatcaaggctgtgacgggcaagggggaagaagggctgttcagggtttccggcacaaaacttgttgaaaaaggtttttacaaagttatcaaactgctttcatcaaaagaagacaaggggaatccctatcctccgcttaaagccggggacaaggtcgcgattgaaaaatttcatcccgagcagcattttacccagggcccgccccgttataccgaggcttcaatcatcgacattttgcgggagaaggaaataggcaggccctcgacttacgctcccattatttctgtgctgctggaccgctattatatacgcgatcaacagagctggcgataa

SEQ ID NO: 2058 - protein, 227 aa, Unknown
  Obtained from environmental sample
  DOMAIN (1)...(224): DNA topoisomerase
  misc_feature (1)..(227): Xaa is any amino acid
MQVAQQLYEGINIGSTRVGLITYMRTDSVRVSETALGELREWLGKNYPKELPEKALEYTSGKKAQDAHEAIRPTYVSYTPDSVAEYLNRDQLRLYTIIWERFVSSQMTNAKTRTVSVEIKAVTGKGEEGLFRVSGTKLVEKGFYKVIKLLSSKEDKGNPYPPLKAGDKVAIEKFHPEQHFTQGPPRYTEASIIDILREKEIGRPSTYAPIISVLLDRYYIRDQQSWR

SEQ ID NO: 2059 - DNA, 780 bp, Unknown
  Obtained from environmental sample
  misc_feature (1)..(780): n is a, c, g, or t
atgaaagacgtttaccgttccctgtatntgaatgatactccctttattgaaacaaatcttgaatcggcggaaatgattaagtacgcgtccaacgctttccttgcggttaaaattacttttataaacgaaattgccaacctttgtgaaaaaacaggcgcggatgtgcaggatgtcgcgagggcgatgggtaaagacgggagaataggttccaagtttctgcatccgggtccaggatacggaggttcctgtttccccaaagacaccagcgccctgataaaaatcggcagggataataaagagattctgcatattgtagaaacaacaatagaaacaaatgaaaaacaaaaactacgcgctgcgcaaaaaatagaatccgtccttggaacgcttaaaaataaaactttatgccttctgggactttcctttaaaccaaacaccgatgacatacgcaagtctcccgcgattacaatatgcgaataccttgtaagcaaaggggcctttttgcgcctctacgatcccgccgctatgaaggaagcgaaaaaaaagtttaagaagacagaaaaatcaatgtattttgcgtccgatgaatatgacgccgccagcggcgccgacgctcttgttataataacagaatggaatcagtttagaaatcttgatcttttcaaattaaaaaaactgctttcttctccttttttctttgatctccgcaatatatataaaaagcaggaagcgcaaagcgcgggccttacttatttcggaatcggaaacggcaaggaatga

SEQ ID NO: 2060 - protein, 259 aa, Unknown
  Obtained from environmental sample
  DOMAIN (136)...(241): UDP-glucose/GDP-mannose dehydrogenase family, UDP binding domain
  misc_feature (1)..(259): Xaa is any amino acid
MKDVYRSLYXNDTPFIETNLESAEMIKYASNAFLAVKITFINEIANLCEKTGADVQDVARAMGKDGRIGSKFLHPGPGYGGSCFPKDTSALIKIGRDNKEILHIVETTIETNEKQKLRAAQKIESVLGTLKNKTLCLLGLSFKPNTDDIRKSPAITICEYLVSKGAFLRLYDPAAMKEAKKKFKKTEKSMYFASDEYDAASGADALVIITEWNQFRNLDLFKLKKLLSSPFFFDLRNIYKKQEAQSAGLTYFGIGNGKE

SEQ ID NO: 2061 - DNA, 363 bp, Unknown
  Obtained from environmental sample
  misc_feature (1)..(363): n is a, c, g, or t
ttgcggtctcgcactcacatacttatcgcccttggagcggccagccttatgctcctttcaatttggctgccgcagaattttaccgaaaaacccggcgacccgggaaggattgcggcgcaggttgtttcaggcattggctttcttggagcaggcgcgattatccggttgggcagcaatatcaggggacttaccaccgccgcgtctttatggcttacagccgcaataggattaactgtcggagcgggaatgtttgttaccgctcttacggcagaaatcctcgcccttgtaacattaattgtgttacataaagttgaaaacaaaattttcccagatgattgggtaaataaagaaaaagaaaaatga

SEQ ID NO: 2062 - protein, 120 aa, Unknown
  Obtained from environmental sample
  SIGNAL (1)...(20)
  DOMAIN (1)...(114): MgtC family
  misc_feature (1)..(120): Xaa is any amino acid
MRSRTHILIALGAASLMLLSIWLPQNFTEKPGDPGRIAAQVVSGIGFLGAGAIIRLGSNIRGLTTAASLWLTAAIGLTVGAGMFVTALTAEILALVTLIVLHKVENKIFPDDWVNKEKEK

SEQ ID NO: 2063 - DNA, 387 bp, Unknown
  Obtained from environmental sample
  misc_feature (1)..(387): n is a, c, g, or t
ttgttctgtaagttcgcttaccgtaagatgtttttcgttcatttttctttttctttatttacccaatcatctgggaaaattttgttttcaactttatgtaacacaattaatgttacaagggcgaggatttctgccgtaagagcggtaacaaacattcccgctccgacagttaatcctattgcggctgtaagccataaagacgcggcggtggtaagtcccctgatattgctgcccaaccggataatcgcgcctgctccaagaaagccaatgcctgaaacaacctgcgccgcaatccttcccgggtcgccgggtttttcggtaaaattctgcggcagccaaattgaaaggagcataaggctggccgctccaagggcgataagtatgtga

SEQ ID NO: 2064 - protein, 128 aa, Unknown
  Obtained from environmental sample
  misc_feature (1)..(128): Xaa is any amino acid
MFCKFAYRKMFFVHFSFSLFTQSSGKILFSTLCNTINVTRARISAVRAVTNIPAPTVNPIAAVSHKDAAVVSPLILLPNRIIAPAPRKPMPETTCAAILPGSPGFSVKFCGSQIERSIRLAAPRAISM

SEQ ID NO: 2065 - DNA, 930 bp, Unknown
  Obtained from environmental sample
  misc_feature (1)..(930): n is a, c, g, or t
atggatcagatcggcagaggacttgccgccgccgttttccgcgttatggaccgggagggaggcctccgcgatttgccggaactgcgggcaattaagcggcggatacaaagcctgaacgcggcgctggaaacggcggtttcccgttatgcttccgatgatgaggtcaggcgtatgctgcaatcaaccgtgccgtcgcagcgggacggcagaacggtgctggcggtcaaggcaaatttccgcgggcgtatccggggcatagtgcatgaagtttcatccagcgggcagaccatttttgttgagccggaaaatgtcgtggaaaaaaacaatgaaattattattgagcaacagaaccttgaggctgaaatcagaaaaattttgcttgatgttaccaaaacaatagcggagcacgccggggcgttaaaacaatttcatctaacaatattaaatattgaagtgttaatggcaaaggcgcggtattcgattgagaccggcggatatttttctcccgatgaagaatcggcgaaccttgccctggtgcaggcaaaacaccccctaataaacaatgccgtacccattgacttgaccatggacggcggcacgttggcactcatcatcaccgggccgaataccggcggcaaaacggtcgcgctgaaaaccgccggcattttcgccctgatgaatcaaattggtcttgccctgcccgcggcggcgggcactacccttccggtgtttgatggtgtttttgccgacatcggcgacgagcaatccatcggtcagtcgctttcaactttttccgcccacattaccaatatcgccaacatcgtcagccattctaccgaccattccctggtactgcttgacgaactcggctcangaaccgaccgcaggaaggcagcgccatcgctatggcgatactcgaccgccttatag

SEQ ID NO: 2066 - protein, 309 aa, Unknown
  Obtained from environmental sample
  DOMAIN (166)...(308): MutS domain V
  misc_feature (1)..(309): Xaa is any amino acid
MDQIGRGLAAAVFRVMDREGGLRDLPELRAIKRRIQSLNAALETAVSRYASDDEVRRMLQSTVPSQRDGRTVLAVKANFRGRIRGIVHEVSSSGQTIFVEPENVVEKNNEIIIEQQNLEAEIRKILLDVTKTIAEHAGALKQFHLTILNIEVLMAKARYSIETGGYFSPDEESANLALVQAKHPLINNAVPIDLTMDGGTLALIITGPNTGGKTVALKTAGIFALMNQIGLALPAAAGTTLPVFDGVFADIGDEQSIGQSLSTFSAHITNIANIVSHSTDHSLVLLDELGSXTDRRKAAPSLWRYSTAL

SEQ ID NO: 2067 - DNA, 666 bp, Unknown
  Obtained from environmental sample
  misc_feature (1)..(666): n is a, c, g, or t
atgggggcgggcggaatacatgatcagggttatatgcttgtaccggactcaagcggggcgcttatttattttaacaacaagaaacaaagccaaattccctacagtataagggtctatggatgggatgaagcgatgccccgcgatgccatagttgtagacaacaaggccctgtttcccgccttcggtattcataaaaacggaaacgccatgttatgtgtcattgaggaaggttcggcttacgcgaacatccgcgccgacgtatcagggcggaacgcctcatggaacagggtatacccgttattcgatatggttcacggcgctaaaatggatattacgggacgcaacgagcgcgatgtttatctttatgaatcaaccttgccggcgggggaaaatattacattgcgttataccctgtgcgaaaattccggttatatgggcatggcggaagaataccgctcatggttattgaataaatatcccgctcttgcgaaaaggtctgccgctcaaagcggcgttccgattgcggtggagttaatcggcgcggttaacaaaacacagcaccgtctcgggctaccttttgatctgccgttaaaacttacatcatacagggaaatggaatccatgattaacgatttcagcaattatggatggaagaacttaaaataa

SEQ ID NO: 2068 - protein, 221 aa, Unknown
  Obtained from environmental sample
  misc_feature (1)..(221): Xaa is any amino acid
MGAGGIHDQGYMLVPDSSGALIYFNNKKQSQIPYSIRVYGWDEAMPRDAIVVDNKALFPAFGIHKNGNAMLCVIEEGSAYANIRADVSGRNASWNRVYPLFDMVHGAKMDITGRNERDVYLYESTLPAGENITLRYTLCENSGYMGMAEEYRSWLLNKYPALAKRSAAQSGVPIAVELIGAVNKTQHRLGLPFDLPLKLTSYREMESMINDFSNYGWKNLK

SEQ ID NO: 2069 - DNA, 414 bp, Unknown
  Obtained from environmental sample
  misc_feature (1)..(414): n is a, c, g, or t
atgggccgtatcattgtatggcaatcccaggttaacaaaagatatgattttttaatatcgtcgaactatgaaaatattgataaattaaaaagagcattggatgattttggagcaccgcctattgatatagaattatataaaaaagaaaaagatgcagttattagaatgggtatttcaccaatacaaatcgatgttattaaacaagctactggcattattatggatgaatgttataaaagaaaagaaatattgtatttagacgatttaaaaataaatgttatttcaataaaagatttaataataaataagcgagcggcaggaagagatcaagatattacagatgcgaatacattagaaaagtttatcaagttgaagaaaaatgaatatataagtattaaagaaggctctaagtag

SEQ ID NO: 2070 - protein, 137 aa, Unknown
  Obtained from environmental sample
  misc_feature (1)..(137): Xaa is any amino acid
MGRIIVWQSQVNKRYDFLISSNYENIDKLKRALDDFGAPPIDIELYKKEKDAVIRMGISPIQIDVIKQATGIIMDECYKRKEILYLDDLKINVISIKDLIINKRAAGRDQDITDANTLEKFIKLKKNEYISIKEGSK

SEQ ID NO: 2071 - DNA, 720 bp, Unknown
  Obtained from environmental sample
  misc_feature (1)..(720): n is a, c, g, or t
atgtatttgatattgccgccgtcggacaccggcgccagtaccggcgctgacgccaaaatgcggatgtttaaccgtgacggcagtgaaagcggcatgagcgggaacgccatccgctgtgtggcaaaatttttgtatgataacggtattgtcaaaaaatacgatatgcaaatagagacaaagagtggcataaaaaaactatacatctccacacgcaaccaggtggtgtcgtcagtcaaggttgatatgggacgcgctgaactgcgccctgaacagatccccgtaaatctgaccggagaaagcgtgattaaaagaaaagtgaccatcggcggcgaagaacgagatattacctgcgtttccatgggcaaccctcacgccgtagttttatgtgataaaattgacgatcttgatttgggtaaaataggcccgctgtttgaaaacgatcctctgtttccggatcgtgtgaacgttgaatttgtaaaagttatggacaagaagcatttaaaaattcgcttatgggaacgcggcagcggcgaaaccagggcaagcggaaccgccgcctgcgcaagcgcggtggccgcggtcctgaacggcaaatgcgacaaggacaccgacattaaagtgcgtctgccgggcgggaatttgattatccgttacacggatgaggctgtatacatgaccggcgattgcgtaaaagtgtttgaaggtactgtggaaatttaa

SEQ ID NO: 2072 - protein, 239 aa, Unknown
  Obtained from environmental sample
  DOMAIN (1)...(88): Diaminopimelate epimerase
  misc_feature (1)..(239): Xaa is any amino acid
MYLILPPSDTGASTGADAKMRMFNRDGSESGMSGNAIRCVAKFLYDNGIVKKYDMQIETKSGIKKLYISTRNQVVSSVKVDMGRAELRPEQIPVNLTGESVIKRKVTIGGEERDITCVSMGNPHAVVLCDKIDDLDLGKIGPLFENDPLFPDRVNVEFVKVMDKKHLKIRLWERGSGETRASGTAACASAVAAVLNGKCDKDTDIKVRLPGGNLIIRYTDEAVYMTGDCVKVFEGTVEI

SEQ ID NO: 2073 - DNA, 546 bp, Unknown
  Obtained from environmental sample
  misc_feature (1)..(546): n is a, c, g, or t
gtggcggttggggtcagccgagtaggggagtttatcaatagcaatttcatggaccggcccgtctggaattccgattttgtaactctgtgtgtgaacgcggccatccatgtgaacaaaagcttcgcaccattgggaaagggcgttcacaacggacacaccaacgccgtgaagacctccggacaccttatacgactttttatcgaacttgccgccagcgtgaagccgggtcattaccagctccagggcgcttataccctcgcccggatgtatgtcaacagggataccacggccgttatcttcgacacgcaccacatcgtttacttcaagggccacaagaatattgtcgcagtggccctgcattgcttcgtcaaccgaattatctactacttcaaaaaccagatgatgcaagccgtcaatactggtggttccgataaacataccgggccgttttcgtaccggctccaaaccttcaagaacagtgatgttttgtgcagaatagtcagaactcattgttcaatgatattgaaaacaggcaaaaaagtatag

SEQ ID NO: 2074 - protein, 181 aa, Unknown
  Obtained from environmental sample
  misc_feature (1)..(181): Xaa is any amino acid
MAVGVSRVGEFINSNFMDRPVWNSDFVTLCVNAAIHVNKSFAPLGKGVHNGHTNAVKTSGHLIRLFIELAASVKPGHYQLQGAYTLARMYVNRDTTAVIFDTHHIVYFKGHKNIVAVALHCFVNRIIYYFKNQMMQAVNTGGSDKHTGPFSYRLQTFKNSDVLCRIVRTHCSMILKTGKKV

SEQ ID NO: 2075 - DNA, 906 bp, Unknown
  Obtained from environmental sample
  misc_feature (1)..(906): n is a, c, g, or t
ttgcttcgcttgaaagcaaaatannggattatcgggcaaaatctgactatgttctggaagccccaaaaaaggacaaagaaacagaggaaaacaacatccaaaagcccagacaaagagaaaaaacgtcagnnaagggggaattcccgccaaactgccgatgcaggacgaaattcctcgccttcctcaaaagaaaccgggaaaagggccaaccaccnccagctccaggaagaatacaccttcgatacctatgtggtcggggaggtcaacaattatgcttttaacgccgcttctgccgttgcacggaacccgggaaactccaaaatctacaatcctttgcttatatacggcggtaccggacttggaaagacccatcttatgcaggcaatcggccatcacatatacacaaacagcgatctccaaattctctacataaccggcgagggctttatgcatgaattcgtggaaacagtgggtttgggccaaaaaaacaaagacgctttcgcaaaaaaataccgcagcgtggacgctcttttaatagacgacattcataacataggcgcacaggccacaggcacccaggacgagttgttttatacgtttgaggccctttacaacaagaaaaaacaaatggtatttacctgcgacaggccaattgcggaattaaaacacatagccgaccgcttaaaatccaggttttcaagcggggttagcgtagaacttcaattgcccaagtacgaagaattgataaacatcctaaaaagaaaagtagagctaaaaaaaatcgaactgaaaaaaaatatagaaatttcagatgaaataatcgagctgataatcaaaaatatctcttccaatgtccgcgatatggaaggagccttgaataaactgatgggttacgcggattggtaa

SEQ ID NO: 2076 - protein, 301 aa, Unknown
  Obtained from environmental sample
  DOMAIN (111)...(301): ATPase family associated with various cellular activities (AAA)
  misc_feature (1)..(301): Xaa is any amino acid
MLRLKAKXXIIGQNLTMFWKPQKRTKKQRKTTSKSPDKEKKRQXRGNSRQTADAGRNSSPSSKETGKRANHXQLQEEYTFDTYVVGEVNNYAFNAASAVARNPGNSKIYNPLLIYGGTGLGKTHLMQAIGHHIYTNSDLQILYITGEGFMHEFVETVGLGQKNKDAFAKKYRSVDALLIDDIHNIGAQATGTQDELFYTFEALYNKKKQMVFTCDRPIAELKHIADRLKSRFSSGVSVELQLPKYEELINILKRKVELKKIELKKNIEISDEIIELIIKNISSNVRDMEGALNKLMGYADW

SEQ ID NO: 2077 - DNA, 831 bp, Unknown
  Obtained from environmental sample
  misc_feature (1)..(831): n is a, c, g, or t
ttgaataccggaaagcacactcttcattttgttatgaccccgatggtgcattggcccgaagtcatgatgacttacgactctaccgataaaatacttttttcagcggacgcctttggctgtttcggcgcgttaaacggcgctcttttcgcagacgaagtggatttcgcgaaggattatatggacgaggcaaggcgttattattcaaatatagtcgggaaatacggggtacaggttgaatcggcgctggacaaagcgtccgctctcgatatcgaaatgatatgtccgcttcacggctttgtatggcgttcaaacttaaatgaaatcctttcaaaatatatgctgtggagcaggtacgagccggaagaacgaggcgttatgatcgcttacgcgtccgtttacgggaatactgaaaacgccgcggaaattcttgcctgccgcctgcgcgacaaaggaatcaaaaccgttatatttgacgtttcagttacgccggcctcccagatagtcagcgccgcgttcaaatggagccacctggtattcgcatccacaacctataacgcgggaattttcgtaacaatggaagcattgattaacgatctcgccgcgcacaatattcaaaaccgccgcgtcgctataatcgaaaacggttcatgggctccaacaagcggcggcttgattcgcgaaatactgggcaagtgcgaaaaaatcattattcttgaaaacagtgttagcatactgtccggcttaaaagcctcgcagctttcggatattgaatcaatggcggaagcgattggcaaggacttccgccgctcccgcgggagtcgccccagataa

SEQ ID NO: 2078 - protein, 276 aa, Unknown
  Obtained from environmental sample
  misc_feature (1)..(276): Xaa is any amino acid
MNTGKHTLHFVMTPMVHWPEVMMTYDSTDKILFSADAFGCFGALNGALFADEVDFAKDYMDEARRYYSNIVGKYGVQVESALDKASALDIEMICPLHGFVWRSNLNEILSKYMLWSRYEPEERGVMIAYASVYGNTENAAEILACRLRDKGIKTVIFDVSVTPASQIVSAAFKWSHLVFASTTYNAGIFVTMEALINDLAAHNIQNRRVAIIENGSWAPTSGGLIREILGKCEKIIILENSVSILSGLKASQLSDIESMAEAIGKDFRRSRGSRPR

SEQ ID NO: 2079 - DNA, 480 bp, Unknown
  Obtained from environmental sample
  misc_feature (1)..(480): n is a, c, g, or t
atgaaaacagcggttatttactattccctgaacaggagttgcgcccttattgcaaaagagctcaaggcaaggctggatgccgatttgctccgtctgcacacggaagatgaaaaaccgcgccggggtttaatacaatttttctgggcaatcggcgttatgagggggagtaaaaaagccccgctcaagccttatgcttttaatccagcggcttacgatttaattatcataggttccccggtttgggccggctcccccgcgcggccaatacgcgacttccttgccgaaacaagcattacaggcaaaaaaatcgccctctttgtctgtcacgccggcggcgcgggaaagtccctggaaaaattcaaggccctgctgcccggcaacaatatagtcgccgcaacagattttattgtcccgataaaaaacagcgagaaagcgaaacaacaggccgcggactgggtgaagggcctgcaggcaagttaa

SEQ ID NO: 2080 - protein, 159 aa, Unknown
  Obtained from environmental sample
  misc_feature (1)..(159): Xaa is any amino acid
MKTAVIYYSLNRSCALIAKELKARLDADLLRLHTEDEKPRRGLIQFFWAIGVMRGSKKAPLKPYAFNPAAYDLIIIGSPVWAGSPARPIRDFLAETSITGKKIALFVCHAGGAGKSLEKFKALLPGNNIVAATDFIVPIKNSEKAKQQAADWVKGLQAS

SEQ ID NO: 2081 - DNA, 864 bp, Unknown
  Obtained from environmental sample
  misc_feature (1)..(864): n is a, c, g, or t
atgggtaaaaccacgctgcttaaaagaatggaagttgaattgcataaagagcaataccggcagcggtttattcccctgctttaccgtgaagagcaatacaatgtaaaagacctcgctgaattctggctgaatactttagacgctttggcggatagcctgcaagcagaaaaatatccggctcaaatggtagataatattgacaaaacaataagggaactatcaaggaaaccgcctaaaattatctcagaagaggcgtataagtatttaatggatatttgttgtgatttacaccgcagaccggttttattgatagataatattggattaatattcggcagattggatagtggtaaagaaaataaaacggaacaatgggctttgcgtaaactgttaagcgagaatggggcgcctattgttgtaagcggaggtgttacccttgttgacaatgtaaataattacggtatgcctttttacgattttttccaaattcaacaactctataaactggactatgaagaatttaaaaaattattattaaatcttgcaactattacgaatagcgacaaaacaatttttgacactattaacgattcccgccaaaaatcattacttgagcttactggcggcagtccgcgtttaacagtaatattatttgaacagattgccaaaggtttttcanataatatatacgatgacctggaaaaattagccgattcgatcactcccttttataaagcgcggtttgaagagttgcccgcacangcacaaattattatagatgctatagcgttgaattgggacgcgatttcgcttaaagacttncacagcgaccgcatgcaaaatatctgctttcgcgcagcttaa

SEQ ID NO: 2082 - protein, 287 aa, Unknown
  Obtained from environmental sample
  misc_feature (1)..(287): Xaa is any amino acid
MGKTTLLKRMEVELHKEQYRQRFIPLLYREEQYNVKDLAEFWLNTLDALADSLQAEKYPAQMVDNIDKTIRELSRKPPKIISEEAYKYLMDICCDLHRRPVLLIDNIGLIFGRLDSGKENKTEQWALRKLLSENGAPIVVSGGVTLVDNVNNYGMPFYDFFQIQQLYKLDYEEFKKLLLNLATITNSDKTIFDTINDSRQKSLLELTGGSPRLTVILFEQIAKGFSXNIYDDLEKLADSITPFYKARFEELPAXAQIIIDAIALNWDAISLKDXHSDRMQNICFRAA

SEQ ID NO: 2083 - DNA, 558 bp, Unknown
  Obtained from environmental sample
  misc_feature (1)..(558): n is a, c, g, or t
atggaaacaaaaattatacagctaacaaccccgttaggccgttctgatattgccggtcttgaaatcggcgatgtcgtcgaacttagcgggttcatttttacggccagggacgcggctcacaaacgcatggaaagcgcctggaaacagggggtgcctctgccggttgaccttaaaggccagcttgtcttttacgcgggcccctgcccggccaaaccgggtcatgccgtgggttccatcgcccccacgaccagtatgcgtatggacggctttgtcgagatgacatttgaactggggcttatcgggatgattggcaagggtgatcgttccgattttgttcccggcctctgcaaaaaatacggcggtgtctatttcctcggcatcggcggcgcctcagcgctcatttcaaaacaggtaaaaagctgcgaagtggtcgcctgggaagaccttggaaccgagtccgtcaaaaagctggaagttgaaaaattacgcctgatagtggggatagattcccagggcagggtttttcaggacagggagatcgctaaataccggcggtga

SEQ ID NO: 2084 - protein, 185 aa, Unknown
  Obtained from environmental sample
  DOMAIN (1)...(181): Fumarase C-terminus
  misc_feature (1)..(185): Xaa is any amino acid
METKIIQLTTPLGRSDIAGLEIGDVVELSGFIFTARDAAHKRMESAWKQGVPLPVDLKGQLVFYAGPCPAKPGHAVGSIAPTTSMRMDGFVEMTFELGLIGMIGKGDRSDFVPGLCKKYGGVYFLGIGGASALISKQVKSCEVVAWEDLGTESVKKLEVEKLRLIVGIDSQGRVFQDREIAKYRR

SEQ ID NO: 2085 - DNA, 765 bp, Unknown
  Obtained from environmental sample
  misc_feature (1)..(765): n is a, c, g, or t
atgaacgccctcaaccctacgaggaagattattcgatttattgaagatgtgcttgaggcccacgggaaggggctttccaaaaaggaggtctacaatctggcgcgggaacgttttgctgttctcaatttgccggaaaaggtgttgaaccaatacgccgttgagctttctggtggcatgaagcagaggacgatcattgccatttctaccattctgaatcccaaggttcttatcgccgatgaaccttcttcggcgctggatgtctcctcccaaaaaattgtaattaaactcctgtacgatcttatggagaaaggctttgtccgctcaatgatttttatcacccacgagcttccgctgctcttcaatgttaccgatgacataatggtaatgtacgccggagaaattgtggaacgcggaacggccagggaaatggtatttgatccaatcatgccctattccaaagggcttatgaattcgatcatcgtgccggaagaaggaaccaggggccatgtattaatggccattcccggcgcgccgccgaatttaaaattcaagccgtcgggctgccgctttgccgagcgctgccgttttgccgatcctgagtgttccagagaaactgtcggcgagcagtacggcggcgccgagggaaggacttaccgctgtcgccataaactggaagaactctttcagatatacgaaaacgatctccccaaccttttggatcatgacaaagaanaaaacgacggtagcagcgatgaaaagaactag

SEQ ID NO: 2086 - protein, 254 aa, Unknown
  Obtained from environmental sample
  DOMAIN (1)...(132): ABC transporter
  misc_feature (1)..(254): Xaa is any amino acid
MNALNPTRKIIRFIEDVLEAHGKGLSKKEVYNLARERFAVLNLPEKVLNQYAVELSGGMKQRTIIAISTILNPKVLIADEPSSALDVSSQKIVIKLLYDLMEKGFVRSMIFITHELPLLFNVTDDIMVMYAGEIVERGTAREMVFDPIMPYSKGLMNSIIVPEEGTRGHVLMAIPGAPPNLKFKPSGCRFAERCRFADPECSRETVGEQYGGAEGRTYRCRHKLEELFQIYENDLPNLLDHDKEXNDGSSDEKN

SEQ ID NO: 2087 - DNA, 795 bp, Unknown
  Obtained from environmental sample
  misc_feature (1)..(795): n is a, c, g, or t
ttgatgcgtacccctgttgaaattatggacgatgcgtatggttatgtttttattactttggccggaagtttcatcgggattttttccaatatgctagccggtataattcgcgccggcggagacagctttacgcccacggttttttttcttgttggaatcgtaagcaatatatttctggatatactctgtgttgtagtttttcactggggggttcgcggggcggctgccgcgtcggtgttctcgcagtttatttcatgcgtccttttcctttttttaaaaatccgccgcttctcccggtttttcccgcagcggcaggattggcttgctgggcggcgggattttggcgtccatctttccatgggaatatctatgggccttctgcattctatagtggaggccggaaacattctgatacaagcggcggttaacagccttggcgcgctgactatagcggcggtgtccgcggcccagcgcgtccggggccttaacatgatgcctctttttgccctttcacgggcaatgactacctatacagcgcagaattatggcgcggataaaatggacagggttaataaaggtattttccaggcctgccttatcagtctgggtctgggcgttttcatggcaactgtgaaccggtttaccggcgcacccattgccgcactttttctaaaagacagccccgaggccgtagctcttgcccatcgttttatcctttatacaggttacacagtttttatcctggggataatgctgttttccgcagcagcctacagggcctctcggccgatctga

SEQ ID NO: 2088 - protein, 264 aa, Unknown
  Obtained from environmental sample
  DOMAIN (121)...(264): MatE
  misc_feature (1)..(264): Xaa is any amino acid
MMRTPVEIMDDAYGYVFITLAGSFIGIFSNMLAGIIRAGGDSFTPTVFFLVGIVSNIFLDILCVVVFHWGVRGAAAASVFSQFISCVLFLFLKIRRFSRFFPQRQDWLAGRRDFGVHLSMGISMGLLHSIVEAGNILIQAAVNSLGALTIAAVSAAQRVRGLNMMPLFALSRAMTTYTAQNYGADKMDRVNKGIFQACLISLGLGVFMATVNRFTGAPIAALFLKDSPEAVALAHRFILYTGYTVFILGIMLFSAAAYRASRPI

SEQ ID NO: 2089 - DNA, 798 bp, Unknown
  Obtained from environmental sample
  misc_feature (1)..(798): n is a, c, g, or t
atgatttcgatacctgccggaacctttaagatgggcagtccctcaactgaaccgtacaggacagacgatgaaacacaacattcagtaacgcttagcggttttaaaatgggtaagtatcaggtaacgcaagagcagtatcaggcggtgatgggaagtaatcccagttattttagctctaacccggaaaatcttgaaactcaaggaaggcgtccagttgaaaatgtaagttggtatgacgctttggtattctgcaacaaattgagcataaaagaaggattaactccggcatacagcattagcggcaaaaccaatcctgcggaatggggaacagtaccaacaagcgcctatgcctatgatactgactatgaaacatggaacaccgctgtaatcgttaatggtactacaggatatcgtttgccgaccgaggcgcagtgggagtatgcatgtcgggcaaagacaacaacagcgtacaacacagggaatacgatcagcgataatacggggtggtatgatagtaacagtgggcaaacaacacatgaagtgggaaagaaacccgcaaatgcttggggattgcatgatatgcacggaaacgtgttggaatggtgctgggactggtatggcacctattcaagcagtgctcagaccgaccccatgggcgcgtcctcggggtctgcccgcgtgttgcgcggcggtagctggagcgattcggctgagggcctgcgttccgcgagccggtacggcatcagcccgaactcccggcactactacagcggcggcttccggctcgtccgcccctag

SEQ ID NO: 2090 - protein, 265 aa, Unknown
  Obtained from environmental sample
  DOMAIN (1)...(264): Domain of unknown function (DUF323)
  misc_feature (1)..(265): Xaa is any amino acid
MISIPAGTFKMGSPSTEPYRTDDETQHSVTLSGFKMGKYQVTQEQYQAVMGSNPSYFSSNPENLETQGRRPVENVSWYDALVFCNKLSIKEGLTPAYSISGKTNPAEWGTVPTSAYAYDTDYETWNTAVIVNGTTGYRLPTEAQWEYACRAKTTTAYNTGNTISDNTGWYDSNSGQTTHEVGKKPANAWGLHDMHGNVLEWCWDWYGTYSSSAQTDPMGASSGSARVLRGGSWSDSAEGLRSASRYGISPNSRHYYSGGFRLVRP

SEQ ID NO: 2091 - DNA, 795 bp, Unknown
  Obtained from environmental sample
  misc_feature (1)..(795): n is a, c, g, or t
ttgaaggagcagttggaggaactgcatacccggatagacgacgcctcaaaatcggtaacggtgattgaggtggaactgcgcaccatatacgaaatgttttacgagaactatagcatagacctcgcggaacgcgaaaaagctatccataaccgaaccttcgacgcgatttcgcttagagccgatctcaaaacgattaaggatgagctgcgcgatatcggacaggtgaacccgatagccatagacgaatgccgcgaactggaggaacgctttactctccttcgcgagcaggtggaagatattgagaaatccgcgaaaaatcttgaggcgatcatcaaggatatcaacaagaactccgaggaactctttcaggaaaccttcaataaggtcaaaatcaattttcacaagatattcaggcggctctttgacgggggcagggcggagatccggctcaccaacccggagaatatgctggagtccggcgtggagattttcgtacagccccccaagaaggcattgcagaacgaggctctgctctccggcggcgagtcctcgctgaccgccatcgccttgcttttcgcgatttttatggtgcatccaagcccattctgccttctggacgagattgacgccgccttggacaaacctaatattgagcgttttaagaaattattgctcgaattccgcgataccacccaattcctgatcatctcgcataatatcgctaccctgaaggccgccgacgccctgtatggggtttcatggaggaagacggcgtatcccacgcgctctcgatag

SEQ ID NO: 2092 - protein, 264 aa, Unknown
  Obtained from environmental sample
  DOMAIN (88)...(260): RecF/RecN/SMC N terminal domain
  misc_feature (1)..(264): Xaa is any amino acid
MKEQLEELHTRIDDASKSVTVIEVELRTIYEMFYENYSIDLAEREKAIHNRTFDAISLRADLKTIKDELRDIGQVNPIAIDECRELEERFTLLREQVEDIEKSAKNLEAIIKDINKNSEELFQETFNKVKINFHKIFRRLFDGGRAEIRLTNPENMLESGVEIFVQPPKKALQNEALLSGGESSLTAIALLFAIFMVHPSPFCLLDEIDAALDKPNIERFKKLLLEFRDTTQFLIISHNIATLKAADALYGVSWRKTAYPTRSR

SEQ ID NO: 2093 - DNA, 987 bp, Unknown
  Obtained from environmental sample
  misc_feature (1)..(987): n is a, c, g, or t
atgcatcagattggccgagagcgccctgcaaaaaagaccgaagaaagggacgcggtcagggaaacgatagaagccgccaacaaggcccttgaagaaaacatggacaaggtaaactccatggaagccgccctggcggaacaccagaaaagcatttacggcctggcggtggaaaaaaacgctcttgaaaaggaagtccgccttctttccgaacagcggggcgacatcaaggccaaaatcgcggtaaacgaaggccgcgaaaaggcggcgggcatcaaaattgaagagcttttaagcgacgcccaggaacaggacggggttgtccgcgacttgcagaaacaagttaccgccatagaagacaatatccgctcttttgaggggaacatccagcttacctccacattgattagagagaacgaaagctcggtcaaaaaaaacgaggaggacatacgccgccttgaattggaccgggcggcaagggagaaggatttagaggccataaccgacgacattgtggccgcccttgacgcgggcttaagggaagccggctattctgcggcggaaaggcggtataccgaagccgccttaagcgaaaccttaaccttgcttaaaaccacgctttccggcagggaggctcttatccgcgacctttccgccgcggcaggcagagccgtttccggcgaaaaaccgccgggcgcggaagaattgaagcgcatagccgaaagcctggccgccgggcttgccgaagccgctagccgttccgaaaaggcaatttcgctctttgaggcctaccgcaagagttccccctctttcctggatgacttcctggctccggaagggatcatcacaaaaaagcgggctttggacgcggaaatccgttcctgccgggtaggggttctgggaaaacgcgagcaaatagcagttttaagaaagcacaacgacgaccttggcaaaaaatcaacgagtaccgcagtacgctggaagacttag

SEQ ID NO: 2094 - protein, 328 aa, Unknown
  Obtained from environmental sample
  misc_feature (1)..(328): Xaa is any amino acid
MHQIGRERPAKKTEERDAVRETIEAANKALEENMDKVNSMEAALAEHQKSIYGLAVEKNALEKEVRLLSEQRGDIKAKIAVNEGREKAAGIKIEELLSDAQEQDGVVRDLQKQVTAIEDNIRSFEGNIQLTSTLIRENESSVKKNEEDIRRLELDRAAREKDLEAITDDIVAALDAGLREAGYSAAERRYTEAALSETLTLLKTTLSGREALIRDLSAAAGRAVSGEKPPGAEELKRIAESLAAGLAEAASRSEKAISLFEAYRKSSPSFLDDFLAPEGIITKKRALDAEIRSCRVGVLGKREQIAVLRKHNDDLGKKSTSTAVRWKT

SEQ ID NO: 2095 - DNA, 825 bp, Unknown
  Obtained from environmental sample
  misc_feature (1)..(825): n is a, c, g, or t
gtgggcgcttcgcgtcaacagatcgccgtccccgtgaacggcggttttttccgcgccaagggaaaagacagcgacacgctctctctcgccctcagcgtggacactaccatgcagaagtacgccatgagcatattccaccaatacaaaccgcgctacgcggctatggcagctatcgatccgtctacgggccgcgttctggcgctggcttcatacgccaacgacagcgaggagatagacggctccgacctctacctgaagaattactttccggcggcctccgtattcaagacgatagtagccgccgccgccgtggaacgcggcggcatgaacggcaaaacggtgttggagcacttcgggcgcaaccacacgctctacactacgcagttacagaaagatctcaaagtttcacgcgaaattaccttagaggacgcctacgcctactccgtaaatccggtcttcgcacgcatagccctcttcaacatcaacaaggatattgtaacggagtacgggcgccgcttcgggttcaatgaatccataccgtttgagtacgatgtggaagtgagcgagatgttcgcgccggacaccggattctccgtggcggagttcgcctcaggcttcaaccgtaagacgaccatcacccccatcttcggggcgctcttggcgggggcgatatgcgagaacggcgtgatctttgaaccgacaataatcgataccgtccgctccgcccgcggcgactcatgcgtctacgtcaggcggccaaaggtatggcggcgggcggtaaaggaatccaccgccgcaaaactcagggagttgatggcaaggtga

SEQ ID NO: 2096 - protein, 274 aa, Unknown
  Obtained from environmental sample
  DOMAIN (53)...(273): Penicillin binding protein transpeptidase domain
  misc_feature (1)..(274): Xaa is any amino acid
MGASRQQIAVPVNGGFFRAKGKDSDTLSLALSVDTTMQKYAMSIFHQYKPRYAAMAAIDPSTGRVLALASYANDSEEIDGSDLYLKNYFPAASVFKTIVAAAAVERGGMNGKTVLEHFGRNHTLYTTQLQKDLKVSREITLEDAYAYSVNPVFARIALFNINKDIVTEYGRRFGFNESIPFEYDVEVSEMFAPDTGFSVAEFASGFNRKTTITPIFGALLAGAICENGVIFEPTIIDTVRSARGDSCVYVRRPKVWRRAVKESTAAKLRELMAR

SEQ ID NO: 2097 - DNA, 591 bp, Unknown
  Obtained from environmental sample
  misc_feature (1)..(591): n is a, c, g, or t
gtgtctgcgtacagattccccctggtcaaggcgttaggcgcaagctatatcgaaacggccttccgtaccgcgcgggaaaccgatcccgatattatcatatattacaatgattatttttgttatgatgatctgtataaagttgaagcggtatgtaaaatgattaacgacataaataatcggtacaaaaaagaaacaggacaggatcgaaaccttatcgaagggttaggtattcaggctcatcatcaagttaagtattttgatgaaagaaaagtacgcttgcctctggaaaaatttgcatctctgaatattgaactttcaataagcgaactggacgtaactactgctggttatgatgtaggggagggaatggacattgttatgacagaatatgatactgcggtacaagcaggtatctatgcccgtcttttcaggatataccgggattacgccgcttatatatcacgaataaccttttggggcgtagatgactacaacagttggctttccgccggaaccccctgcctttttgaccgctacctaaaccccaagaaagcatataatgcggtatttacccctgaaattaaatgttaa

SEQ ID NO: 2098 - protein, 196 aa, Unknown
  Obtained from environmental sample
  DOMAIN (1)...(193): Glycosyl hydrolase family 10
  misc_feature (1)..(196): Xaa is any amino acid
MSAYRFPLVKALGASYIETAFRTARETDPDIIIYYNDYFCYDDLYKVEAVCKMINDINNRYKKETGQDRNLIEGLGIQAHHQVKYFDERKVRLPLEKFASLNIELSISELDVTTAGYDVGEGMDIVMTEYDTAVQAGIYARLFRIYRDYAAYISRITFWGVDDYNSWLSAGTPCLFDRYLNPKKAYNAVFTPEIKC

SEQ ID NO: 2099 - DNA, 663 bp, Unknown
  Obtained from environmental sample
  misc_feature (1)..(663): n is a, c, g, or t
ttgggagagcataaaaaagccggttaccttatatgcaacaatggtactttaatacaggaaagccataccggtaaaatcgtctacgagagtaaaatggacgcaaaaatcgcgcttaccgcctttgatttagccgatgccgaaggctttcccgtacagatttatgaagatgatataatgtatgtatcgcgccataatgaatatacaggctatgatcagaaacttaccggtcttagacaggtagtagtggaacattttcgggctatggtcagcaacggctgccataaactgcttattcccggcgatcccacgctccttgttccgctggaaagtattttacgtacctatcttggagacaatattaccatctttaccagcaagccatattttctggaattattacccgtcaataccaacaaaggtacagcccttgagaaagttgcgaatttactgggagttaatcaaaaagaggtgatagctattggggattcgatgaatgacgaagccatgctccgctgggccggtatgggtattgcaatggcaaacagcgatgaacggataaaaaacatcgcggatctggtaacatcaaaggacaatgatgatgacggcgttgccgaagtcattgaaaaatatatcctgtcaaaaacggcggtttccaatgagtaa

SEQ ID NO: 2100 - protein, 220 aa, Unknown
  Obtained from environmental sample
  DOMAIN (6)...(183): haloacid dehalogenase-like hydrolase
  misc_feature (1)..(220): Xaa is any amino acid
MGEHKKAGYLICNNGTLIQESHTGKIVYESKMDAKIALTAFDLADAEGFPVQIYEDDIMYVSRHNEYTGYDQKLTGLRQVVVEHFRAMVSNGCHKLLIPGDPTLLVPLESILRTYLGDNITIFTSKPYFLELLPVNTNKGTALEKVANLLGVNQKEVIAIGDSMNDEAMLRWAGMGIAMANSDERIKNIADLVTSKDNDDDGVAEVIEKYILSKTAVSNE

SEQ ID NO: 2101 - DNA, 825 bp, Unknown
  Obtained from environmental sample
  misc_feature (1)..(825): n is a, c, g, or t
gtgcagttgaagagctcaagcagctctgtagcagcaacgggttcaagcagttccgtgtcagcaacaggttcaagcagttccgtgtcagcaacgggttcaagcagttccgtgtcagcaacaagttccagcagccgtaatggggcagtaagctcaagcagccgtgcaagctcaagcagccgtgcaagctcaagcagccgtgcaagctcaagcagccgtaatggagcagcaagttcaagcagccgtgctgcatctagtagttcagtgacaacaggaggcacaagcagccaatcatctggagctattaccacgcggtcttggactaatgtcaattacgtgccgtccaccgccactgggaaaaagcacgaccgccaaaaattagaccttaaattgccggattcggggaacggacctttcccattgatattgtatgtccacggcgggggatttaccagcgggaactggcagttatctagtaacaacaacgggcttatttcagccgctcgaggcaagggttatgccgttgccagtgccggatacctcttgtacggtaacaatccccaaaatccgtctttcccgtatatggtggaggatattttggcggctatacgccatttaagagccaacgcagaaacataccatcttgacccaaataagttcgtcgtagcgggtttctcggcgggaggctacttgtctaatatagtttgcgccctttccggcaacacgacccacaattatgatataaccacgctcggcaacgctggtgtttccagtgatgttcaggcggcggcaagttcggcggggcttacggatttctccaagtggtag

SEQ ID NO: 2102 - protein, 274 aa, Unknown
  Obtained from environmental sample
  SIGNAL (1)...(30)
  DOMAIN (141)...(273): alpha/beta hydrolase fold
  misc_feature (1)..(274): Xaa is any amino acid
MQLKSSSSSVAATGSSSSVSATGSSSSVSATGSSSSVSATSSSSRNGAVSSSSRASSSSRASSSSRASSSSRNGAASSSSRAASSSSVTTGGTSSQSSGAITTRSWTNVNYVPSTATGKKHDRQKLDLKLPDSGNGPFPLILYVHGGGFTSGNWQLSSNNNGLISAARGKGYAVASAGYLLYGNNPQNPSFPYMVEDILAAIRHLRANAETYHLDPNKFVVAGFSAGGYLSNIVCALSGNTTHNYDITTLGNAGVSSDVQAAASSAGLTDFSKW

SEQ ID NO: 2103 - DNA, 918 bp, Unknown
  Obtained from environmental sample
  misc_feature (1)..(918): n is a, c, g, or t
atgcgcacaaagatggagttggcacagaaggcgagtgggattgttctgtggaccacccaaggcaacgcaagcactgttcaatggtgtaaacaatccggttttgatatagtcagaattcccgtcacttggactggacatataggttcttcccctgattacaccataagcccagctagattgcagcgtgtggttgaaattatagattatgctaaaactgctggcataaaggctatgattatcaatatacaccacgatgggttatatatggataaagatggtggaactactcttggatttttgaattttccgaaagcagaaaagagtgctgatgaaaagaccaaaatacaaaatgaacttgtcaaagtttggacacagatagccaactattttaaaaattacggagattaccttatttttgagactatgaacgaggttcataatggcaattggggaaatggaagcggctcagcttacgaaaaacaacaagacctactctttgattggaataaagcggcacttgatgcgattcgcgctactggtggaaataatgctactcgctttgttgcgattccgggtttgggcagcacagagccaagtatggttattagcgcccataaccgacaaaaattgctgccaagtgacggtacaaatggtactggaaaattgattgtttctgttcattattaccatccgtggcgatatactgtggcagatccaaacagcacaacggaaccattgttgcatacttgggacgcttctgaacgcggtcatccggctagcgcaatgggttcgctaaaaactacttttatagacaaaggaattgcggtttatctaggcgaatggggtgccccaactgggctacgcgcaactatgtcagcagaaataaaagctactcatcgcgagtctcggccgatctga

SEQ ID NO: 2104 - protein, 305 aa, Unknown
  Obtained from environmental sample
  DOMAIN (2)...(305): Cellulase (glycosyl hydrolase family 5)
  misc_feature (1)..(305): Xaa is any amino acid
MRTKMELAQKASGIVLWTTQGNASTVQWCKQSGFDIVRIPVTWTGHIGSSPDYTISPARLQRVVEIIDYAKTAGIKAMIINIHHDGLYMDKDGGTTLGFLNFPKAEKSADEKTKIQNELVKVWTQIANYFKNYGDYLIFETMNEVHNGNWGNGSGSAYEKQQDLLFDWNKAALDAIRATGGNNATRFVAIPGLGSTEPSMVISAHNRQKLLPSDGTNGTGKLIVSVHYYHPWRYTVADPNSTTEPLLHTWDASERGHPASAMGSLKTTFIDKGIAVYLGEWGAPTGLRATMSAEIKATHRESRPI

SEQ ID NO: 2105 - DNA, 486 bp, Unknown
  Obtained from environmental sample
  misc_feature (1)..(486): n is a, c, g, or t
ttgcgagataataaccggaaaggagagaaaatgaaaacatttaaaggcagggtcatcgttccttccggggatggaaaagaagttaacgccgaggcgctggtttcaagccggggctttaatacgctggcgagtttccagaaagctttgatgttcggcgataaagaggcgcgatgctcggatcagaacaacgaggatatttacggcaagccaatggcgggaaaggccctgtgccttcctcagactatcggctccaccaccggcggcatggtgcttttctgcgccgcctcgatggagcgccaacccgcctgcctgcttttcacaaagcccatagattccctggctgccgccggcgcaatccttgccggcgtctggacggacaaacccatgcttacgattgattcccttggggacgaattccttgcggcggtaaaatccggttcgcgcgtaaaagccctctgcgacggcacggtagaattagatggttga

SEQ ID NO: 2106 - protein, 161 aa, Unknown
  Obtained from environmental sample
  DOMAIN (11)...(159): Protein of unknown function DUF126
  misc_feature (1)..(161): Xaa is any amino acid
MRDNNRKGEKMKTFKGRVIVPSGDGKEVNAEALVSSRGFNTLASFQKALMFGDKEARCSDQNNEDIYGKPMAGKALCLPQTIGSTTGGMVLFCAASMERQPACLLFTKPIDSLAAAGAILAGVWTDKPMLTIDSLGDEFLAAVKSGSRVKALCDGTVELDG

SEQ ID NO: 2107 - DNA, 852 bp, Unknown
  Obtained from environmental sample
  misc_feature (1)..(852): n is a, c, g, or t
atgaaatttaacatcccgcttcctgcaggtcttacacataagtcaaaatcgcacaccaatccccaacccatagccccgccccgtccacggactaccggtttattggccagagcctcatcccagcatttcaataaccttacagtgataaacctgcacaaaaggttcggcttaaaagaggtagtcaagggagtgaatttctccatgcaaaacggggaggtagccggccttttgggaccaaacggggccgggaagacaaccattttctacatgattgtcggtttctaccgtccaactcaggggacagtcactctggacggcctggacattacctccatgcccatgtaccgccgcgcaaggcacggcatcgcgtatcttcctcaagaagcatcaattttcagaaagctcactgtggaacaaaatatctgggcgattctggaaagccgcacagacatcacaaaagaaaagatgaaagaacgcctggaatacctccttgaagaattcggcatagagcggatcagaaaacagatgggcttcaccctgtcggggggcgaaaggcggcggaccgaaatagcccgctcccttgcgacggaaccaaaattcctgcttctggacgagcctttcgccgggatcgatccaatcgcggtttacgaaataaagcagatcgtccgccgcctcgcggaaaaaggaatcggcattcttatcacagaccacaatgtaagggacacactggaaataaacaccgaagcctttattatcaacgaaaggctcattgtcacacgcggcgctaaagacgaaatcctttccaatgaaatggtcaggagaatttatctgggcagcgaattcangatgtag

SEQ ID NO: 2108 - protein, 283 aa, Unknown
  Obtained from environmental sample
  DOMAIN (71)...(255): ABC transporter
  misc_feature (1)..(283): Xaa is any amino acid
MKFNIPLPAGLTHKSKSHTNPQPIAPPRPRTTGLLARASSQHFNNLTVINLHKRFGLKEVVKGVNFSMQNGEVAGLLGPNGAGKTTIFYMIVGFYRPTQGTVTLDGLDITSMPMYRRARHGIAYLPQEASIFRKLTVEQNIWAILESRTDITKEKMKERLEYLLEEFGIERIRKQMGFTLSGGERRRTEIARSLATEPKFLLLDEPFAGIDPIAVYEIKQIVRRLAEKGIGILITDHNVRDTLEINTEAFIINERLIVTRGAKDEILSNEMVRRIYLGSEFXM

SEQ ID NO: 2109 - DNA, 765 bp, Unknown
  Obtained from environmental sample
  misc_feature (1)..(765): n is a, c, g, or t
atgactgacagggaattgacattgaaacaaaacccccttgttaatgtttcccggccaacggcggcgcgtatgtggcttgtggcaatctgcgcttttttggccgcgctccagtcatccatgggggattcatttctgtccctgatcatcgccctttccgcccttgtttccgcgttgttaaccgaactgcttataacctataaaacgcgcggcttcacaaagataaaagacggaagcgccgccgcgtcggctctggtgcttgccctgctgttcccgaaccatatccaccccgtgtacgcggcgttgagcgccgtatttgccatagccgtggtaaagcacagttttggcggccttggggcaaactggatgaatccggctttgggcggctggctctttgcccgtttttcatggccccagggcttttcaattgcgcttaacaattccatgagcggcatggatggggcgggcaccgctttcggcaatatggtaaacagctccctgaataaaacatttttttcttttcttggggcggaactgccccctggttatattgaccttttcgcgttaaaaacgccgggcattatcgccgaccgcgccgtgcttgtgatcgttctcaccaccgccgtcattgccgcttcccaaataagccgctcgtgggtttcctttgtttacctggcagtcttcggatttttaacgcgaatgctgggggatcctgccctgtggaacggcgacgttatttacgcttttctttcaggcggcactttttaa

SEQ ID NO: 2110 - protein, 254 aa, Unknown
  Obtained from environmental sample
  misc_feature (1)..(254): Xaa is any amino acid
MTDRELTLKQNPLVNVSRPTAARMWLVAICAFLAALQSSMGDSFLSLIIALSALVSALLTELLITYKTRGFTKIKDGSAAASALVLALLFPNHIHPVYAALSAVFAIAVVKHSFGGLGANWMNPALGGWLFARFSWPQGFSIALNNSMSGMDGAGTAFGNMVNSSLNKTFFSFLGAELPPGYIDLFALKTPGIIADRAVLVIVLTTAVIAASQISRSWVSFVYLAVFGFLTRMLGDPALWNGDVIYAFLSGGTF

SEQ ID NO: 2111 - DNA, 630 bp, Unknown
  Obtained from environmental sample
  misc_feature (1)..(630): n is a, c, g, or t
gtgccacatggcaagcctgcccgtggccgtgaacatcaactgccatgcgtccagacacgccagcttggagatttgacaatgagcatacgccaactcgagacgccactcaacgatgaaatagtttcaagcctttcctgcggcgacgaagtccgcttgagcgggactatatacactgcacgcgaccaagcccacagaaggatctgcgcccttatggacaagggcgaaaaattgccgatagaactgacaggcaccgtcatctactttgcagggcctacgcccgcaaagcctggcaagccaattggcagcgtgggcccaacgaccgcctaccgcatggacgctttttcgccaaggctgatagaagccgggctaaaagggatgatcgccaaagggggcagggcgccagaggtgataaatgccatgaaaaaacatggcgcggtttacttcgcggccacaggcggcgccggtgctcttatcgcccagtgcgtgaaggccgccacctgcgtggcatacgaagagcttggcccagaggccatctacaagcttgaggtgaaagactttcccctgctggtggccatagactgcaaaggcaacaacatctatgtgtccgggccggagaaatataaaagctag

SEQ ID NO: 2112 - protein, 209 aa, Unknown
  Obtained from environmental sample
  DOMAIN (4)...(206): Fumarase C-terminus
  misc_feature (1)..(209): Xaa is any amino acid
MPHGKPARGREHQLPCVQTRQLGDLTMSIRQLETPLNDEIVSSLSCGDEVRLSGTIYTARDQAHRRICALMDKGEKLPIELTGTVIYFAGPTPAKPGKPIGSVGPTTAYRMDAFSPRLIEAGLKGMIAKGGRAPEVINAMKKHGAVYFAATGGAGALIAQCVKAATCVAYEELGPEAIYKLEVKDFPLLVAIDCKGNNIYVSGPEKYKS

SEQ ID NO: 2113 - DNA, 546 bp, Unknown
  Obtained from environmental sample
  misc_feature (1)..(546): n is a, c, g, or t
ttgccgcaggcgactacgacacgtccgctagatacgccgatgaagccgccnctgtttgccaaacagtccgacgtatatgtcgccattaccacggcaaagcgctatattgaccaggctgtctcctcaggcgtttctgtgcggtattctcccgaatacagggaagcggaaaattggtatcagcaaagcgtcaacgccagagacagcgaagaatgggacagcgccattgcctccgccaacatggtggtagaattgcttgatggcctggatgcctcagcccctcctcctcctaacgctttgcccgccacttacaccgtgcggccctgggctgtttcaaaggactgtttttggaatattgccggcttcccttgggtttacggcaatccgcgccagtggagagtcctttacaacgccaataaatcaaaactggaaaatccgaataacccgaacgtcctggagcctggtactgttttagacatccccagtataaagggcgaactgcgcgagggggcctgggaaagcggaaggagttacgaaccgctgaaataa

SEQ ID NO: 2114 - protein, 181 aa, Unknown
  Obtained from environmental sample
  misc_feature (1)..(181): Xaa is any amino acid
MPQATTTRPLDTPMKPPLFAKQSDVYVAITTAKRYIDQAVSSGVSVRYSPEYREAENWYQQSVNARDSEEWDSAIASANMVVELLDGLDASAPPPPNALPATYTVRPWAVSKDCFWNIAGFPWVYGNPRQWRVLYNANKSKLENPNNPNVLEPGTVLDIPSIKGELREGAWESGRSYEPLK

SEQ ID NO: 2115 - DNA, 489 bp, Unknown
  Obtained from environmental sample
  misc_feature (1)..(489): n is a, c, g, or t
atggaattgatagactttattgaaccctttgtggaagtcactatcaccaccttcaaagattttgtcggtctggaagcgagtccgagccaccctcattatctggagccggacaaagagtatgactgggacatttcttcagtcatcggcctttccggatcagtccggggagccgtgattatttccatgaaaaccgaactctcgttgaaactggccgacgcgcttgtcggaaccacccatacggagatagacgctgacgtaacagactgcgtcggggaaatagtgaacatcatcgcgggaaacatcaaaccaaaagtaccgaacggagacaagatagtaatatccattcctacagttatcaagggaaagaaaatttccttcgtatggcccagcaagcagacgcggatactttgtattccccataaagtttataaaaatgactttttccatcttttagtcgccattgatatggataacgaagtacagatttag

SEQ ID NO: 2116 - protein, 162 aa, Unknown
  Obtained from environmental sample
  misc_feature (1)..(162): Xaa is any amino acid
MELIDFIEPFVEVTITTFKDFVGLEASPSHPHYLEPDKEYDWDISSVIGLSGSVRGAVIISMKTELSLKLADALVGTTHTEIDADVTDCVGEIVNIIAGNIKPKVPNGDKIVISIPTVIKGKKISFVWPSKQTRILCIPHKVYKNDFFHLLVAIDMDNEVQI

SEQ ID NO: 2117 - DNA, 810 bp, Unknown
  Obtained from environmental sample
  misc_feature (1)..(810): n is a, c, g, or t
atgganttattgggcatgatttttcttaggaatgatgtttccatcaataataattgttctttcgatattgatgcttatattgatcagcaaaagaaagatgttggtgtaaaaggagaaaatacgccggatgtgattcattatttaaatgaattcaataaaaatgattttaataaaatagaaaactattattcacctgaattttttgaaaatcccgattataaaccgcaaaatgataaaaaaataaaatttgttgtcgctttggaggaatggcttgaatatatcggcatatccgatgaaataataatcgataggcttgaaaatggcgagcattttaaaataattattgaaatggacgagcagaaatttgccataccccaaattggaactggcattagtcagattttgcctattttggtaatgtgccttgccgcccctgttgggtccactctaataattcaggagccggaaaaaaatctacacccaaaatgccaatcgcgacttgctgattttttcatagccatgtcactttccgggcggcaatgcctgatagagacgcatagcgaaaacataattaaacagcttcgttatcgtattgtcatgttgtctaaccggatacctttgcataaaaaaaccaaaatatattttgtttccaaacacaacggtacttctcaatttaaagacattgaagtaaatgaatatgccgcattggacgaatggccggaagatttttttgatgaatccagtaatatatccaaaaaaataatggaagaagttataaaaaagatggagtcagacgaacaagatgattag

SEQ ID NO: 2118 - protein, 269 aa, Unknown
  Obtained from environmental sample
  misc_feature (1)..(269): Xaa is any amino acid
MXLLGMIFLRNDVSINNNCSFDIDAYIDQQKKDVGVKGENTPDVIHYLNEFNKNDFNKIENYYSPEFFENPDYKPQNDKKIKFVVALEEWLEYIGISDEIIIDRLENGEHFKIIIEMDEQKFAIPQIGTGISQILPILVMCLAAPVGSTLIIQEPEKNLHPKCQSRLADFFIAMSLSGRQCLIETHSENIIKQLRYRIVMLSNRIPLHKKTKIYFVSKHNGTSQFKDIEVNEYAALDEWPEDFFDESSNISKKIMEEVIKKMESDEQDD

SEQ ID NO: 2119 - DNA, 603 bp, Unknown
  Obtained from environmental sample
  misc_feature (1)..(603): n is a, c, g, or t
atgtcttcgcagtacggaaaaaaattacgaatatcgatttttgggcagtcgcattcaccggcgattggcgtgagcattgacggcttgacggccgggatcaaaattgatattgatgaactaggggccttccttaaacgcagggccccgggacaaaatgacatttccacggcccgttcggaagatgacgcgccggagattttgtcaggactggcggacggtgttacatgcggcgcgccgctagcgataatcatccgcaacaaagacgcccgctccgccgattaccgcgaactgcgggatattccccgtccgtcacacgcagattttgccgcgcacataaagtacggcgggtttcaggatgttgcgggcggcggacatttttccggcagactgacagcgccattgtgcgccgccggcgggatatgtttacaaatattgcgcggtctgggagtcagcatcggggcgcatatattgcggatcggcggcgcggaagatgatccgtttgaccctgtggctgtatcaggcgcggaattcgagctaattcaaaaaaacccattgcctgtgctcaagcgtgaagccggagaagcaatgagacagcaaatttaa

SEQ ID NO: 2120 - protein, 200 aa, Unknown
  Obtained from environmental sample
  DOMAIN (9)...(199): Chorismate synthase
  misc_feature (1)..(200): Xaa is any amino acid
MSSQYGKKLRISIFGQSHSPAIGVSIDGLTAGIKIDIDELGAFLKRRAPGQNDISTARSEDDAPEILSGLADGVTCGAPLAIIIRNKDARSADYRELRDIPRPSHADFAAHIKYGGFQDVAGGGHFSGRLTAPLCAAGGICLQILRGLGVSIGAHILRIGGAEDDPFDPVAVSGAEFELIQKNPLPVLKREAGEAMRQQI

SEQ ID NO: 2121 - DNA, 651 bp, Unknown
  Obtained from environmental sample
  misc_feature (1)..(651): n is a, c, g, or t
gtgcttacacggttttttccaantctcggcactagaatagaacctcattatatagaagcgatcgttggcaaaaacggagaagtcatagaaaaaaactacaaggttgaacacgaggttttgaaaaagccctccgcttatctaatggtttcaatgctgcaaacggtaaatactggcggaacagccgcaaaagtgtgggcgagcggttttcaccatccaagcggtggcaaaacaggaaccacaaacgattacaccgatgcgtggtatataggtttcaccaagcaatacaccatgggcgtgtggattggaacagatgattttttaccgatgggaccaggtcatacgggcacagaagatgcactgccggtgtggctcaattccatgccagaaattcataaaaatttgccagaattgcaatttccagttcctcagggagttatttcaagaaaaatttgcaactacactggcaaaatagctggctcatattgcaatcaattcacaggttgcctttacaccgctgcgtctccagaaattgaagagtgcgatggcaagcattttgagcaaccaaaagaaagcaatgccactatgttcagcaatacttccactccagcagctcctagtaccaaaagcgccaaggcaaggcaggtgttttga

SEQ ID NO: 2122 - protein, 216 aa, Unknown
  Obtained from environmental sample
  misc_feature (1)..(216): Xaa is any amino acid
MLTRFFPXLGTRIEPHYIEAIVGKNGEVIEKNYKVEHEVLKKPSAYLMVSMLQTVNTGGTAAKVWASGFHHPSGGKTGTTNDYTDAWYIGFTKQYTMGVWIGTDDFLPMGPGHTGTEDALPVWLNSMPEIHKNLPELQFPVPQGVISRKICNYTGKIAGSYCNQFTGCLYTAASPEIEECDGKHFEQPKESNATMFSNTSTPAAPSTKSAKARQVF

SEQ ID NO: 2123 - DNA, 717 bp, Unknown
  Obtained from environmental sample
  misc_feature (1)..(717): n is a, c, g, or t
gtgtatcagatcggccgagtggggatgcacatggaaacaggaattgacttttccgtcctgaagcctgaaatccttggctttttcgaactgtcaaccgatgcctttggcgctattgtctatgcctggatgagcgagcttcctgtaacaggacagataatccggtttgggaaaaaaattcttgcgtcacaaaatacggtaaccggcaataggggatcggcccagcgcggaaaaattgaaacaatgcggcggaaagcggcgcagattgccgcaaccgaccgaggcgatttcgatgtgcaaactgtgcgggaggcggcatacaaagtctggcatgaaacaaacaggttaatgggccttctgcgtttttgccccgatgaaaaaggcgtatatatagcccaatgcgaaccggatcattttgtgctgccgtctttaggcccgcatttcatggaacgcttcggcgaaacgccctgggttataattgataacaaacgccgcctcagcctttgctgtgaaacgggacaggcaggcatttccggcaggactcttgtattttcagccaataccgaaaatcaattttcttttgaaaaagggaagacaggcgaatgggagaatctgtggaaacattaccataaaaccatcaacaacgaaagcaggaataacccggatctgcaaaaaagattcatgcccgcgcgttactggaaatatctgacggaattgtaa

SEQ ID NO: 2124 - protein, 238 aa, Unknown
  Obtained from environmental sample
  misc_feature (1)..(238): Xaa is any amino acid
MYQIGRVGMHMETGIDFSVLKPEILGFFELSTDAFGAIVYAWMSELPVTGQIIRFGKKILASQNTVTGNRGSAQRGKIETMRRKAAQIAATDRGDFDVQTVREAAYKVWHETNRLMGLLRFCPDEKGVYIAQCEPDHFVLPSLGPHFMERFGETPWVIIDNKRRLSLCCETGQAGISGRTLVFSANTENQFSFEKGKTGEWENLWKHYHKTINNESRNNPDLQKRFMPARYWKYLTEL

SEQ ID NO: 2125 - DNA, 504 bp, Unknown
  Obtained from environmental sample
  misc_feature (1)..(504): n is a, c, g, or t
atgggatgggctttccctgccgccatgggggcaaagcttgcacgaccggacacgccggtaattgccttcctgggagacggcgattttatgatggtcatgcaggagctttccaccatggcccagtatcagatccccgttgttgttattcttgccaataacagcgggtggatggccataaaggatctgcaaaacggcatgttagggaacggctacgtttttggaaatgactggataaaaaacaatgaagtgtattcgcccaatttcgcgggaattgcggaagcctttgggatacaggccagaaaaatttcacagccggaagaagtggcccctgcggtaaacgccgccattacttccggaaaaccctcttttattgaggttaatgtttaccgggaattcccccaatccggaggagacgcctacggctggtgggatgttcctattccctactatctgcccgatggaaaaaataaatacgacacaggcaaaggcgaggaacaaatataa

SEQ ID NO: 2126 - protein, 167 aa, Unknown
  Obtained from environmental sample
  DOMAIN (1)...(126): Thiamine pyrophosphate enzyme, C-terminal TPP binding domain
  misc_feature (1)..(167): Xaa is any amino acid
MGWAFPAAMGAKLARPDTPVIAFLGDGDFMMVMQELSTMAQYQIPVVVILANNSGWMAIKDLQNGMLGNGYVFGNDWIKNNEVYSPNFAGIAEAFGIQARKISQPEEVAPAVNAAITSGKPSFIEVNVYREFPQSGGDAYGWWDVPIPYYLPDGKNKYDTGKGEEQI

SEQ ID NO: 2127 - DNA, 300 bp, Unknown
  Obtained from environmental sample
  misc_feature (1)..(300): n is a, c, g, or t
atggaagaacaggaagttggcagccgtaacattcttgaggctgttagccagcttaatgaagttaccgaattggtaagaagcgcttcaaaagacatgaccaacgacggaaatgagatactaaaacaaagcttagacctaaggcagcttaccgccgatgtctcagatagtatgggtataatggcggaaagtgcgtcgcagataagtaatgttgttatcagggtaacagaaatcagcaaggagaacaaagataacactttatccttacgcggagaagttgagcgctttaaggttaaagaataa

SEQ ID NO: 2128 - protein, 99 aa, Unknown
  Obtained from environmental sample
  misc_feature (1)..(99): Xaa is any amino acid
MEEQEVGSRNILEAVSQLNEVTELVRSASKDMTNDGNEILKQSLDLRQLTADVSDSMGIMAESASQISNVVIRVTEISKENKDNTLSLRGEVERFKVKE

SEQ ID NO: 2129 - DNA, 618 bp, Unknown
  Obtained from environmental sample
  misc_feature (1)..(618): n is a, c, g, or t
atgagggaagatatactaaaatactattgtcaaaaattctgttatatttttgttgatgaataccaggacatcaatttttcccaatacgccctaatccggctgctggttcataatgggaaagttgctccctctctttgggtcatcggcgatcccaatcaggccatttacggtttccgaggctctgacaaggagttcattgatcgctttctgcaagactaccccgatgcgggccgttttgaattgaagaaaagtttccgctgcgcagaacctatcatcaaagccgcaggccgccttgccaaagccgatctaaaaggcgccgatctaaattcttctgtacagatcaacctattccgccgaacatacccgacagaaaaatccgaggccgaaggcatagcccgcatcatcgcgtcgcttgtcggaggaacgagttttttcgcgctggactcgaagacaaccaaaaacatggattcaaacgccgcggactttagcccctcggactgcgcggttcttgtgcgggcggcggctctggcggaacctatcgccaaagcgcttaatgaccacggcataccgtttgaaatcactcggggcccaaacatggtgggaagaagaacctgttaa

SEQ ID NO: 2130 - protein, 205 aa, Unknown
  Obtained from environmental sample
  misc_feature (1)..(205): Xaa is any amino acid
MREDILKYYCQKFCYIFVDEYQDINFSQYALIRLLVHNGKVAPSLWVIGDPNQAIYGFRGSDKEFIDRFLQDYPDAGRFELKKSFRCAEPIIKAAGRLAKADLKGADLNSSVQINLFRRTYPTEKSEAEGIARIIASLVGGTSFFALDSKTTKNMDSNAADFSPSDCAVLVRAAALAEPIAKALNDHGIPFEITRGPNMVGRRTC

SEQ ID NO: 2131 - DNA, 654 bp, Unknown
  Obtained from environmental sample
  misc_feature (1)..(654): n is a, c, g, or t
ttgcgcttccaggggatagcaaggcggcaatggcgttttaaattgcgatgcggttacagcgcggttaatgaggaagaagcggaagagggggttagtttcgggagtaacgctgtcgttgggcagatagaaaaaggttcttttgttgacaagagggacggtcagaaataccaaacggtaaaaatgcctgatggtaaaatctggatggcgcagaatctcaattacaaggtagataattcgtgggcctacgatgatgacgaagccaacgccacgaagtacggccgcctctacacgtgggtggcggctaaggccgcgtgtccgaagggttggcatctgccgacacgcgaggagtgggcggcgttggttgaggtggcggggggcggcaggatggctggggcgcggttgaagtcgagggatgggtgggctaaaggtggtggcggggcggatgattacgggttttcggccttgcccggcggctaccgcttctacaacggtggcagtttcgacaaagccggcaactacggcagctggtggacggccacggagtacggcgcgctcagcgcctaccgccggaacatgtactacaactacgaccgcgtgaacgaggactacttcttcaagagcatcgggcagtctgtgcgttgtgttgaggactaa

SEQ ID NO: 2132 - protein, 217 aa, Unknown
  Obtained from environmental sample
  misc_feature (1)..(217): Xaa is any amino acid
MRFQGIARRQWRFKLRCGYSAVNEEEAEEGVSFGSNAVVGQIEKGSFVDKRDGQKYQTVKMPDGKIWMAQNLNYKVDNSWAYDDDEANATKYGRLYTWVAAKAACPKGWHLPTREEWAALVEVAGGGRMAGARLKSRDGWAKGGGGADDYGFSALPGGYRFYNGGSFDKAGNYGSWWTATEYGALSAYRRNMYYNYDRVNEDYFFKSIGQSVRCVED

SEQ ID NO: 2133 - DNA, 558 bp, Unknown
  Obtained from environmental sample
  misc_feature (1)..(558): n is a, c, g, or t
atgataggcgatcttcataaatattttcctgatataaatatcagcgttgtaaattttggaatttttcccgatagtcttgcggtgcgcttcatttttcatggggctaaatcttatctcgatgttaatgacggtactaaagaatttaaaaaaggtttaagtataataaagacgggtgaagtttattattccccgggcgtttataagctaatcatagaattagatgaaataaaaaatcttagaagttatacgactgaccgtgaatggcaggttttatttcttgtctgtaacggttttactaatgaggggattgctttctggctttcggtaagcgataagacggtggaaacccatattaatagtttgtataaaatatttgatgttggtaaaagggtaaatttattgagaaaagccgataaattgggatggattaataaaaaagaattagtttttaacggcaatgacgtgaaaattccgaaaaatccttcaaagaaaagaaataaaaaaaatccccccgcgcatggcggagggcggttgattaggcggtttgccgttggttaa

SEQ ID NO: 2134 - protein, 185 aa, Unknown
  Obtained from environmental sample
  DOMAIN (80)...(137): Bacterial regulatory proteins, luxR family
  misc_feature (1)..(185): Xaa is any amino acid
MIGDLHKYFPDINISVVNFGIFPDSLAVRFIFHGAKSYLDVNDGTKEFKKGLSIIKTGEVYYSPGVYKLIIELDEIKNLRSYTTDREWQVLFLVCNGFTNEGIAFWLSVSDKTVETHINSLYKIFDVGKRVNLLRKADKLGWINKKELVFNGNDVKIPKNPSKKRNKKNPPAHGGGRLIRRFAVG

SEQ ID NO: 2135 - DNA, 894 bp, Unknown
  Obtained from environmental sample
  misc_feature (1)..(894): n is a, c, g, or t
gtggtggacgagttcggctacacggcgagttggatggaagagtacgttccgagcgaagagataggtctggacgcggacgagccggcgggggctatgcttccgcgcgcgccggtggtgacggttatggggcacgtcgaccacgggaagacctcgctgcttgactatataaggaagacgaacgtgatcgccggggagtcgggcggcatcacgcagcacatcgcggcgtatgaggttcagacgtcgcacggttcggtaacgttcttggacactccgggccacgaggcttttacggctatgcgcgccagaggttcgcagatcaccgacgtcatagtgctggtcgtggccgccgactcggcggttatgccgcagacgcgggaggccatagaccacgcgagggcggcgaacgtgccgctggtggtggccatcaacaagatcgacctgcctacggcgaatcctgagaagatcaagggagaattggcgggttacaatgtgcttgtggaggagtacggcgggcagacctcgtgcgtggaaatctcggcgaagacgggtcaaggcatagacaaactgctggaggtgctcgcgcttgaaacggagatattggagttgaaggcgacacccgaaggtcgggcgcacggcgtggttatagaggcggagctcgacaaagggaaggggcctatcgccacggtgcttatacagcgcggcacgctcaaaaaagggaacgcctttgtgacgggcattcacagcgggcgcgtgcgggagctgcacaacgaacgcggttccattgtggagaacgccggtccgagccagccggtattgattatcggcctatccgggacgccgcaggccggcgactctttcagggtgctgacgacgagaaagaggcgagggagataa

SEQ ID NO: 2136 - protein, 297 aa, Unknown
  Obtained from environmental sample
  DOMAIN (37)...(146): GTPase of unknown function
  misc_feature (1)..(297): Xaa is any amino acid
MVDEFGYTASWMEEYVPSEEIGLDADEPAGAMLPRAPVVTVMGHVDHGKTSLLDYIRKTNVIAGESGGITQHIAAYEVQTSHGSVTFLDTPGHEAFTAMRARGSQITDVIVLVVAADSAVMPQTREAIDHARAANVPLVVAINKIDLPTANPEKIKGELAGYNVLVEEYGGQTSCVEISAKTGQGIDKLLEVLALETEILELKATPEGRAHGVVIEAELDKGKGPIATVLIQRGTLKKGNAFVTGIHSGRVRELHNERGSIVENAGPSQPVLIIGLSGTPQAGDSFRVLTTRKRRGR

SEQ ID NO: 2137 - DNA, 666 bp, Unknown
  Obtained from environmental sample
  misc_feature (1)..(666): n is a, c, g, or t
atggattatggtcaggtagcgggcggtaccttcaccgaccagcagaaatcgctgatgaagacctctcttgccattgagaattgggatgtaaaattcaactcttcctcccagacaatcgcgaatgtctccaacacgtataccagagaggcgccttcaaaacaatggggaacggtcatgggcgtgagggttcactacccggtcgactatgcctattccaaggcgacaattaagcctccgtttgagattccggcttatgagcccatggccgaagtggacgacaacggcgttattcagcaaagcgattcagacggcattaccggccccagccgctttgaaaatgaatacggggttttgaagaacgttggtacaatccgatctatagcggtgaacgtttacggccttaatttcccccacggtcttaacgtgattatcatcgattccgaagggaacgaaaaaatctgcttcatgggctatctgaactttgacggatgggccgagcttacctggaataatccccagtatatttttgaagtaagaaacagggatttaaggctttatcccctgtatcccacaaccatgcccttcataaaattcggcgggttcaggcttgacagggacgcggatagggcaggcggcgattttatcacttactttaaagacgtatag

SEQ ID NO: 2138 - protein, 221 aa, Unknown
  Obtained from environmental sample
  DOMAIN (1)...(221): Flagellar filament outer layer protein FlaA
  misc_feature (1)..(221): Xaa is any amino acid
MDYGQVAGGTFTDQQKSLMKTSLAIENWDVKFNSSSQTIANVSNTYTREAPSKQWGTVMGVRVHYPVDYAYSKATIKPPFEIPAYEPMAEVDDNGVIQQSDSDGITGPSRFENEYGVLKNVGTIRSIAVNVYGLNFPHGLNVIIIDSEGNEKICFMGYLNFDGWAELTWNNPQYIFEVRNRDLRLYPLYPTTMPFIKFGGFRLDRDADRAGGDFITYFKDV

SEQ ID NO: 2139 - DNA, 723 bp, Unknown
  Obtained from environmental sample
  misc_feature (1)..(723): n is a, c, g, or t
ttggaaggttggaatagtcagtataaaagacagctttcaccagaagatatagaagaaaatgatgataaacttcttgttaaacaaattagtaaaggaagcataattattgaacttatgtcttctgtgatgccattattaagtgattatagtaatttatacacattcttttcatctatgctaattctttttacttggcttcgtacaaaaaaagggaaaaaaccaaacgccgaaataacagattttgaaaacgctaagaaaatcgttgctccaataaacacagacgataaaaaaatgcaaatattttttaatggtgatgttcagaatgtttatataattgataaggtaactgctgatgtaatcacgaaaaatgccaatgatgaactacttactcttgctaaaccagaagaaacgaatgaggatcaaacaaacgcaaaaaatgtactattaaaatttaaccagattgaaggagcagaaaaaaataataaaaaaacaaaaggggttattagtgaaataacaaataaatcatacccagttatgtttgccgaagagttaaaacatggtatagtacatggttctgaaaatccgttaaatagaaattatcttgtaaatgcaaaagttcatactgaaaatgacgaaattaaagcgtatacagttttagaagttattgattcatttgatgaagatgatggtagtaatgagccggaaaccgatcttttttcttga

SEQ ID NO: 2140 - protein, 240 aa, Unknown
  Obtained from environmental sample
  misc_feature (1)..(240): Xaa is any amino acid
MEGWNSQYKRQLSPEDIEENDDKLLVKQISKGSIIIELMSSVMPLLSDYSNLYTFFSSMLILFTWLRTKKGKKPNAEITDFENAKKIVAPINTDDKKMQIFFNGDVQNVYIIDKVTADVITKNANDELLTLAKPEETNEDQTNAKNVLLKFNQIEGAEKNNKKTKGVISEITNKSYPVMFAEELKHGIVHGSENPLNRNYLVNAKVHTENDEIKAYTVLEVIDSFDEDDGSNEPETDLFS

SEQ ID NO: 2141 - DNA, 699 bp, Unknown
  Obtained from environmental sample
  misc_feature (1)..(699): n is a, c, g, or t
gtggcgatcagcaatttaacgtggcatgacatctactcgccatacgcggagcggttcccggagtacgnggagatgctgcgggagatggcggatcagtaccgcaaagcctcaatcgcgttgacgctctacccgtccttgccgatgccggtcttcgagaggaagaaaccgatacacatcctcggcagacgcggcgttgaccggcgggaggagatttgccggcatttcgggatcgaccggggcaagcggcttggggtgatctacgtagggaattttgggcttgaccgcgttgattggcggcggcttgaggagtttgacgggtgggaatttgtcggtgtctacccgttaccgggcgggcctaaaaattatcacttagtatcaaaagaacagttccgttaccaagacctgtcggcctcggcggacgttgtaatagccaagatggggtacggggtcttctccgaatcgatacttaacggcataccgctggtctacctgccgagggaggatttcgcggagtttccggtcttggacgcggaggccgagaggcatgggagcggggtttgcgttgataccgaagagttctgcggattaaaatggttaaagctattggatggggttgtcgataacaataagatgaaaccggctgattgtgacggggcgaggatgtgcgctgaggagataataaaaatagcgggatcgtga

SEQ ID NO: 2142 - protein, 232 aa, Unknown
  Obtained from environmental sample
  misc_feature (1)..(232): Xaa is any amino acid
MAISNLTWHDIYSPYAERFPEYXEMLREMADQYRKASIALTLYPSLPMPVFERKKPIHILGRRGVDRREEICRHFGIDRGKRLGVIYVGNFGLDRVDWRRLEEFDGWEFVGVYPLPGGPKNYHLVSKEQFRYQDLSASADVVIAKMGYGVFSESILNGIPLVYLPREDFAEFPVLDAEAERHGSGVCVDTEEFCGLKWLKLLDGVVDNNKMKPADCDGARMCAEEIIKIAGS

SEQ ID NO: 2143 - DNA, 477 bp, Unknown
  Obtained from environmental sample
  misc_feature (1)..(477): n is a, c, g, or t
gtgaaacatctccttgcctctcttttagacagctactcaaaattgggaaattccattccaattaatccgcactctttgccaaataaagatgaagtcgttgaacttgtgagcaaactccacagcctgctattcccaggctactttggcaatcacaaaacagacacactcttaaagaaagctcaccacctgctgaacaagcaactggaattgctccattgcaaaaaagaattgggaactgaatttttgaacaaactcccaaagataagggcaagcctcgcaactgatgtggaagccgcctctgatggcgaccctgccgcctcggataaacaggagataataatttcttatccagggatttatgcaatctccgtttacaggctggctcacgagcttgagttgttgaaaataccaaaactgcccagaataatgactgaacacgctcattccgtaacaggaatagacattcctcggcgataa

SEQ ID NO: 2144 - protein, 158 aa, Unknown
  Obtained from environmental sample
  misc_feature (1)..(158): Xaa is any amino acid
MKHLLASLLDSYSKLGNSIPINPHSLPNKDEVVELVSKLHSLLFPGYFGNHKTDTLLKKAHHLLNKQLELLHCKKELGTEFLNKLPKIRASLATDVEAASDGDPAASDKQEIIISYPGIYAISVYRLAHELELLKIPKLPRIMTEHAHSVTGIDIPRR

SEQ ID NO: 2145 - DNA, 729 bp, Unknown
  Obtained from environmental sample
  misc_feature (1)..(729): n is a, c, g, or t
gtgggcaacgacgctacntgctatggatggggtgttcatgtacgcgcatacaagagcgtggaagtgcgtaacctgggctttatgatgttcaccgatgacggtgtgtcgcttgaggtggacaaccaaaatatctgggtgcacaacaacgacattttctacggcgcgaacggcggcggcgacaaggctaagggtgacggcgcgatggacagcaagacatccggttatgtgaccatgtcgtacaaccacttctgggattcgggcaagtgcaacctgctgggcaacggcaccgaaaacccggaataccttacctaccatcacaactggtatgaccactcggacagccgccatccgagggtgcgtttccacagcgcccatgtgtacaacaactactatgacggcaattccaagtacggcatcggggcaaccagaaattcctcgatttttgccgaaaagaattacttccgcaataccaaaaaccccatgttgatctccatgcagggtacggacaccaagtcgggcgcggccccgggtgacgggtcattctccaaagaagacggcggtatgatcaaggcgtttgacaactacatggaaggtgtcagcagtaccacttacataccctggagcagttccaatacggttcattttgacgcttacccggtgggcgccagaaacacaaccgtgctttcttcggtaaagaccaaccagggcgggttacttacaacaacttga

SEQ ID NO: 2146 - protein, 242 aa, Unknown
  Obtained from environmental sample
  DOMAIN (2)...(154): Pectate lyase
  misc_feature (1)..(242): Xaa is any amino acid
MGNDATCYGWGVHVRAYKSVEVRNLGFMMFTDDGVSLEVDNQNIWVHNNDIFYGANGGGDKAKGDGAMDSKTSGYVTMSYNHFWDSGKCNLLGNGTENPEYLTYHHNWYDHSDSRHPRVRFHSAHVYNNYYDGNSKYGIGATRNSSIFAEKNYFRNTKNPMLISMQGTDTKSGAAPGDGSFSKEDGGMIKAFDNYMEGVSSTTYIPWSSSNTVHFDAYPVGARNTTVLSSVKTNQGGLLTTT

SEQ ID NO: 2147 - DNA, 303 bp, Unknown
  Obtained from environmental sample
  misc_feature (1)..(303): n is a, c, g, or t
gtgttagctgacgtaaactggaagacagaagcggtcattccccgtcacaactttcagcgggggagagncaaagggttggcgtgggcgcgttccatggtaaatgatcctgcgttaattctggctgatganccgacggggaatcttgacccgcagaacagcgatattgtcgcggaattgttgtatgaaaacgctcaaaaaagaaataagactttaattattgtcacacatgacagaaaggtggcgcaaagggcgtccataagatttgtattggaaaatggcgtgttgtcagaggaaccatcttga

SEQ ID NO: 2148 - protein, 100 aa, Unknown
  Obtained from environmental sample
  DOMAIN (1)...(93): ABC transporter
  misc_feature (1)..(100): Xaa is any amino acid
MLADVNWKTEAVIPRHNFQRGRXKGLAWARSMVNDPALILADXPTGNLDPQNSDIVAELLYENAQKRNKTLIIVTHDRKVAQRASIRFVLENGVLSEEPS

SEQ ID NO: 2149 - DNA, 840 bp, Unknown
  Obtained from environmental sample
  misc_feature (1)..(840): n is a, c, g, or t
gtgtaccctattccaagcatgaagattgtgcaaaatcacggcgctgtggaaattatgcgcggctgccctaacggctgccgtttctgccacgccggttactggtacagaccttgcaggcaaaaaaatgaacagcttatcgccgcgcaggtggacgaaatggtaacaaaaggcggctggcaggaaataagcctgtcctcgctgtcatcgggcgattactccgggattgccgaattggtggaaaatcttaattcacgcttcagcggtaaacacatttctttccagttgccctcgcttaaagtttcgggtttttcgctttcgatactggaaaagatcgccgtaacaaggaaaagcggactcacatttgccgtagaaacgcctaatgaactctggcagatggctataaacaaagaagtaacaagggattcggttgtttcgataattgcggaggcaagaaagaacggctggaagggagcgaagttttattttatgataaggcttcccgttcctgattgcggatttaatgaggaagaggatattgtttcgtttatcgcggatatcggacgcagatgcaaaatgcactttaacattaacgtaggaatatttaccccgaaaccgcataccccgtaccaatgtgcgcggcagattgacagcgaagtcgcggaaaagaaactaaactgtatacgctcaaaacttaatacctctgggacacaaggtaagtatttcagacacgcctatctcgcatatagaagtatcttaagcagggaagacgatcgctcaagcttatgtgtgaaaaagcatggcgtgaaagaaacaggctttgaccatggagcgcatttataa

SEQ ID NO: 2150 - protein, 279 aa, Unknown
  Obtained from environmental sample
  DOMAIN (16)...(183): Radical SAM superfamily
  misc_feature (1)..(279): Xaa is any amino acid
MYPIPSMKIVQNHGAVEIMRGCPNGCRFCHAGYWYRPCRQKNEQLIAAQVDEMVTKGGWQEISLSSLSSGDYSGIAELVENLNSRFSGKHISFQLPSLKVSGFSLSILEKIAVTRKSGLTFAVETPNELWQMAINKEVTRDSVVSIIAEARKNGWKGAKFYFMIRLPVPDCGFNEEEDIVSFIADIGRRCKMHFNINVGIFTPKPHTPYQCARQIDSEVAEKKLNCIRSKLNTSGTQGKYFRHAYLAYRSILSREDDRSSLCVKKHGVKETGFDHGAHL

SEQ ID NO: 2151 - DNA, 534 bp, Unknown
  Obtained from environmental sample
  misc_feature (1)..(534): n is a, c, g, or t
atgatggaaaaatcacttttcgccggattcggcggtcaaggtatcatatctctcggtcaactttgggtctattttgccatgcaggaagggaaaaatgttactttcttcccgttttacggggcggaaaagcgcggaggcatcgccagagcgggtgtaatcgtctctgatgatgaaattgcaagccctcttgtgacaattcccgactctgcgctggttatgaactcggattccctgcccgtttgcgagaaaattctcaaggaaggcggcttaattgtggtaaattcgacccttgttaaggaaaatccgaccagatcagacctaaaaatcgtaaaaattgacgcttcaggcattgcggaacagataggaaacctgctttttgccaatatggtggctctcggagcgatggcaaagctaacaaaagccctgaatttgaccgatattgaaggtgtactaaagaaattctttccgtccgataagcaccagttcgtaccgatgaatactaaggctatcagggcgggatatgaggcagtttaa

SEQ ID NO: 2152 - protein, 177 aa, Unknown
  Obtained from environmental sample
  DOMAIN (11)...(175): Pyruvate ferredoxin/flavodoxin oxidoreductase
  misc_feature (1)..(177): Xaa is any amino acid
MMEKSLFAGFGGQGIISLGQLWVYFAMQEGKNVTFFPFYGAEKRGGIARAGVIVSDDEIASPLVTIPDSALVMNSDSLPVCEKILKEGGLIVVNSTLVKENPTRSDLKIVKIDASGIAEQIGNLLFANMVALGAMAKLTKALNLTDIEGVLKKFFPSDKHQFVPMNTKAIRAGYEAV

SEQ ID NO: 2153 - DNA, 870 bp, Unknown
  Obtained from environmental sample
  misc_feature (1)..(870): n is a, c, g, or t
atggatcatatgatgccgcagatggatggcatagaaacgactaagaagctgcgcgttctgggatatgcgggtactatcgtggctttgacagcaaacgcgttagtaggaaatgaggaaatgttccttgagaacggttttgacggatttgttacgaagcccatcgacataaagcaattggatattgtacttaatcgttttatatgcgacaaatatcccgaagaagctaaaaagtacgagaaagcacaggatgaaatcgttgatctaaatagtggaagcggcaaagaagataaagggaaaaaagacattggaacaattaataaaaaattaattaaaatatttatacaagatgctgaaagagcaattaaagtattggaggaaacaaaatccaataatgacatgaagttgttcactacttccgtacatggtatgaagtccgccttggcaaatattggcgaaacagggaaatctgaattggcatttatgcttgaaaaggcaggcaacaattcagatatggaatatataaatgcaaatgccgataacttcatatccaagataaaagaattaataaatgaattaaaaccggaaaatagcaataaagataataacgagaataatgcaaataacgagaataatgcaaataacgagaataatgcaaataacgagaataatgcaaaacaattgttacttatggaacaattgaagatagcgtgcgccgcttgtgatgattatgatgattctgcggtttacgcggtacttgacgagctaagaaaaacgctatgggaccagagtattgttatgatgttagaaaatgtgcatgacttgttgtttttacatagtgattttgaagaagcggcggacgagatgagataa

SEQ ID NO: 2154 - protein, 289 aa, Unknown
  Obtained from environmental sample
  misc_feature (1)..(289): Xaa is any amino acid
MDHMMPQMDGIETTKKLRVLGYAGTIVALTANALVGNEEMFLENGFDGFVTKPIDIKQLDIVLNRFICDKYPEEAKKYEKAQDEIVDLNSGSGKEDKGKKDIGTINKKLIKIFIQDAERAIKVLEETKSNNDMKLFTTSVHGMKSALANIGETGKSELAFMLEKAGNNSDMEYINANADNFISKIKELINELKPENSNKDNNENNANNENNANNENNANNENNAKQLLLMEQLKIACAACDDYDDSAVYAVLDELRKTLWDQSIVMMLENVHDLLFLHSDFEEAADEMR

SEQ ID NO: 2155 - DNA, 555 bp, Unknown
  Obtained from environmental sample
  misc_feature (1)..(555): n is a, c, g, or t
atgaaactggaggcgctcgtgcctgtcatcaggaaacaaatcccgctgaaggctcacgcacaccgcgcggacgacatctttacggccatacgcatagctaaagaattcgatctgctcttaacgctggatcactgcaccgaaggccatctgattgttgaagagctggtaaaagagaacaggtacattttcgtgggccccacttttggatcaaaatccaagctggaacttcagaacatgagttttgaaaccgctaaggtcctttccgacgccggtctcaaggtctctatcatcaccgacgcgcccgtaatcccccaggggagcctctcgctttgcgccggattcgcggttaaagccggcatgaacgaggaaaaggcctggaaagcgatcacgatcacgcccgccgaagcgatgggcgttgccgacagggtaggcagtcttgaaaccggcaaagacgccgacatcgtcatcttcaacggggatccgctcaaagacatagccagtacggccgcgtacacgatagtcgacggaagggtcgcgtacaaggaaggggaatag

SEQ ID NO: 2156 - protein, 184 aa, Unknown
  Obtained from environmental sample
  misc_feature (1)..(184): Xaa is any amino acid
MKLEALVPVIRKQIPLKAHAHRADDIFTAIRIAKEFDLLLTLDHCTEGHLIVEELVKENRYIFVGPTFGSKSKLELQNMSFETAKVLSDAGLKVSIITDAPVIPQGSLSLCAGFAVKAGMNEEKAWKAITITPAEAMGVADRVGSLETGKDADIVIFNGDPLKDIASTAAYTIVDGRVAYKEGE

SEQ ID NO: 2157 - DNA, 603 bp, Unknown
  Obtained from environmental sample
  misc_feature (1)..(603): n is a, c, g, or t
atgaacgaggctaaaaccaaccgcaaatacaaagatagcgttttcacgctactgttcggcgagaaaaacaatcttttggagttgtacaacgccattaggaacaccaactatggcagagacacagatattcgcataaccacgcttgaagatgtgctgtttatggaacgcataaacgatatttcttttgtgatagaaggcaaattggttgtgcttatcgaacaccaatctacgctcaatccgaatatgccgttgaagatgcttatttatatgggcagaaactatgaaaagataattgacaaagatggtctttacagcacgaaaaagatgtccataccaaagccagaatttatagtgctgtacaacggagtagatgaatgccctgacaggcaagttttaaaactttccgatatgtttattgagcctttggaagaaagtattgagagtcttgaacttgtggtgagcgtttacnatataaacaaaggcaggaacgangaaatggncactcgtagtgaaaatttgagaggctatgagttttttatatatccgataagagagtaccttanagcangaatgaccagggactcggctatcagcgtgctgtag

SEQ ID NO: 2158 - protein, 200 aa, Unknown
  Obtained from environmental sample
  misc_feature (1)..(200): Xaa is any amino acid
MNEAKTNRKYKDSVFTLLFGEKNNLLELYNAIRNTNYGRDTDIRITTLEDVLFMERINDISFVIEGKLVVLIEHQSTLNPNMPLKMLIYMGRNYEKIIDKDGLYSTKKMSIPKPEFIVLYNGVDECPDRQVLKLSDMFIEPLEESIESLELVVSVYXINKGRNXEMXTRSENLRGYEFFIYPIREYLXAXMTRDSAISVL

SEQ ID NO: 2159 - DNA, 582 bp, Unknown
  Obtained from environmental sample
  misc_feature (1)..(582): n is a, c, g, or t
atgaagactttcgtccggggacgccggagcgttcgcgctttcctggacgaagatattcccgccgcctgcatagatgaactcttggccgacctggcccatgcgccaagcggctgcaacgcccgcgacctgaccttttccgtcgtatccgggcgcaaggccatggcggcccttctggagaagctcattaaagccatcgaaaccaagctgcccacaggcgaaatacaggctgattttgtcaccgaagctgtagaggcttatcgtaaaaacggaacggatccgatttttgagggcgcgccccatctcctggtcgtctcccacggcgaaaaggcggtttgtttccgggaggatgttgtcctggccctagcctactttgaattgctggcgcaaagcgccggcttgggaacgacctggtgcggcatggtcaaattcatagccgacatggtgccggaaatcggcgggtggttcggcttggctccgggcacctacttctacgccatgattttcggccggcccgcggttcgctatgcgcggacagtccaaaaggatcaggcggcccggattcgccgtatagactttgcctag

SEQ ID NO: 2160 - protein, 193 aa, Unknown
  Obtained from environmental sample
  DOMAIN (5)...(170): Nitroreductase family
  misc_feature (1)..(193): Xaa is any amino acid
MKTFVRGRRSVRAFLDEDIPAACIDELLADLAHAPSGCNARDLTFSVVSGRKAMAALLEKLIKAIETKLPTGEIQADFVTEAVEAYRKNGTDPIFEGAPHLLVVSHGEKAVCFREDVVLALAYFELLAQSAGLGTTWCGMVKFIADMVPEIGGWFGLAPGTYFYAMIFGRPAVRYARTVQKDQAARIRRIDFA

SEQ ID NO: 2161 - DNA, 483 bp, Unknown
  Obtained from environmental sample
  misc_feature (1)..(483): n is a, c, g, or t
gtgacacaaaccctcggtattcncgctacgcagggttattttcccactcccaattattcctcattcctcatttctcattcctcatttgacacagtcaccctctggtatgtcatcgaacatttccgtgactgcgttcccgcgctttctgaaataagaaagctgctcaaaactggcggggtactggctttcgcaacgccgtcgtataagggaatttccggccgtagttcgctaaaacgctttcttgaaaacagcccgcaggatcattggactgtctggtccccggcaatatgcgggaaagccctggggaaagccggcttcaaggtaaaaaaaatcgtaagcagcggccaccatcccgaacgcttcccgattattggcaaatttacgcataacaaggtttcactgttgtataggatgttattggcggcaagcaggattttttcgttaggcgacacatttgaagtgtacgctgtcaaggaaaggtaa

SEQ ID NO: 2162 - protein, 160 aa, Unknown
  Obtained from environmental sample
  misc_feature (1)..(160): Xaa is any amino acid
MTQTLGIXATQGYFPTPNYSSFLISHSSFDTVTLWYVIEHFRDCVPALSEIRKLLKTGGVLAFATPSYKGISGRSSLKRFLENSPQDHWTVWSPAICGKALGKAGFKVKKIVSSGHHPERFPIIGKFTHNKVSLLYRMLLAASRIFSLGDTFEVYAVKER

SEQ ID NO: 2163 - DNA, 723 bp, Unknown
  Obtained from environmental sample
  misc_feature (1)..(723): n is a, c, g, or t
gtgggcgcaatttacgagcatgacagaacagcggaagtatgggcaagccttaacgacagcgggcggcgcacaatcgcgcaagtctctccgaaactggttcttaatgccggcgggaaagccggtgggattacaacgggaaaaattgttaccgcgctaaaactgctcggttttgataaggtctatgacgagggagtctcggcggaaatcagtaattcacagttaaacgaagaactgcaaaagcggattagctccggcggcaaattgcaaggaagtttacttccattaatttccggcatttctgagggagttagccgttttgtaaaaaatttcttccccgatttagccggaaaccttgccgcgggcagaaatccgcggcggatttttgctgaagtgataaagggcgaatatgccgcgtccgaaaaagcggacatatcctgcgttatgtcggtctcctttgtgccgggcatagccgggaagtacggggaagcctgcaagacggatatcgctgttaccgccgcggaactggcgcggatgattaaattggcgggtatagacattgccggcctttcggaaagttcctttgacgaagtcaaaattacccctccgaaaggggaaaattctgctcaaaaagagaaagtttgcggttttgcgcatgcgcgcaaggttttggaagccgtctgcgagggcaaatatacctcaaaatggattgaaatatcggattaa

SEQ ID NO: 2164 - protein, 240 aa, Unknown
  Obtained from environmental sample
  DOMAIN (10)...(238): Iron only hydrogenase large subunit, C-terminal domain
  misc_feature (1)..(240): Xaa is any amino acid
MGAIYEHDRTAEVWASLNDSGRRTIAQVSPKLVLNAGGKAGGITTGKIVTALKLLGFDKVYDEGVSAEISNSQLNEELQKRISSGGKLQGSLLPLISGISEGVSRFVKNFFPDLAGNLAAGRNPRRIFAEVIKGEYAASEKADISCVMSVSFVPGIAGKYGEACKTDIAVTAAELARMIKLAGIDIAGLSESSFDEVKITPPKGENSAQKEKVCGFAHARKVLEAVCEGKYTSKWIEISD

SEQ ID NO: 2165 - DNA, 660 bp, Unknown
  Obtained from environmental sample
  misc_feature (1)..(660): n is a, c, g, or t
atggcggggaggatgaggtggctcttatcggggttgagtatgtactccgatacggcggcgtggtttatcagtatttcggcggccggtatgcggcctctgccgtcttttctggggagcagccgcagcgatattatggccaccagcacgtttgacagcactaatcgtatctggtcgtgctggtgcggggggaagaatgagattatgcgcgtgatggtctccgtggtattcatagtgtggagcgtgctcattacgaggtgtccggtgtcggcggcgctcatggcggtttctatggtttcgcagtctctcatttctcctatgagaatgatatcggggtcttggcggaagcaggcgcgtagcgcgttgttgaaggacggcgcgtcggagccgatttctctttgcgctatgatgctgcgcttgtcgcggtgcaggaactctatgggatcctcaatggttacgatgttgactgctctgctgttgtttatgtggtctatcattgaggcgagaagcgttgacttgccgcttcccgtggtgcctgtgactaatatcatgccgcggtttttcattgctatatccactatgacgctggggagggccagttcggagaagttcgggacttccaccttgatggagcgtacggccatcgcgggggtgccgcgttga

SEQ ID NO: 2166 - protein, 219 aa, Unknown
  Obtained from environmental sample
  misc_feature (1)..(219): Xaa is any amino acid
MAGRMRWLLSGLSMYSDTAAWFISISAAGMRPLPSFLGSSRSDIMATSTFDSTNRIWSCWCGGKNEIMRVMVSVVFIVWSVLITRCPVSAALMAVSMVSQSLISPMRMISGSWRKQARSALLKDGASEPISLCAMMLRLSRCRNSMGSSMVTMLTALLLFMWSIIEARSVDLPLPVVPVTNIMPRFFIAISTMTLGRASSEKFGTSTLMERTAIAGVPR

SEQ ID NO: 2167 - DNA, 792 bp, Unknown
  Obtained from environmental sample
  misc_feature (1)..(792): n is a, c, g, or t
gtgatgacgtggaggttgtcggcggtcagcggaatacgagccggggcgccgaagtcgcgtcgggaacggggcgcgacggaacccaaaacggcgtccgcgctgtcggagagcagctcgctcagcgccgcgccgcgcagaacgggaatggacgaggtcagcgcaccgcgttcccgcctgacccaaaagtcaaaggtaaccaaccgcctatcgacgcccttagacaagtccaaggcaaggtcgcttcgcgtcagcgacgacagcgttttgatgtcaagctcggtcagccacagagactcgtcgtcggaaaatacctcccactcgacatcggagtcgcgcctaacggtaaaccctccggagatgtcgagttcgtcgtcaacagccatggcaataggattgatacgcgccccggatttatccgtatcaactcccgccttgtcaattcccgtattgccggtattaattttatctgtaccggaacccgtattattattaactttgtccgcggcattaccggccacaccggtactaacaccgtttaaggcatcgccaaccgcttcgtctttcatcaacaccgccgacagcgcggccaacattttgcccgacgctttccctcccctggtctctatgcctaccctcccgctgtcgtccttgataaccgctatgtacgacgacacccgcctcttctcccacccgaagtgcgaccgtatcccctccctgtccgcggcaatgatcctgaactgcgcctccgtgaaatccgggtacgagaacgatactctcccctcccgtctttga

SEQ ID NO: 2168 - protein, 263 aa, Unknown
  Obtained from environmental sample
  misc_feature (1)..(263): Xaa is any amino acid
MMTWRLSAVSGIRAGAPKSRRERGATEPKTASALSESSSLSAAPRRTGMDEVSAPRSRLTQKSKVTNRLSTPLDKSKARSLRVSDDSVLMSSSVSHRDSSSENTSHSTSESRLTVNPPEMSSSSSTAMAIGLIRAPDLSVSTPALSIPVLPVLILSVPEPVLLLTLSAALPATPVLTPFKASPTASSFINTADSAANILPDAFPPLVSMPTLPLSSLITAMYDDTRLFSHPKCDRIPSLSAAMILNCASVKSGYENDTLPSRL

SEQ ID NO: 2169 - DNA, 804 bp, Unknown
  Obtained from environmental sample
  misc_feature (1)..(804): n is a, c, g, or t
atggagcataaaaacaggggactattcgcctcttttgcaatgcgaattgaatgtttgaaggcgagcgactgggaagcgacaaatgaggctttaaagagcatagagcgtacggacaattcggtgaaagtttcggataacagcgatggttcttggaccttgcacgctatgggagcggttcagttcgattttattttatccagattaaaaagagaatttcgctctgaggttagggcaggggagccgagcgttgagtttagggaaatgctttccaaaaaattagaggctatccagaatttttgccagattggagatacaagcgtaaaaatttctctttctgctgaacctaatagcgagggctttgcagttaaaggcagcgaaaggctttggaaagatgtgataatttctgctcttgatgaattttgccagtctggagttttgggcaaaggttctttgtggaatgttaaatttgttttgcataaatttgaagtgcagggcaattcgcaagccgtggtaaaaaaagcctgccttgatgcggcaaaaatgcttgtggagccgagttccgtgcaaatttacgaaccctgggtaaatttaaccgttcaatgcccaagccttttcgcaggcacggttgcaagcgatttgctctcccgtggcgcaaaaataataaacagcgatggagatggcaaaaaagcccgcttttacgcagaggcaccactcagcaaacttgcccgctacacaactgaactcctctccataaccaaaggaggggggaatttttttttgcattactttcaacatagggcttga

SEQ ID NO: 2170 - protein, 267 aa, Unknown
  Obtained from environmental sample
  DOMAIN (189)...(267): Elongation factor G C-terminus
  misc_feature (1)..(267): Xaa is any amino acid
MEHKNRGLFASFAMRIECLKASDWEATNEALKSIERTDNSVKVSDNSDGSWTLHAMGAVQFDFILSRLKREFRSEVRAGEPSVEFREMLSKKLEAIQNFCQIGDTSVKISLSAEPNSEGFAVKGSERLWKDVIISALDEFCQSGVLGKGSLWNVKFVLHKFEVQGNSQAVVKKACLDAAKMLVEPSSVQIYEPWVNLTVQCPSLFAGTVASDLLSRGAKIINSDGDGKKARFYAEAPLSKLARYTTELLSITKGGGNFFLHYFQHRA

SEQ ID NO: 2171 - DNA, 708 bp, Unknown
  Obtained from environmental sample
  misc_feature (1)..(708): n is a, c, g, or t
atggaattgctcaaagatggaactggagtatgtgacggtgccactatttcgtggaaagtagaggataaacgctttataattcagtcgtcctcgatagggatggttagtgattatgaagtgtctggttataggctcactctaaccagtaacggcgaaaaaagtacgtatgtaaatgtaaataaagattatctgcaaaagggttctttcaccgatcctcgcgacaagaaaaagtacgggactgtaaaaattggcgaccaaacttggatgtctgagaatttgaattacgaggctgatggaaaatgctacggtaacgatccagccaactgtgcaaaatatggcagtctttatgattggaaaacagcgttgagtgtttgccccaatggttggcatttgccaagtgataatgaatggcagactcttgtggatttcgtgggtggcgataaaattgccggcaagaagctcaagtctagaagcggctgggagaagtcaggcaacggcacggacattttcggtttttcggctctgcctggcggcgacggcgattccgttggcagtttcggcggtgtcggctacaacggctattggtggagtgcttccgagtacggtagcaaccacgcctacggccggagtatgctttacggcaacgagtacgccatctacctcagcggtaagagctacttgttctctgtccgttgtttgcaggactaa

SEQ ID NO: 2172 - protein, 235 aa, Unknown
  Obtained from environmental sample
  misc_feature (1)..(235): Xaa is any amino acid
MELLKDGTGVCDGATISWKVEDKRFIIQSSSIGMVSDYEVSGYRLTLTSNGEKSTYVNVNKDYLQKGSFTDPRDKKKYGTVKIGDQTWMSENLNYEADGKCYGNDPANCAKYGSLYDWKTALSVCPNGWHLPSDNEWQTLVDFVGGDKIAGKKLKSRSGWEKSGNGTDIFGFSALPGGDGDSVGSFGGVGYNGYWWSASEYGSNHAYGRSMLYGNEYAIYLSGKSYLFSVRCLQD

SEQ ID NO: 2173 - DNA, 522 bp, Unknown
  Obtained from environmental sample
  misc_feature (1)..(522): n is a, c, g, or t
atggaataccttacggtttatcctaacgataaccaggccagagagttaatacttgagatagggcggcgaatgtacagcaagcagtatgttgcttccaatgacggaaacatcacctgcaaaacgggaaaggacacgatctgggccacgccgacaggggtttccaaaggttttatgaaagaagatgagctggttaaaatgagcctggacggtaaagtaattcagcagggcaaattagcgccgtcttcagaaataaagatgcatttacgtatatacaacgaaaacccaaaaatacaggccgtctgtcacgcccatccgccttttgccacttctttcgcaatcgcgggtataagtttggacaaggcaatatacccagaagcgctggtgaatttgggcgtcgtgcctgtgacgcgttacgaaacgcctggttcccagggtgttcccgattcggtggccccctattgcagggattacaacgccctgcttcttgccaaccatcggcgcttaacgtgggctcggcgataa

SEQ ID NO: 2174 - protein, 173 aa, Unknown
  Obtained from environmental sample
  DOMAIN (15)...(173): Class II Aldolase and Adducin N-terminal domain
  misc_feature (1)..(173): Xaa is any amino acid
MEYLTVYPNDNQARELILEIGRRMYSKQYVASNDGNITCKTGKDTIWATPTGVSKGFMKEDELVKMSLDGKVIQQGKLAPSSEIKMHLRIYNENPKIQAVCHAHPPFATSFAIAGISLDKAIYPEALVNLGVVPVTRYETPGSQGVPDSVAPYCRDYNALLLANHRRLTWARR

SEQ ID NO: 2175 - DNA, 375 bp, Unknown
  Obtained from environmental sample
  misc_feature (1)..(375): n is a, c, g, or t
ttggctgaggatgttgaaataaaccgtgaaattcttatcaccatgatggaacctttgcagatcgaaattgattgcgccgtaaacggcgtggaagcggtagaaatgttttccgcggaaccggatcgctacgatttgatttttatggatttgcaaatgccggtaatggacggctttgaagcttcccgcgaaattcgcaatttaaattttgaaaaggcaaaaacggttcccattattgccatgacagctaatgtttttcgcgaggacgttgaaaaatgccttgaggccggtatgaacgatcacatcggaaaacctttggactttgacaaagtgctggaaaagctaaggctttttctggcagaggaatcgggagagtaa

SEQ ID NO: 2176 - protein, 124 aa, Unknown
  Obtained from environmental sample
  DOMAIN (2)...(115): Response regulator receiver domain
  misc_feature (1)..(124): Xaa is any amino acid
MAEDVEINREILITMMEPLQIEIDCAVNGVEAVEMFSAEPDRYDLIFMDLQMPVMDGFEASREIRNLNFEKAKTVPIIAMTANVFREDVEKCLEAGMNDHIGKPLDFDKVLEKLRLFLAEESGE

SEQ ID NO: 2177 - DNA, 732 bp, Unknown
  Obtained from environmental sample
  misc_feature (1)..(732): n is a, c, g, or t
atgataagatcacgattaataatgaaggatttgtttcttccgccaatgttaagtgacgggatggttatacagcatggaatcgctttcccaatccgtggtcgttcccctccatcttcagcggtgtcagtcacctttttgggcaaaacctaccagtcgcaggcgaacgcggatggcaaatggcagatactcctcgatcctgttcaggcgggtggcccctttacaatggatatagaatcagcggaaaccaaaatttgtataaaaggtatttattctggcgatgtatggctctgtgccggccagtccaatatggagttgcccatgcaacgactaagagacgattatccggaggaatggattgcggatacttttcctccgattagacaattcaaagcgccacaggagtgggatttttcgggcccacgcgaggagctaagcggaggctgttggactgtcgcgaccgctgaaaccctccatgatttttcaggaacggcctggttcttcgctaaatacctgcatgaaaagtacaatcttcccatcggtcttatttgtaccgcatggggcggaacgcctgtcgaagtctggatgagccgcgaggcgctggccgactttccagaaaaagccgcccagggcgagcaatacgctgatccggctgtttgcaaaaaaatcggtgcagagaatgaagctgcaatacaggaatgggaagatcgcctaatccgagaagacgaaggctaa

SEQ ID NO: 2178 - protein, 243 aa, Unknown
  Obtained from environmental sample
  DOMAIN (161)...(238): Domain of unknown function (DUF303)
  misc_feature (1)..(243): Xaa is any amino acid
MIRSRLIMKDLFLPPMLSDGMVIQHGIAFPIRGRSPPSSAVSVTFLGKTYQSQANADGKWQILLDPVQAGGPFTMDIESAETKICIKGIYSGDVWLCAGQSNMELPMQRLRDDYPEEWIADTFPPIRQFKAPQEWDFSGPREELSGGCWTVATAETLHDFSGTAWFFAKYLHEKYNLPIGLICTAWGGTPVEVWMSREALADFPEKAAQGEQYADPAVCKKIGAENEAAIQEWEDRLIREDEG

SEQ ID NO: 2179 - DNA, 771 bp, Unknown
  Obtained from environmental sample
  misc_feature (1)..(771): n is a, c, g, or t
ttgaacagccatgtaaaagttttaccgcgcaaattaaacggcgttgtccgcgcgattccctccaagtcgcaggcgcacagggcgcttatatgcgccgcgttagctgataaaccgacaaacatcgaatgctcgggtagttccgatgacataactgcaaccgccgcctgcctgtccgcgctgggggcgaaaattgagcgcgaatcgggcgtttatattgtccatcccctgaaacgggaggctcatgatattgcgactctaggctgcggggaaagcggcagcacctttcgttttatgctgcccatagtcggcgctcttgggcgtaaagcttcgttcatcctgaaaggccggcttcccgagcgtcccctctccccgttatacgaagagcttgtccgccacggagccgaattgtctcctcagggttctgtcccgttttgcgcttcggggcggcttgcgcccgggccttatttgcttgacgccggagtatcatcgcaattcatcagcggactgctgttcgccctgcccctgctggacggcgacagcgaattgcaactaacaggacgtgcggaatcgtttccgtatattgagctgacccttgcgatgctggagatattcggcgtacaaacagaatttaaagacaatgttttttacataccgggcgggcaaatatatcggtctccgggcagggctttggtagagggcgactggtctaacgcggcgttctggctgagcgcgggcgcgataggggagacacgcataacctgtaccggttga

SEQ ID NO: 2180 - protein, 256 aa, Unknown
  Obtained from environmental sample
  DOMAIN (7)...(256): EPSP synthase (3-phosphoshikimate 1-carboxyvinyltransferase)
  misc_feature (1)..(256): Xaa is any amino acid
MNSHVKVLPRKLNGVVRAIPSKSQAHRALICAALADKPTNIECSGSSDDITATAACLSALGAKIERESGVYIVHPLKREAHDIATLGCGESGSTFRFMLPIVGALGRKASFILKGRLPERPLSPLYEELVRHGAELSPQGSVPFCASGRLAPGPYLLDAGVSSQFISGLLFALPLLDGDSELQLTGRAESFPYIELTLAMLEIFGVQTEFKDNVFYIPGGQIYRSPGRALVEGDWSNAAFWLSAGAIGETRITCTG

SEQ ID NO: 2181 - DNA, 792 bp, Unknown
  Obtained from environmental sample
  misc_feature (1)..(792): n is a, c, g, or t
atggacaaagttgaaaaaaacgaaaattctttcccctgccttagccgcgatctttcatgggtcgattttaacgagcgcgtatttaatgaagggctgcgtaaggaactgcctctgctcgaacgcttccgtttcttgtcgattgtttcttcaaactttgacgaatttttcatggtaagggttgcggcgttaaaacggatgcaaaatgcggttgacccctgcggacttacgcccgcccagcagttaaaggcaatctcggaaaaagtccattctatcatgcgcaaacagtatgcgtgtctgcaaaacgaaattttacccggtcttgcaaaaaacgggttgtcgcttctgcgccccgattcatggtctgtccctcagcttgattttcttaactcgttttttgtaggacaggtatacccggtgctgaccccccttaggctggaagatgaaaagccgatgccttttatcgaaagccggctgttacacgccgcttttcttcttgaacctgaatcacatgacacacttacgcctgaaaaattaaaaataattgtcccgctgccgcctgtccttgacagaattgtctggctgccgggctcggataaaatgacagttaacggacaggaaaaagaaaaactgcagcttgttttactggaagatattattattacatggggagcgtatctttttcccggataccgcgtaaaagaaagtctgttatttaaagttaccgcgacgccgatttttccgttgatgaacagcgcgacgaagactttatcgaagcaatgtcggaagttttga

SEQ ID NO: 2182 - protein, 263 aa, Unknown
  Obtained from environmental sample
  DOMAIN (12)...(263): Polyphosphate kinase
  misc_feature (1)..(263): Xaa is any amino acid
MDKVEKNENSFPCLSRDLSWVDFNERVFNEGLRKELPLLERFRFLSIVSSNFDEFFMVRVAALKRMQNAVDPCGLTPAQQLKAISEKVHSIMRKQYACLQNEILPGLAKNGLSLLRPDSWSVPQLDFLNSFFVGQVYPVLTPLRLEDEKPMPFIESRLLHAAFLLEPESHDTLTPEKLKIIVPLPPVLDRIVWLPGSDKMTVNGQEKEKLQLVLLEDIIITWGAYLFPGYRVKESLLFKVTATPIFPLMNSATKTLSKQCRKF

SEQ ID NO: 2183 - DNA, 873 bp, Unknown
  Obtained from environmental sample
  misc_feature (1)..(873): n is a, c, g, or t
atgcattataagaattttttgacggttacttatgcgcccgccggttatttgaatgacaattcgattgaacagataaaagcggacattgaaaaagccggcaagtacataaaacttgacaagatatatcttgaaacttaccgttcggaagttttaatagagcgcgaaaagatggaagccgtaaaagccttatttgttgagaagggctatatggtatccggcgggattacaaccacggtgaagcaaactttaatgggcagcatgtgttttacagactcggaaaaccgcaaaaggcttggagaaattgccgcctacaccgcgaaactttttgatgaaataatccttgacgacttttattttacaaattgccgctgtgaatcctgcatcaaggcaaaaggagaccgcgattgggcttctttccgtcttgcgctgatgaatgatatttccgagaacgtgattattaaaaacgctaaagcggcgaatccaaaggtaaattgcataatcaaatatcccaactggtacgacagttttcaggctaacggctataaccttgaagacgaatcaaaaatgtttgacatgatctacaccggaaccgagacgcgcgatccaaattatacgcatcaaaacctgccgcgttatttaagttttttcctgccccgtctttttgaacacatcaagccgggaaaaaacggcggcggctggtatgatctttttgactgttctttggaagactatgtacagcaggcgtacttaacgctcttttcaaaatgccgcgaacaaatgcttttctgttnccctttacttgtacacgcccctctttacaccgccgctgtcggcgcgttcttcgatgaagcggatcagttcatcgacagatag

SEQ ID NO: 2184 - protein, 290 aa, Unknown
  Obtained from environmental sample
  misc_feature (1)..(290): Xaa is any amino acid
MHYKNFLTVTYAPAGYLNDNSIEQIKADIEKAGKYIKLDKIYLETYRSEVLIEREKMEAVKALFVEKGYMVSGGITTTVKQTLMGSMCFTDSENRKRLGEIAAYTAKLFDEIILDDFYFTNCRCESCIKAKGDRDWASFRLALMNDISENVIIKNAKAANPKVNCIIKYPNWYDSFQANGYNLEDESKMFDMIYTGTETRDPNYTHQNLPRYLSFFLPRLFEHIKPGKNGGGWYDLFDCSLEDYVQQAYLTLFSKCREQMLFCXPLLVHAPLYTAAVGAFFDEADQFIDR

SEQ ID NO: 2185 - DNA, 699 bp, Unknown
  Obtained from environmental sample
  misc_feature (1)..(699): n is a, c, g, or t
gtgattttcgttgacgcccttttttatgacccgttgaaacagcttgttattgattacgtgggcggcatggaagacattcgaaagggcgttatacgtccccttatcgcattgtcccatattttcaccgacgatccagtgcgcatcataagggcggtcaagtatgccgctatggcaggttttaagctgcccttctctctaaggaatataatacgaaaacagtcagaccttcttgctgatgtttccccttcaaggcttaccgaagaaattttcaagattatctattcttccgatgcgctaaaaattgttgaagctctggataatttaaaaatttatggctatctccagccgaaagccgtggaactttttagaaccatgccgggttttagggaaagatacctgaaaaccttcgccgctttgtgcagggaagactttaaaaaccagcccggagaagccctggcctgcctggtaaaagactaccttgaaagagcggtagattggcatatgagcgaaggcccggcggaaactttccgaagcgcttttattctggccagaaaattcgtgcttcctatgaatccgccaaagatagaactggaacaggccttaaagattatatttctggggcacggactctcggttaaaagaacacgaattaacgaacggcatcgaagaaagcccaaaaacagcgcagttactgtgtga

SEQ ID NO: 2186 - protein, 232 aa, Unknown
  Obtained from environmental sample
  DOMAIN (2)...(124): Poly A polymerase family
  misc_feature (1)..(232): Xaa is any amino acid
MIFVDALFYDPLKQLVIDYVGGMEDIRKGVIRPLIALSHIFTDDPVRIIRAVKYAAMAGFKLPFSLRNIIRKQSDLLADVSPSRLTEEIFKIIYSSDALKIVEALDNLKIYGYLQPKAVELFRTMPGFRERYLKTFAALCREDFKNQPGEALACLVKDYLERAVDWHMSEGPAETFRSAFILARKFVLPMNPPKIELEQALKIIFLGHGLSVKRTRINERHRRKPKNSAVTV

SEQ ID NO: 2187 - DNA, 378 bp, Unknown
  Obtained from environmental sample
  misc_feature (1)..(378): n is a, c, g, or t
atggaccttacccctcctgatttacacaaagataagcgggaaatacaatacaaggagagggaaaagatgggaaggaaaggttcacaaagacgtgtttacacgaaggaattcaaggtcgaagcggtagcattggccgagaagagggaaaagccaataagccagatagccaaggatctggggctcaacgagaacgtgctgcgccgctggatgcatgtgtctcaggcgccggcggggagcggggtgcaagcgttccccggtcacgggcggccgcgggacgaggagcttgcccgcttgaggaaagagaacaaggctttgcggaatgcgaatgaaatcctaaaaaaagcagcggtcatcttcgcacaaggggaaccccagtaa

SEQ ID NO: 2188 - protein, 125 aa, Unknown
  Obtained from environmental sample
  DOMAIN (30)...(112): Transposase
  misc_feature (1)..(125): Xaa is any amino acid
MDLTPPDLHKDKREIQYKEREKMGRKGSQRRVYTKEFKVEAVALAEKREKPISQIAKDLGLNENVLRRWMHVSQAPAGSGVQAFPGHGRPRDEELARLRKENKALRNANEILKKAAVIFAQGEPQ

SEQ ID NO: 2189 - DNA, 738 bp, Unknown
  Obtained from environmental sample
  misc_feature (1)..(738): n is a, c, g, or t
gtgcaggctgatgaggactatacgaagctgcttgccgggcgattttccttcgtggtggtgatcggtggtgacggtaccctgctggatgtggcgcgtcgcttcgtgtcctgtccgaccccgctgctgggcatcaatttcggaaaggtgggttttttagcggaagcgcatgcttccgagtggcgcgaagtgctgatcggtgcgctcgaaggacgcctgcttgttctggagcgcatggcgctcgcctttgagctgtttcgtgaagagaaacaaattcttgccggcgttgccgtcaacgatgtggtgttcaaccgcggctgtctggcccgggtcatcaatctggacgttgcggtgcagggctttgcgttgtgccgcatccgcgcggacgggctgatcatcgcctcgcctcagggctgctccggctacggcgcatccgccggcgggccgcttgtgcatccggacatccaggcgttcactctggtgccgatttgtccgtatgcctgcgactttccgcccctggtgctgccgtatccccaggaagtacgcgtaacgttgccgaaaaacaccacggagacctacctgacggtggacggacagcaaggatatactctgcagacggacgacagcgtgctcgtctgcggtatccccggcggcgtgcacttcgccagacgggacagggcaggctatctgcgcagactgaaagcacgcggcctgttggcggaacgggcggaacatgcctga

SEQ ID NO: 2190 - protein, 245 aa, Unknown
  Obtained from environmental sample
  DOMAIN (3)...(223): ATP-NAD kinase
  misc_feature (1)..(245): Xaa is any amino acid
MQADEDYTKLLAGRFSFVVVIGGDGTLLDVARRFVSCPTPLLGINFGKVGFLAEAHASEWREVLIGALEGRLLVLERMALAFELFREEKQILAGVAVNDVVFNRGCLARVINLDVAVQGFALCRIRADGLIIASPQGCSGYGASAGGPLVHPDIQAFTLVPICPYACDFPPLVLPYPQEVRVTLPKNTTETYLTVDGQQGYTLQTDDSVLVCGIPGGVHFARRDRAGYLRRLKARGLLAERAEHA

SEQ ID NO: 2191 - DNA, 486 bp, Unknown
  Obtained from environmental sample
  misc_feature (1)..(486): n is a, c, g, or t
atgcgcaaagccgggcaaagcggcagaaccgtcatgttctacagtgncatcgtcggcagcattncgggccagaccgggacggccatccagctggtaaacgcgtttgtcgaatacttgcgcaagaaaatggacggcgtcttcatcgtcaatcccacggagcaatttgaagagggcatggacggcgacgacctcatgtatatgtgggaacaggtgcaacgcagcaaccttatcgacatctggcgttttcagacggttgaggatgtcgagcggagttttgccctgttggggcgcaaaatcacgccggcctggtcgggcaaggacgccaccttttccaccggctgcaccaaagaaatgcatatcgccttggaaatgctgcaatacaataaagaactgcagattatcggcccgccgccggagcgcttcttccgccgcagccaatacggggtgggcaagtattttgacgcgaagctcaaaaaccatgcctag

SEQ ID NO: 2192 - protein, 161 aa, Unknown
  Obtained from environmental sample
  misc_feature (1)..(161): Xaa is any amino acid
MRKAGQSGRTVMFYSXIVGSIXGQTGTAIQLVNAFVEYLRKKMDGVFIVNPTEQFEEGMDGDDLMYMWEQVQRSNLIDIWRFQTVEDVERSFALLGRKITPAWSGKDATFSTGCTKEMHIALEMLQYNKELQIIGPPPERFFRRSQYGVGKYFDAKLKNHA

SEQ ID NO: 2193 - DNA, 369 bp, Unknown
  Obtained from environmental sample
  misc_feature (1)..(369): n is a, c, g, or t
gtgggcgaatgcggggcatgcaacgtgatcatcaacggggaatgttttaattcctgcatttacctcgcaatctgggccgaaggcaaggagattaccaccaccgaagggctattaagcgccgacggggaactctccgcgatccagcaggcgttcattgacgaaggcgcggtgcagtgcggcttttgcacgccgggctttctgatgagcgccactgagatcatacgctccggaaaaacctacagcgacgcggaactgcgaaaactgctatccgggcatctttgccgctgcacgggctatgagaacatattccgcgctgtgaaaaaacttgcccctagtgtcgcagtaaaaaaatctaaagcagacggctaa

SEQ ID NO: 2194 - protein, 122 aa, Unknown
  Obtained from environmental sample
  DOMAIN (33)...(108): [2Fe-2S] binding domain
  misc_feature (1)..(122): Xaa is any amino acid
MGECGACNVIINGECFNSCIYLAIWAEGKEITTTEGLLSADGELSAIQQAFIDEGAVQCGFCTPGFLMSATEIIRSGKTYSDAELRKLLSGHLCRCTGYENIFRAVKKLAPSVAVKKSKADG

SEQ ID NO: 2195 - DNA, 429 bp, Unknown
  Obtained from environmental sample
  misc_feature (1)..(429): n is a, c, g, or t
gtgcggctcgcgcccgaagaattcctttacggctttctgcacctttggcatgcgggtctggccgccgaccaggatgacttcgccgatctgcgacttgtcgattcccgcgtcccgcagggctttgcggcatggttcgatagatcgctctataaggtcttcgaccagcgattccagccgcgcctgcgaaagctggatattcagatgcttcggcccgctggcgtccgcggtgatgaacggcaggtttatgtcggtcatgtttttggacgacagctctatcttcgctttttcggcggcttccttaagcctctgcagggccagcttgtcgccggacaggtcgatgccgcttgtcttcttgaattcgtcgatcaggtaatgcagcacgcgcgcgtcgaagtccgcgcctcccagggctgtgtccccgttggttga

SEQ ID NO: 2196 - protein, 142 aa, Unknown
  Obtained from environmental sample
  misc_feature (1)..(142): Xaa is any amino acid
MRLAPEEFLYGFLHLWHAGLAADQDDFADLRLVDSRVPQGFAAWFDRSLYKVFDQRFQPRLRKLDIQMLRPAGVRGDERQVYVGHVFGRQLYLRFFGGFLKPLQGQLVAGQVDAACLLEFVDQVMQHARVEVRASQGCVPVG

SEQ ID NO: 2197 - DNA, 537 bp, Unknown
  Obtained from environmental sample
  misc_feature (1)..(537): n is a, c, g, or t
gtggtgttgcggtcgatcaggcgggtgaatatgtttccggcggtcgcgatgccaagcgaaagcggggtcacgtccagcagcaggacgtccttgacatcgcccttcaggacgccgccctggatggccgcgcccatggcgacgacttcgtcggggttcacgcctttgtgcggctcgcgcccgaagaattcctttacggctttctgcacctttggcatgcgggtctggccgccgaccaggatgacttcgccgatctgcgacttgtcgattcccgcgtcccgcagggctttgcggcatggttcgatagatcgctctataaggtcttcgaccagcgattccagccgcgcctgcgaaagctggatattcagatgcttcggcccgctggcgtccgcggtgatgaacggcaggtttatgtcggtcatgtttttggacgacagctctatcttcgctttttcggcggcttccttaagcctctgcagggccagcttgtcgccggacaggtcgatgccgcttgtcttcttgaattcgtcgatcaggtaa

SEQ ID NO: 2198 - protein, 178 aa, Unknown
  Obtained from environmental sample
  misc_feature (1)..(178): Xaa is any amino acid
MVLRSIRRVNMFPAVAMPSESGVTSSSRTSLTSPFRTPPWMAAPMATTSSGFTPLCGSRPKNSFTAFCTFGMRVWPPTRMTSPICDLSIPASRRALRHGSIDRSIRSSTSDSSRACESWIFRCFGPLASAVMNGRFMSVMFLDDSSIFAFSAASLSLCRASLSPDRSMPLVFLNSSIR

SEQ ID NO: 2199 - DNA, 420 bp, Unknown
  Obtained from environmental sample
  misc_feature (1)..(420): n is a, c, g, or t
atgaaaatacgtctaacgttaattattatcgcgtcgcttttattgtttcagggattgtccccgtgggaaggctccgccgcggtcgcgcctaacggagaattgcccataaccggtttttatatcgccactaacgcgtttccaaaaaatacggttgtggacattaccaatattgaaaacggaaaaaaaactcgggtgatcgtttcaaatactttaaccaatcccggtcttcttgcggtagtttcacgcgaagccgccgaattaatagggatgagggcgggctccattagcagaattaggatgatacagccttccgatcctatggcatatatacgctttacggaaagtatggcaaaaggaacccccgaatatgactctggaaatgtaattgacgaagataaactggtatcggatgtgtantaa

SEQ ID NO: 2200 - protein, 139 aa, Unknown
  Obtained from environmental sample
  SIGNAL (1)...(26)
  misc_feature (1)..(139): Xaa is any amino acid
MKIRLTLIIIASLLLFQGLSPWEGSAAVAPNGELPITGFYIATNAFPKNTVVDITNIENGKKTRVIVSNTLTNPGLLAVVSREAAELIGMRAGSISRIRMIQPSDPMAYIRFTESMAKGTPEYDSGNVIDEDKLVSDVX

SEQ ID NO: 2201 - DNA, 714 bp, Unknown
  Obtained from environmental sample
  misc_feature (1)..(714): n is a, c, g, or t
atgatttttaaaaatagacacaagctccctgcggaacttaacaaaaaattaaatgtttcatttatattcttttgtatgtttgttgttttttcgttcattgcagttatagatatgagccaagaaaatgaatttgtaatttcagaatacagccggggacttgacattgtttttgcaatagatgtttccagaagcatggatattgatgatgcgcaggcaggaggaaatgtctcccgcctccaacgcggcatttcgattattaaggaaggcgccgctgttgtttccggcgcacgttttgccgctgttattggccgtgacagggggtacttggcagttcctcttgttcatgacggcgaagcagccgtaaattttatggaatcaattgatgtatcgtcaatgacaggcagaagtaccaatctggaagcgcttgttgaatcggctgcaggcgcatttttaacttcatcggcggcaagaaaaattatagtctttgtatcagacggtgaatcccattccggcgtccttcgtaacgcgataaaccgctgcgtcagagaaggtattatcgtaaccgctgtagcaacaggcagtgatgaaggcaggccggttcctttaggagaacagtcttcggctgctgttagcagaagagatgccgctgttatgcgttacattgcggaaaaaacgcggcggactttacatgacggcagcctcgtgccaatctga

SEQ ID NO: 2202 - protein, 237 aa, Unknown
  Obtained from environmental sample
  DOMAIN (54)...(229): von Willebrand factor type A domain
  misc_feature (1)..(237): Xaa is any amino acid
MIFKNRHKLPAELNKKLNVSFIFFCMFVVFSFIAVIDMSQENEFVISEYSRGLDIVFAIDVSRSMDIDDAQAGGNVSRLQRGISIIKEGAAVVSGARFAAVIGRDRGYLAVPLVHDGEAAVNFMESIDVSSMTGRSTNLEALVESAAGAFLTSSAARKIIVFVSDGESHSGVLRNAINRCVREGIIVTAVATGSDEGRPVPLGEQSSAAVSRRDAAVMRYIAEKTRRTLHDGSLVPI

SEQ ID NO: 2203 - DNA, 594 bp, Unknown
  Obtained from environmental sample
  misc_feature (1)..(594): n is a, c, g, or t
atgaaacagaaaccgattgaaatcggaaaagatcggcttgatattgaaacccttgtcgcggcggcgaaaaaacaaacagcggtacgactgtgccgcagcgccgaatttgaggcaaagatcgggaaaggcgcggcccttcttgattcgatgctggcgcaacacggcggaatctacggcgttaccacaggttacggcgattcctgtaccgagaaaattaatcctgaacaataccgggaactgccaattaatttaacccggttccacggatgcggcatgggggattattttgacgatgaaacggtcagggcattgatgatcgtaaggctcaataccctggctatgggttattccggcgtcagcatggaactgctgcgttatattgaattttttattgagcatgacattctgccccttgtcccgcaggaaggctccgtgggcgcgtcaggcgatcttacccctctttcataccttgcgggggcgatcatcggcgagcggcaggttcgctatcagggtaaagtccgctcttccgccgaagcgcttgccgaattgggcaaaccgccctatncattccgtccanagaagccatcgccataa

SEQ ID NO: 2204 - protein, 197 aa, Unknown
  Obtained from environmental sample
  DOMAIN (5)...(196): Phenylalanine and histidine ammonia-lyase
  misc_feature (1)..(197): Xaa is any amino acid
MKQKPIEIGKDRLDIETLVAAAKKQTAVRLCRSAEFEAKIGKGAALLDSMLAQHGGIYGVTTGYGDSCTEKINPEQYRELPINLTRFHGCGMGDYFDDETVRALMIVRLNTLAMGYSGVSMELLRYIEFFIEHDILPLVPQEGSVGASGDLTPLSYLAGAIIGERQVRYQGKVRSSAEALAELGKPPYXFRPXKPSP

SEQ ID NO: 2205 - DNA, 744 bp, Unknown
  Obtained from environmental sample
  misc_feature (1)..(744): n is a, c, g, or t
gtgaatacgatgaacgcggccaaacatacgatgggtaaagtcgcgggagctggcgcgaatctggccggcaaattaacgggaggcgcggccggcctggccgggaatcttgtggcttcgcaccaaaacgggcaggcggcgaaagaagcggaaaaattggcgggcagcgatgagaaaacgcagaacagggccgcaaggcagggatttgcttccagtatgctgagaggcgcggtaaaccaggtcagtagtataggcggcagtttaaggggaggcggaaaatcatccggtgattcaatggcgggaaccataatggccggcattggcggaacgcctattcataggggcggccgcggcagccacggcggcgatggcagcgacgttaaaggctatctgccgaaggatgccgaggggaaaacaaaatcggacaggcagctgcaaagtaaaaatgcccaggagcgcataaaaggcgcggcgcataaagcgtttgaaaattatcagagtggcatgagcattcgggacagcatgaaaagcgggataagcagtttggcgcaggcaaatagagacgcgcttccggcgaactggaataaatcagacgcttataaagcgaaagaagcggctgctgaaagagaagccgtaaaaggcgattcagacgccggtaaaggaagtcgccgccatggtcatcacggtcaccagagccagcaaagtcaccatggtcaacaaaatcaccacgggcgccacaggtgctga

SEQ ID NO: 2206 - protein, 247 aa, Unknown
  Obtained from environmental sample
  misc_feature (1)..(247): Xaa is any amino acid
MNTMNAAKHTMGKVAGAGANLAGKLTGGAAGLAGNLVASHQNGQAAKEAEKLAGSDEKTQNRAARQGFASSMLRGAVNQVSSIGGSLRGGGKSSGDSMAGTIMAGIGGTPIHRGGRGSHGGDGSDVKGYLPKDAEGKTKSDRQLQSKNAQERIKGAAHKAFENYQSGMSIRDSMKSGISSLAQANRDALPANWNKSDAYKAKEAAAEREAVKGDSDAGKGSRRHGHHGHQSQQSHHGQQNHHGRHRC

SEQ ID NO: 2207 - DNA, 555 bp, Unknown
  Obtained from environmental sample
  misc_feature (1)..(555): n is a, c, g, or t
atgaaagaattgacggtacgccagaaagaagtgcttgtttttatcgctgattataaaagcaaacattcatatcccccgacaataagggaaatagcggaacatttttccatgtctgttaaaggcgcgcatgatcatattacggcattaaaaaagaaaggtcagataaaatatgaagacaagcgtcctcgtacgctggaactcaccaatataaaaaaagaagaccactcctccattatagatgttcctcttcttggtaatgtcgcggcgggcgttccccttcttgcggaagaaaattttgaaaggaatatacccatacacagctctttccttaaaaaaaataaaaaatattttgccctgaaagttaaaggcgattccatgtcgggagcaggcatattggacggagactttgcaattatagaaaaactcagcgttgtccgcaacggagaaatcgcggtggcagtcattaacgaagcggtaaccttaaaacgcttttacaaagaaagtacaaggatcaggctgcagcctgaaatcccgcttatagcccacatacagtaa

SEQ ID NO: 2208 - protein, 184 aa, Unknown
  Obtained from environmental sample
  DOMAIN (120)...(182): Peptidase S24-like
  misc_feature (1)..(184): Xaa is any amino acid
MKELTVRQKEVLVFIADYKSKHSYPPTIREIAEHFSMSVKGAHDHITALKKKGQIKYEDKRPRTLELTNIKKEDHSSIIDVPLLGNVAAGVPLLAEENFERNIPIHSSFLKKNKKYFALKVKGDSMSGAGILDGDFAIIEKLSVVRNGEIAVAVINEAVTLKRFYKESTRIRLQPEIPLIAHIQ

SEQ ID NO: 2209 - DNA, 381 bp, Unknown
  Obtained from environmental sample
  misc_feature (1)..(381): n is a, c, g, or t
atggccttggcgcagatacccactgccgccatgctctcctgtcccccggaaacgcttgcccgccgcgcccgagggctggcggcgcgtctgcgccgcgcgctcggccggacggcacaaattgtcgtcgtcaaagacagttcccgtgccggcggcggcgctttccccgaacgcgatctgcccaccagtctggtctgtctgcgtccggccgcatgttcggcgggggatctgaaacttcgtctgctcaataccgtcccgccgctcctgggccgcctggaggacgacgctttttgtctggacccgcgcaccttggacgacagggaattgcctctggtcgtgagcgcgcttcaacgcgcattgcgcctggaaaaggatgtgccgtga

SEQ ID NO: 2210 - protein, 126 aa, Unknown
  Obtained from environmental sample
  misc_feature (1)..(126): Xaa is any amino acid
MALAQIPTAAMLSCPPETLARRARGLAARLRRALGRTAQIVVVKDSSRAGGGAFPERDLPTSLVCLRPAACSAGDLKLRLLNTVPPLLGRLEDDAFCLDPRTLDDRELPLVVSALQRALRLEKDVP

SEQ ID NO: 2211 - DNA, 420 bp, Unknown
  Obtained from environmental sample
  misc_feature (1)..(420): n is a, c, g, or t
atggccgaggatacggccatattgttcaatttcttcgcggcgggaatgattggtgtaaagggattgtcggattactgcgccggaaaatttgccgcctttggttttgacgaagccctgcgtatggaactgagacgcatgaaaagcaagataagaactacagtcgtctgtccgttctttataaatacgggaatgtttgaaggggtaaaaacccgcgttccgcttcttttaccgattcttaaaaaagaatatgccgtaaaaaaaattgttaaagcggtattgaaaaacaaaactcggctcatcatgccacggtttgtgttctcggtatttttactgcggcttgtgcccacggcaataatggattcagtagccgactttttcggcatcagccacgcaatggacgattttaaggggagagcatga

SEQ ID NO: 2212 - protein, 139 aa, Unknown
  Obtained from environmental sample
  misc_feature (1)..(139): Xaa is any amino acid
MAEDTAILFNFFAAGMIGVKGLSDYCAGKFAAFGFDEALRMELRRMKSKIRTTVVCPFFINTGMFEGVKTRVPLLLPILKKEYAVKKIVKAVLKNKTRLIMPRFVFSVFLLRLVPTAIMDSVADFFGISHAMDDFKGRA

SEQ ID NO: 2213 - DNA, 567 bp, Unknown
  Obtained from environmental sample
  misc_feature (1)..(567): n is a, c, g, or t
ttggcagcacgagatcaaggagatgatgggcggcatggggataaattcgatagagagcttgaaagggaacaggctgatgttacgcggcgtgggtctaaacgaaaaagaactctctatcctaggaatcaaacacgcgggagaatgataatgaaaagagtctacgtaaacgaaaaatggtgtctaggctgccatctctgcgaatactactgcgcgttcgcggggacggacgagacggatatggccagggcgctgaagacgataaagatcaatcctaagatcaaaatcgaggagaaggacggcgtcagtttcgccgtttcatgccggcactgcaatgagcctttgtgcgtcaagggctgcatcaccggggcgctgaccatatcggccgacggcgtcatcactataaaccacgaccgttgcgtgagctgcttcacctgcattctgagctgcccttacggcgcggtctccccttccgacgacggcgcggtgcagaagtgcgagctgtgcgtcaaaacggccaagggccagcccgcttgcgtctccgggtgtcccaacggcgcgatgtcttga

SEQ ID NO: 2214 - protein, 188 aa, Unknown
  Obtained from environmental sample
  DOMAIN (132)...(155): 4Fe-4S binding domain
  misc_feature (1)..(188): Xaa is any amino acid
MAARDQGDDGRHGDKFDRELEREQADVTRRGSKRKRTLYPRNQTRGRMIMKRVYVNEKWCLGCHLCEYYCAFAGTDETDMARALKTIKINPKIKIEEKDGVSFAVSCRHCNEPLCVKGCITGALTISADGVITINHDRCVSCFTCILSCPYGAVSPSDDGAVQKCELCVKTAKGQPACVSGCPNGAMS

SEQ ID NO: 2215 - DNA, 453 bp, Unknown
  Obtained from environmental sample
  misc_feature (1)..(453): n is a, c, g, or t
gtgggcatcccgatagattgggcattggcgagcgtagacagccgtttacgcgacgagggcatccgcgaccacgtatcgatagtggtaggcggcagcatccgctccagcgcagacattgtgaaggcggtcgctttaggagccgactgcgtctacgtggccacgtcggccctgttggcgttaggctgccacctatgcagaagctgccacgccggcaaatgcaactggggcatcgccacgcaagcgccggaactggtgaagcgcctgaatcctaatataggatataagcgtttggtgaacctgatgaccgcttggcagcacgagatcaaggagatgatgggcggcatggggataaattcgatagagagcttgaaagggaacaggctgatgttacgcggcgtgggtctaaacgaaaaagaactctctatcctaggaatcaaacacgcgggagaatga

SEQ ID NO: 2216 - protein, 150 aa, Unknown
  Obtained from environmental sample
  DOMAIN (1)...(118): Conserved region in glutamate synthase
  misc_feature (1)..(150): Xaa is any amino acid
MGIPIDWALASVDSRLRDEGIRDHVSIVVGGSIRSSADIVKAVALGADCVYVATSALLALGCHLCRSCHAGKCNWGIATQAPELVKRLNPNIGYKRLVNLMTAWQHEIKEMMGGMGINSIESLKGNRLMLRGVGLNEKELSILGIKHAGE

SEQ ID NO: 2217 - DNA, 414 bp, Unknown
  Obtained from environmental sample
  misc_feature (1)..(414): n is a, c, g, or t
atgaaaaagctttttaagttacaggaaaaagggacaactgttcagcgtgaaatctttgcgggtatcactacctttttgacaatggcttacattcttgcgataaatccgggaatgttagcccttacaggtatgccgtggggaggagtttttaccgcaacggcgattgcttcggcagtagcgacatttgttatggctattacggcgaatcttccaatcgctcttgcgccgggtatgggacttaacgcgttctttacttttaccgttgttttgggaatgggctattcctggcagcttgccctgaccgcggtatttattgaaggtattatatttatcatactttcaatgtttaatgtacgggaagcgattattaaagctattccttcaaacctaaaaaagctgtctcggccgatctga

SEQ ID NO: 2218 - protein, 137 aa, Unknown
  Obtained from environmental sample
  misc_feature (1)..(137): Xaa is any amino acid
MKKLFKLQEKGTTVQREIFAGITTFLTMAYILAINPGMLALTGMPWGGVFTATAIASAVATFVMAITANLPIALAPGMGLNAFFTFTVVLGMGYSWQLALTAVFIEGIIFIILSMFNVREAIIKAIPSNLKKLSRPI

SEQ ID NO: 2219 - DNA, 771 bp, Unknown
  Obtained from environmental sample
  misc_feature (1)..(771): n is a, c, g, or t
ttgtgctcagcagaaaaaaagagtttggatattcccgaaggatatgtggaatattcgcaaaaacccagagaatatatcctcaactccatttccacaatcataaacgtggataccgcagttcaagatatatattcttctccttacgaccaaacaaaagagcaacttcatttggctattgaaagtttgcgcgaaaggcaagagagccaaattatcaataacgatgattacggcttgttaaaaaacgttccagaaagccagcgcataaagaagcccggaaacaaagctaattccccaatgccagatgatttagatgaattgctttcaaaagtgtggaaagatccatcctttttcttggcacatccaagagccattgccgctttccagcgcgaatgtacacgcagaggcgttcctcctacaaccatatcaacttttggtggcacatttatacagtggcgcggcattcctcttatcccaacagataagttatttgttgatggattgaaaaatccaaagagcaaaggcggcaaaaccaatattttattggtgcgtagcggcgaagcaaaacgcggtgttgttggcttgtatcaaaccggcttgcagaacgaacagggaagaggtctttcggtgcgtttcagaggagtggataacagagggcttgcctcttatcttttgtctctgtactgctctgctgcaattctcgcagacgatgccatagctgttcttgaagatgtggaagtaggcaactattacgactatccaaatagctattaa

SEQ ID NO: 2220 - protein, 256 aa, Unknown
  Obtained from environmental sample
  misc_feature (1)..(256): Xaa is any amino acid
MCSAEKKSLDIPEGYVEYSQKPREYILNSISTIINVDTAVQDIYSSPYDQTKEQLHLAIESLRERQESQIINNDDYGLLKNVPESQRIKKPGNKANSPMPDDLDELLSKVWKDPSFFLAHPRAIAAFQRECTRRGVPPTTISTFGGTFIQWRGIPLIPTDKLFVDGLKNPKSKGGKTNILLVRSGEAKRGVVGLYQTGLQNEQGRGLSVRFRGVDNRGLASYLLSLYCSAAILADDAIAVLEDVEVGNYYDYPNSY

SEQ ID NO: 2221 - DNA, 864 bp, Unknown
  Obtained from environmental sample
  misc_feature (1)..(864): n is a, c, g, or t
atggaccacatgatgccggaaatggacggtattaaagcggcaaaattaatacgcggcatgggttatacaaatcccatcgtcgcgcttacggctaacgcgctggcgggccaggcggaaatgttcatgcaaaacgggtttgacggttttatttccaagccgattgatatacgccagctgaacgcttctcttaacaagctggtacgcgacaggtatccgctcgaagtggtagaagcggcgcggcggcaggcgctcgatcttaatgcaaagctcaaaataaaaaaatcctccgccggggaggttaagcctgtttcagacccggaactggcggctattttcgtcagggacgccgagaaggcccttgcgaggctggaatcaatgcaggaattcgcgtaccgcagaaccgatgacctccgtatgtatgttataaatatccacgcgatgaaaagcgcgcttgcgaatatcggcgaaacagagctttccgctgccgcgctcaagctggaacaggcagggcgtgatgaaaatatacagttaatggcagatgaaactcctgagtttcttaaagcgctgcgtgaagtaatcgggaaaaacaaaccgaaagacggcggcgggctgccgggggaagattcggaatatgaccgggcatatttgggcgaaaagcttctcgctatacaaaaagcgtgcggggagtatgatgaaaaaaccgccaatacggcgcttgatgagctaaaacaaacaggattgccgcgttctgtcagaaagctgctggacgccattgccgagtatctgctgcacagtgattttgaggaggccgcccagcttctgtcagattacgcggacggcaatgatatacgngcagtgccgtga

SEQ ID NO: 2222 - protein, 287 aa, Unknown
  Obtained from environmental sample
  DOMAIN (107)...(192): Hpt domain
  misc_feature (1)..(287): Xaa is any amino acid
MDHMMPEMDGIKAAKLIRGMGYTNPIVALTANALAGQAEMFMQNGFDGFISKPIDIRQLNASLNKLVRDRYPLEVVEAARRQALDLNAKLKIKKSSAGEVKPVSDPELAAIFVRDAEKALARLESMQEFAYRRTDDLRMYVINIHAMKSALANIGETELSAAALKLEQAGRDENIQLMADETPEFLKALREVIGKNKPKDGGGLPGEDSEYDRAYLGEKLLAIQKACGEYDEKTANTALDELKQTGLPRSVRKLLDAIAEYLLHSDFEEAAQLLSDYADGNDIRAVP

SEQ ID NO: 2223 - DNA, 957 bp, Unknown
  Obtained from environmental sample
  misc_feature (1)..(957): n is a, c, g, or t
gtgaataccatgatgatagggcttatcctggtgggctttacgctggcggcgggcttgagcgttatttttatacacattgcttcggaaaaaaacaaagccgaagtaaaaaatcagcagaagagcaatttcctggcaaggatgagccatgagatacgcacgccgatgaacgcgatcctgggtattgcagaaattcaacttcaagacgaatcaattccgccgggcgtcagggaagctttttataaaataaacaattcaggcgatttgctgattggcattatcaacgacatactggatctttccaaaatcgaggcgggcaagctggaattagcgcaggcgaaatatgatgttccaagccttattaacgatactgtccagctgaacgtattatactatgaaagcaagcagatagattttaaattaattgtggatgaaaatgttccgttaacactgatcggcgacgaacttcacatcaagcagattttaaacaaccttctttccaacgcgttcaaatacacggataggggagaggtttcacttaccattactgtcgattatatgccgaggggaggctcgatccacgtacctcttattttccgcgtgagcgatacggggcagggcatgacggcggagcagatgcggcgtctgggcgatgagtattcccgctttaatatggaagccaaccgtacaaccgagggaaccggtttgggcatgagtatcgcgatgaaacttatacagatgatgaacggtgagatttcagtggaaagcaagccgggcaagggaacaacggttactgttcgtctgccgcagagaaatgtcggcctcggcgtatccggcacgataggaaaggagctggcggaaaatttgcagaaattacgcatacgcagcatacctcgcatgaaaaaggtgcaaatgacgcgtacgcccatgccctatggcaaagctcgtgccgaattctga

SEQ ID NO: 2224 - protein, 318 aa, Unknown
  Obtained from environmental sample
  SIGNAL (1)...(16)
  DOMAIN (39)...(105): His Kinase A (phosphoacceptor) domain
  misc_feature (1)..(318): Xaa is any amino acid
MNTMMIGLILVGFTLAAGLSVIFIHIASEKNKAEVKNQQKSNFLARMSHEIRTPMNAILGIAEIQLQDESIPPGVREAFYKINNSGDLLIGIINDILDLSKIEAGKLELAQAKYDVPSLINDTVQLNVLYYESKQIDFKLIVDENVPLTLIGDELHIKQILNNLLSNAFKYTDRGEVSLTITVDYMPRGGSIHVPLIFRVSDTGQGMTAEQMRRLGDEYSRFNMEANRTTEGTGLGMSIAMKLIQMMNGEISVESKPGKGTTVTVRLPQRNVGLGVSGTIGKELAENLQKLRIRSIPRMKKVQMTRTPMPYGKARAEF

SEQ ID NO: 2225 - DNA, 879 bp, Unknown
  Obtained from environmental sample
  misc_feature (1)..(879): n is a, c, g, or t
atgcagtttttgcggcctccgctggttcagtttcataattgctcaaaaatcaggcttgaaggcgtaacgctgcaaaattcaccgttctggactttgcatccgctgtactgccgcgacattgttatttccggacttaccgttaaaaatcctgttgacgctccaaatacggacggcatggacattgattcctgcgaagacgtgttaatcgaaaattgcatggtctcggtgggagatgacggcattgtgcttaaatcaggttcgggcgaagacggcattcgcgtgggaaaaccttgccgcagaataactgttcgtaactgcatgatagaagacggtcacggcgggatcgttataggcagtgaaaccgctgccggcgtttatgaagtgctgaccgaggattgtcttttcaggggaaccgaccgggggataaggataaaaacccgccgaggcaggggaggaaaaattcacgatttggaattccgtaacctcaccatggaaaacaacctttgcccccttgcgattaatatgttttaccgtccgggcgcggctttgacggacggctatttcagtcagagcgcccttcctgtgaacgcggcaacgccctcaattaaaaatatccgcatctcggatatcagggcttcaggctgcagggcgtcggccggttttatcgccggtttgcctgagtcgcctgtagaaaacgtcgttatcaaccgctgtgaattttctactgacgaaagatccggagtaagccccgatgaatcggacatgtttttgggaattccggcgattactgaaaaaagtatacgtcttcttaatgttaaaaatatacaattcaacgaagtaaatgtaagggggccgctcgaggcttttatttatcgttag

SEQ ID NO: 2226 - protein, 292 aa, Unknown
  Obtained from environmental sample
  DOMAIN (1)...(267): Glycosyl hydrolases family 28
  misc_feature (1)..(292): Xaa is any amino acid
MQFLRPPLVQFHNCSKIRLEGVTLQNSPFWTLHPLYCRDIVISGLTVKNPVDAPNTDGMDIDSCEDVLIENCMVSVGDDGIVLKSGSGEDGIRVGKPCRRITVRNCMIEDGHGGIVIGSETAAGVYEVLTEDCLFRGTDRGIRIKTRRGRGGKIHDLEFRNLTMENNLCPLAINMFYRPGAALTDGYFSQSALPVNAATPSIKNIRISDIRASGCRASAGFIAGLPESPVENVVINRCEFSTDERSGVSPDESDMFLGIPAITEKSIRLLNVKNIQFNEVNVRGPLEAFIYR

SEQ ID NO: 2227 - DNA, 711 bp, Unknown
  Obtained from environmental sample
  misc_feature (1)..(711): n is a, c, g, or t
gtgattctggatgaatttgccgcccagattgcagacctggtcaggagcggaaaacagattgtcattgtttcttccggcgcgcaggtggcgggactttcgactatggacaaatgggcgcgcaaaagagacattcattacagacaagccctctgtgcggtaggtcaggttgagctcatgaaaacatggggcagggcgtttgagaaaaccaaccttcacatcgcgcagatactccttacccaggaggattttgccgatcccatccgtaccctgaatatgcggaatacgctttttacactggtagatgagggggtcattccggtaatcaacgaaaacgacaccgtgtcggtcgcggaaattaagatcggcgacaacgatactttggcggcccagtcggccatactttggagcgcggatctcctaatccttttcagtgacatcgacgggctttacaccaaaaacccaaaagagtttccggacgcggaacttgtggaagaagttgttgatataaaggcggtcagggaaaaggtagccattggaagctccaacgcgcttggcaccggaggaatcgctactaagatctccgccgcagaaagaaccataccttacagcattcctaccatcattaccaacggttcaaagcccagggcgctggaagccctggcctccggaaagcagcgcggtacggcttttcttgctgagggtataaaatga

SEQ ID NO: 2228 - protein, 236 aa, Unknown
  Obtained from environmental sample
  DOMAIN (1)...(210): Amino acid kinase family
  misc_feature (1)..(236): Xaa is any amino acid
MILDEFAAQIADLVRSGKQIVIVSSGAQVAGLSTMDKWARKRDIHYRQALCAVGQVELMKTWGRAFEKTNLHIAQILLTQEDFADPIRTLNMRNTLFTLVDEGVIPVINENDTVSVAEIKIGDNDTLAAQSAILWSADLLILFSDIDGLYTKNPKEFPDAELVEEVVDIKAVREKVAIGSSNALGTGGIATKISAAERTIPYSIPTIITNGSKPRALEALASGKQRGTAFLAEGIK

SEQ ID NO: 2229 - DNA, 924 bp, Unknown
  Obtained from environmental sample
  misc_feature (1)..(924): n is a, c, g, or t
gtgattgatgcaggccatgacgccaagcacacagccaaagcaatggaagagcggcaccggcagacagacgcggtctttcggcgaaaaagcctggtggtagccgatccagtagccgttgttcacgatgttgacgtgggtcagcatcacgcccttgggaaagcccgtggtgcccgaggtgtactgcatgttcaccacatcgtagggagaaaccagggccttgcgcgcttcgtattccgcatcggagaccatcaccgccaggcttttgacctcgggtatggaatacatgcccctgtgcttttccattcccagaaaaataacccggcgcaggtggggaagggtgggcgaattgagttctccccgctgctgggagcggatttcgggaagaatcttgtgcagggtttgcaggtagtcgtgatccctgaagccgtcaatgacgaccagattttcgcattccgagtgccgcaattggtattccagttcgctttcctggtagctggtgttcacagtcaagagtatcgcgccgatgcgggctgtggcgaacatcaggctcacccagaagggcacgttgctggcccagatggcgaccttttcgccctgtttgacgccaaggcccatgagtcccttggccagaatgtccacttccctgccgaactccgtccaggtcaggcggtagtcgcggtcaacatagaccagggcgtcggtgtccggagatttggcgatggtccggtcgagcacctggcccagagtcagttcctgcaaaacaaagggttcttcgtacatgactgccgccttatgccggatgatagaaggttgcgtaaatggtgcagggctggccctcggccgagccgacgtagtgcggcacgatggcgttgtaatacgccgtgtcgcccgcttccagtatgcggcgttcgttgccgtagatga

SEQ ID NO: 2230 - protein, 307 aa, Unknown
  Obtained from environmental sample
  misc_feature (1)..(307): Xaa is any amino acid
MIDAGHDAKHTAKAMEERHRQTDAVFRRKSLVVADPVAVVHDVDVGQHHALGKARGARGVLHVHHIVGRNQGLARFVFRIGDHHRQAFDLGYGIHAPVLFHSQKNNPAQVGKGGRIEFSPLLGADFGKNLVQGLQVVVIPEAVNDDQIFAFRVPQLVFQFAFLVAGVHSQEYRADAGCGEHQAHPEGHVAGPDGDLFALFDAKAHESLGQNVHFPAELRPGQAVVAVNIDQGVGVRRFGDGPVEHLAQSQFLQNKGFFVHDCRLMPDDRRLRKWCRAGPRPSRRSAARWRCNTPCRPLPVCGVRCRR

SEQ ID NO: 2231 - DNA, 822 bp, Unknown
  Obtained from environmental sample
  misc_feature (1)..(822): n is a, c, g, or t
atggtcgccggtcttgaggacattaccgaaggtgaactcattattgacggtgaacaaatgaacgatgttccgcccaaggacaggaatatcgcgatggtattccaaaactacgctctttatccccacatgtcagtttatgaaaacatggcgtttggtcttaggattaaaaaagtcccaaaagccgaaattgacaagcgcgtaaatgaagcggcgcgtattcttgacattgaaaaattccttgatcgtaaaccgaaggctctttccggcggtcagagacagcgtgtcgcggtaggacgcgccattgtccgtaacccaaaggtcttcctctttgacgaacctctttccaacctggacgcaaaactgcgcgtacagatgagggcggaactttccgacctgcacctgcgccttaacgcaaccatgatctatgttacccacgaccaggtagaagccatgactatggcgaataaaatcgttgttatgaaagacggaaaagtccagcaaattggttctcctctgttcctttataaccacccagtcaacaaatttgtagccggatttatcggttcgccgccgatgaacttccttactgtaaaagtacaggaagaagccaattccattgtattgaacgaaagctcctttagaattaaggccgatggttctcacgttgaatatttaagaaaatatgtcggcaaagaagtttacttcggtatccgcccggaagatttgacctatacaacgtccgcccggcacaacagcatgaccgtaaaggtaaccgttgttgagccgttgggcgccgatattcacctgtggctgacaaactga

SEQ ID NO: 2232 - protein, 273 aa, Unknown
  Obtained from environmental sample
  DOMAIN (1)...(163): ABC transporter
  misc_feature (1)..(273): Xaa is any amino acid
MVAGLEDITEGELIIDGEQMNDVPPKDRNIAMVFQNYALYPHMSVYENMAFGLRIKKVPKAEIDKRVNEAARILDIEKFLDRKPKALSGGQRQRVAVGRAIVRNPKVFLFDEPLSNLDAKLRVQMRAELSDLHLRLNATMIYVTHDQVEAMTMANKIVVMKDGKVQQIGSPLFLYNHPVNKFVAGFIGSPPMNFLTVKVQEEANSIVLNESSFRIKADGSHVEYLRKYVGKEVYFGIRPEDLTYTTSARHNSMTVKVTVVEPLGADIHLWLTN

SEQ ID NO: 2233 - DNA, 534 bp, Unknown
  Obtained from environmental sample
  misc_feature (1)..(534): n is a, c, g, or t
gtgagaaccatcggccttaattctaaaggagctttcgttcaatacaatggaattggcttcttcctgtacttttacagtaaggaagttcatcggcggcgaaccgataaatccggctacaaatttgttgactgggtggttataaaggaacagaggagaaccaatttgctggacttttccgtctttcataacaacgattttattcgccatagtcatggcttctacctggtcgtgggtaacatagatcatggttgcgttaaggcgcaggtgcaggtcggaaagttccgccctcatctgtacgcgcagttttgcgtccaggttggaaagaggttcgtcaaagaggaagacctttgggttacggacaatggcgcgtcctaccgcgacacgctgtctctgaccgccggaaagagccttcggtttacgatcaaggaatttttcaatgtcaagaatacgcgccgcttcatttacgcgcttgtcaatttcggcttttgggacttttttaatcctaagaccaaacgccatgttttcataaactga

SEQ ID NO: 2234 - protein, 177 aa, Unknown
  Obtained from environmental sample
  misc_feature (1)..(177): Xaa is any amino acid
MRTIGLNSKGAFVQYNGIGFFLYFYSKEVHRRRTDKSGYKFVDWVVIKEQRRTNLLDFSVFHNNDFIRHSHGFYLVVGNIDHGCVKAQVQVGKFRPHLYAQFCVQVGKRFVKEEDLWVTDNGASYRDTLSLTAGKSLRFTIKEFFNVKNTRRFIYALVNFGFWDFFNPKTKRHVFIN

SEQ ID NO: 2235 - DNA, 630 bp, Unknown
  Obtained from environmental sample
  misc_feature (1)..(630): n is a, c, g, or t
atggtttttatcagcggcaatattgtcaggataatcggcactctcgcgataaattcgctggtaatggtgttctcgctgttttttttctatgccgacggaccctatctttcacggctggtgcttcgcgccattccgataagggcggaatacatcagcgcgcttacgagaaaattcatggatattacgcggaatcttttttccggctatattatcgtagcgttactgcaggcggtagtggctttttttatttttaccatttttaaaattaacggttcgctggtgctcgcggttgtaacgtttgtctttgtatttattcctgtgctcggggccacggttgtttatataccactggctatcatgaaaatcgcaagcgggaacatagctggcggggtggttttccttattgttagcgcggtttttatttccggcatcgacaatgttttaaggccgatgtttctgagggaccgtatacagcttcacccgttgataatattttttgccatcctcggcggactggttgtttttggctttaacggatttattctcggcccgatgctggtaattctttttctcaccgttctggatctgtttttaattgagcacaaaatcgacgcccaggatcaggcgtaa

SEQ ID NO: 2236 - protein, 209 aa, Unknown
  Obtained from environmental sample
  DOMAIN (2)...(198): Domain of unknown function DUF20
  misc_feature (1)..(209): Xaa is any amino acid
MVFISGNIVRIIGTLAINSLVMVFSLFFFYADGPYLSRLVLRAIPIRAEYISALTRKFMDITRNLFSGYIIVALLQAVVAFFIFTIFKINGSLVLAVVTFVFVFIPVLGATVVYIPLAIMKIASGNIAGGVVFLIVSAVFISGIDNVLRPMFLRDRIQLHPLIIFFAILGGLVVFGFNGFILGPMLVILFLTVLDLFLIEHKIDAQDQA

SEQ ID NO: 2237 - DNA, 606 bp, Unknown
  Obtained from environmental sample
  misc_feature (1)..(606): n is a, c, g, or t
ttgaccactgtggctgaaaattacagccatgaaccctgggctgtgctggtctccacgattctcagcctgcgcaccaaagatgaagtgacgctggaaacttcaaggcggatgcttgccaaagcgcccggccccgcggaacttgccgcgttaagcgaagataaaatcgcccgtcttgcctatccggcgggcttttaccgcacaaaagcaaaaaacctgaaaaaaatcgccgcaattcttcttgagcaatacaagggcgaagtgcccgccgacatggacgcgctcctggccctgcccggcgtcggcagaaaaaccgccaatctggtgttaatcgaagcctttgatctgcccggcatctgcgttgacgtccatgtccaccgcatatccaaccgctgcggctggctgcgtaccgaaaatcggtacggtacaaaaacgccggaagaaaccgaaatgacattgcgcgagatactgcccaaaaaatactggaaagggataaacgcccttttggtgctctacggacaaaacctctgccgccccgtcagcccctggtgttcccgctgcgtaatcaaggcccattgcaaacgcatagccgtggggaaaagcagataa

SEQ ID NO: 2238 - protein, 201 aa, Unknown
  Obtained from environmental sample
  DOMAIN (82)...(111): Helix-hairpin-helix motif
  misc_feature (1)..(201): Xaa is any amino acid
MTTVAENYSHEPWAVLVSTILSLRTKDEVTLETSRRMLAKAPGPAELAALSEDKIARLAYPAGFYRTKAKNLKKIAAILLEQYKGEVPADMDALLALPGVGRKTANLVLIEAFDLPGICVDVHVHRISNRCGWLRTENRYGTKTPEETEMTLREILPKKYWKGINALLVLYGQNLCRPVSPWCSRCVIKAHCKRIAVGKSR

SEQ ID NO: 2239 - DNA, 651 bp, Unknown
  Obtained from environmental sample
  misc_feature (1)..(651): n is a, c, g, or t
atgagcctttccaatatctctataggagactatggctctatagcagccgttatatgcgccgcaggctcttccgcccgtatggggggcgccaaaaaagaatacctgccgctgtctggtgcctctgattcccttacagtgctgggcgcggctgtttccgcttttgccgctgttccggaaatcaggattatcgtcgtcgttgtaccggaggaacccgaaaccggggaaatcccggcgcgaaaagccctgccccctgaaattcctggaaaagcagacccaacagtgcgtttcgtcaccggcggcagcactcgccgcgcttcggcattaaacgcccttcgcgcgcttgccgctgacgcgccaaattacgtgttaatccatgacggcgcccgcccctggatcagctctgctctgattgagcgagtgattaagggcgtcaaacaataccgcgccgttatccccctgctccccctgacggaaaccccaaaggaaacagacttgccgcttgacaggccttttggcagcggccctgtttttatcaagcggcagctaaagagggcctttatcggaaccgcccagacgcctcangcctttagtttcccggaattctcactgcccatgaaaaagccgccgccaagaggaggattttaccgatga

SEQ ID NO: 2240 - protein, 216 aa, Unknown
  Obtained from environmental sample
  SIGNAL (1)...(28)
  DOMAIN (14)...(205): Uncharacterized protein family UPF0007
  misc_feature (1)..(216): Xaa is any amino acid
MSLSNISIGDYGSIAAVICAAGSSARMGGAKKEYLPLSGASDSLTVLGAAVSAFAAVPEIRIIVVVVPEEPETGEIPARKALPPEIPGKADPTVRFVTGGSTRRASALNALRALAADAPNYVLIHDGARPWISSALIERVIKGVKQYRAVIPLLPLTETPKETDLPLDRPFGSGPVFIKRQLKRAFIGTAQTPXAFSFPEFSLPMKKPPPRGGFYR

SEQ ID NO: 2241 - DNA, 777 bp, Unknown
  Obtained from environmental sample
  misc_feature (1)..(777): n is a, c, g, or t
atggtcgattnggagatgggcaccggcaaaacggtatcaaagggaaagaacgtcttggacgcggtcttctcccccgccggcaatttcctatactacatagaggccgacagcggaagcgatatgggcgtgatccgcaaaacgaggatgtacatgaacgacgcgctcaccgttctccacgccgacgcctcgcaacgcggcgacctgcaaatatcctccgacggggagacgcttatcttcgcgtctaaatacaaaaacagcaagtgggacatctacgcgcttgacacgtcgggaaaagtcgcgccggtgagactgaccgacggccgagccgaccaccgccacccgcgcataagccccgacggcaagtacgtcgcgtacctatcgaaccgcaccggcttcggctggaaaatggacttgtgggtctacgacagggtcgcgacgaagcacaatcagctaacgttcgatacaaacgtgcaaggcttcacctggagcgacgactccgagacgatctacttctctgcgggcgcgaacctgctggaaatatgccgcgttgacatgaggcacaacctgataaagaacatgataccgcacccgcaaggcggagtgaagtcgtggagcgagagcgccccgagatttatacgctacaacgacgagccgatgatcgtgtacacgcgaatatatcctgacggaaagcggcggatctattggtacgacatcaacaacgcggcggacgccaagatgtactctgtcggggagtttgacgagtggaacgaggattga

SEQ ID NO: 2242 - protein, 258 aa, Unknown
  Obtained from environmental sample
  DOMAIN (102)...(140): WD40-like Beta Propeller Repeat
  misc_feature (1)..(258): Xaa is any amino acid
MVDXEMGTGKTVSKGKNVLDAVFSPAGNFLYYIEADSGSDMGVIRKTRMYMNDALTVLHADASQRGDLQISSDGETLIFASKYKNSKWDIYALDTSGKVAPVRLTDGRADHRHPRISPDGKYVAYLSNRTGFGWKMDLWVYDRVATKHNQLTFDTNVQGFTWSDDSETIYFSAGANLLEICRVDMRHNLIKNMIPHPQGGVKSWSESAPRFIRYNDEPMIVYTRIYPDGKRRIYWYDINNAADAKMYSVGEFDEWNED

SEQ ID NO: 2243 - DNA, 459 bp, Unknown
  Obtained from environmental sample
  misc_feature (1)..(459): n is a, c, g, or t
ttgatggccgagcatttgccaattacaggtttgatcgagacgaagctaataattatgagtaagattgcgttagatagcaacattctaatttataatcacagcctggaatttgaagataaaaaacatattgcaagaaggttcttcaatgaaaatcctgttgtttcatctcaagtagtatccgagtatatcaatgtgataaaaagaaatttaaaaatatcaaaactggaattaattcaattatgttctttgtggttggagaaatgtacggttcaaccagttgttttatccacaataaagctggctcagaatttaattgttaaatatgattttcaagtttttgacgggattattgttgccgccgcattggaagcagattgtgatattatttactcagaagatatgcacggtggaataataatagagaataagttaaaaatcgttaatccttttattaattga

SEQ ID NO: 2244 - protein, 152 aa, Unknown
  Obtained from environmental sample
  DOMAIN (22)...(140): PIN domain
  misc_feature (1)..(152): Xaa is any amino acid
MMAEHLPITGLIETKLIIMSKIALDSNILIYNHSLEFEDKKHIARRFFNENPVVSSQVVSEYINVIKRNLKISKLELIQLCSLWLEKCTVQPVVLSTIKLAQNLIVKYDFQVFDGIIVAAALEADCDIIYSEDMHGGIIIENKLKIVNPFIN

SEQ ID NO: 2245 - DNA, 558 bp, Unknown
  Obtained from environmental sample
  misc_feature (1)..(558): n is a, c, g, or t
atgcgtaagggcgacataatactgataatcgcggtgacgttgttcgcctttcctatattgtatatcgcgatgcttttcgcgtccgggtctctgaatgtcgtgtacacgctgaagaaggcggattctacggcgcccgtgactaagattgatgagatcaggcataccgcgcgtcgggattcgctcgccgcggccaattctaaggtttttgaggcggcggtgttggggcgcgccgagttgataaaagagcaggagaggctggccgagcagcaggcgcgtcttgagttgcttcagggcgagattgagaaggagcgtgaggagttgctcaaggagcgctcgctgcttgagaagaagatggccgatataccggctatagaggatgcgcgttacaagaagttggcaaagatatatcaggccatgaagcccgcggaggccgccgcgatattggagacgattcaggatggtcaggtcgcctccatactgggtaagatgaacgacgatcgtcagaagggcaagatactcgcccttttaacaaaggaaaaggccgccccggctcaataa

SEQ ID NO: 2246 - protein, 185 aa, Unknown
  Obtained from environmental sample
  SIGNAL (1)...(27)
  misc_feature (1)..(185): Xaa is any amino acid
MRKGDIILIIAVTLFAFPILYIAMLFASGSLNVVYTLKKADSTAPVTKIDEIRHTARRDSLAAANSKVFEAAVLGRAELIKEQERLAEQQARLELLQGEIEKEREELLKERSLLEKKMADIPAIEDARYKKLAKIYQAMKPAEAAAILETIQDGQVASILGKMNDDRQKGKILALLTKEKAAPAQ

SEQ ID NO: 2247 - DNA, 873 bp, Unknown
  Obtained from environmental sample
  misc_feature (1)..(873): n is a, c, g, or t
atgctgcattttaattataaaaactatttctttctggatctgggggatgcagtcatatggccaaaacgttttgagctgggatatatgtcgccaataaccaataccatcttttacaaaaataatgtcggcgactntgataatttgtcgatgattcttaattttaaagcgcaatatccggggcttggcaatatctggttttcgcttttctgggatgaggccttctgggtgccgtattggtacgagcttgaccgcaccatgcttgcggggcaggcgggcgtgagcttgtcattgcctttcctgtctttctcatcattaaaaatcagttataccaaagtgaatccctattgttacacccataaccgcaatttcaacccctggtatggcagtctgccgatggagacctcgtataccaacaacggcgtaagccttggctattacctccccccgaattcggatgagtttttattcaagttcaagacaatgcctgtcagaaacctggttacgtctctgcaataccagatgatccgccacggcgcgaattacggttccagcgcggtagacggcagctccctgctctcggagcttgatccgtataataggcatgggtccaaatcagaattaaaaagattttttctccatgacggggcatatcagtggatacacaccataaaagcaggcgttgaatataatctgccaaagctgccggttgcgctgtattgcgaaacgggaatcaattattcatattttacaaatattgaagaaaaagccaatgtcaccggatttgcgcgtccgtattttgtgatcgacacgcccgaataccctaaatccgccggttatatcattgtaatcggagttaaggttttcccaagataa

SEQ ID NO: 2248 - protein, 290 aa, Unknown
  Obtained from environmental sample
  misc_feature (1)..(290): Xaa is any amino acid
MLHFNYKNYFFLDLGDAVIWPKRFELGYMSPITNTIFYKNNVGDXDNLSMILNFKAQYPGLGNIWFSLFWDEAFWVPYWYELDRTMLAGQAGVSLSLPFLSFSSLKISYTKVNPYCYTHNRNFNPWYGSLPMETSYTNNGVSLGYYLPPNSDEFLFKFKTMPVRNLVTSLQYQMIRHGANYGSSAVDGSSLLSELDPYNRHGSKSELKRFFLHDGAYQWIHTIKAGVEYNLPKLPVALYCETGINYSYFTNIEEKANVTGFARPYFVIDTPEYPKSAGYIIVIGVKVFPR

SEQ ID NO: 2249 - DNA, 303 bp, Unknown
  Obtained from environmental sample
  misc_feature (1)..(303): n is a, c, g, or t
ttggtgatggcggtgggtggacaagaggccgcaggtgagaagttgaaatcaaagagtgggtggatgtgggaccatgatgatcccggtacggatgatttcggattttcggcactgcctgccggctaccgcacctacgatggtatcttcgacaacgttggttacttcgccttctggtatacgtctactgcgtcctcagaaaattctgcttatgctttcttctctgtattaaacggatatagagccggtggtttgtaccaagactatagggacatcgggcgttcggtgcgttgcgttatggattaa

SEQ ID NO: 2250 - protein, 100 aa, Unknown
  Obtained from environmental sample
  misc_feature (1)..(100): Xaa is any amino acid
MVMAVGGQEAAGEKLKSKSGWMWDHDDPGTDDFGFSALPAGYRTYDGIFDNVGYFAFWYTSTASSENSAYAFFSVLNGYRAGGLYQDYRDIGRSVRCVMD

SEQ ID NO: 2251 - DNA, 567 bp, Unknown
  Obtained from environmental sample
  misc_feature (1)..(567): n is a, c, g, or t
atgcgaataatctttcttacggtagcttttatggcaacggtgtgggcttgtatcggcgggacggttttggctcaaacaggaacgttcaccgacagcagggacgggaagacgtacaagactgtaaagatagggcgtcagacatggatggcggagaatcttaattatcagacggatagttcttggtgctacgataataaagaatctaactgcaagaaatacggtaggttgtatgtttggaatgcggcgatgaaggcttgtcctgctggataccgtttgtcttctaataaagattgggacgacttgtgtcgggcggtggggagtaagaaaggacagtggtgtgaagaagacggttgcggtgaaggttggggcggtgccggtaagaaattaaaatcaaagagcgggtggggcgaatacggtgatggtacggataactttgggttttcagccctgccgggttgcggctacggcctctggtggacgtctactgaggacaatagttataatgcctacttccggcaggtgggctccattggaatcatgaacgaccatgtgaccgaggggagctaa

SEQ ID NO: 2252 - protein, 188 aa, Unknown
  Obtained from environmental sample
  SIGNAL (1)...(24)
  misc_feature (1)..(188): Xaa is any amino acid
MRIIFLTVAFMATVWACIGGTVLAQTGTFTDSRDGKTYKTVKIGRQTWMAENLNYQTDSSWCYDNKESNCKKYGRLYVWNAAMKACPAGYRLSSNKDWDDLCRAVGSKKGQWCEEDGCGEGWGGAGKKLKSKSGWGEYGDGTDNFGFSALPGCGYGLWWTSTEDNSYNAYFRQVGSIGIMNDHVTEGS

SEQ ID NO: 2253 - DNA, 699 bp, Unknown
  Obtained from environmental sample
  misc_feature (1)..(699): n is a, c, g, or t
atgttttcaatgaaacgtttttcaattcttatattaacgggtgttatcgcagtatcagccgtttcagcccagaataatccggaaatgactgttgaacaatcctatttacaggaagcagtgcaagttatgatcatcagggaaacggcaagagcgagcagcagagaacagaaatttatcgctttgaattatatcggagatatgattaatagcggaagtaaaaatgacgaaatccgccagacactggattttctttccagagaaggaagaagaactatagcgacggaaagcggaagagtcgttaataatttccccgatgtcagaaggcagtcggcaaagtaccttggattattgggtacggaagaagcaagaaaaaccctgcttgaaatttgtcagtatgaaaacgaacctatggtgcttcaggaagcgataaaatctctgggtgatataggaatcaacgaaaacaatgagacagttgtaataatttcatgggctttctcaaagtttgacaatttaaatcccgataaccttatggcaattgccactattgacgcttttgaaaatatcgcaaggcaaaacaacggtattaattctcctgatgcaatcagaactttatcccgaataaccgaaggttactatattacaccggtaaaggaaagagcaaggcaattattgtctgatcttcgncattaccagaattaa

SEQ ID NO: 2254 - protein, 232 aa, Unknown
  Obtained from environmental sample
  SIGNAL (1)...(23)
  misc_feature (1)..(232): Xaa is any amino acid
MFSMKRFSILILTGVIAVSAVSAQNNPEMTVEQSYLQEAVQVMIIRETARASSREQKFIALNYIGDMINSGSKNDEIRQTLDFLSREGRRTIATESGRVVNNFPDVRRQSAKYLGLLGTEEARKTLLEICQYENEPMVLQEAIKSLGDIGINENNETVVIISWAFSKFDNLNPDNLMAIATIDAFENIARQNNGINSPDAIRTLSRITEGYYITPVKERARQLLSDLRHYQN

SEQ ID NO: 2255 - DNA, 891 bp, Unknown
  Obtained from environmental sample
  misc_feature (1)..(891): n is a, c, g, or t
atgaaatggaataatatttccgatgtagacggcgaagctgtaagcattatacgtaaattgaagagcgcgggacatgacacctatatcgtgggcggggccgtccgtgatttaatactcggaaaaaaaccgaaagattttgacattgtaagctccgcaaccccgcttaaaataaggaaaatgttccgtaattccagaataatagggcggcgtttccgtcttgtacatatatacttcgggcagaggctatttgaggtagccactttccgatctcttaaagacgggaatacaagcaatacattcggaacgattgatgaagacgtattccggcgcgattttacaatgaacgcacttttttatgatcccgaacagcagattgttgtggactatgtaggcggcatgaatgatataagaaaaaaacaggtaaggccggttattcccatttcacagatatttaccgaagaccctgtaagaatgatacgcgccgtaaaatacgcggcggctgctggttttttgattcctataaacgtcaaattaaaaatatataaacagtccggattacttgcttcaatttcaccttcccgcctgacagaagaaatattaaaaattataaattccaaccaggcggcgattattgtagacatgctggataaaatggggctttactgctaccttcagccggaagccgcaaaacttatgcgtaaaagcaaagatttcaggcaatcatatctgaagtcaatggcggttttaaacggtcaggaaaattcaagaggacaggcttatggcgctcttttttatgattatcttgaaactgtttccgcatgggagccggggacgatagaaaatttcaaggaaatttancacaccgtccgtttcctttgtttcaccgattaa

SEQ ID NO: 2256 - protein, 296 aa, Unknown
  Obtained from environmental sample
  DOMAIN (85)...(234): Poly A polymerase family
  misc_feature (1)..(296): Xaa is any amino acid
MKWNNISDVDGEAVSIIRKLKSAGHDTYIVGGAVRDLILGKKPKDFDIVSSATPLKIRKMFRNSRIIGRRFRLVHIYFGQRLFEVATFRSLKDGNTSNTFGTIDEDVFRRDFTMNALFYDPEQQIVVDYVGGMNDIRKKQVRPVIPISQIFTEDPVRMIRAVKYAAAAGFLIPINVKLKIYKQSGLLASISPSRLTEEILKIINSNQAAIIVDMLDKMGLYCYLQPEAAKLMRKSKDFRQSYLKSMAVLNGQENSRGQAYGALFYDYLETVSAWEPGTIENFKEIXHTVRFLCFTD

SEQ ID NO: 2257 - DNA, 465 bp, Unknown
  Obtained from environmental sample
  misc_feature (1)..(465): n is a, c, g, or t
atgaaccgcgcattaattgtgtattttgatacttgttgctatagtcggctattcgacggcaagataagcccggaagtaatggctgaagccgggcggattcggtacattatccgcaaccgcctttccggtaaatacatcattgtaggcagtgatattgtaactgctgaagttcgtcaaaacccggacgataacgagcgcgggatcattgaagaactctataatatgatcataagcgacgaagcgacggcgcacccgcaacgcataacacgcgccgccgaactggaattaaaaggactgaaaacgatggacgcccggcaccttgcggcggctgaagtgatgggtgccgattaccttttaacggtggacaaagattttataaaaacgtgttcaaaaccactaccgtcccataatatcttccgatacgataaaaaaggccttaaattaaccggaaacgccgttttctaa

SEQ ID NO: 2258 - protein, 154 aa, Unknown
  Obtained from environmental sample
  misc_feature (1)..(154): Xaa is any amino acid
MNRALIVYFDTCCYSRLFDGKISPEVMAEAGRIRYIIRNRLSGKYIIVGSDIVTAEVRQNPDDNERGIIEELYNMIISDEATAHPQRITRAAELELKGLKTMDARHLAAAEVMGADYLLTVDKDFIKTCSKPLPSHNIFRYDKKGLKLTGNAVF

SEQ ID NO: 2259 - DNA, 813 bp, Unknown
  Obtained from environmental sample
  misc_feature (1)..(813): n is a, c, g, or t
gtgtacagcggaaacggtacggatgagttcggtttttcggctttgccgggcgggagccattatgatagcatcggcaaatccggtgaatggtggactgacgaaagcaagtccgacccggagtggtattatctcagttattatagttacgaacttacaaatacgtactgccgtgccggtttctgtggtggcgacgcctcggttcgctgcgtccaagacatcccaggcgttcccgaaaaagttgttggtttagacgaccccccgccgccgatagtgaaatcatgggaatcaggcgcgacgaccgttacattctacaccaacgggttgttaagagtcagcggcaacggaaaaatggaagattgcatccccgaatgggaagaatatagccgtttcgcgtcgcagcgttattgcaaatccccttggcgcgattatcctgttaccggtttaatcattgaagacggcgtgacgcatatcggaagccgcgcgtttgacggatgctacatcatgtcgtccgtcacaatcccaaacactgtgacgtctataggggcgtacgcgtttcattattgcacaagcctgaggtcaataatcatccgaaattcgaacccgccgaaaatcgcctggacatttcaaatgggtatgcgtcgagatcaacccgcaactgtcgtaggtaacgtatttgaaagatattatgaaaatattatggaaaaagcttgtctatacgtcccggcaaacagcattgacgcctaccgcgccgccgacgggtggaaagattttggttgcgtcaaggaactcgaatccgcgccgggaggaaaataa

SEQ ID NO: 2260 - protein, 270 aa, Unknown
  Obtained from environmental sample
  misc_feature (1)..(270): Xaa is any amino acid
MYSGNGTDEFGFSALPGGSHYDSIGKSGEWWTDESKSDPEWYYLSYYSYELTNTYCRAGFCGGDASVRCVQDIPGVPEKVVGLDDPPPPIVKSWESGATTVTFYTNGLLRVSGNGKMEDCIPEWEEYSRFASQRYCKSPWRDYPVTGLIIEDGVTHIGSRAFDGCYIMSSVTIPNTVTSIGAYAFHYCTSLRSIIIRNSNPPKIAWTFQMGMRRDQPATVVGNVFERYYENIMEKACLYVPANSIDAYRAADGWKDFGCVKELESAPGGK

SEQ ID NO: 2261 - DNA, 864 bp, Unknown
  Obtained from environmental sample
  misc_feature (1)..(864): n is a, c, g, or t
atggcgatagggcgaaagattgttgtgatgggcagcatgcctaatgacgacgcggagcttgtaggggcggcggcggagcgctacgggtntgagttgtcggctacattgcgtcttgtcggcggtgttttggcggggagcaatgagtatccggccggggttatatcctatctgccgtgcagtcacgagaagatcagccatttctttgccgtgcagcatatagattttgttgatgatataccgttttatcagtgtgtcggcgagggcgcggttccgccgtacgtgtacgatcttccggtcagcggcgtttttgtttcgccgctctccgaggcggcggcggctagtttggtgctctctattgtgcgcagcagcgccgcgctctccaagcgtatggcgcttgaggcgcaggtgatgagcgatcgtaaccataaggaccgtcttgcttctatcggtatggagttgtgctatgagaatgactttccggcgcttttggggcatattctgacggtgaatcgcgaggcggtgtatgccgacgcggggtgtatatacgtgcgggatcggatggtggacaatagtttatgcgacacgttgcgctttatgctctgtcagagcgactcctttgccggcggcgccggcacggcgcccatgataaaggtcaacaccgacacgctcgtcggttgcgcggtctacaccggtcagttcattgaggtcgacgacgttgaaaggatacgccccgacgcccccttcaaggccgataggagtttcatttgctcgccggactatcactgcaagtcggtactgactgtgccgctcataaacgttgaggacgaagtggtgggcgtgctgcagcttatgaacaaaaagtga

SEQ ID NO: 2262 - protein, 287 aa, Unknown
  Obtained from environmental sample
  misc_feature (1)..(287): Xaa is any amino acid
MAIGRKIVVMGSMPNDDAELVGAAAERYGXELSATLRLVGGVLAGSNEYPAGVISYLPCSHEKISHFFAVQHIDFVDDIPFYQCVGEGAVPPYVYDLPVSGVFVSPLSEAAAASLVLSIVRSSAALSKRMALEAQVMSDRNHKDRLASIGMELCYENDFPALLGHILTVNREAVYADAGCIYVRDRMVDNSLCDTLRFMLCQSDSFAGGAGTAPMIKVNTDTLVGCAVYTGQFIEVDDVERIRPDAPFKADRSFICSPDYHCKSVLTVPLINVEDEVVGVLQLMNKK

SEQ ID NO: 2263 - DNA, 882 bp, Unknown
  Obtained from environmental sample
  misc_feature (1)..(882): n is a, c, g, or t
atgcgcctttggagctatcaggcattggcncacggttcggataccgtaatgtttttccagatgcgccgttcccgcggctgctgcgaaaaattccacggagcggtaattgatcactgtggacacgagaacacgcgggtattccgcgaaactgccgttttgggagaagaacttaaaaaactgggcgacgtatttttggacagcgttcttgtttgtgagacggcggttctttacgactgggacaactggtgggcgactcaactgtcggcgggcccgactattgatattaattatcccgaggaagtttaccgatattatgacgcggtagcgaaacagaatattcccgtggatataatcggagttgacactccacttgaaaaatacaaggttctttttgcgcctgtgctttacatgattaagccgggatacgcggaaaaactgaaagcctttgtcagtaatggcggcatacttgtaacgacttatttttccggcatgacggacgaacgcgaccttgttacgcaggacggctaccccggagaactgcgttctctctgcggtatctgggtagaagagacagacgctttaccgtccggaaaggctaacggttttgtgataaaggatcctccgtgggataaaaccacccttgccggaacatggaaggcggaaatgctctgtgacattatccacagtgaaggcgcgcaggtaatagccgtttacgaaaacgatttttacgcgggaacgcctgttctgtgccgcaataattatggcaaggggcaggtttggtattttggcgcaaggccccaggccgcgctgctggagcgtaccgccgcttttatctgcaatgaaagcggaattaaacccgtttccccgcgcaggaaggaatga

SEQ ID NO: 2264 - protein, 293 aa, Unknown
  Obtained from environmental sample
  DOMAIN (71)...(285): Beta-galactosidase trimerisation domain
  misc_feature (1)..(293): Xaa is any amino acid
MRLWSYQALAHGSDTVMFFQMRRSRGCCEKFHGAVIDHCGHENTRVFRETAVLGEELKKLGDVFLDSVLVCETAVLYDWDNWWATQLSAGPTIDINYPEEVYRYYDAVAKQNIPVDIIGVDTPLEKYKVLFAPVLYMIKPGYAEKLKAFVSNGGILVTTYFSGMTDERDLVTQDGYPGELRSLCGIWVEETDALPSGKANGFVIKDPPWDKTTLAGTWKAEMLCDIIHSEGAQVIAVYENDFYAGTPVLCRNNYGKGQVWYFGARPQAALLERTAAFICNESGIKPVSPRRKE

SEQ ID NO: 2265 - DNA, 672 bp, Unknown
  Obtained from environmental sample
  misc_feature (1)..(672): n is a, c, g, or t
ttggccgagggatcgggtttcagcggcggttatggcatcgcgattactacatcctgtaaagaccccgaaagggcgattgaattccttgactggatggcttccgaagagggttgtatcctccgggaatggggccttgaaggcgtgaattacaaatatatagatcaaaacggcaagaaaatcagggttcaaaacgaagaagacaggttagcccgtatttccgatcccaattacggaaggagaacaggaattggtctgtggtatcatcccttcccgcgccgcggcactggctggattgattcaaccggaaattatatcactacaaccactcctgaacttatcaagcaaaatttcctggatgttgaaagagatactttaaaagcctatggcgccgagttgtggacagaccttttcccctctactgaatctttgggaatcagccggcatggccaggcatggcagtatactttaccgcccgatctgcaggcaaaaatgtcagaagcggatgattatatgaaaacagcgttgtccaacattgttatcgggccgcagaacaattttgacgccgcctggacaaaaatccagaatgacctaaaggcgatgggcatagatgacgcaaacaaaggtttatcggcgcttgtaaaagacaaggtaaagctctgggaaagcaagtaa

SEQ ID NO: 2266 - protein, 223 aa, Unknown
  Obtained from environmental sample
  misc_feature (1)..(223): Xaa is any amino acid
MAEGSGFSGGYGIAITTSCKDPERAIEFLDWMASEEGCILREWGLEGVNYKYIDQNGKKIRVQNEEDRLARISDPNYGRRTGIGLWYHPFPRRGTGWIDSTGNYITTTTPELIKQNFLDVERDTLKAYGAELWTDLFPSTESLGISRHGQAWQYTLPPDLQAKMSEADDYMKTALSNIVIGPQNNFDAAWTKIQNDLKAMGIDDANKGLSALVKDKVKLWESK

SEQ ID NO: 2267 - DNA, 846 bp, Unknown
  Obtained from environmental sample
  misc_feature (1)..(846): n is a, c, g, or t
gtgccaaagatagatgtcaaagatttaccgcagtatcttcccgaatttaaaatccccgaaggttttactgagcctaatgaatacttaagacatcttacggcagaaggtcttgaaaagcgttatgcgaaagtaaaggaaaatgatttaaataaatgggaagatataaaaaagagggctgattatgaactgaatacgataatcagcatgggctatacgggatattttttgattgtagctgattttataaattacgcgaaagagcaagacattcccgtaggtccggggcgcggctcaggcgcgggttcgattgtcgcttattcactgcgtattacgaatattgatccattaaaatacggtcttatatttgaacgctttttaaatcctgaacgtatttccatgccggattttgacattgattttgccaatgagggacgcgaagaagtaataaattatgttacgaataaatacggcaaagaaagggtagcgcagataatcacattcggaacattgggagcgaaagcggttatcaaggatgtggctagggtattgggaatatcaatctccgaatcggaaatgataacaaaacttatttcattcaatcctgaaattactttggaaaaagcgaaagaagaagagccgcgccttagggaaatggaaagtgatccccgttttacggagttatttgccatcgcgcataaattagagggacttaaccgccattcaagcatacacgccgctggtatcgttatagggaaaaaaccgctgattgagttagtgcctctctttcaggaacgggaagaaaagggcggcaatatcgccacacagtacagcatgaacttcctttga

SEQ ID NO: 2268 - protein, 281 aa, Unknown
  Obtained from environmental sample
  DOMAIN (1)...(279): Bacterial DNA polymerase III alpha subunit
  misc_feature (1)..(281): Xaa is any amino acid
MPKIDVKDLPQYLPEFKIPEGFTEPNEYLRHLTAEGLEKRYAKVKENDLNKWEDIKKRADYELNTIISMGYTGYFLIVADFINYAKEQDIPVGPGRGSGAGSIVAYSLRITNIDPLKYGLIFERFLNPERISMPDFDIDFANEGREEVINYVTNKYGKERVAQIITFGTLGAKAVIKDVARVLGISISESEMITKLISFNPEITLEKAKEEEPRLREMESDPRFTELFAIAHKLEGLNRHSSIHAAGIVIGKKPLIELVPLFQEREEKGGNIATQYSMNFL

SEQ ID NO: 2269 - DNA, 450 bp, Unknown
  Obtained from environmental sample
  misc_feature (1)..(450): n is a, c, g, or t
gtgttttttacccatatgctgcgtaaaacaagacaaatttctagcattaggctatactctaaaaaaaaggaaaaaatgaataccttatggcggattgctaaagaagctgtcagatataaaggctggctgttgttgtcgattttcggcacgcttatgctgacgacagtcaatctgattgccccaagaattatggcgggtatgacggggcttgtggcggcgggcatgactcgggaaaatcttatcaccgttttatggatggcaggcggattgcttggcctatacctgacacgcatcctgttccggtttttatccaattactgctcgcatagggcggcgtggcggcttgtgcttgaactgcggataaaagtttataacgcgattcagtctttttccatggactattttcacaacaagcaaaccggcgctcgtgccgatctgatacatcggtaa

SEQ ID NO: 2270 - protein, 149 aa, Unknown
  Obtained from environmental sample
  misc_feature (1)..(149): Xaa is any amino acid
MFFTHMLRKTRQISSIRLYSKKKEKMNTLWRIAKEAVRYKGWLLLSIFGTLMLTTVNLIAPRIMAGMTGLVAAGMTRENLITVLWMAGGLLGLYLTRILFRFLSNYCSHRAAWRLVLELRIKVYNAIQSFSMDYFHNKQTGARADLIHR

SEQ ID NO: 2271 - DNA, 939 bp, Unknown
  Obtained from environmental sample
  misc_feature (1)..(939): n is a, c, g, or t
atgacgagtctgtcgggaagtacccgcggaaaagggaagcgcctactgccgnccaggtctggagagctttgctttgacgggaagacgctgaaaatcctttccaccaaaaccatagagggcgacgtgaatcaggaaaccggaaaaattaagttttcaggtgaaataaagattacggggaacgtgctttccggcggtgtggtagtgggagcttcccatgtgacggtggatggctatgccgaagaagcgatgatttcttcaggcggcaaagccacggttacaatgggctttaagggcggcggaagaggggttctcaaagccagggccggcatttcagccgcgtttgttgaaagagcctcggcggcggcgttgggtgacgtacagctcaacaaaggctccatcctttcaagcataaaaacaaacggaaaactttctattgtctcggaaaacgggaagctctctggcggggtctgtcaggcccgccagggaattgacgccgccgatattggatcggaaaaaggccttcgcactgaaatatcctttgggcaggactacttccttaaagagcagataggcgcatgcgaggaagaaatcgtcagattcaagagcgaactttcagagctggaaggaaaaatcaatcaagtgcgaaatgaatctcgaaataaaaaagagagtattcccgatgatttaaggatagaaaaaatacggctggttaaacttttagagcaggcaaatttaaagatatttaacctaagggaaaaatttgaggaacactatgaatctgaaattcgctgccgcggcactgttttttccggggtggtgatagaaagccacaacaggtattatgaggttcagcagaaacgaagccaggtgattttttatttcgaccgtgaatcaggaagaataaaagaaaagcccctgttccggaatacgaataactaa

SEQ ID NO: 2272 - protein, 312 aa, Unknown
  Obtained from environmental sample
  DOMAIN (1)...(300): Protein of unknown function (DUF342)
  misc_feature (1)..(312): Xaa is any amino acid
MTSLSGSTRGKGKRLLPXRSGELCFDGKTLKILSTKTIEGDVNQETGKIKFSGEIKITGNVLSGGVVVGASHVTVDGYAEEAMISSGGKATVTMGFKGGGRGVLKARAGISAAFVERASAAALGDVQLNKGSILSSIKTNGKLSIVSENGKLSGGVCQARQGIDAADIGSEKGLRTEISFGQDYFLKEQIGACEEEIVRFKSELSELEGKINQVRNESRNKKESIPDDLRIEKIRLVKLLEQANLKIFNLREKFEEHYESEIRCRGTVFSGVVIESHNRYYEVQQKRSQVIFYFDRESGRIKEKPLFRNTNN

SEQ ID NO: 2273 - DNA, 747 bp, Unknown
  Obtained from environmental sample
  misc_feature (1)..(747): n is a, c, g, or t
atgtcgcggcttttggcacagtacggggtaactgcgtttaaccctaccctttaccccatggaaagtgagcggatgcttgaggcggtaaaagcggctgtttcggccattggcagggaggacggggcccagatcatggggcttcatctggaaggcccctttatttcgcgtgaacgcctgggagtcatgaaagccggaacggtacataatgtcgacctggcgtttatgaagcggctttgggaagcagctggaggcaggatcgtaaacatgaccgtagccccggagcttaagggaatgagggagttggccctgttctgcttaaagaaaggcatcgtactacaggccggccatacagaagccgaatacgataacatggtggaaggaatgcaggcgggcattcttcacagcacgcatcttttcaacgccatgagcagtatgaaacaccggaaccccaacgcggtaggagcggttctaattcatcctgaaatgtcctgtgaaattatcgccgatggtttccacatacacccggacttgtacaagctgcttttaagggacaagcccgtagacaggatcgtgctcatcaccgacgcccttaaacccacagagcaggtcaaaggccccttgcttgccaacggggaagaagtgatctttcaggatggggtttttcaccgcaaagccgataatgttattgccggttcggccctgaccatgatcaagggcgtacaaaaccntggtgaacttcggctttag

SEQ ID NO: 2274 - protein, 248 aa, Unknown
  Obtained from environmental sample
  misc_feature (1)..(248): Xaa is any amino acid
MSRLLAQYGVTAFNPTLYPMESERMLEAVKAAVSAIGREDGAQIMGLHLEGPFISRERLGVMKAGTVHNVDLAFMKRLWEAAGGRIVNMTVAPELKGMRELALFCLKKGIVLQAGHTEAEYDNMVEGMQAGILHSTHLFNAMSSMKHRNPNAVGAVLIHPEMSCEIIADGFHIHPDLYKLLLRDKPVDRIVLITDALKPTEQVKGPLLANGEEVIFQDGVFHRKADNVIAGSALTMIKGVQNXGELRL

SEQ ID NO: 2275 - DNA, 417 bp, Unknown
  Obtained from environmental sample
  misc_feature (1)..(417): n is a, c, g, or t
atgcaaagaaaaggttacggagcattgattgtgctggaaaagagggttggtttaaaatcttatgttgattcgggcgaagtgataaatggcgatttttccaaaaaacttttatgtacaattttttatcccggaaccgctttgcacgatggcgcggtgatagttttgggaaataaaattatagcggcaggttgcgtactgcctatgccaaccggaactgccgccgccgagcaatccggaggaatgcggcacagggcggcaaaagccctagctctggaaacagatgcttttgtgatagttgtgtctgaggaaacgggctacatctcaatagcttaccgcgatagcttccgcacaaggcagagcaaaagagaattagaagaagaaataaaacgccattggaaagaactttatgaaaactga

SEQ ID NO: 2276 - protein, 138 aa, Unknown
  Obtained from environmental sample
  DOMAIN (1)...(116): Domain of unknown function DUF147
  misc_feature (1)..(138): Xaa is any amino acid
MQRKGYGALIVLEKRVGLKSYVDSGEVINGDFSKKLLCTIFYPGTALHDGAVIVLGNKIIAAGCVLPMPTGTAAAEQSGGMRHRAAKALALETDAFVIVVSEETGYISIAYRDSFRTRQSKRELEEEIKRHWKELYEN

SEQ ID NO: 2277 - DNA, 657 bp, Unknown
  Obtained from environmental sample
  misc_feature (1)..(657): n is a, c, g, or t
atgctggcgatagcggtaaaacctttcggcggggtaattgtgtggcgttgttttgtttacaactgcgtgcaggactggagggacaaaaacacagaccgcgcccgcgcctcttacgaccactttatgcctcaggacggcgcgtttgacgtcaatgttatcctgcagataaagcacggcccttacgattttcaagtgcgcgagcctgtatctccgcttttcggagccttaaagaaaacccgccatgtgatggaattgcagataacgcaggaatacaccggccatcagatagacctctgtttcctgccgtggatgtgggaagacattatgcgatatgacagcggacatggggaaaagaacggtatcagggagttagtggaaaaaagaagggaaggccaaaacggcattgagggattttcggcggtagtaaacgtagggcttgataaaaactggacagggcacactttagcgcaggcgaacctttacggttacggacgcatggcgtggaacccggccgttacggcaaaagagattgcatgggaatggagcgcactttcattcggcgctggagaagcgccgcaaaaaatagaaaatatccttcttaaatcatatcccgcgtatganaatacaacgctcctttcggcatttgctttatggtaa

SEQ ID NO: 2278 - protein, 218 aa, Unknown
  Obtained from environmental sample
  DOMAIN (1)...(150): Glycosyl hydrolase family 67 middle domain
  misc_feature (1)..(218): Xaa is any amino acid
MLAIAVKPFGGVIVWRCFVYNCVQDWRDKNTDRARASYDHFMPQDGAFDVNVILQIKHGPYDFQVREPVSPLFGALKKTRHVMELQITQEYTGHQIDLCFLPWMWEDIMRYDSGHGEKNGIRELVEKRREGQNGIEGFSAVVNVGLDKNWTGHTLAQANLYGYGRMAWNPAVTAKEIAWEWSALSFGAGEAPQKIENILLKSYPAYXNTTLLSAFALW

SEQ ID NO: 2279 - DNA, 408 bp, Unknown
  Obtained from environmental sample
  misc_feature (1)..(408): n is a, c, g, or t
atgtataaaaaaaaagttattggccttaccggaaactactgcgcgggaaaaaaccacgtagcttcccttctggagcaaaacaatattccggttcttgacgttgataaactggggcaccatgccattgaaaccgaaaaagagcggcttttggaacgctttggcgatgatatccttgctcaggacgggtcatggtcaatagatcgcaagcggcttggaaataaagtttttggcaggcaagaagaactgaaagccctggaggaaataatccatcctgtcgcaaacagcgaaaccctcgcctggatcgattcccaaaagggggaagcctgcgtaataaacgcggctttgcttcaccgctcatcggcttttgaaatgctggatgcggtctcggccgatctgatcatcggctaa

SEQ ID NO: 2280 - protein, 135 aa, Unknown
  Obtained from environmental sample
  DOMAIN (5)...(131): Dephospho-CoA kinase
  misc_feature (1)..(135): Xaa is any amino acid
MYKKKVIGLTGNYCAGKNHVASLLEQNNIPVLDVDKLGHHAIETEKERLLERFGDDILAQDGSWSIDRKRLGNKVFGRQEELKALEEIIHPVANSETLAWIDSQKGEACVINAALLHRSSAFEMLDAVSADLIIG

SEQ ID NO: 2281 - DNA, 927 bp, Unknown
  Obtained from environmental sample
  misc_feature (1)..(927): n is a, c, g, or t
ttgatggccgagggcgcaaaagcgcgccgagtgctggacaggcttgtaggttacaatctctccccattgctctggaaaaaagtaaagaacggcctttccgccgggcgcgtccagtctgtggccttaaggctgatctgcgagcgcgagaaagaagtggaaagttttattcccgaagaatactggacactggaagccgaatttaagtcaggcaagtcagtttatgacgcccaacttacgctttggaataacaacaagcccgttttgaaaagcgaggccgaagtaaaagatataatcgacaaaattaaggataaggattttattgtgtcagacgtgcgtgagacggaaaaaaccatcagacccaaagcgccgtttaccacgtcccagcttcagcagacggcggcaaacaagcttggtttcacctcacgcaagacaatgcaggtagcccagcagctttacgaaggcgttgccataggagcgtcaagggtaggtttgattacctatatgcgcaccgacagcgtccgtatttcacaaaccgcgctggaagacgttcgcacatggcttgaaaaaaattatcccaaagaactgcctgaaaagcccgtggaatataccgtaggcaaaaacgcgcaggacgcgcatgaggcaatcaggcccacatataccgaatatactcccgattcaataaaagaacatttaacaaaggaccagctccgcctgtattcgataatctgggaaaggtttgtttccagtcagatgaccaacgcgaaaagcaggaccgtaagccttgatatcaaggttgttgcgggtaacgaagaagggcttttccgcgtaagcgggacaaaacttgtcgaaaaaggcttttacaaggcgataaaactcctgtcccctcaaggagaaacacaggttcctgtccgtcgctttgagcaatga

SEQ ID NO: 2282 - protein, 308 aa, Unknown
  Obtained from environmental sample
  DOMAIN (4)...(308): DNA topoisomerase
  misc_feature (1)..(308): Xaa is any amino acid
MMAEGAKARRVLDRLVGYNLSPLLWKKVKNGLSAGRVQSVALRLICEREKEVESFIPEEYWTLEAEFKSGKSVYDAQLTLWNNNKPVLKSEAEVKDIIDKIKDKDFIVSDVRETEKTIRPKAPFTTSQLQQTAANKLGFTSRKTMQVAQQLYEGVAIGASRVGLITYMRTDSVRISQTALEDVRTWLEKNYPKELPEKPVEYTVGKNAQDAHEAIRPTYTEYTPDSIKEHLTKDQLRLYSIIWERFVSSQMTNAKSRTVSLDIKVVAGNEEGLFRVSGTKLVEKGFYKAIKLLSPQGETQVPVRRFEQ

SEQ ID NO: 2283 - DNA, 648 bp, Unknown
  Obtained from environmental sample
  misc_feature (1)..(648): n is a, c, g, or t
atgagtagaacggcggaaattacaagaaagacaaaagagactgatatttccatcaagttgaatattgacggtaccggcattgcgaaactggattatccaattggttttatggggcacatgcttaatacttttgcccgccacgggctctttgatctggaaattgccgcaaagggcgaccttgaggtagaccagcaccacctggtggaggatacgggaatcgtcttgggccattgcttcgcgaaggcgttaggtgaaaaaaggggaatacggcgcaatgggagctgcctttttcccatggacgagacccttgcccgcgccgcggttgatatttcaggccgcagttttttgttttttgacggtcggcttggagccgcgccgctattggctgccgatgattcggatgggcttttccggttccaggtcgacaccattgaagatttttggcaaggttttacaggcgcggccggctgcaacctgcatctggaaatactccggggcagaagcgaccaccacaaaatagaggccatgttcaaggcggccgcccgttccctccgttcagcctgcgaatttgacgagcgcgcgcgtgacgcgattccctcgacaaaaggatcactgccgggctttgactcgccgggagtactggtatga

SEQ ID NO: 2284 - protein, 215 aa, Unknown
  Obtained from environmental sample
  DOMAIN (34)...(185): Imidazoleglycerol-phosphate dehydratase
  misc_feature (1)..(215): Xaa is any amino acid
MSRTAEITRKTKETDISIKLNIDGTGIAKLDYPIGFMGHMLNTFARHGLFDLEIAAKGDLEVDQHHLVEDTGIVLGHCFAKALGEKRGIRRNGSCLFPMDETLARAAVDISGRSFLFFDGRLGAAPLLAADDSDGLFRFQVDTIEDFWQGFTGAAGCNLHLEILRGRSDHHKIEAMFKAAARSLRSACEFDERARDAIPSTKGSLPGFDSPGVLV

SEQ ID NO: 2285 - DNA, 555 bp, Unknown
  Obtained from environmental sample
  misc_feature (1)..(555): n is a, c, g, or t
ttgttccatgaaatatggtacaatcaggaagtaatttttatgtggtatgataagttatttactgaattggaaaaaaacaaaaatacagaacaagccataaaaatggcagcttatatgcaaaacaaatttatatttttaggcataccaaaaccaaaattgaaagaaataataaagccttatataaaagaaggtaaaaaatatgaacctgactggaaatttattgatatttgctggaaaaaaaattatcgtgaggctcaatatgcggcgatagaatatttggagagtctcataaaattattaactgataatgatttacctaaacttaaaaaacttattgttaccaagtcatggtgggaaaccgctgattcaatagatgcaatagttggaaaaattattttaaattacaaacagtcagaaaaggaaatgcttaaatggtcaacagatgaaaatatttggttaaaaagagntatcaatagattttcaactgcaatacaaagaaaaaaccaatcaaaaattatggaacaagttatcgtaacaatttctcggccaatctga

SEQ ID NO: 2286 - protein, 184 aa, Unknown
  Obtained from environmental sample
  misc_feature (1)..(184): Xaa is any amino acid
MFHEIWYNQEVIFMWYDKLFTELEKNKNTEQAIKMAAYMQNKFIFLGIPKPKLKEIIKPYIKEGKKYEPDWKFIDICWKKNYREAQYAAIEYLESLIKLLTDNDLPKLKKLIVTKSWWETADSIDAIVGKIILNYKQSEKEMLKWSTDENIWLKRXINRFSTAIQRKNQSKIMEQVIVTISRPI

SEQ ID NO: 2287 - DNA, 651 bp, Unknown
  Obtained from environmental sample
  misc_feature (1)..(651): n is a, c, g, or t
atgaagtatgattttgaccgcgtaatagacaggagcaactcctacagcatcaaatacgagcctacatggcgcggcaagcccgatgacatactgcccctatgggtcgcggatatggatttcgcggcgcctgtctgcgtacaggaggcgcttgtccgccgtgcccaacacgggattttcggctattccgaacctgacgccgcttattttgacgttacgcataaatggtttgaggaacgttttaactggactgtccaacgcgagtggatgacgattacgccgggggtggtaaacgccctgtacatcgccgtcagggccttaacaaaaccgggggacggcattgttatacaacagcccgtttattacccttttgaatcaagcataatgaaaacaggtcggcggttgcttgtaaatgaacttgtatacaaagatggacattacagcatagattttcaggattttgaaacaaaaataaaacagtcgaagatgttcattatgtgcaatccgcataatcctgtcgggcgggtctggagccgcgatgaacttatccgaatgggcgaaatatgcctgcgccacggcgtgaccgttatcgccgatgaaatccacgaggattttatttttccgggccataagcatattgttttcgccgcttaa

SEQ ID NO: 2288 - protein, 216 aa, Unknown
  Obtained from environmental sample
  misc_feature (1)..(216): Xaa is any amino acid
MKYDFDRVIDRSNSYSIKYEPTWRGKPDDILPLWVADMDFAAPVCVQEALVRRAQHGIFGYSEPDAAYFDVTHKWFEERFNWTVQREWMTITPGVVNALYIAVRALTKPGDGIVIQQPVYYPFESSIMKTGRRLLVNELVYKDGHYSIDFQDFETKIKQSKMFIMCNPHNPVGRVWSRDELIRMGEICLRHGVTVIADEIHEDFIFPGHKHIVFAA

SEQ ID NO: 2289 - DNA, 585 bp, Unknown
  Obtained from environmental sample
  misc_feature (1)..(585): n is a, c, g, or t
ttgagcagtgctgcaaaactgcaagccagccacggcgatggcggcgtgaccgcgttggtggataaaaaagttccagcagaccgccaaaaacctatagttccagcaggctctggcagttttaaacattttcacgaccattgcttgggttgccaactttgcgcttctgtttgcccaaatgatgtactgtctaataaagcgtttggaaccacaaagcccaatatgtcttttgagcgcggctattgccgcccagagtgtgttaaatgttctgaggtttgcccaaccggagcaataaagccaataacaagagcagaaaaatcctccatacagataggctacgccgtgtggaacaaggaactctgcattgtgaataaagacaaagtggtttgcgatttgtgctcgcgcaaatgcccaaatgcggctatatccatgataccacaaagcgcggacgctccggctactgaccccaaaatcccgatgatagacacaagccgttgcataggttgcggcgcctgcgagcatctctgcccgtcaagaccgtatagcgcaatttacgtggaaggggttgaggtacacagggtggtgtga

SEQ ID NO: 2290 - protein, 194 aa, Unknown
  Obtained from environmental sample
  DOMAIN (40)...(63): 4Fe-4S binding domain
  misc_feature (1)..(194): Xaa is any amino acid
MSSAAKLQASHGDGGVTALVDKKVPADRQKPIVPAGSGSFKHFHDHCLGCQLCASVCPNDVLSNKAFGTTKPNMSFERGYCRPECVKCSEVCPTGAIKPITRAEKSSIQIGYAVWNKELCIVNKDKVVCDLCSRKCPNAAISMIPQSADAPATDPKIPMIDTSRCIGCGACEHLCPSRPYSAIYVEGVEVHRVV

SEQ ID NO: 2291 - DNA, 849 bp, Unknown
  Obtained from environmental sample
  misc_feature (1)..(849): n is a, c, g, or t
ttgttttctagggtggttccgtcggggaaaacggtggtgtattactatgcttatgacggagagggtaagaggttaggtccgtggactacgggacaggttaataagacggcggcaaggaattactgtaacttgcttatccgaaaggggaaattattgcctgatgctaaagggataccgacttttgcggaatttgccgccgttttctgggattgggataaaagcgattatttgaaggaacggcggaagcgcaggaagttggcacaatcctatgctgacaaaaataaaaagacggtcgagaatattttagttccttactttgggaatatgaagcttgacgctataacgggaaaggaaattgatacttggcttgattacctgatttcaaaaaagtataagaattctaccgctaacggcttttacggttctttgcaaactatgttgaaatgggcggttaaaaaacacattatcgagcgtgatccgttcaatgacgtggaaaagctgctgcaagagcaaaaaaagaaaaagattattacccctaaagaattttgggctttgttttctgacgattggaaaaaggtgtgggataataatttcctgatgtgtacggctcataagttggcggggctgaccggaattcggtgttgtgagattttggggctaaagggggaatatgtgtttgatgaccatatctatatttgcgcacaatacgatgagatatacggctatcgggaaacgaaaactaaaacagaacacaatatccctttgacagaggaagttattgcggatttgaaaaaactgatngaatgtaaacggacaggggtttgtgttttcggagactggcggcgataa

SEQ ID NO: 2292 - protein, 282 aa, Unknown
  Obtained from environmental sample
  misc_feature (1)..(282): Xaa is any amino acid
MFSRVVPSGKTVVYYYAYDGEGKRLGPWTTGQVNKTAARNYCNLLIRKGKLLPDAKGIPTFAEFAAVFWDWDKSDYLKERRKRRKLAQSYADKNKKTVENILVPYFGNMKLDAITGKEIDTWLDYLISKKYKNSTANGFYGSLQTMLKWAVKKHIIERDPFNDVEKLLQEQKKKKIITPKEFWALFSDDWKKVWDNNFLMCTAHKLAGLTGIRCCEILGLKGEYVFDDHIYICAQYDEIYGYRETKTKTEHNIPLTEEVIADLKKLXECKRTGVCVFGDWRR

SEQ ID NO: 2293 - DNA, 648 bp, Unknown
  Obtained from environmental sample
  misc_feature (1)..(648): n is a, c, g, or t
gtggttggcggcataccgtggattgagtttacccaggaggacgaacagcgccatgtggacgagatgtttggcctggcgaaaaagtacgggaaagacgtgtccatgctgcttgacgatgtgggcgatgccggggagcgtactttggaaatgtgcgtacaaaaagccattgaacagggctggcaggggcgtgttacagcccagcattgccgcgccatggcgttgtacgaagaaaattatttccgcaagatagcggcgctgatgcgcaaagccaacatcggccttgtggcggatccgcataccggacctctgcacgcgcgggtgcgcgatctggcggcggccggcgtgaatgtggccctgggacaggatgacatagcggacgcttactatccctacggccggtgtaatatgcaggaaatcgcgtttctcgcttcccaccttatgtggatgacttctttccaggacatggagcttttatacgatatgataactacttcggcggcgcgggttttgggtatttccggacatgttctggaaccgggcggaaacgccgatcttgtggtgcttaaagccgaagacgtgtatcacgcgatttgggaacatcaagcgcccgtatatgttatccgtaaaggtgtcattgtaaaacgctga

SEQ ID NO: 2294 - protein, 215 aa, Unknown
  Obtained from environmental sample
  misc_feature (1)..(215): Xaa is any amino acid
MVGGIPWIEFTQEDEQRHVDEMFGLAKKYGKDVSMLLDDVGDAGERTLEMCVQKAIEQGWQGRVTAQHCRAMALYEENYFRKIAALMRKANIGLVADPHTGPLHARVRDLAAAGVNVALGQDDIADAYYPYGRCNMQEIAFLASHLMWMTSFQDMELLYDMITTSAARVLGISGHVLEPGGNADLVVLKAEDVYHAIWEHQAPVYVIRKGVIVKR

SEQ ID NO: 2295 - DNA, 363 bp, Unknown
  Obtained from environmental sample
  misc_feature (1)..(363): n is a, c, g, or t
atggaaacagtctcccgcctctacccgcaaatccgcccgcaagcagagtacgccagatcgctggagctgataagacgcgccgccgatagcggacgctccgtagttaagtccggtataatggttggattgggagagacggtcgaggaggtggagggtctgatgcgggacttgaggtcggcgggttgcggcgtaataacggtaggccaatacctccgtccgtccgccagacaaatagcggtatcagagttcatctccccggagcggttcgcggagtacgagaaaatggccgttgaaatgggtttcacacgggcgttctgcggaccgtacgtgaggagttcttatcgggccggagagttgatgtga

SEQ ID NO: 2296 - protein, 120 aa, Unknown
  Obtained from environmental sample
  misc_feature (1)..(120): Xaa is any amino acid
METVSRLYPQIRPQAEYARSLELIRRAADSGRSVVKSGIMVGLGETVEEVEGLMRDLRSAGCGVITVGQYLRPSARQIAVSEFISPERFAEYEKMAVEMGFTRAFCGPYVRSSYRAGELM

SEQ ID NO: 2297 - DNA, 576 bp, Unknown
  Obtained from environmental sample
  misc_feature (1)..(576): n is a, c, g, or t
ttgaaaggcgcgagatttcgcgagggcgattttgtgtcgggcatgattatagccaacaacaaaaacagtatcctcacggtaaccgacaacggccacggcaagcgcacatcgcttgcggaataccgcagaacaaatcgcggcggcaaggggataacaaatatcaaattcaagggtaaaaacggcagcggcgttgtggcgctcaaaggagtgcagggcgacgaagacgtacttttaattacccaaaatggaatcataatccgagttaatgttgaccttatgcgagaactcagccgtttctcccaaggcgtaaaactgataaatctcgacgacgacgacaaggtgatagacatcgccatctgcgacagggacagcgaagacgtgtcggatatcccggtggcggccccggtggagacggcgccggaagaagaggacgcagcagacgcggcggaggaagaggaagacgaagttgcggacgatggggacggtacggacgaggctatagacgaggaggacggcgaagacggcacggatgccgtcgatgatacggataacgaggacgacggggcggccggttga

SEQ ID NO: 2298 - protein, 191 aa, Unknown
  Obtained from environmental sample
  DOMAIN (21)...(72): DNA gyrase C-terminal domain, beta-propeller
  misc_feature (1)..(191): Xaa is any amino acid
MKGARFREGDFVSGMIIANNKNSILTVTDNGHGKRTSLAEYRRTNRGGKGITNIKFKGKNGSGVVALKGVQGDEDVLLITQNGIIIRVNVDLMRELSRFSQGVKLINLDDDDKVIDIAICDRDSEDVSDIPVAAPVETAPEEEDAADAAEEEEDEVADDGDGTDEAIDEEDGEDGTDAVDDTDNEDDGAAG

SEQ ID NO: 2299 - DNA, 495 bp, Unknown
  Obtained from environmental sample
  misc_feature (1)..(495): n is a, c, g, or t
ttgatggcgagattcgcaaaccaaagggatgatatcgttcttgaagtttttgactacgacatcgccaaagcctccatcattggccccgctccgctggcggcccgcttcgcggcggatatgcgtaccagccataacaactttgggctaatggtagatctttctcacattcccatgacctatgagacgccggaattcgtagtccgcaccctcaagccctatatcgttcatttccatgtgggaaacactgtgtgcagggatcccaaagcggaaggctacggggacgaacaccagcgttttggtttccccaacagttctaacgacacagcccaggtactcgaatacctgcgtgtgcttaaaaacgaaggattcttcaacgcggaaaatccctatgtgttttcttttgaggtaaaaccctttaaggatgaagatccggacacagtggtcgcgaatgccaaaagggtactcaaccgcgcctgggcattgctggaggattaa

SEQ ID NO: 2300 - protein, 164 aa, Unknown
  Obtained from environmental sample
  misc_feature (1)..(164): Xaa is any amino acid
MMARFANQRDDIVLEVFDYDIAKASIIGPAPLAARFAADMRTSHNNFGLMVDLSHIPMTYETPEFVVRTLKPYIVHFHVGNTVCRDPKAEGYGDEHQRFGFPNSSNDTAQVLEYLRVLKNEGFFNAENPYVFSFEVKPFKDEDPDTVVANAKRVLNRAWALLED

SEQ ID NO: 2301 - DNA, 483 bp, Unknown
  Obtained from environmental sample
  misc_feature (1)..(483): n is a, c, g, or t
gtgaagatcgtaatactggatggtcataccgagaaccccggtgacttaagctgggaagggctcgaaaaatttggtgaacttaaagtctatgaccggacttccttaacagaccccaaagaatccatcgcgagaattggagatgcggaggcggtgtttacaaataagactccgctaacggcggaagttttcaacgcctgtccctcgataaaattcgtcggcgtgcttgccacaggttacaatgtagtggatgtgaataccgccaaggcaaagggcatccctgtctgcaatattccaacctatggaaccgcggctgtgggccagtttgccatcgccctgctcctggaaatctgccaccacatcgggcatcacgacaaggcagttcacgagggcaggtgggaaaacaacgtagactggtgtttctgggactacccactgattgagctcgcnagaaaactattggcatcatcggctttggccgcatag

SEQ ID NO: 2302 - protein, 160 aa, Unknown
  Obtained from environmental sample
  DOMAIN (3)...(137): D-isomer specific 2-hydroxyacid dehydrogenase, catalytic domain
  misc_feature (1)..(160): Xaa is any amino acid
MKIVILDGHTENPGDLSWEGLEKFGELKVYDRTSLTDPKESIARIGDAEAVFTNKTPLTAEVFNACPSIKFVGVLATGYNVVDVNTAKAKGIPVCNIPTYGTAAVGQFAIALLLEICHHIGHHDKAVHEGRWENNVDWCFWDYPLIELARKLLASSALAA

SEQ ID NO: 2303 - DNA, 396 bp, Unknown
  Obtained from environmental sample
  misc_feature (1)..(396): n is a, c, g, or t
atgattctcgtcctcgcccttgccgccgctgcaatttacggtattgtttattttattaaaaggtcttccaaacaatcctcgataaacgaccctttcttgaaaattttagcaagttcccatcttggttttaaccgttatgtgcatatcgcctccgtcggctccaaggcgtggcttttgggggcaagcgagggcggagtgaacctgataagcgaaattgaagataaagaaataatagacgcgatgcttcttgaggattccaaaaaagatcaggagactcaaagccgttttccggatttcctgtcaattcttcgccgtcttgggactcctgggcaaactcgttcttcagacggcgttgatgaaattcgcaagcgcagagaaaggctcaaggggttgtga

SEQ ID NO: 2304 - protein, 131 aa, Unknown
  Obtained from environmental sample
  misc_feature (1)..(131): Xaa is any amino acid
MILVLALAAAAIYGIVYFIKRSSKQSSINDPFLKILASSHLGFNRYVHIASVGSKAWLLGASEGGVNLISEIEDKEIIDAMLLEDSKKDQETQSRFPDFLSILRRLGTPGQTRSSDGVDEIRKRRERLKGL

SEQ ID NO: 2305 - DNA, 540 bp, Unknown
  Obtained from environmental sample
  misc_feature (1)..(540): n is a, c, g, or t
gtgatgcggttaataaaaatgctcaattgcaaattaatgacacttgtttttttcattgttttttcgattctctttcccgccgtagcgaacgcgcaacaacaatttcctgacagggcgactcagggaaccgcgaatttgattacgcctccgggtccccctgcgattccttttattgatttaacaatacgaaaccctcagagcgggcaggaagtggcgttttcattacagttactgcttctgttaactattctttccctcgcgccaagtatcattatactaatgacaagttttctgcgcgtttccatcgttctggattttataaaacgcgccctgtcattacagcaggttccccccaatcaggtaattttaggcatatcgctttttcttaccgtgcttatcatgtggcccacgtttagcgcgatttattccaattccatacaaccgctttccgccggaacgctctcggtggagaacgcgtacagggaagctgaagccccattaaagggttttatgtacaggcaaatgagccgcccgtcctga

SEQ ID NO: 2306 - protein, 179 aa, Unknown
  Obtained from environmental sample
  SIGNAL (1)...(29)
  DOMAIN (80)...(179): FliP family
  misc_feature (1)..(179): Xaa is any amino acid
MMRLIKMLNCKLMTLVFFIVFSILFPAVANAQQQFPDRATQGTANLITPPGPPAIPFIDLTIRNPQSGQEVAFSLQLLLLLTILSLAPSIIILMTSFLRVSIVLDFIKRALSLQQVPPNQVILGISLFLTVLIMWPTFSAIYSNSIQPLSAGTLSVENAYREAEAPLKGFMYRQMSRPS

SEQ ID NO: 2307 - DNA, 930 bp, Unknown
  Obtained from environmental sample
  misc_feature (1)..(930): n is a, c, g, or t
ttgagccgctgtattgccgaactcggctcccttatcgagctggaagaaaagtttggcgactcggcccttgttccttcttcgccctttggttttttcctttcttacttgagcgggaaagagtatgtaagggcagggcagaaaagcggggtgaatattttcaggtggcgggtagcggcggcggctccctttgcctgccactttgtgcttaacgcgtcccagagcgccgcgtcggtgctttaccagcccttgaaattcttgcgccaggacaaacgaaaggccctgggccttggagactccgatgcgtcaggcgcttttttccttctatgtgatacaggagaagacaagggctttaaaacttacgccagaacaagcgcttcggagcagactttttccggctgggcgatcccccacagtttttttgcccagggtaaaaccgttgagccgtcggcgagcgtcggcgactcttacgccgaagagcgatgcttttggagggaggggacggcgcttggggaaatttaccctctgcaaaaaagctcctacgaatgctggaagaacacccttgtccaaaaagaaaataatttttctttttttgtctcccctgtttcggcgaagaaagacggcacaggcgcagtaagggagcttcttgaagctgccatgcttggcggcgacggctgtcttgccgttacgcccaccagggacctcaacgtgtattacaaatgctcgctgtcctggctctacagcagggtcttcggggcggagaagttttcgcttgaggcggcgcttctggacgacacgtccctgggcattctttatcacaaaattctggaaaagctttttgcgaagattaagaacgaagatcgcgtgtttattcaggccgcctgggtgcctacaaaaattggactttggaaatttacagagaggccattatga

SEQ ID NO: 2308 - protein, 309 aa, Unknown
  Obtained from environmental sample
  misc_feature (1)..(309): Xaa is any amino acid
MSRCIAELGSLIELEEKFGDSALVPSSPFGFFLSYLSGKEYVRAGQKSGVNIFRWRVAAAAPFACHFVLNASQSAASVLYQPLKFLRQDKRKALGLGDSDASGAFFLLCDTGEDKGFKTYARTSASEQTFSGWAIPHSFFAQGKTVEPSASVGDSYAEERCFWREGTALGEIYPLQKSSYECWKNTLVQKENNFSFFVSPVSAKKDGTGAVRELLEAAMLGGDGCLAVTPTRDLNVYYKCSLSWLYSRVFGAEKFSLEAALLDDTSLGILYHKILEKLFAKIKNEDRVFIQAAWVPTKIGLWKFTERPL

SEQ ID NO: 2309 - DNA, 744 bp, Unknown
  Obtained from environmental sample
  misc_feature (1)..(744): n is a, c, g, or t
atgggtgacgatttaaaacgcatattggtaatggaagattccgatattttcgcggaaatgctgataagctcctttgatcagtcaaaatacaatattcaaagggcggtaaacggttttgacggtattaaaaaagtgtttgggtttttgccccaccttattatttcagacgttgaaatgcccctatttaaagggtatcaggttacacgctttttaaaatcgcgcaagaacacaaagaatattcccattattatgttcacatcccttgatgaaacaaaggacaaattctggggactgcaaacgggggcggattattacattgaaaaatcacctgaaaatataaatatgttgattacacttatagagaaaatattttcttccccacaggaaatagatttcaacgcgattgaaaaagaaagcagaaaaataaatgacgattccattatagaaatagtaaataatcttcttgataataaacttttccagactacaattatcggccttcttgctgatttgtcaaaaaaagcaaattcaattgaaatgacggcgcagggaataattgagcttcttcatacggtttgtgaggcggaaattgtaactttgataattaaaggaaataatggaattatatatacttatacggataatttcagcgcgtatacaaaagaaatatatgataattttttaggggtatgcacatcagaatttaataatctttttcaaggctttaaaattatttccnaataa

SEQ ID NO: 2310 - protein, 247 aa, Unknown
  Obtained from environmental sample
  DOMAIN (6)...(121): Response regulator receiver domain
  misc_feature (1)..(247): Xaa is any amino acid
MGDDLKRILVMEDSDIFAEMLISSFDQSKYNIQRAVNGFDGIKKVFGFLPHLIISDVEMPLFKGYQVTRFLKSRKNTKNIPIIMFTSLDETKDKFWGLQTGADYYIEKSPENINMLITLIEKIFSSPQEIDFNAIEKESRKINDDSIIEIVNNLLDNKLFQTTIIGLLADLSKKANSIEMTAQGIIELLHTVCEAEIVTLIIKGNNGIIYTYTDNFSAYTKEIYDNFLGVCTSEFNNLFQGFKIISX

SEQ ID NO: 2311 - DNA, 324 bp, Unknown
  Obtained from environmental sample
  misc_feature (1)..(324): n is a, c, g, or t
gtgctcgctacgggcggcgaggagttcgtcctaatacttcccgataccgatttagacggggccgtcacattagcgaataggatacgcgagaccattgcgggtaatccgtttgccaatatgaaatactacgtcccatatacctcaagcttcggtctcgccatgtacgacggcgccgcgccgccgataaacaaggatgaacttatccatatagccgacacagctctttatcattcaaaacaccacggcaaaaaccgcgttacggtggctgctaaggagggggcggggatcgtttgtaaagatacggttggtgaatacataatataa

SEQ ID NO: 2312 - protein, 107 aa, Unknown
  Obtained from environmental sample
  misc_feature (1)..(107): Xaa is any amino acid
MLATGGEEFVLILPDTDLDGAVTLANRIRETIAGNPFANMKYYVPYTSSFGLAMYDGAAPPINKDELIHIADTALYHSKHHGKNRVTVAAKEGAGIVCKDTVGEYII

SEQ ID NO: 2313 - DNA, 582 bp, Unknown
  Obtained from environmental sample
  misc_feature (1)..(582): n is a, c, g, or t
atggattctctttccaattccgcgcacaagatactcgcagtcgatgacgacgcggttacccttgaattattgacggagattctttcgacgcgttacgacgttacggtttgctccagcggtaaggaagctataaggtctttagatgagaacaattttgatttgataattaccgaccttatgcttcccgatgtgtccggtatagacgtcctcgctcacgccaagcgccgcgacgcgtttgcggaggttctgatgattaccggtcacgcctctgtggataccgccgccgcggcgttgagcggcggcgtaggttcgtatatgctgaaaccgttttccatacgcgagctttgcggccgcgtggataaaatggtcgccaaacggagatttcttacaaagagcctgcaactcttggctcgcagcgacgctattgaccctaccgttaaagagtatattgacgacatcacttcgctctatcacttcacccgcaaacttgtgctaacgcttgagatctcggaggtaatgaggattatttgggaggnagctaaaccgggaatccgttgcgatgttttgctcgctttgaggtaa

SEQ ID NO: 2314 - protein, 193 aa, Unknown
  Obtained from environmental sample
  DOMAIN (9)...(120): Response regulator receiver domain
  misc_feature (1)..(193): Xaa is any amino acid
MDSLSNSAHKILAVDDDAVTLELLTEILSTRYDVTVCSSGKEAIRSLDENNFDLIITDLMLPDVSGIDVLAHAKRRDAFAEVLMITGHASVDTAAAALSGGVGSYMLKPFSIRELCGRVDKMVAKRRFLTKSLQLLARSDAIDPTVKEYIDDITSLYHFTRKLVLTLEISEVMRIIWEXAKPGIRCDVLLALR

SEQ ID NO: 2315 - DNA, 510 bp, Unknown
  Obtained from environmental sample
  misc_feature (1)..(510): n is a, c, g, or t
ttgtgctcgcttgtgccacgggatttgcggcggaattatgcgagatgtattgctcaacaacaatccaccagtagcttgcaaaaacccattatgcccattgtctgcattctcgctgctgttttggttataatagcccaaaaaaaaatagtttctcactggctttttgttctgatagcagatgccattgggcttgggacttttacggcaataggtgcaatccacgcggaaaatgcaggagcaggcgggatagctatagtaagccttgctgtgcttacggcggttggtgggggaatgctcagggatattttggcagatgaaatacctcaagttttaaaaagcgatttttatgcgactgcggctttgataggcggtttgttctattgggtttttggcttgtgcacaagcgaatttcacggcattaaaatcgtggcaaccatagccataaccataaccctgcgcttatatgctatgtatgccaaactcaagttacctaaaataagccccccttga

SEQ ID NO: 2316 - protein, 169 aa, Unknown
  Obtained from environmental sample
  DOMAIN (56)...(140): UPF0126 domain
  misc_feature (1)..(169): Xaa is any amino acid
MCSLVPRDLRRNYARCIAQQQSTSSLQKPIMPIVCILAAVLVIIAQKKIVSHWLFVLIADAIGLGTFTAIGAIHAENAGAGGIAIVSLAVLTAVGGGMLRDILADEIPQVLKSDFYATAALIGGLFYWVFGLCTSEFHGIKIVATIAITITLRLYAMYAKLKLPKISPP

SEQ ID NO: 2317 - DNA, 996 bp, Unknown
  Obtained from environmental sample
  misc_feature (1)..(996): n is a, c, g, or t
ttgatcagatcggccgaggagcaggacagcggacgttaccgtaaacttttcgacataatcggcgaaggtaagcagaaacagctctttatgcttaccgctacccctattaacaactctttccttgatttacaacatcaaatagagctttttacccaaagagatgataactattttgcaattcccccgcttggtatacacagtttaaagggccgcatcaagacaatggaagcccagcttaataaaatcgccatcacgggggatgccccaatagaagcagacctaattctgaaaggagactcgttggtaagggaactggtggtgcagcgtagccggacgtttgtaaaaaaaagccttaccgtatcagaaggggccgaagttctgtttccaaaccgcgccccgcccaatgtcgttgcatattcactcaaggccagttacgggaaattgattgatgattttgttcactcatttgaaagaaaagatgcattgggccgaaaagtttcaattctttctctggctatttattctccctacgaggacgcatattataaaggcgataaaagtaaaatagacgattttaagcgggggcgacaggcacagatcgtcaatctaatcagaattttattattaaaacgttttgaaagctccgcttcggcctttgaggaaacctgtatcagaatttttgtacgcttgcggaaattcattgacgattataaggaatacggtaatgaacgggcaatagaacgcttttaccagcaccaggatcgggtcatcgagcatatcagcaaatttatcgccgaanacgctccatatacagaagaagaactggaagacgaccttcctgattacgtatgggaagtggaagaaaaatttgatattggtgattttgatatttcgatgatgattcangaaactttgggcgatttggaaaatcctgcggactttatcgaagaccttatgggtattgagcccttcgaggatgataaaactacgccctga

SEQ ID NO: 2318 - protein, 331 aa, Unknown
  Obtained from environmental sample
  misc_feature (1)..(331): Xaa is any amino acid
MIRSAEEQDSGRYRKLFDIIGEGKQKQLFMLTATPINNSFLDLQHQIELFTQRDDNYFAIPPLGIHSLKGRIKTMEAQLNKIAITGDAPIEADLILKGDSLVRELVVQRSRTFVKKSLTVSEGAEVLFPNRAPPNVVAYSLKASYGKLIDDFVHSFERKDALGRKVSILSLAIYSPYEDAYYKGDKSKIDDFKRGRQAQIVNLIRILLLKRFESSASAFEETCIRIFVRLRKFIDDYKEYGNERAIERFYQHQDRVIEHISKFIAEXAPYTEEELEDDLPDYVWEVEEKFDIGDFDISMMIXETLGDLENPADFIEDLMGIEPFEDDKTTP

SEQ ID NO: 2319 - DNA, 399 bp, Unknown
  Obtained from environmental sample
  misc_feature (1)..(399): n is a, c, g, or t
gtgtggcatccaaagatgactgaatttgatgagcgaatgaagaagctctttgacgaggttgacgcctgtattgaaaatctttacggagacagatacagcctgcacccgatgcgccctgagcggggtgaaacatccaatcctgaagcggacggcctttttaatatcggcgctgtctttacaccgggctacggctcagaacacggacgcggttaccttattgacatatcaatctccacattggaaaacgtagacgaggatacacgccgggaaatctacgaaaccgtcgcaaataaagtaaaagaactccttcctgttcactttcccgaacgggaacttaccgttctgcgtgatagaaatcattttaagattatgggcgattttaatcttgggataatttaa

SEQ ID NO: 2320 - protein, 132 aa, Unknown
  Obtained from environmental sample
  misc_feature (1)..(132): Xaa is any amino acid
MWHPKMTEFDERMKKLFDEVDACIENLYGDRYSLHPMRPERGETSNPEADGLFNIGAVFTPGYGSEHGRGYLIDISISTLENVDEDTRREIYETVANKVKELLPVHFPERELTVLRDRNHFKIMGDFNLGII

SEQ ID NO: 2321 - DNA, 741 bp, Unknown
  Obtained from environmental sample
  misc_feature (1)..(741): n is a, c, g, or t
atgcgccctccggagccggagaatgcggagtggttggaagcgagttttagcgagtttgcaaaaaagcatccttgggtgtgcggcgagcgggttaatccgcaaacaatagttttggaaatgttcgcggagtgtttttccttttcgggatatataaagcaatacggcttggagcgcatagagggtttattgcttcgccacataaacagtgcgtacaaggttttggcgcacactgttccagaaaaatacaagaacgaagaaattttggaaatgcaggattacctgcgcgaaatgctgcaaagggttgactcttcgcttttggacgagtggcagcgtatgcaaaatccagaatttattttgcccgaagaaaaggaagagcccttgccgccttttgcggttagcgagcgaatggttaaagcccttgttctgcaattcttggtagcttggggtaaatgtgatttttctgccgccaccgattgccttgaaccgagtgaggagtttaacgagaaaaaacttgccgccctccacaaagaatacattgaaacgcacaaggagctgaggctagatgcggagggtcgttccaacaagcacacatctattgaaaagaaaggcgatgtttgggaggtttccagaatgttgcaagattatgatgagcaaaacgattggcaaatggtgtttgcggtggatttggcagagtctaagaagggggagaggttggtgatgaggctggaaaatattaggtga

SEQ ID NO: 2322 - protein, 246 aa, Unknown
  Obtained from environmental sample
  misc_feature (1)..(246): Xaa is any amino acid
MRPPEPENAEWLEASFSEFAKKHPWVCGERVNPQTIVLEMFAECFSFSGYIKQYGLERIEGLLLRHINSAYKVLAHTVPEKYKNEEILEMQDYLREMLQRVDSSLLDEWQRMQNPEFILPEEKEEPLPPFAVSERMVKALVLQFLVAWGKCDFSAATDCLEPSEEFNEKKLAALHKEYIETHKELRLDAEGRSNKHTSIEKKGDVWEVSRMLQDYDEQNDWQMVFAVDLAESKKGERLVMRLENIR

SEQ ID NO: 2323 - DNA, 579 bp, Unknown
  Obtained from environmental sample
  misc_feature (1)..(579): n is a, c, g, or t
atgacggataattccgctcttttcacggatttttattctctcacaatggctcaaggttactggaaaaataaccgcgatgaaaccgtcgtattcgagatgtttttccgtcagcagccgttttcgggcggttattcaatctttgcggggcttggcgttttacttgaaaagctggtcaattttaaattttcagaagatgacattgcctttttaaaaaatttgggtgtttttgaaaacgggtttaccgattatcttaaaacttttcgttttaacggctctctttgggcaatggacgagggaacggttatctttccgcaagaaccgttgatacgagcggaaggcagtcttgttgaatgtcagataatcgaaggtcttattttaaacattatcaattttcaaagtttaatcgctacaaaaacacgccgaatatggcttgcttccggtaaagggcagataatggaattcggtcttcgcagagcgcagggacaggacggggcgatttccgcttcccgcgcggcgtacattggcggtgctcaaggaacaagcaacacgctggctggaaaaatttacggtattccctaa

SEQ ID NO: 2324 - protein, 192 aa, Unknown
  Obtained from environmental sample
  misc_feature (1)..(192): Xaa is any amino acid
MTDNSALFTDFYSLTMAQGYWKNNRDETVVFEMFFRQQPFSGGYSIFAGLGVLLEKLVNFKFSEDDIAFLKNLGVFENGFTDYLKTFRFNGSLWAMDEGTVIFPQEPLIRAEGSLVECQIIEGLILNIINFQSLIATKTRRIWLASGKGQIMEFGLRRAQGQDGAISASRAAYIGGAQGTSNTLAGKIYGIP

SEQ ID NO: 2325 - DNA, 915 bp, Unknown
  Obtained from environmental sample
  misc_feature (1)..(915): n is a, c, g, or t
gtggggcttacggggttgagggacagagcgccttcaactttatcgggcggcgaaaaacagcgtctcgctattgccgccgttcttgccatgaaaggaaaaatactcgttcttgacgaaccgctttgccgccttgatccgcagggcgcgctggaagtaatgtcggttttaagagaattgcgtaaaaaagaaaatataacggtaattatgacaacgcatgacagcgcaaaagcggctgaattcgcagacagggtttgcgttttaagaaacggaaaaatcgccgctcttgataccgcaaaaaacattttttccgacagcgatttattaaaagaaaattgtatacagccgattactgataattttacgaattttattccgcagaataaaatttgcgatgatcccgtaataagcgtaaaaaatctttcatttgcatattcaaacggttcgggaataaagaatatagatttggaaatcgcaaataacgattttgtcgccgtaacgggcggcaacggctgcggaaaaacaacgcttctaaaatgcataacagggcttttgcgcccaagcgaaggggatatttccgtttgcggaaaaaatacaaaaaaactttccgtcggcgatatttccaaagaaataggttttgttatgcaaaacccagacacccagctttttaccgattctgtctataaagaaatagctttcgctcttaaaaatatgcgtctttcaaaaacggaaataaagcaaagagttgaagatgcccttaaaaccgcgggtcttaacgacacggacgcttttccgcctgcgttaagcagaacggacagagcgaagacattaatagcgtgcgttcttgcgatgggctgtaaaataattatttttgacgaaattgacgcaggcaatgatattcaagctcggccgatctga

SEQ ID NO: 2326 - protein, 304 aa, Unknown
  Obtained from environmental sample
  DOMAIN (160)...(302): ABC transporter
  misc_feature (1)..(304): Xaa is any amino acid
MGLTGLRDRAPSTLSGGEKQRLAIAAVLAMKGKILVLDEPLCRLDPQGALEVMSVLRELRKKENITVIMTTHDSAKAAEFADRVCVLRNGKIAALDTAKNIFSDSDLLKENCIQPITDNFTNFIPQNKICDDPVISVKNLSFAYSNGSGIKNIDLEIANNDFVAVTGGNGCGKTTLLKCITGLLRPSEGDISVCGKNTKKLSVGDISKEIGFVMQNPDTQLFTDSVYKEIAFALKNMRLSKTEIKQRVEDALKTAGLNDTDAFPPALSRTDRAKTLIACVLAMGCKIIIFDEIDAGNDIQARPI

SEQ ID NO: 2327 - DNA, 675 bp, Unknown
  Obtained from environmental sample
  misc_feature (1)..(675): n is a, c, g, or t
gtgtctgggttttgcataacaaaacctatttctttggaaatatcgccgacggaaagtttttttgtattttttccgcaaacggaaatatccccttcgcttgggcgcaaaagccctgttatgcattttagaagcgttgtttttccgcagccgttgccgcccgttacggcgacaaaatcgttatttgcgatttccaaatctatattctttattcccgaaccgtttgaatatgcaaatgaaagattttttacgcttattacgggatcatcgcaaattttattctgcggaataaaattcgtaaaattatcagtaatcggctgtatacaattttcttttaataaatcgctgtcggaaaaaatgttttttgcggtatcaagagcggcgatttttccgtttcttaaaacgcaaaccctgtctgcgaattcagccgcttttgcgctgtcatgcgttgtcataattaccgttatattttcttttttacgcaattctcttaaaaccgacattacttccagcgcgccctgcggatcaaggcggcaaagcggttcgtcaagaacgagtatttttcctttcatggcaagaacggcggcaatagcgagacgctgtttttcgccgcccgataaagttgaaggcgctctgtccctcaaccccgtaagccccacggctccaaagccagtttaa

SEQ ID NO: 2328 - protein, 224 aa, Unknown
  Obtained from environmental sample
  DOMAIN (180)...(218): Protein of unknown function (DUF1602)
  misc_feature (1)..(224): Xaa is any amino acid
MSGFCITKPISLEISPTESFFVFFPQTEISPSLGRKSPVMHFRSVVFPQPLPPVTATKSLFAISKSIFFIPEPFEYANERFFTLITGSSQILFCGIKFVKLSVIGCIQFSFNKSLSEKMFFAVSRAAIFPFLKTQTLSANSAAFALSCVVIITVIFSFLRNSLKTDITSSAPCGSRRQSGSSRTSIFPFMARTAAIARRCFSPPDKVEGALSLNPVSPTAPKPV

SEQ ID NO: 2329 - DNA, 543 bp, Unknown
  Obtained from environmental sample
  misc_feature (1)..(543): n is a, c, g, or t
gtggaaatgatgggcggcaagatagaaatcaaatccgaactcggaaaaggctctgttttcacatttacaatacaagcccaaaaaggttcttatatagaagatacgcctgacgcgaacgccgaggataaaggaaaggcggacattaccggcatttttgccggcagccgcattttactagtggaagatgtggaacttaaccgagagatagtaaagtctttgcttgaaccgacgcagatttctatagactgcgcggaaaacggcgcggaagcggtgcgcatattttcggaaacccccgacaaatacgccttgatctttatggatgtgcagatgcccgaaatggacggttacgaggcgacgcggcgcatacgggccatggacatacccaaagcccaaaccatccccatcatcgcgatgaccgctaacgtctttagggaagacatagagaagtgcgaggcggcgggtatggacagtcatttaggcaagccgcttgattttgaagaacttctgaacaaactgcgcgggtatctgcttaaaaacacgtag

SEQ ID NO: 2330 - protein, 180 aa, Unknown
  Obtained from environmental sample
  DOMAIN (55)...(173): Response regulator receiver domain
  misc_feature (1)..(180): Xaa is any amino acid
MEMMGGKIEIKSELGKGSVFTFTIQAQKGSYIEDTPDANAEDKGKADITGIFAGSRILLVEDVELNREIVKSLLEPTQISIDCAENGAEAVRIFSETPDKYALIFMDVQMPEMDGYEATRRIRAMDIPKAQTIPIIAMTANVFREDIEKCEAAGMDSHLGKPLDFEELLNKLRGYLLKNT

SEQ ID NO: 2331 - DNA, 765 bp, Unknown
  Obtained from environmental sample
  misc_feature (1)..(765): n is a, c, g, or t
ttggccgagtttctggtagatatggcgcactttgccggccttgtggcgggcaagatctttaccggtgaatacgatcccgttccctgggcgcacattgtaacttccacgacgcataagaccctgcgcggcccccgcgccgggctggttctctcgacagccgaatttgccgaagcgctggatcacggttgcccgctgacaatgggcggccctttgccccatgttatcgcagccaaggcggttgccttccgcgaggccgcctctcccgaattcaagcgttacgcgcaacgtattgtggaaaactgccgtgatttggccgccgcctgtatgaagaacggccttgaggtgcttaccggcggcaccgacaaccacctaatgctgatcaacgtgaaccatatcgggttaaccggcagacaggcggaaagctccctgcatgagtgtcgcataacgcttaaccggaacagcctgccgtttgatcccaacggcccctggtataccgccggcctgaggctgggaaccgccgcagtcactaccctgggaatgggcaaaaatgaaatggaagagatcgcctcaatcatgtcgatggtgcttaagggtacgaccccggctccaaatgagaaagacccttccgtaaagagcaaggccaaatatttggtagaccccgcagtaaaaacggcggcgatagatcgcgttaagaatctgctggatcgtttccccgtgtatccggaactggatctgcccctgcttaaagaggcgtttgttaaataa

SEQ ID NO: 2332 - protein, 254 aa, Unknown
  Obtained from environmental sample
  DOMAIN (1)...(192): Serine hydroxymethyltransferase
  misc_feature (1)..(254): Xaa is any amino acid
MAEFLVDMAHFAGLVAGKIFTGEYDPVPWAHIVTSTTHKTLRGPRAGLVLSTAEFAEALDHGCPLTMGGPLPHVIAAKAVAFREAASPEFKRYAQRIVENCRDLAAACMKNGLEVLTGGTDNHLMLINVNHIGLTGRQAESSLHECRITLNRNSLPFDPNGPWYTAGLRLGTAAVTTLGMGKNEMEEIASIMSMVLKGTTPAPNEKDPSVKSKAKYLVDPAVKTAAIDRVKNLLDRFPVYPELDLPLLKEAFVK

SEQ ID NO: 2333 - DNA, 678 bp, Unknown
  Obtained from environmental sample
  misc_feature (1)..(678): n is a, c, g, or t
atggttcccgtaaatgtaatatccggcgaacttcctgtgggagacgctattgtagaactatatctttccgggggaaaattattttccgcaaaaacagacgtgcgcgggaacgcgtatttattcccttcgtttaaattaacaggagaaactataaccattaaagtaaacagctcaggcaaaagttcagagcaatctttaacatataacgctgagcctgttaaaataacgcttgaaaatcacgcggaaaaaagttcgattctggatttaatgtttgttattgatactacaggctcaatgggcgatgaaataaaatacttaaaatcggaaatttcagatgtaattgattctatctcttccgccaacccaaattatacaatcaatttagcgctgcttttttacagggataaaggcgatgaatatgtaacaagatactttgattttaccgcaaatatttcagcgcagcagcaaaatctggctaagcaatccgcaaacggcggcggagattttccggaagctgtagacagagcgcttttggaagctgtagataaaaactggaacaaagataacgccacgcggattattttccatgtatgcgacgcgccgcctcacgatgatcaggaaagccagaccgggtttctacacgcgataaaaagcgccgctcaaaaggcatccgtataa

SEQ ID NO: 2334 - protein, 225 aa, Unknown
  Obtained from environmental sample
  misc_feature (1)..(225): Xaa is any amino acid
MVPVNVISGELPVGDAIVELYLSGGKLFSAKTDVRGNAYLFPSFKLTGETITIKVNSSGKSSEQSLTYNAEPVKITLENHAEKSSILDLMFVIDTTGSMGDEIKYLKSEISDVIDSISSANPNYTINLALLFYRDKGDEYVTRYFDFTANISAQQQNLAKQSANGGGDFPEAVDRALLEAVDKNWNKDNATRIIFHVCDAPPHDDQESQTGFLHAIKSAAQKASV

SEQ ID NO: 2335 - DNA, 849 bp, Unknown
  Obtained from environmental sample
  misc_feature (1)..(849): n is a, c, g, or t
ttgggaggactcatatcgccggagcaattatcccagttacgcgaagagatggggcttaaccgcaatgttttttcgcgttactttgactggcttttcaactttctatccggcaatccaggaaattccctgcgttaccgcggggaagagatttctgtgatgataactgggcgtatccccgtcagtttttcgcttgccgtcctttcgcttttttttattttattaattgccgttccgttatcactttttaccgtcagacgggaaacggatatctctgaccgctttgtaaatttcttaaccgccgcaggtatcagtacccccggattttttcttggtcttttgtttatctttatattcggatatattttaaaacttttcattcccggacagtatattgattacagggaaaatttttcaggttttttaggctgtcttttctttcccgctttggcaatcgccgttccgaacgcggcggttatgacaaaattcctgcgcggctcgctttttcaggaactaaaaagcgattatgtgcggacggcgaaaagcaagggagcaaaccgcctgtatattctttaccatcatgtgctaaaaaacgccgtaatacctacaattacgatcttcggtatgataatcgccgaagttttatctggcagtatcgttattgaacaggttttttccatacccggaatcggcagattgctcataacggcgattacatcaagggattatcccttgattcaggcgttaatggtttatatagcatttatcgtagttgcggcaaatacaatagcggacattataataatgataattgacccaagaatcagaatggcaaaaagggatattcaatga

SEQ ID NO: 2336 - protein, 282 aa, Unknown
  Obtained from environmental sample
  DOMAIN (58)...(276): Binding-protein-dependent transport system inner membrane component
  misc_feature (1)..(282): Xaa is any amino acid
MGGLISPEQLSQLREEMGLNRNVFSRYFDWLFNFLSGNPGNSLRYRGEEISVMITGRIPVSFSLAVLSLFFILLIAVPLSLFTVRRETDISDRFVNFLTAAGISTPGFFLGLLFIFIFGYILKLFIPGQYIDYRENFSGFLGCLFFPALAIAVPNAAVMTKFLRGSLFQELKSDYVRTAKSKGANRLYILYHHVLKNAVIPTITIFGMIIAEVLSGSIVIEQVFSIPGIGRLLITAITSRDYPLIQALMVYIAFIVVAANTIADIIIMIIDPRIRMAKRDIQ

SEQ ID NO: 2337 - DNA, 420 bp, Unknown
  Obtained from environmental sample
  misc_feature (1)..(420): n is a, c, g, or t
ttgtactggtttggaatgttcaacaaagagctggacgatgtgcaggccggtgaaaatgttggcgtactgctccgtggtattgacaagaaagaagtagagcgcggacaggtacttgccaaacccggttcaattaccccccacaaaaagttcaagggtcagatttactgcctttccaaggaagaaggagggcggcacaagccttttgagacaggttatcggccccagttctatttccgtaccactgatattaccggaaccataattctccctgaggggaagcatatggtactgcccggggataataccgaaatcatcggcgaacttatccacccgatagctatggaaaagggacttaagttcgccatccgtgagggcggcaaaaccgttgcttccggtcaggtaacagaaattattgagtag

SEQ ID NO: 2338 - protein, 139 aa, Unknown
  Obtained from environmental sample
  DOMAIN (44)...(138): Elongation factor Tu C-terminal domain
  misc_feature (1)..(139): Xaa is any amino acid
MYWFGMFNKELDDVQAGENVGVLLRGIDKKEVERGQVLAKPGSITPHKKFKGQIYCLSKEEGGRHKPFETGYRPQFYFRTTDITGTIILPEGKHMVLPGDNTEIIGELIHPIAMEKGLKFAIREGGKTVASGQVTEIIE

SEQ ID NO: 2339 - DNA, 312 bp, Unknown
  Obtained from environmental sample
  misc_feature (1)..(312): n is a, c, g, or t
atgttaagcgctataaacctactcaataatttctgttacctgaccggaagcaacggttttgccgccctcacggatggcgaacttaagtcccttttccatagctatcgggtggataagttcgccgatgatttcggtattatccccgggcagtaccatatgcttcccctcagggagaattatggttccggtaatatcagtggtacggaaatagaactggggccgataacctgtctcaaaaggcttgtgccgccctccttcttccttggaaaggcagtaaatctgacccttgaactttttgtggggggtaattga

SEQ ID NO: 2340 - protein, 103 aa, Unknown
  Obtained from environmental sample
  misc_feature (1)..(103): Xaa is any amino acid
MLSAINLLNNFCYLTGSNGFAALTDGELKSLFHSYRVDKFADDFGIIPGQYHMLPLRENYGSGNISGTEIELGPITCLKRLVPPSFFLGKAVNLTLELFVGGN

SEQ ID NO: 2341 - DNA, 309 bp, Unknown
  Obtained from environmental sample
  misc_feature (1)..(309): n is a, c, g, or t
atggctaaggaacggattcgcgttcgtttacgcggtttcgatgtggaattactggatcagagttcaaagtcaatcgttcagaccgtgcagaaggcgggggccaaagtaactggcccaattccccttcctacgcggataaacaagataacggtgcttcgttctccccatgtcaacaagaagtcacgggaacagtttgaaatgcggacccataaaaggctcatcgacatcataaatccttcggcagaggtaatggattctttgatgaagctggagcttccggcaggcgtggacgtggaaattaagcagtag

SEQ ID NO: 2342 - protein, 102 aa, Unknown
  Obtained from environmental sample
  DOMAIN (5)...(100): Ribosomal protein S10p/S20e
  misc_feature (1)..(102): Xaa is any amino acid
MAKERIRVRLRGFDVELLDQSSKSIVQTVQKAGAKVTGPIPLPTRINKITVLRSPHVNKKSREQFEMRTHKRLIDIINPSAEVMDSLMKLELPAGVDVEIKQ

SEQ ID NO: 2343 - DNA, 915 bp, Unknown
  Obtained from environmental sample
  misc_feature (1)..(915): n is a, c, g, or t
ttgttcaaagccatgatgcccgttttgcaaaacgaaaagcttctgaaaaaagctccaaaagaggtaagagaagcctttgaggttttacgcagccttgagccgcccggagtgggagcctttgacctccgcgactgtctccttattcagcaaaaaagaataccagatttttcaaaaaccgcaattgatatgctggaaaagcattacgatttgctggctgatntgcgttatatgcaaattgccaaagcaatgaacatatctacccaagatgttagcattgcggtgaaagaacttgcaaggcttaaccccaggccgctcgcgcaaattcccgtttccaatttgtcttttgtaacaccggattttattgtggagagggagcctaatggttcgtttagcgtgtcgctgagagatggcacaaaggcaaagttgaaaataaacagcacctacaaaaatctgctgaaaacaaaaaacgtgagcaacgaagaaaaaacctggataaggggcaagctgaattcggcaagcgtttttatgcggagcatagagagccgcaaagaaaccatgcttttagttatgaatgccatagtccgcaggcaatacgattttttcgcccgtgggcagcagcatttgagacctatgattttgcaggatatagcaaacgagattaacagggatataagtacggtaaatagggttacaaacggaaagtatgttcaaaccacttacggggtttttgagttgaaaaaattcttctctgccggagttgcccaagatgacggtaccgaagttagcaatgtgaaaataaaagacagcatcaaggaacttataaacaacgaaaacaagaaaagacccctctccgaccaagaaatagcggaacttttggaaaagcngcgggttgagggtggcgcggagaacggttaa

SEQ ID NO: 2344 - protein, 304 aa, Unknown
  Obtained from environmental sample
  DOMAIN (3)...(149): Sigma-54 factor, core binding domain
  misc_feature (1)..(304): Xaa is any amino acid
MFKAMMPVLQNEKLLKKAPKEVREAFEVLRSLEPPGVGAFDLRDCLLIQQKRIPDFSKTAIDMLEKHYDLLADXRYMQIAKAMNISTQDVSIAVKELARLNPRPLAQIPVSNLSFVTPDFIVEREPNGSFSVSLRDGTKAKLKINSTYKNLLKTKNVSNEEKTWIRGKLNSASVFMRSIESRKETMLLVMNAIVRRQYDFFARGQQHLRPMILQDIANEINRDISTVNRVTNGKYVQTTYGVFELKKFFSAGVAQDDGTEVSNVKIKDSIKELINNENKKRPLSDQEIAELLEKXRVEGGAENG

SEQ ID NO: 2345 - DNA, 522 bp, Unknown
  Obtained from environmental sample
  misc_feature (1)..(522): n is a, c, g, or t
atgcctgcaattctcaacttaatttggcttttgcccattttagcagtttttgcgagtttgctcataccaaggcagcaaaaccaagcgttaaaaatgttccacgctacttgtgctcttgccaatgttgtgctttgcgttttttttgtggttaaaatatatggtctggctctttcttctcaggctcctattgggaatgccctgcaactccaatacctaacggatgcctcttggttcccagcgctgaacataaggtttataataggggcggatgctctttcaattctgatgtgttttttggcttccataatagtttttactggtatattgatgagctgggaggttgagagaccaaaggaattttttgcgatgattcaaattttgggagctggcgttatgggcgtgttcctgagttttgaccctgtcctgtttatgatattctatgaggtggaagccctggcgatgtatctgatgattgctggttggggacgggcagaaaggatactgcggaagaagctaccctga

SEQ ID NO: 2346 - protein, 173 aa, Unknown
  Obtained from environmental sample
  SIGNAL (1)...(18)
  misc_feature (1)..(173): Xaa is any amino acid
MPAILNLIWLLPILAVFASLLIPRQQNQALKMFHATCALANVVLCVFFVVKIYGLALSSQAPIGNALQLQYLTDASWFPALNIRFIIGADALSILMCFLASIIVFTGILMSWEVERPKEFFAMIQILGAGVMGVFLSFDPVLFMIFYEVEALAMYLMIAGWGRAERILRKKLP

SEQ ID NO: 2347 - DNA, 831 bp, Unknown
  Obtained from environmental sample
  misc_feature (1)..(831): n is a, c, g, or t
gtgcacaacacaatgctcacaagccaaaacgcccttgacataatcggtggctacgacatagtagcagacgggacggataactttcaaacgcgctatcttgtaaatgatgcgtgcgtgtttttgggcaagccaaatgtgtatggttcggtgtttcagtttgaggggcaatcaagcgtttttggggcaaaggatggtccttgctatcgctgcctgtacccttctccaccgccgcccgggcttgtgccttcgtgcgccgaaggcggggtgatgggagttttgcccggcattataggtaccatacaggcggcggaaacaataaagctcatagttggcggggcaaagccgctcgtggggcgtttgctgcattttgacgcttggcgcatggcgttccgtgaactcaaactggataaagacgagaactgcccagtgtgcggaaaaaatccatccatccgtgagcttatagattacgagcaattctgcggattaaaaaagaaccaagacagcgaaccaatagaaacaattaccgctattgatttaaaacaacgtttggataaaggtgaccacattcaattcatagatattcgcgagccgcacgagcgtgctattgtaaaattccccgatgccaaaattatgccgcttggtcaattggtgcggcgaatggacgaattagacacaagcacagattcagtatttttatgtaaaatagggcaacgcagcattctgggaataagagccttgcgcgaagccggatacaaaggcaggctcttnaatctgcaagacgggcntaacgcctgggcgagaaacgttgatacgtcgatgcctgtgtattaa

SEQ ID NO: 2348 - protein, 276 aa, Unknown
  Obtained from environmental sample
  DOMAIN (2)...(60): ThiF family
  misc_feature (1)..(276): Xaa is any amino acid
MHNTMLTSQNALDIIGGYDIVADGTDNFQTRYLVNDACVFLGKPNVYGSVFQFEGQSSVFGAKDGPCYRCLYPSPPPPGLVPSCAEGGVMGVLPGIIGTIQAAETIKLIVGGAKPLVGRLLHFDAWRMAFRELKLDKDENCPVCGKNPSIRELIDYEQFCGLKKNQDSEPIETITAIDLKQRLDKGDHIQFIDIREPHERAIVKFPDAKIMPLGQLVRRMDELDTSTDSVFLCKIGQRSILGIRALREAGYKGRLXNLQDGXNAWARNVDTSMPVY

SEQ ID NO: 2349 - DNA, 408 bp, Unknown
  Obtained from environmental sample
  misc_feature (1)..(408): n is a, c, g, or t
ttgtacaattcattcggttattttgaaagtcaggatgaagacttgtgctttgtacggaatgtctataattcgcttaaaaagggcggttgctttattatcgaaattttcggaaaagaagtagccgtccgcgattttgttgaagccgagtggtttgaacgcgccggattcatggtgttaacaaaatacaaagttttagactcatggacatttctgcacaaccggtggatactaatcaaagacggaaaaaaatacgaaaaaactttttcttacaggctttattcggctgtggaattaaaatcactgcttttggaagccggtttttccaaaatagacagttacggcgaatgggacgggggaccgtatgatcaatacgccggcaggcttattgttgtagcaaggaaactgtaa

SEQ ID NO: 2350 - protein, 135 aa, Unknown
  Obtained from environmental sample
  misc_feature (1)..(135): Xaa is any amino acid
MYNSFGYFESQDEDLCFVRNVYNSLKKGGCFIIEIFGKEVAVRDFVEAEWFERAGFMVLTKYKVLDSWTFLHNRWILIKDGKKYEKTFSYRLYSAVELKSLLLEAGFSKIDSYGEWDGGPYDQYAGRLIVVARKL

SEQ ID NO: 2351 - DNA, 327 bp, Unknown
  Obtained from environmental sample
  misc_feature (1)..(327): n is a, c, g, or t
atgaaagccgaaaaatttattcaggtagaaacgataaaaattttatttttgggattatttgcatttgtcgttaatacgggtgggggagtaatattcgcgaaaatattaaatctctttttaaaaacaaaaataaacccgatgataggggccacgggaatatccgcgtttcccatgtcggccagggttattcaaaaaatggcgttaaaggaagaccctgaaaacattttattgatgcacgcggtaagcgcgaatgtttcagggcagattgcgtcggttgcggcaagcggtttggttttaagtcttgttatgagtcatttaggaaagtga

SEQ ID NO: 2352 - protein, 108 aa, Unknown
  Obtained from environmental sample
  DOMAIN (1)...(103): Na+-transporting methylmalonyl-CoA/oxaloacetate decarboxylase, beta subunit
  misc_feature (1)..(108): Xaa is any amino acid
MKAEKFIQVETIKILFLGLFAFVVNTGGGVIFAKILNLFLKTKINPMIGATGISAFPMSARVIQKMALKEDPENILLMHAVSANVSGQIASVAASGLVLSLVMSHLGK

SEQ ID NO: 2353 - DNA, 903 bp, Unknown
  Obtained from environmental sample
  misc_feature (1)..(903): n is a, c, g, or t
atgagcatcctccccccgtctcctcccccccccccgtctccttttggcagggaaataaagctcagcaatgacgagtttatccagctgcgtgattttatttatgcgcagtgcggcatttacattggtgaaaacagaaaataccttattgaaaaccgcctggcgacccgcatcaaggaactcaacctcacatcctacggcgaatattacaatttcctgcgttttgaccccaacaaacgcgccgagctgtcgagactctttgaggtcgtcacaaccaacgaaaccagtttttaccgtaacccgccccagctgcaagtttttcaagaggtggtgcttcagggcgccattgacggcttgcgcaagatcaaccagaaaagactgcgcatctggtcggcaggctgttccaccggcgaggagccttacacgatagccatcattatccacgagttgctcaaacaggaaacgctcacctgggatattaaaattaccgccaacgacctttcggaagcggtactggccgccgcccgccggggcatctattcggagtatgccctgcgcaccacgcccccggaaatcgtcgccagatattttacgaaagaagacgccaactacaaactcgatcccagactcaagcatcttgtctcgttcggacagatcaacctgaacgacaggcagcagctcgcccgtgtggagcgttcgcatatcgtattctgccgcaacgtgattatttacttcgacgacgacatgaagcgcagggtcatcagcgcgttttacgataaccttttgccgggcggggccatgctgatcgggcattcggaatctctccacaacatcagccgcgctttcgcgccagaacatcacaaaggaaccatcgtctaccgcaaaaacggcttgacccggcagtga

SEQ ID NO: 2354 - protein, 300 aa, Unknown
  Obtained from environmental sample
  DOMAIN (22)...(78): CheR methyltransferase, all-alpha domain
  misc_feature (1)..(300): Xaa is any amino acid
MSILPPSPPPPPSPFGREIKLSNDEFIQLRDFIYAQCGIYIGENRKYLIENRLATRIKELNLTSYGEYYNFLRFDPNKRAELSRLFEVVTTNETSFYRNPPQLQVFQEVVLQGAIDGLRKINQKRLRIWSAGCSTGEEPYTIAIIIHELLKQETLTWDIKITANDLSEAVLAAARRGIYSEYALRTTPPEIVARYFTKEDANYKLDPRLKHLVSFGQINLNDRQQLARVERSHIVFCRNVIIYFDDDMKRRVISAFYDNLLPGGAMLIGHSESLHNISRAFAPEHHKGTIVYRKNGLTRQ

SEQ ID NO: 2355 - DNA, 372 bp, Unknown
  Obtained from environmental sample
  misc_feature (1)..(372): n is a, c, g, or t
atgagcaaacatattatggtcgttgacgattccaagacgattcgcaatctcctcgcattcgtcatcaaatccgaaggttttaaagtgacgacagccgaggacggacttgacggcttggaaaaactctacaacagcacggagccggtggatctgatcgtctccgatgtcaacatgccgcgcatggatggctttacctttatcaagaccctgcgggaacaggacacctacaaggatgtgcccattatcgtcctgtccacggaaggcaaagaaaaggatatcgccatgggcatgaccctgggagccaacctgtacatggtgaagcccgcagagccggcaaaaatgattcgtaacataaagatgttgctcggatag

SEQ ID NO: 2356 - protein, 123 aa, Unknown
  Obtained from environmental sample
  DOMAIN (3)...(119): Response regulator receiver domain
  misc_feature (1)..(123): Xaa is any amino acid
MSKHIMVVDDSKTIRNLLAFVIKSEGFKVTTAEDGLDGLEKLYNSTEPVDLIVSDVNMPRMDGFTFIKTLREQDTYKDVPIIVLSTEGKEKDIAMGMTLGANLYMVKPAEPAKMIRNIKMLLG

SEQ ID NO: 2357 - DNA, 600 bp, Unknown
  Obtained from environmental sample
  misc_feature (1)..(600): n is a, c, g, or t
atggagcgaagcgccgccgcttttggaagacatctatacaatggcggacgcgttggcggtcggttgtatgctgataaccctgttaaaaacgctgaccgggtaaaaatcgcgtgtcttgcgcagttggtaaacgttatcgctccaatcatgactgaaaaaaacggcggcgcatggcggcagacaattttttatccgttcaaggacgcgtcaacttacggacggggtacggtacttcgctgtcccgtcactgttgacaaatacgatttgcgggaattctgcgacgtgccgtaccttgatgccgtgggtgttcacaacgccgaaaaaaaagaaataacaatttttgccgtaaatcggaacctgaaagaagcgataaatcttgaagccgaaatagcgggtttcgggaaagtaaatcttgttgaacaccgccttatttgtaatgaagacttaaacgcctgcaacagtgtaaaggaagaaaaagtaaaacccgttgttcaaacaggcggtagtcttgaaggcggagaaggtgggatgcggttaaatatcaatttaccgtcggcttcatggaatgtgataagactgaagattcaggagttattatga

SEQ ID NO: 2358 - protein, 199 aa, Unknown
  Obtained from environmental sample
  DOMAIN (23)...(187): Alpha-L-arabinofuranosidase C-terminus
  misc_feature (1)..(199): Xaa is any amino acid
MERSAAAFGRHLYNGGRVGGRLYADNPVKNADRVKIACLAQLVNVIAPIMTEKNGGAWRQTIFYPFKDASTYGRGTVLRCPVTVDKYDLREFCDVPYLDAVGVHNAEKKEITIFAVNRNLKEAINLEAEIAGFGKVNLVEHRLICNEDLNACNSVKEEKVKPVVQTGGSLEGGEGGMRLNINLPSASWNVIRLKIQELL

SEQ ID NO: 2359 - DNA, 786 bp, Unknown
  Obtained from environmental sample
  misc_feature (1)..(786): n is a, c, g, or t
ttgatgaaaaaacgcgtcgctgttcttggggcaaccggctccatcggaaaaagttccctcgacataatttcacgtaacaacgaagactttgaaccagtcctcctcacagcccgctccagccgcagcaaacttgaagaattgtcaaaacaattccccgccgccgtttgcgttcttgcggacgaaaacaacggcaaggaaaaaatcttatccgccatagccgaagtaaaacccgacataacaataaacggcatatcaggcgccgctggccttgaaccctctcttgcggcaatcaacgcaggctcacacctggctcttgcaaataaggaaacaatcgtcatggccggcgatttggcaatccgcacggcgaaagaaaaaaacgtaaacattatccccgtcgattccgaacactccgcgatttttcaccttcttcgtttttttacagggcaagacggtaacaagagcgaaaatgtaagcgaaataattttaaccgcgtcaggcggtccgtttaggaatttaagcgctaaagacatggaaaatgtaacggtaaatgacgcgctttcccatcccacatggaacatgggaccaaagataacgattgattcagcttcaatggcgaacaagggactggaaataatcgaagcctgcgtattttttaacatgccaagcgaaaaaataaaagttgtaattcacccccaaagcatagtccactcgatgatccgcctgtgtaacggcgtcatttacgcccagcttcaaaacccgacctcggccgatctgatccgtgggtaa

SEQ ID NO: 2360 - protein, 261 aa, Unknown
  Obtained from environmental sample
  DOMAIN (6)...(115): 1-deoxy-D-xylulose 5-phosphate reductoisomerase
  misc_feature (1)..(261): Xaa is any amino acid
MMKKRVAVLGATGSIGKSSLDIISRNNEDFEPVLLTARSSRSKLEELSKQFPAAVCVLADENNGKEKILSAIAEVKPDITINGISGAAGLEPSLAAINAGSHLALANKETIVMAGDLAIRTAKEKNVNIIPVDSEHSAIFHLLRFFTGQDGNKSENVSEIILTASGGPFRNLSAKDMENVTVNDALSHPTWNMGPKITIDSASMANKGLEIIEACVFFNMPSEKIKVVIHPQSIVHSMIRLCNGVIYAQLQNPTSADLIRG

SEQ ID NO: 2361 - DNA, 426 bp, Unknown
  Obtained from environmental sample
  misc_feature (1)..(426): n is a, c, g, or t
ttgcaaaatgcctgtttgttgtacttggttcacagaaaagatatttcaggaaaaaaaatgcttaaatttcaagaaaaaatttacattgcagaccacgggattagagaagctgtttatggaaataacacgaaagacattgagcaggttttggaaaacgtagtatatatggaattgctccgtagaggctatgacgtttgcgttgggaaaatagaggagtttgaaatagattttgtagcatcaaaaggagcaaagcaaatttacattcaagtttgctatttgctagcttcaccagaaactatagaaagagaattttccccattgtttaaaataaaagacaatttcccgaaattagttatatcaacagataaatttgatatgagcagggaaggcatagttcacaggaatatagaggagtttttgagttaa

SEQ ID NO: 2362 - protein, 141 aa, Unknown
  Obtained from environmental sample
  misc_feature (1)..(141): Xaa is any amino acid
MQNACLLYLVHRKDISGKKMLKFQEKIYIADHGIREAVYGNNTKDIEQVLENVVYMELLRRGYDVCVGKIEEFEIDFVASKGAKQIYIQVCYLLASPETIEREFSPLFKIKDNFPKLVISTDKFDMSREGIVHRNIEEFLS

SEQ ID NO: 2363 - DNA, 375 bp, Unknown
  Obtained from environmental sample
  misc_feature (1)..(375): n is a, c, g, or t
ttgcataaacttgaagaaaaaatttccctcgtcaaaagcgacctgctctccaatgtgcaaaacaacattaaatttgatgccttgctcgcaaatttgccttacatcccgcttggcgataaaaattccctgcaaccagaagtgctaagtggagaccctcacctagcactctttggaggcacagacggcttggatttaattcgccgcctcttaaacacctgtgcaaattacttaaaaccaagtgctcctataattttggaaattgcaagcggtcaggagaaaattttgcaaagcgaatgttttgctggtgtaaaatggattgagaaccgaaaagattatgccgagcaaacgagattttctatattccaaaaatgttag

SEQ ID NO: 2364 - protein, 124 aa, Unknown
  Obtained from environmental sample
  misc_feature (1)..(124): Xaa is any amino acid
MHKLEEKISLVKSDLLSNVQNNIKFDALLANLPYIPLGDKNSLQPEVLSGDPHLALFGGTDGLDLIRRLLNTCANYLKPSAPIILEIASGQEKILQSECFAGVKWIENRKDYAEQTRFSIFQKC

SEQ ID NO: 2365 - DNA, 852 bp, Unknown
  Obtained from environmental sample
  misc_feature (1)..(852): n is a, c, g, or t
gtgcgcgattttgaggtcggcgcggtcgattcatttttagaccatgttgacgagcgtaccgcctaccttgccacctcccgcccgactgccgtcaatctcttttgggcgcttgaacgggttagaaagttcgcccacgcccaagcggacgcttgttacagcattgatgtcgataccttaaaaaagcgtatcttagaggaggccgtccgtatccttgaggaggacaagcggatgtgccgggcgataggcgagcacgggtttgaacttatcaaggataaggggtgcatcctgacccactgcaacgccggcggtttggcgacaagcgaactcggcacggcgctcgcccccatatacgtcggtcaggagcgcggcgcgtcgtttagggtattcgccgacgagacgcgcccgcttctgcagggcgcgaggatcaccgcgctggagttaagcgaggccggaatccccgttacggtgatatgcgacaatatggccgcttcagtcatggcgagcggtcaaatcaaggcctgcatagtgggcgcagaccgcatagcggccaacggcgacaccgccaacaagatcggcacctacggcgtggcgatagttgccgcctaccacaagataccgttctacgtagccgccccgtcgtcgacgttcgacctcaaaatcagggacggctcggacataccgatagagcggcggaatagggaagaggtgtctatgcccgggggcgtcaaaaagagcgttcccgacggggcggaggtgttcaatccggctttcgacgttactccggcggagttgatcaccgctattatcaccgaggcgggggttatttatccgcccttatgttacgaatattga

SEQ ID NO: 2366 - protein, 283 aa, Unknown
  Obtained from environmental sample
  DOMAIN (1)...(279): Initiation factor 2 subunit family
  misc_feature (1)..(283): Xaa is any amino acid
MRDFEVGAVDSFLDHVDERTAYLATSRPTAVNLFWALERVRKFAHAQADACYSIDVDTLKKRILEEAVRILEEDKRMCRAIGEHGFELIKDKGCILTHCNAGGLATSELGTALAPIYVGQERGASFRVFADETRPLLQGARITALELSEAGIPVTVICDNMAASVMASGQIKACIVGADRIAANGDTANKIGTYGVAIVAAYHKIPFYVAAPSSTFDLKIRDGSDIPIERRNREEVSMPGGVKKSVPDGAEVFNPAFDVTPAELITAIITEAGVIYPPLCYEY

SEQ ID NO: 2367 - DNA, 864 bp, Unknown
  Obtained from environmental sample
  misc_feature (1)..(864): n is a, c, g, or t
atgcgcccagtctcacccgaaaatgagtccgaagaagaagccgcaacggagcaaagcttgcgaccgcagtcgcttgcggattttactgggcaagaggcgttaaaagaaagcctttccatagcgatagaagcggcgaaaaaaagaaaagatgctttggatcattgcctattttccggaccgccagggctgggaaaaacaacgcttgcaggcataatagcacaagaaatggacgttcaaattcacgtaaccagcggacctgttttggaaaaacccagcgatttggcgggcttgctaacaaacttgcagcacggcgatatattgtttatagatgaaattcataggctggggcgaattgttgaggaatatctctatccggcaatggaggattttcgcttggacataatgctggattcgggtcccggagcaaggagcgttaatttgccgcttcgccctttcacccttgttggcgcaaccacaaggagcgggcttttgacaagccctttaagagaccgctttggattgctgtttcgcttggagctttattccccgcaagaacttttgacaatcataaataggtctgcgaaaattttgcaagtggaaattgaaaacgatgccacagttcttttaggctcacgttgccgcggaactccgcgagttgcgaacagagttttgcgaaggtgcagagatgttgcgcaagttagaggcggcggcaaaatcaccgttcaaatagcggaaaaaacactacaaatgctaaccatagatgcagacggcttggattcaatggataggcgaattttggaatgtataatagacagctttaatggcggccccgttgggctaacaacaataggggcagctctgtga

SEQ ID NO: 2368 - protein, 287 aa, Unknown
  Obtained from environmental sample
  DOMAIN (25)...(186): Magnesium chelatase, subunit ChlI
  misc_feature (1)..(287): Xaa is any amino acid
MRPVSPENESEEEAATEQSLRPQSLADFTGQEALKESLSIAIEAAKKRKDALDHCLFSGPPGLGKTTLAGIIAQEMDVQIHVTSGPVLEKPSDLAGLLTNLQHGDILFIDEIHRLGRIVEEYLYPAMEDFRLDIMLDSGPGARSVNLPLRPFTLVGATTRSGLLTSPLRDRFGLLFRLELYSPQELLTIINRSAKILQVEIENDATVLLGSRCRGTPRVANRVLRRCRDVAQVRGGGKITVQIAEKTLQMLTIDADGLDSMDRRILECIIDSFNGGPVGLTTIGAAL

SEQ ID NO: 2369 - DNA, 630 bp, Unknown
  Obtained from environmental sample
  misc_feature (1)..(630): n is a, c, g, or t
atgacagattcggccgagcgcttacacgttcttcactatcacgacaaatcgctagacaaagataaagattcctacaaggagtttcttgaaaatttggaaattgatgataagtatggcgatcatcaccgctttatacgaggctatctatacgatgaggaggactgcttcaccgtcaattctactctacgctttgcacacgacaatgcgcttgtctgccgaaacgtaataggtagcgagccacttgcctacatccagctggcaatagatgcgttcaatgcaagtagagacaaaaaaaatccgcgtttggcactaatgccaaccatagattacctgttcgcgttttggggaagtctggatgacaagctcgccaacggcgaagcacgcactattatcaagtgtggcaaatttgttgaacggttagatttgtactttcggttttcttatgaccacaagctcataaaaaacgagtacgatatgctatgccacgtactttcacgtgtacgcaagggtttttgcaacgcacagcatttggcggtgatagccgatgctcttgctacggaaagctacaaggtacaacaagacgaaatacttgaaagcctgagtaagttgtttgaggatcaaatagtttga

SEQ ID NO: 2370 - protein, 209 aa, Unknown
  Obtained from environmental sample
  misc_feature (1)..(209): Xaa is any amino acid
MTDSAERLHVLHYHDKSLDKDKDSYKEFLENLEIDDKYGDHHRFIRGYLYDEEDCFTVNSTLRFAHDNALVCRNVIGSEPLAYIQLAIDAFNASRDKKNPRLALMPTIDYLFAFWGSLDDKLANGEARTIIKCGKFVERLDLYFRFSYDHKLIKNEYDMLCHVLSRVRKGFCNAQHLAVIADALATESYKVQQDEILESLSKLFEDQIV

SEQ ID NO: 2371 - DNA, 846 bp, Unknown
  Obtained from environmental sample
  misc_feature (1)..(846): n is a, c, g, or t
atgctttgcacaaccgccggttttgcgagagtaccgcctggaggggaatacccgccgcagcaaaatgcccacccggcaatctatagaccggttgcggtgggccgtgtattgccggaattccagatggtatatgtcaccgccggggaaggggtcttcacatcaggggacatgtcttacagcgtaaatcccggttcggtattgcttgttctacccggaataaaacatttatatcacccgcttttggaaaccggatggcacgaatactgggtcggctttaagggggcgtatttttcaggccttatcaaggaagggcgcttttcaccggatcaggttttttttcagattgggctgagcgactccattttatccctgtttaatatgctctttgatgaggtacaggcccagcgccccctttaccagataaaagcctgcgccgctattctttcccttattgccgaagtactgacaagagaccgccggaaagaacagctcaattcgtatcagaaaatagttgaaaaagcaaaatatttaatggaatccaatgtctttagcgcaattgatctttcaagtatttcagatcaactaggaatcagcacttccaagcttaacgagatatttaaaacctatacttccatgacgccttatcagtattacattcagataaaaatatataaagcggaaagccttttggaacagcagtatctttcggtaaaagaagtggcgcaccaaatgggttttgaggatcaatactacttctcaaggcttttcaaaaacaagaccggagtgtccccctcggaatggaagaattttgtaattaagcctgaaccggtacagaaaatcagctaa

SEQ ID NO: 2372 - protein, 281 aa, Unknown
  Obtained from environmental sample
  DOMAIN (24)...(157): AraC-like ligand binding domain
  misc_feature (1)..(281): Xaa is any amino acid
MLCTTAGFARVPPGGEYPPQQNAHPAIYRPVAVGRVLPEFQMVYVTAGEGVFTSGDMSYSVNPGSVLLVLPGIKHLYHPLLETGWHEYWVGFKGAYFSGLIKEGRFSPDQVFFQIGLSDSILSLFNMLFDEVQAQRPLYQIKACAAILSLIAEVLTRDRRKEQLNSYQKIVEKAKYLMESNVFSAIDLSSISDQLGISTSKLNEIFKTYTSMTPYQYYIQIKIYKAESLLEQQYLSVKEVAHQMGFEDQYYFSRLFKNKTGVSPSEWKNFVIKPEPVQKIS

SEQ ID NO: 2373 - DNA, 849 bp, Unknown
  Obtained from environmental sample
  misc_feature (1)..(849): n is a, c, g, or t
atgcgcccttcgcctgattcagcgcaatatatgcagtatatagtggataatgattttgacgaaaaaacgcgggtcggtttggataccccgccatttgatccgcgccacacaccctggatggtgcctgtgcttgaggaggggcaatccaaatattctggtttaggtcattacactcccggctgggaagggttgctgaacggctttgctcctgtttttgacagcgaaggcaatgttaaagcaattgctggagtggatataagagaccatgagattgtatttgcaaagcgaatgatatcaattcttacggtgactcaaattgtttctgtggtacttgtgtttgcaagtggcttattaggtcttatagaagcgaataaagccaataaagccaaaaccaaatttttggcaaagatgagccatgagataagaacgccgatgaatgcaataataggaatggcagaacttaccctgcgcgaaaatattacttctaccgtaaaggagtatattctcaccgttaaacatgcgggtacaaaccttttatccataatcaatgacattttggacttttcaaaaattgaaagcggaaaattggaaatagttccgagcaattattcattttcatctatgttcaatgatgtagtcaatattgtcaaaatgaagattgtggattcgggactgagatttgatataaatatagacagcaatatgccgaatttcctttttggggacgaggctagaataaggcaagtgttgctcaacatattgngcaacgccgttaaatacacgaaaaaaggctttatctcattttccgtanatggagaaataataaaaaacactgttcttttaccatag

SEQ ID NO: 2374 - protein, 282 aa, Unknown
  Obtained from environmental sample
  DOMAIN (129)...(194): His Kinase A (phosphoacceptor) domain
  misc_feature (1)..(282): Xaa is any amino acid
MRPSPDSAQYMQYIVDNDFDEKTRVGLDTPPFDPRHTPWMVPVLEEGQSKYSGLGHYTPGWEGLLNGFAPVFDSEGNVKAIAGVDIRDHEIVFAKRMISILTVTQIVSVVLVFASGLLGLIEANKANKAKTKFLAKMSHEIRTPMNAIIGMAELTLRENITSTVKEYILTVKHAGTNLLSIINDILDFSKIESGKLEIVPSNYSFSSMFNDVVNIVKMKIVDSGLRFDINIDSNMPNFLFGDEARIRQVLLNILXNAVKYTKKGFISFSVXGEIIKNTVLLP

SEQ ID NO: 2375 - DNA, 774 bp, Unknown
  Obtained from environmental sample
  misc_feature (1)..(774): n is a, c, g, or t
atgaatatgtccgaagaaaatacaaacaacgaacctgcggaagaagcccttgaagacaaggctcctgctattaatcgtttcaaaatagccatttccaaagaccaaatggaagttataatgagtccgctgacgggagttaccagtggtgggttaaccactttagaagaggttcttgatgcttgccgtatggaaaacataacggcagagatagatgaaaaatcaattgaaaaacaaatactggtagccaatccagttgaagtagccatagccaaaggcataaaacccgaagatggcaaaaatggctatgttgaatacaaggttgatatgagcgcaaagccgcagttcataccaaaagatgacgatataattgattataaaacctcaatgcaaatcaccgtagttcaaataggcgatattatcgcagatgtgattccgccaacagagggcgaagaaggaaccgatgtcagagggtctcccataaaggcaaatgccggttcaaaagcgagatattttttaggagacggggtagaagaaaaagacggtcatctgattgccacagcagctggaacgccaagcgttcaagatgaagtcgttatggttcgccgcaactatgatgtggatggcgatgtggatttatcaactggaaatatgaattttccgggcacagttgttatacacggcaatgtcacagatggctttgaggttatatccgaagaaaacatagtgatatacgggcttatatcccgggcaaaagtagagcaaaaggctatgtaa

SEQ ID NO: 2376 - protein, 257 aa, Unknown
  Obtained from environmental sample
  misc_feature (1)..(257): Xaa is any amino acid
MNMSEENTNNEPAEEALEDKAPAINRFKIAISKDQMEVIMSPLTGVTSGGLTTLEEVLDACRMENITAEIDEKSIEKQILVANPVEVAIAKGIKPEDGKNGYVEYKVDMSAKPQFIPKDDDIIDYKTSMQITVVQIGDIIADVIPPTEGEEGTDVRGSPIKANAGSKARYFLGDGVEEKDGHLIATAAGTPSVQDEVVMVRRNYDVDGDVDLSTGNMNFPGTVVIHGNVTDGFEVISEENIVIYGLISRAKVEQKAM

SEQ ID NO: 2377 - DNA, 669 bp, Unknown
  Obtained from environmental sample
  misc_feature (1)..(669): n is a, c, g, or t
atgataaacttggtccctttgccgtgttcggaagtgacagtgaccgtgccgttgagtttgtcgatctgccggcgcacaacgtcaaggcctacaccgcggcccgaaatggctgtaattgacttggcggtagagaagccgggctcgaagatcaggttgaaggcttccgggtcggtaagcagtttgttggggcttattaagccgcgttcaacggctttggccttaaccgcctcaacgtcaatacccttgccgtcgtcgcctatttcgatgacgatcatgttgccttcgttggtggccttcagaagcactctgccttcttcgggcttgccggcggcgcggcgctcttcctgcgattcaatgccgtggtcaatggagtttctgaccgagtgcatgatcgggtccagaaggtcctctataaccgacttgtcgagttcggtttcttcaccttcaatgaccaggttgattttcttattaagcgatttggaaagatcgcgcacgagacgggggaaacggctgaaaatctggctgatcggaaccatgcggatccgcataaccccttcctgcaattccccggtaatccgtccaaggttctgcgccgtggaacggaatttacccatgttgtttttgaaagaagcctcaaaaccgtcaaagagcgagaaaatgtccccataa

SEQ ID NO: 2378 - protein, 222 aa, Unknown
  Obtained from environmental sample
  misc_feature (1)..(222): Xaa is any amino acid
MINLVPLPCSEVTVTVPLSLSICRRTTSRPTPRPEMAVIDLAVEKPGSKIRLKASGSVSSLLGLIKPRSTALALTASTSIPLPSSPISMTIMLPSLVAFRSTLPSSGLPAARRSSCDSMPWSMEFLTECMIGSRRSSITDLSSSVSSPSMTRLIFLLSDLERSRTRRGKRLKIWLIGTMRIRITPSCNSPVIRPRFCAVERNLPMLFLKEASKPSKSEKMSP

SEQ ID NO: 2379 - DNA, 615 bp, Unknown
  Obtained from environmental sample
  misc_feature (1)..(615): n is a, c, g, or t
atgaaaccccaaaatgttacgaacgggcgcagcgggaataccatcacttacacctggaccaacgctgacctctttgtcaacgcggcccgcaactccggctttttggttcacgggcataccctgctatggcacagccagaattccacatggataaaaaacatcggcaccgacaactcaataaccaaagcgcaggccatcaccattatgaagcagttcataaccgacgtggtatcgcgttataaaggaaagatatattcatgggacgtgctgaacgaagcgttccccgacagcggccccagcagcgccactgcggactggaaaacgtcaatgcgttccggcaacgacggaaacccctggtttgtaaaaattggctcggactttgtatatgagggattccttgccgctcggcttgccgaccccggcgcgatactgtactacaacgactttaacaccgacgtggcaaacaaggcaaacgtgatacgcgacatggtgcgcgacgtgaatcaaaagtatctggcatcgggcgacaaacccgcaggggaggatcctaacaggctgcttatcgaacgcattggtatgcaggagcatcacaacaccggcattaccgccgactaa

SEQ ID NO: 2380 - protein, 204 aa, Unknown
  Obtained from environmental sample
  DOMAIN (1)...(204): Glycosyl hydrolase family 10
  misc_feature (1)..(204): Xaa is any amino acid
MKPQNVTNGRSGNTITYTWTNADLFVNAARNSGFLVHGHTLLWHSQNSTWIKNIGTDNSITKAQAITIMKQFITDVVSRYKGKIYSWDVLNEAFPDSGPSSATADWKTSMRSGNDGNPWFVKIGSDFVYEGFLAARLADPGAILYYNDFNTDVANKANVIRDMVRDVNQKYLASGDKPAGEDPNRLLIERIGMQEHHNTGITAD

SEQ ID NO: 2381 - DNA, 528 bp, Unknown
  Obtained from environmental sample
  misc_feature (1)..(528): n is a, c, g, or t
ttgatggccaagtctgatgaaatcagccaacaagatacgacaagctggaaaactgaagcggtacagcaggcgtttattaggtatgttgagaacggcggagggttgctgattatccatagcggaactgtggcgggtaaacaaacaaaggaccttgaccagttgattggctgtcgctttgcctttcaccctaacaattgtttagtaactgtccagccaattaagcctcatcccgttaccgagggtgtaggaatgtttttcgaaaccgatgagcattaccggcttgaaattctggcacaggacgcagacattcttatagcctcatattccccgccccagggtgatacggagaaatatcaggaagacccttatcacaacacgccagcgtgggtatgtcctgccggatatgtgcgaacccagggcaaaggtcgggtctgtgtcctgacgccgggacatctcctcccggtatggcacaacccccaataccaaagaacaatcgccaatgccttaagatggtgtggcggtcaataa

SEQ ID NO: 2382 - protein, 175 aa, Unknown
  Obtained from environmental sample
  misc_feature (1)..(175): Xaa is any amino acid
MMAKSDEISQQDTTSWKTEAVQQAFIRYVENGGGLLIIHSGTVAGKQTKDLDQLIGCRFAFHPNNCLVTVQPIKPHPVTEGVGMFFETDEHYRLEILAQDADILIASYSPPQGDTEKYQEDPYHNTPAWVCPAGYVRTQGKGRVCVLTPGHLLPVWHNPQYQRTIANALRWCGGQ

SEQ ID NO: 2383 - DNA, 468 bp, Unknown
  Obtained from environmental sample
  misc_feature (1)..(468): n is a, c, g, or t
ttgtctgtgctttctttattttccgggtgcgggggtttggaccttggatttgaaggcgatttccgtgttttaaaagaatccattaatgaaaaaattaaccctgattggaaatgtgcaaatagcgataataataaatggaaacaattaccaaaaacccggtttcaaaccgttttcgcaaatgacatcagacaagacgcgaaaatcgcctggacaaactatttccgtaaacgcggaacagattcatctatttacagggtagacagcatagtcgatctcgtaaaagagcacaaaaacggaagagaaatatttcctgaaaatattgatgtagtaaccggtggttttccctgccaggatttttctgtcgccggaaaaagattgnggtttaaatccaacaaaggccataatggaacaattatagaaaacgatacgcccactattgagaatcgcggacaccttatatatggatga

SEQ ID NO: 2384 - protein, 155 aa, Unknown
  Obtained from environmental sample
  misc_feature (1)..(155): Xaa is any amino acid
MSVLSLFSGCGGLDLGFEGDFRVLKESINEKINPDWKCANSDNNKWKQLPKTRFQTVFANDIRQDAKIAWTNYFRKRGTDSSIYRVDSIVDLVKEHKNGREIFPENIDVVTGGFPCQDFSVAGKRLXFKSNKGHNGTIIENDTPTIENRGHLIYG

SEQ ID NO: 2385 - DNA, 672 bp, Unknown
  Obtained from environmental sample
  misc_feature (1)..(672): n is a, c, g, or t
atggcgctctcgctgggcggttttttggcaattatcgcgacgttctttttgtttgtgccgcgcaagcttcttagttttggagatttttttgcctcaataactaccggtgtgaaggcaatggttcccgcgcttatcattctggctttggcatggacaatcagcggtgtatgcagggatcttcttttgaccggcccttacgtggcaggtctcgttgagcaatcgaaccttccagtcgcgctaattcccgcgatcatgttcctggtcgcctgcgggctttcttttgccaccggaacctcctggggaactttcggcattctaatacccatcaccatttcggtctgcgatattgtggcgccctggctttccattacttcgttgtccgccgttcttgcaggttcagtgttcggcgatcattgctcgccaatctccgataccaccatactctcgtctaccggagcggcatgcaaccacattgcccatgtcgcgacccaaattccgtatgccgctaccgttgcagtggtatgctttattggatacataatagcgggtgccacttcggacatgggctacgcagccagcgtagcaatcacgcttccggtgtcttttgccatgctgattgcagcattgctcgttttgccaagagcttttccggtagctaaagaaaaggcttaa

SEQ ID NO: 2386 - protein, 223 aa, Unknown
  Obtained from environmental sample
  DOMAIN (1)...(184): Na+/H+ antiporter family
  misc_feature (1)..(223): Xaa is any amino acid
MALSLGGFLAIIATFFLFVPRKLLSFGDFFASITTGVKAMVPALIILALAWTISGVCRDLLLTGPYVAGLVEQSNLPVALIPAIMFLVACGLSFATGTSWGTFGILIPITISVCDIVAPWLSITSLSAVLAGSVFGDHCSPISDTTILSSTGAACNHIAHVATQIPYAATVAVVCFIGYIIAGATSDMGYAASVAITLPVSFAMLIAALLVLPRAFPVAKEKA

SEQ ID NO: 2387 - DNA, 948 bp, Unknown
  Obtained from environmental sample
  misc_feature (1)..(948): n is a, c, g, or t
gtggcaggtacgcttgtggatattaccgaaaccaagaaaaagcttctggaaaaggagaggcaaatggaggaagcgcaagccgccaaccgcgctaaaagcaccttccttgccaacatgagccatgaactgcgcacgcctctcaatgtggttatcgggcttaccggtttaataatggaagataaaaaccttgaaaaacatattacggataatctgataaaaataagcaacgcgggaagcacacttcttaacattgtaaacaatattcttgatctttcaaaaatcgagtcgggcaagcttgaattaattcctgatgagtattacacggcaagtatgctgaacgataccgttacccttattcttgcccgcatcggggaaaaagacataaagttccatttgaatatagacgacaacctgccgtacaaactttacggcgacgatctgcgggtgaagcagatttttaccaacctgcttaccaacgccgtcaaatacaccaacgaaggaagcgtagaactcagcatacactgcgagcatgaaggcgatacggtgtggatgaatgccgccatcagcgataccggcatgggtatgtccgcagatgacatgaaaaacctgtttcttgattatcacagaatcgattcaaaatccaaccatcatgttgagggtacgggtttgggtttatccatcaccaaaaaatttgttgaaatgatgagcggagaaatcaaggtgaagagcgagattggcaagggctcaactttcagtttccgcataaagcangggtttgtcagcgacgaggttattggagcggatgtttcanacaaactccgcaacttctgcttcagcgatgacaagcgcattgtctcgcaaaaactggtaaagatcgatttgagttacgccaaaatgctggtagtagacgacattcgaccaatttggacgtggcggcgggcgttttag

SEQ ID NO: 2388 - protein, 315 aa, Unknown
  Obtained from environmental sample
  DOMAIN (31)...(97): His Kinase A (phosphoacceptor) domain
  misc_feature (1)..(315): Xaa is any amino acid
MAGTLVDITETKKKLLEKERQMEEAQAANRAKSTFLANMSHELRTPLNVVIGLTGLIMEDKNLEKHITDNLIKISNAGSTLLNIVNNILDLSKIESGKLELIPDEYYTASMLNDTVTLILARIGEKDIKFHLNIDDNLPYKLYGDDLRVKQIFTNLLTNAVKYTNEGSVELSIHCEHEGDTVWMNAAISDTGMGMSADDMKNLFLDYHRIDSKSNHHVEGTGLGLSITKKFVEMMSGEIKVKSEIGKGSTFSFRIKXGFVSDEVIGADVSXKLRNFCFSDDKRIVSQKLVKIDLSYAKMLVVDDIRPIWTWRRAF

SEQ ID NO: 2389 - DNA, 486 bp, Unknown
  Obtained from environmental sample
  misc_feature (1)..(486): n is a, c, g, or t
ttgcggctaaaaatgtgggaagccgaaagggcaatttacgctgccgggcgaaggctggaatacgccgcttctgtaaacgccgccagaaagtaccccgaagagtacaaggaagcccaatactcttatgccgaggcccgttctttccgcgcggcggaaaggtgggatgatgccattgacgcggcgaaccgtgttctggcggccctggcttacgttgacgggagtgtgccggacccgctccctgctcagtacactgtgcgcgcatggagtactttcagggactgcttttggaacatagccggccgcccctgggcctttaacgatccctatttatggagagccctttacgaagcgaacaaatcaaaactgcccgacgccaataatcctgatattattgaacctgggatggtgctggatattccaagtcttaggggagaatataggtatggcatgtgggatccgggaaatacgtatttactttctcaatga

SEQ ID NO: 2390 - protein, 161 aa, Unknown
  Obtained from environmental sample
  misc_feature (1)..(161): Xaa is any amino acid
MRLKMWEAERAIYAAGRRLEYAASVNAARKYPEEYKEAQYSYAEARSFRAAERWDDAIDAANRVLAALAYVDGSVPDPLPAQYTVRAWSTFRDCFWNIAGRPWAFNDPYLWRALYEANKSKLPDANNPDIIEPGMVLDIPSLRGEYRYGMWDPGNTYLLSQ

SEQ ID NO: 2391 - DNA, 933 bp, Unknown
  Obtained from environmental sample
  misc_feature (1)..(933): n is a, c, g, or t
gtgtgccagaactggatgcagtaccgcttaatcaagaaatacctgaaagcgatgaccagtgaccagacgctggtagtggaatccgggcacccgctcgggcttttcgcttcccgccccgaagcgccgcgcgtgatccttaccaacggcctcatggtgggtttgtacgacaacccgcgggactggcaccatgcggcccagctcggcgtcaccaactacggccagatgacggctggcggctggatgtatataggcccgcagggcattgtacacggcaccttcaacacgctcctgaatgccggtcgcctgcatctgggcctctcaggcgaccaggaccttgccgggcgcctttttgtttcctccggccttggcggtatgagcggcgcgcagcccaaggcaacggaaatcgccggggccgtgggcgtcatcgcggaagtggacataagccgcatcaagacccggctggatcagggatgggttcgtaaatattcagcaaagctggatgatgtcttcgcttgggcggccgcctcgcagaagaaaaatgaacccatgtccatcgcctaccacggcaatattgtggacttgctgcaatactgcctggacaaaaaaatccacattgatctcctctcggaccagacctcctgccacgttgcctatgagggaggatactgtccgcaaggcctcaccttcgagcagcgtaccgaaatgctcgcaaagaaccggcctgaattcatccttcgggtgaacaaaaccctgaagaagcattttgaactcatcaaggccctggccgcccaaggaacctatttctttgactacggcaacgccttcctgaaggccgtatacgacaccggcgtcaaggaaatctcaaagaacggcctggacgacaaagacggctttatcttcccttcctatgggaagacatctcggccaatctga

SEQ ID NO: 2392 - protein, 310 aa, Unknown
  Obtained from environmental sample
  DOMAIN (1)...(310): Urocanase
  misc_feature (1)..(310): Xaa is any amino acid
MCQNWMQYRLIKKYLKAMTSDQTLVVESGHPLGLFASRPEAPRVILTNGLMVGLYDNPRDWHHAAQLGVTNYGQMTAGGWMYIGPQGIVHGTFNTLLNAGRLHLGLSGDQDLAGRLFVSSGLGGMSGAQPKATEIAGAVGVIAEVDISRIKTRLDQGWVRKYSAKLDDVFAWAAASQKKNEPMSIAYHGNIVDLLQYCLDKKIHIDLLSDQTSCHVAYEGGYCPQGLTFEQRTEMLAKNRPEFILRVNKTLKKHFELIKALAAQGTYFFDYGNAFLKAVYDTGVKEISKNGLDDKDGFIFPSYGKTSRPI

SEQ ID NO: 2393 - DNA, 411 bp, Unknown
  Obtained from environmental sample
  misc_feature (1)..(411): n is a, c, g, or t
atgcttaaacctgacaggtttaaaacgttggttgattcaagggggcacagcgccggcgatgcggctatgattaggatagcgattatacttaaaaatattacaaggcaaatcgggcatggctgggcgttgcgttttaaaagtaatgaagttggactaattattaataactgcgacgctgcgcaagcggaagaaatagcccttgaattatatgaatttatcaacgacatggacgcggttcctcctcaggacgatattcctgaatttaatttttccgcgacaatatcatgggcgctctggccggaagacggcgctgattgggaaacgttatttagcggaaattacagttttcttttaaacaattggaaagaaggcggcgacagagtaattcattattcaagagaggccacgtga

SEQ ID NO: 2394 - protein, 136 aa, Unknown
  Obtained from environmental sample
  misc_feature (1)..(136): Xaa is any amino acid
MLKPDRFKTLVDSRGHSAGDAAMIRIAIILKNITRQIGHGWALRFKSNEVGLIINNCDAAQAEEIALELYEFINDMDAVPPQDDIPEFNFSATISWALWPEDGADWETLFSGNYSFLLNNWKEGGDRVIHYSREAT

SEQ ID NO: 2395 - DNA, 849 bp, Unknown
  Obtained from environmental sample
  misc_feature (1)..(849): n is a, c, g, or t
atgtcaatttctgagctatccaaggcatgggcagaccataatcgcaggtttgcgaatttttgttttgtttaccccgttatttcaaggcgagccaaagggctttccataggcataaacagcacgccaaactgtgcgtgttcttatgattgcatttattgccaagttaataaaaaaaatatgtctgtaaaaattccatctgtggatgaaattatttttgagttgaaagagatattgtccatataccataatacaaaattgacggaacatttcccaaacatcgaggaaaagaatagggtgttaaaggacgtagctttaagcggagatggcgaacctactctttacccgcattttgccgagctttgtgagcgtttaaaagagattcctggaattccaaaattggtgctgataacaaatacagctcaattggagaaaattcaaaacttcaatggggaaatatggggaaaattggatgctggcacagatgaatggctcaattttataaacagacccgtaaaagggatagatatcgcttcaatagagagaaaccttaaatttgctgtctctaaatttcccttgcgtattcaaactatgctttgcaaggtgcagggtaaaaccgccagcgagatggaggttaaaaactatgcccagattatccaaagaatttatgaaaccaaccccaaaaacttgctaagcgttcaaatatattccgttgccccgccctgtagccaaagataccgtacagccgctacctatgggatttttagagcacgtgaaaaaaaagggtggaggaaaaaaattctaactttacggttagagaattttttaactatatgtctgccatacccataa

SEQ ID NO: 2396 - protein, 282 aa, Unknown
  Obtained from environmental sample
  DOMAIN (40)...(215): Radical SAM superfamily
  misc_feature (1)..(282): Xaa is any amino acid
MSISELSKAWADHNRRFANFCFVYPVISRRAKGLSIGINSTPNCACSYDCIYCQVNKKNMSVKIPSVDEIIFELKEILSIYHNTKLTEHFPNIEEKNRVLKDVALSGDGEPTLYPHFAELCERLKEIPGIPKLVLITNTAQLEKIQNFNGEIWGKLDAGTDEWLNFINRPVKGIDIASIERNLKFAVSKFPLRIQTMLCKVQGKTASEMEVKNYAQIIQRIYETNPKNLLSVQIYSVAPPCSQRYRTAATYGIFRAREKKGWRKKILTLRLENFLTICLPYP

SEQ ID NO: 2397 - DNA, 975 bp, Unknown
  Obtained from environmental sample
  misc_feature (1)..(975): n is a, c, g, or t
ttggtcagaatcggccgaggagtcttatgtggtgatcgaactggcgacacgaatttgcgcaaggatcagcttctctccgaggagcaatactccgagcttatggagcagggcaagaaatttgacgctaagatgggcggccaggcggttttggagcttttggccaaggttgaggtggagaagctggtgatagagctgcgtcacttggtgaagcgcgagacgtcggagcagcgccgtttggagcacttgaagcgtctgcgtgtcgccgaggcgttcaacaggtctaagaacgatccgcagaatatggtgctcaaggtcttgccggtgctgccgccggatttgcggccgcttgtgccgcttgagggcgggcgtttcgcgacgtcggatttgaacgatctctatcgtcgcgttatcaatagaaacaaccgtctcaagaaactgcttgaaatcaaggcgccggaggtcattctccgcaacgagaagaggatgcttcaggaggcggttgacacgttgtttgataacgggcgccggactttctccgttaagggcgagggcaagcgtcctttgaagtcgctcagcgatttgttgaaaggaaagcaggggcgcttccgtcagaacttgctgggtaagcgcgtcgactattccggtcgcagcgttatcgtcgtggggccggaacttaagatacatcagtgcgggttgcctaagcttatggcgcttgagttgttcaagccgtttgtgatacagaagttggaagagaaagggttggtgcagacggttaaaagcgccaagaagtttgtggagaaggagcgtccggaggtttgggacatacttgaggaggttatcaaagatcaccccgtgcttctgaaccgcgccccacgttgcataggttgggcattcaggcatttttcccggtgcctgtggagggtaggcgatacgtcctcacccgctcgtgtgttccgcgttcaacgccgactttga

SEQ ID NO: 2398 - protein, 324 aa, Unknown
  Obtained from environmental sample
  DOMAIN (2)...(206): RNA polymerase Rpb1, domain 1
  misc_feature (1)..(324): Xaa is any amino acid
MVRIGRGVLCGDRTGDTNLRKDQLLSEEQYSELMEQGKKFDAKMGGQAVLELLAKVEVEKLVIELRHLVKRETSEQRRLEHLKRLRVAEAFNRSKNDPQNMVLKVLPVLPPDLRPLVPLEGGRFATSDLNDLYRRVINRNNRLKKLLEIKAPEVILRNEKRMLQEAVDTLFDNGRRTFSVKGEGKRPLKSLSDLLKGKQGRFRQNLLGKRVDYSGRSVIVVGPELKIHQCGLPKLMALELFKPFVIQKLEEKGLVQTVKSAKKFVEKERPEVWDILEEVIKDHPVLLNRAPRCIGWAFRHFSRCLWRVGDTSSPARVFRVQRRL

SEQ ID NO: 2399 - DNA, 549 bp, Unknown
  Obtained from environmental sample
  misc_feature (1)..(549): n is a, c, g, or t
ttgggggtgtacatggacgcctacattcagtgggtcactcagaacccgattttctctgcgttcgttcagttcgccatactggggccgacgggggaagtggttgcggcgtcgcttgtcgccaagcgccccgcccttccctgcccgtggctgaaaatgctgggcaaggcactcgcgtgggcaatccttggcgtggtcatcaagtacggctttgtcggcatgaaggggtttgtggaagcactgctggcaaagcacatgctcccatcgctgttttcgactagcgtcgcccacgccttcgccgtgtccgtgttcacaaatgtgctgtttgggccgcagatgatgctcttccataggtttgaggacaacctaatacttggggacaacgactacgcgggtatgtggaaggccatccagacccttctgtggttttggatacccgcacatacgatcactttttgcctcccaacccactttcagattgggcttgccgcactgtgggggctggcgctgggcataatcctaggcctttcaaaaatacggcgtaatctatag

SEQ ID NO: 2400 - protein, 182 aa, Unknown
  Obtained from environmental sample
  misc_feature (1)..(182): Xaa is any amino acid
MGVYMDAYIQWVTQNPIFSAFVQFAILGPTGEVVAASLVAKRPALPCPWLKMLGKALAWAILGVVIKYGFVGMKGFVEALLAKHMLPSLFSTSVAHAFAVSVFTNVLFGPQMMLFHRFEDNLILGDNDYAGMWKAIQTLLWFWIPAHTITFCLPTHFQIGLAALWGLALGIILGLSKIRRNL

SEQ ID NO: 2401 - DNA, 396 bp, Unknown
  Obtained from environmental sample
  misc_feature (1)..(396): n is a, c, g, or t
atggcggtttcatccgcgttacaaaacgccgaaattgttcatgcggaatattcaaattgctacaataaagctgacggaaaaactttcgtgtattttgatcccccttatcgtcctttaacgcaaacttcaagctttacgacatataccgacgcggaatggacggataaacaacaaatggaactggcggtttttttccaaaaattggataaggaaaaaggtgcaaaacttatgctgtcaaattctgatccgacaaatattaatcccaatgatactttttttaagaaggcgtatcgcggctataatttttttagagtttccgcaaatagagccgtaaactgtaattccgcaggacgtggaaaaataaatgaactgttaattacaaattatagtaactga

SEQ ID NO: 2402 - protein, 131 aa, Unknown
  Obtained from environmental sample
  misc_feature (1)..(131): Xaa is any amino acid
MAVSSALQNAEIVHAEYSNCYNKADGKTFVYFDPPYRPLTQTSSFTTYTDAEWTDKQQMELAVFFQKLDKEKGAKLMLSNSDPTNINPNDTFFKKAYRGYNFFRVSANRAVNCNSAGRGKINELLITNYSN

SEQ ID NO: 2403 - DNA, 417 bp, Unknown
  Obtained from environmental sample
  misc_feature (1)..(417): n is a, c, g, or t
ttgcggctttgttaccagcgctgcagcatgctgtccgccgacgtaaacgccgcctttgaccccacctacgccggagtcttcgacaaaaagaattcttcgtttatggggaaggggctggtgcttacaaaatacaccggaagcggcggcaagtacggggcaagcgacgccaacgcggaattctgcgcgaaggtccagtcgataatgaacaagaacaaagtccagtggcagttcggcgctctcggaaaagtggacaaaggcggcggcgggacaatcgcgctttacgccgcaaatctgggaatggacgtccttgactgcggcgttcccgtcctgtccatgcactcgccgtttgaggtaatcagcaagatcgatctttttacgacgtacaggggatacatcgcttttttgaataacgcgtag

SEQ ID NO: 2404 - protein, 138 aa, Unknown
  Obtained from environmental sample
  misc_feature (1)..(138): Xaa is any amino acid
MRLCYQRCSMLSADVNAAFDPTYAGVFDKKNSSFMGKGLVLTKYTGSGGKYGASDANAEFCAKVQSIMNKNKVQWQFGALGKVDKGGGGTIALYAANLGMDVLDCGVPVLSMHSPFEVISKIDLFTTYRGYIAFLNNA

SEQ ID NO: 2405 - DNA, 579 bp, Unknown
  Obtained from environmental sample
  misc_feature (1)..(579): n is a, c, g, or t
atgtccgaagcgtataaacccataatagaggatgagaattttacctatgcggattacaaagcatgggaactaaaaccaggcgagcgttttgagcttataaacggcgttgcctatgccatgtccgcgccgaatgtatcccaccaagggatacttatgacattatcgggagagttttatacatatctaaaaggcaaaacctgcaaggtgttccctgctcctattgacgtcaggcttttttacgaggaagacgacagcgacgacacggtggtccagccggatgtgatagttgtctgcgaccccaaaaaactcggcgaagaaggctgccgtggggccccggacttggtagtggaaatcctctccccttccaatacggcgattgaaatggagcggaaactgcttttatatatggaagccggagtgcgggaatactggatcgtcgagcccaagaacaagcacatcagtatttacacccttaaaaacggtgaatacaccctacaaacttgcaaaaatcaggacagcgccaggcctgtcgtggttcccggccttgaaataccgctttctacaatctttgccgagtaa

SEQ ID NO: 2406 - protein, 192 aa, Unknown
  Obtained from environmental sample
  DOMAIN (47)...(157): Protein of unknown function (DUF820)
  misc_feature (1)..(192): Xaa is any amino acid
MSEAYKPIIEDENFTYADYKAWELKPGERFELINGVAYAMSAPNVSHQGILMTLSGEFYTYLKGKTCKVFPAPIDVRLFYEEDDSDDTVVQPDVIVVCDPKKLGEEGCRGAPDLVVEILSPSNTAIEMERKLLLYMEAGVREYWIVEPKNKHISIYTLKNGEYTLQTCKNQDSARPVVVPGLEIPLSTIFAE

SEQ ID NO: 2407 - DNA, 777 bp, Unknown
  Obtained from environmental sample
  misc_feature (1)..(777): n is a, c, g, or t
gtggcgaaaggcaacggacaaccgtttgtcatcgttattccgccgcccaatgtaacaggcgtactgcacctggggcatgggcttaacaacagcctgcaggacatagtcatccgctaccaccgtatgcgcggcgaaccggttctttgggtgccaggcaccgatcacgcgggtatagccacgcaaaacgtggtggaacgcaaacttaaagaaaagggcacaagccgccgcgaactgggcagggaaaaattcattgaagaaacctggaaagtcaagcgcgagcatcatgccataattaccgagcagcttgcgcggattggggcgagcgtggactgggacagggagcgttttaccctggacgagggacttgcaagcgccgtgagagaagtgtttgtaaccctgtacgagcgggacctgttgtataagggaaattacctggtaaactggtgcccatcctgcggtactgcccttgccgatgacgaggttgaccatgaagatacgccggggaaaatgtaccacctgcgttactactttgccaacgccgaaggcgataccgccaggaaaacagcgataaacggcgaaacgcccgcaggcgtttatgttgaactggccaccacccgccccgagacgctgttaggcgacactgccgtggcggttcacccggaagacgaacgctacgccgggctgaaagggaaaaccgtaaaactcccccttgctgaccgtgatattcccgttgtgtttgacacatacgttgatcgcgcctttggacaggcgttgtga

SEQ ID NO: 2408 - protein, 258 aa, Unknown
  Obtained from environmental sample
  DOMAIN (1)...(258): tRNA synthetases class I (I, L, M and V)
  misc_feature (1)..(258): Xaa is any amino acid
MAKGNGQPFVIVIPPPNVTGVLHLGHGLNNSLQDIVIRYHRMRGEPVLWVPGTDHAGIATQNVVERKLKEKGTSRRELGREKFIEETWKVKREHHAIITEQLARIGASVDWDRERFTLDEGLASAVREVFVTLYERDLLYKGNYLVNWCPSCGTALADDEVDHEDTPGKMYHLRYYFANAEGDTARKTAINGETPAGVYVELATTRPETLLGDTAVAVHPEDERYAGLKGKTVKLPLADRDIPVVFDTYVDRAFGQAL

SEQ ID NO: 2409 - DNA, 921 bp, Unknown
  Obtained from environmental sample
  misc_feature (1)..(921): n is a, c, g, or t
ttgttcgcggcggaaatctccggacaggcgagcggcgcgcaatggaggtccaatccccaggacgccgcctacgaccccctggcggatacggtaaccggatattttttggaatcccagttttcgctggaatacgccgatgccgccggagtcggcatgaccctgtattcgggcgtgaacagcgtggcgctgggcgtgtatggctatgaacttgcgggtaactgtcttgaagtgcgttattcaatcggcgacattgcgcataattacattattcccccggcggcgccggaacaaagaatgttgacatttctggataaaatggaacctgacgacaggcgcaaggttgaggcgagttaccggctttacgacatcaacaacctgcgctcaagcgatgataaaagcgcgctgctggccagttatcccgacctcagccggacgaagatatatgtaatgcgcgacaacgcccaggaatatatgaaagaattgatggaaggctttttcgcgcaggccggttacacctacgatgattattatgaggactcttcccgttatacggtctcaggcggcgaggagaaaccggcgtttaacataacgctgcgttatacgctggacggaagatcgctgctgctcaccgtgccttttgataaaatagcgtaccgtcccgcctaccccataacccagttggccctcctgccttttatgggcgcgggcggcgaaaatgacaaggggtatatgctggtgccggacggcagcggggcgctgatatactttaacaacggaaggcagaatcagatagcgtataacaataacgtgtacggatgggatgaggcgatgcccccgcacgaggtaataaatgacaacaaagccccctttccggcctttggcatacagaaaaacggggaacgccttgttatgtgtcattga

SEQ ID NO: 2410 - protein, 306 aa, Unknown
  Obtained from environmental sample
  misc_feature (1)..(306): Xaa is any amino acid
MFAAEISGQASGAQWRSNPQDAAYDPLADTVTGYFLESQFSLEYADAAGVGMTLYSGVNSVALGVYGYELAGNCLEVRYSIGDIAHNYIIPPAAPEQRMLTFLDKMEPDDRRKVEASYRLYDINNLRSSDDKSALLASYPDLSRTKIYVMRDNAQEYMKELMEGFFAQAGYTYDDYYEDSSRYTVSGGEEKPAFNITLRYTLDGRSLLLTVPFDKIAYRPAYPITQLALLPFMGAGGENDKGYMLVPDGSGALIYFNNGRQNQIAYNNNVYGWDEAMPPHEVINDNKAPFPAFGIQKNGERLVMCH

SEQ ID NO: 2411 - DNA, 825 bp, Unknown
  Obtained from environmental sample
  misc_feature (1)..(825): n is a, c, g, or t
atgttcggcgaaactccaaaagaaaaattccgcgttcacaattggcgcgatgaaataactgaacttggacgaatcgaagaagagtgggtggaaaaagcgtgtgaaggagcggtcaggtatgactggcctgttcaggtaaataaattgctcagtaaacagacccctgaaggcggtaatttttcgtttgtattaagtatcgggcaggttgttccccatgaagttgcgggtatggcaaaccacgcaaagaatatctttgtcggaacgggcgggaaagaagctatagataaaagccacttcgcaggtgctgtatacggaattgaatgtatcatgggcagaactgacactccggtgcgtgcgctttttgatgaaggattgcggcgttttgaatcaaagatgccgccaattctttgggcgcttaccgttgtcggtgaaaggaaagaagctgaaattacagatggaaaatcacaggcagtgcgcgggcttttcatcggttttggcagggaatgttttgaaaaagccgccgccctttcaagagaaataaacgtcaatatagtaaacgaaccggtaaaaaaagccgttgtttatcttgatccaaacgaataccgcacaacatggcttggaaacaaggccatttacagaatgcggatggcgattgccgacggcggcgaacttgtgatacttgcccccgcgcttgaacgtttcggcgaagatttacaggttgacgcgataatcagaaaatacggttaccgcagcgcagccggcattatcgctgaaacggcaaaatcccccgaactggcggaattaagcgccgagccctcgcgataa

SEQ ID NO: 2412 - protein, 274 aa, Unknown
  Obtained from environmental sample
  misc_feature (1)..(274): Xaa is any amino acid
MFGETPKEKFRVHNWRDEITELGRIEEEWVEKACEGAVRYDWPVQVNKLLSKQTPEGGNFSFVLSIGQVVPHEVAGMANHAKNIFVGTGGKEAIDKSHFAGAVYGIECIMGRTDTPVRALFDEGLRRFESKMPPILWALTVVGERKEAEITDGKSQAVRGLFIGFGRECFEKAAALSREINVNIVNEPVKKAVVYLDPNEYRTTWLGNKAIYRMRMAIADGGELVILAPALERFGEDLQVDAIIRKYGYRSAAGIIAETAKSPELAELSAEPSR

SEQ ID NO: 2413 - DNA, 897 bp, Unknown
  Obtained from environmental sample
  misc_feature (1)..(897): n is a, c, g, or t
gtgaattttattattcggtatgtctttaaacggctgctcctgctcgcgcctgtactccttgcggtatcggcagtgatatttttccttatacgccttacgccttcagaccctatcggctcaattacaagcggacggaggatcaacgaagagacacgggcgtcccttactgcccagtattttttggacaagagccttccacatcagtattttatctggataagtaacgcggtaagaggaaatcttggcgacagtttcagacaccgccaacctgtgagcgctcttcttgcggccaggcttccggttacaattcagcttgtttttatgagcgccttattcgcagttcttttggctgttccggcgggtattatcagcgctgtcaaacggcatacaattgttgatcgggttatttcggcatttatgcttttctgcgtttcatcgccggtttttcttaacgccattttattaatgctgatttttgtttttaaattgaggtggtttccggcgtttggagccgggcgcagttttacggaaaatctgtattatctgtgcctgccggcttttgctttaagccttaatatggtagctctcataggacggataatccgcgaccgtatgattttggaattcaaatcaaattacgcccttgctctttcggcaaaaggaacgcctttcagccgtatcgttatgacacattgttttaaaaacaccttgattccggttatcactgtcgggggagtgcaaataggcgcaatggtgatcggggcggtgttagttgaaaatgttttcgccctcggcggaataggagccttgctcatcgaaggaattcaggcgtcggattatcctgttgtacagagtatcatgctttttcttgtcgcactgtttcttgtccttaattaa

SEQ ID NO: 2414 - protein, 298 aa, Unknown
  Obtained from environmental sample
  SIGNAL (1)...(24)
  DOMAIN (99)...(298): Binding-protein-dependent transport system inner membrane component
  misc_feature (1)..(298): Xaa is any amino acid
MNFIIRYVFKRLLLLAPVLLAVSAVIFFLIRLTPSDPIGSITSGRRINEETRASLTAQYFLDKSLPHQYFIWISNAVRGNLGDSFRHRQPVSALLAARLPVTIQLVFMSALFAVLLAVPAGIISAVKRHTIVDRVISAFMLFCVSSPVFLNAILLMLIFVFKLRWFPAFGAGRSFTENLYYLCLPAFALSLNMVALIGRIIRDRMILEFKSNYALALSAKGTPFSRIVMTHCFKNTLIPVITVGGVQIGAMVIGAVLVENVFALGGIGALLIEGIQASDYPVVQSIMLFLVALFLVLN

SEQ ID NO: 2415 - DNA, 804 bp, Unknown
  Obtained from environmental sample
  misc_feature (1)..(804): n is a, c, g, or t
gtgaatctcctgtataaagagcaggttaaaattatcccggtaaactatcagatatactggaaagacggtgaagatccgtttagcctgttaaaatccgaaattgataaacgaaatatcactcttaataaaattgcccttgagccccggatacccgctttattttccctgcccttgagcaagacctttccgtccgcaaattttgaacttggctcttcaattattgacccgctgcgccaatgcaaggacgaaaccgagcttgatcttatacgcaaggcctgtaaagagtcggatcgcgctttgggcgttttaattgacaaaggcgattactggatcggcaaaaccgaatccgcattcctcggcgaactatcggcggaaataagccggaacggcgtgtatgattttgacgcgtccgttcaggcgggcccaaacgcggcgataccccattacgccacgggcaaagcagtcattgaaaagggaaaatgcctgctctgcgatttctggggacgttacgcggggtactacacggactgcacaaggacttttcactttggcaaaccggaagcggaatttgagaaaatctacaatgttgttttggaagcgcacctggctgcggaagccaaagccctgcccggcaacctgcttgaagatgtcgacatggccgcccgctctgttatcgcgaagcacggctacggcgaatacttcacccaccgcaccggccacggccttggcatcgacgttcacgagggcgattccgtcaataccggggttagggttcccataaagcccggcatggtttttccatag

SEQ ID NO: 2416 - protein, 267 aa, Unknown
  Obtained from environmental sample
  DOMAIN (87)...(267): metallopeptidase family M24
  misc_feature (1)..(267): Xaa is any amino acid
MNLLYKEQVKIIPVNYQIYWKDGEDPFSLLKSEIDKRNITLNKIALEPRIPALFSLPLSKTFPSANFELGSSIIDPLRQCKDETELDLIRKACKESDRALGVLIDKGDYWIGKTESAFLGELSAEISRNGVYDFDASVQAGPNAAIPHYATGKAVIEKGKCLLCDFWGRYAGYYTDCTRTFHFGKPEAEFEKIYNVVLEAHLAAEAKALPGNLLEDVDMAARSVIAKHGYGEYFTHRTGHGLGIDVHEGDSVNTGVRVPIKPGMVFP

SEQ ID NO: 2417 - DNA, 606 bp, Unknown
  Obtained from environmental sample
  misc_feature (1)..(606): n is a, c, g, or t
ttgataggccttaacattctgcgtaaagaatttccttttggagaaaatcccgaaaaaagcagaaggggaatttaccgtatcagggataattgttaccgtttttggtatcgttatgtgtttacgaataaaaccgctattgagcatggcaccggcgcgtcgcttctaaaatcatttctgccggaattaaacagctacattggcggcccatttgaagatatttgtatgcagtacatgatacggatgaataatcttttggcgctgccttttgtttttacccagtccggaagatggtggggaacaaacccgaaaacccgtcagcaggaagaaattgatatggttttttccgatacaacccattttatttttgcggaatgtaaatggcgcaatgatttgaaagatacggcaattctgaaaacactgattgaaaagtcaaaattgttgattcgcgattattataatcatgattatacaaaacaaaaaggagtttttttctatttgttttccaaaatgcccttttcgaagtcttgtatatcccttgcgcaacagacgggcaatgttttcttaataggccaaaaggaactttttaaccctgctgaaaaaaggtga

SEQ ID NO: 2418 - protein, 201 aa, Unknown
  Obtained from environmental sample
  DOMAIN (35)...(139): Archaea bacterial proteins of unknown function
  misc_feature (1)..(201): Xaa is any amino acid
MIGLNILRKEFPFGENPEKSRRGIYRIRDNCYRFWYRYVFTNKTAIEHGTGASLLKSFLPELNSYIGGPFEDICMQYMIRMNNLLALPFVFTQSGRWWGTNPKTRQQEEIDMVFSDTTHFIFAECKWRNDLKDTAILKTLIEKSKLLIRDYYNHDYTKQKGVFFYLFSKMPFSKSCISLAQQTGNVFLIGQKELFNPAEKR

SEQ ID NO: 2419 - DNA, 642 bp, Unknown
  Obtained from environmental sample
  misc_feature (1)..(642): n is a, c, g, or t
ttggttcccgaggagattggcggcacgagggtgacgaccagcacggcgtttaccggcgacgcgacggtctacgcccagtggtcgcctatctacaaggtgactttcgatcccaacggcggtgtagtgacgacggtgtccgccaatacgggcgcgggcggaaaacttactacgttgcctacgccaacgctgaaggattacacttttgtaggttggtacactgagaaagagggcggtgtgcgtgtaacgacaagcacggtgtttgacggcgacgcgacaatttacgcccagtggtcgttgttcacccacgctaaggtgacattcagcgccggcgccaacggtacattgagggcgaccgtaggcggtctcccgattacccccggcgattcggtcgccatcggcaaggacatagtgttcacggcagtccccaacgatgggtacaaggtagccggttggacgatcaacggcacggttgtagtagacaccttctttacgtatgtacacgcgggtctgtcgaacacgaccacggtatcggtgacgtttgagcggagggtatccgttgcgtcgcccaaccgcgagattccaagcggcccgccggcggtgatttgcccccctaacgccggaaaagcccttgtcggcttttga

SEQ ID NO: 2420 - protein, 213 aa, Unknown
  Obtained from environmental sample
  misc_feature (1)..(213): Xaa is any amino acid
MVPEEIGGTRVTTSTAFTGDATVYAQWSPIYKVTFDPNGGVVTTVSANTGAGGKLTTLPTPTLKDYTFVGWYTEKEGGVRVTTSTVFDGDATIYAQWSLFTHAKVTFSAGANGTLRATVGGLPITPGDSVAIGKDIVFTAVPNDGYKVAGWTINGTVVVDTFFTYVHAGLSNTTTVSVTFERRVSVASPNREIPSGPPAVICPPNAGKALVGF

SEQ ID NO: 2421 - DNA, 576 bp, Unknown
  Obtained from environmental sample
  misc_feature (1)..(576): n is a, c, g, or t
ttggagaaacacgggcttccggtcctggatgtggacaaactgggacacaaggcccttgaacataaaaaagacgaagttttttcccgtttcggagatgaagtaaaaaatccggacggatcggtaaaccggcgcctgctgggggaaatggtctttgggaaaaaagacgagattaccgcgctggaagcgattgtccacccgcaggtcgaccgcatgacgctggaatggatcgcctcgcaaagcggtaaaacctgcgttatcaacgcggcagtgttgcacagattggctatctttggacagtttgacagcattatattggttcacgccccgttccttgtccggctgttacgggcaaaacgcagggacagacactcctgggtctcaattttaaggataatgatgagtcagaagcgttttacccttcaatatttagccggaaatgccgatatttacatagtagaaaacccgggaacaggagttttcttgccggattccaccggcaatgaaacaaagctggaacaacggatcggcgagttcctgtcggagcttgcaaataaaaaaactcagggaggattataa

SEQ ID NO: 2422 - protein, 191 aa, Unknown
  Obtained from environmental sample
  DOMAIN (2)...(163): Dephospho-CoA kinase
  misc_feature (1)..(191): Xaa is any amino acid
MEKHGLPVLDVDKLGHKALEHKKDEVFSRFGDEVKNPDGSVNRRLLGEMVFGKKDEITALEAIVHPQVDRMTLEWIASQSGKTCVINAAVLHRLAIFGQFDSIILVHAPFLVRLLRAKRRDRHSWVSILRIMMSQKRFTLQYLAGNADIYIVENPGTGVFLPDSTGNETKLEQRIGEFLSELANKKTQGGL

SEQ ID NO: 2423 - DNA, 660 bp, Unknown
  Obtained from environmental sample
  misc_feature (1)..(660): n is a, c, g, or t
ttgaacgaacggcgatcgcatttccagcgggatgttgttgtaaagacaaataacggtcatgtgatatatgcttctgattattatgacagtgtgggaaaagttctgtatggactgagcattattgaacaggatgaaaatggaggtcttgttaatctggtacgggtacagcgggctgcatggaacaaagaatattgggaattttccggttctgtaatttacgaatggaaaaacggttttttacagtaccggaattttgagggaagcgacaaataccgcgaagaccccgacactttcagaagaagcatggttaatattgaagagctgcatttttttgacgcacgtcttttggtaaatgaccttaagatcgcgggattgccatataccaacgccctcgcggattttcatcaccggttttctttttcatcggtttcttttatagtcgttgcgctctcaatttccatgggagggcgtttcaggaaaaacataatgttaatgagccttttatcaagcctggtgtccgcggttgtattttatgttatggaaatgataagcatgatgatggccaagctgggatatattcctccctttatcggggcatggtttccggtttttgtttttattatcgtggcgttcctgcttcttagaaccgcgaaaacttaa

SEQ ID NO: 2424 - protein, 219 aa, Unknown
  Obtained from environmental sample
  misc_feature (1)..(219): Xaa is any amino acid
MNERRSHFQRDVVVKTNNGHVIYASDYYDSVGKVLYGLSIIEQDENGGLVNLVRVQRAAWNKEYWEFSGSVIYEWKNGFLQYRNFEGSDKYREDPDTFRRSMVNIEELHFFDARLLVNDLKIAGLPYTNALADFHHRFSFSSVSFIVVALSISMGGRFRKNIMLMSLLSSLVSAVVFYVMEMISMMMAKLGYIPPFIGAWFPVFVFIIVAFLLLRTAKT

SEQ ID NO: 2425 - DNA, 555 bp, Unknown
  Obtained from environmental sample
  misc_feature (1)..(555): n is a, c, g, or t
atggttgaattgagcatgattactccaaacgggcaggatgaggcatggaatgagcttttgactattgccggaaaaacgtcagtttccagtggatcgggcaattcgcttggacggcctcattttgcggcatttcttataaagcataaaattgttaaaaacgtgaatcaagcgtttgcccgctatcttggagtgggaaaacctctgtatgtgccaaaagaggggcttgtttttgaggaagccgctgttctgatacgcgaatccggcggcatccccgtccttgcgcatcccatctcgctttatgtagcgtggggacgccttcccgaccttataaagatattaaaagatatgggactgatgggacttgaagcatggcatcccacagccaaacaaggctcctgccgtcggcttgaaactcttgccaggtctttaggactctacgtcactgagggcagcgactttcacggctccatccgccctgacagaaaactgggctattcctcaaaaggcagaaaaattgacgattctctcctggacgctattcctgaactgcggtaa

SEQ ID NO: 2426 - protein, 184 aa, Unknown
  Obtained from environmental sample
  misc_feature (1)..(184): Xaa is any amino acid
MVELSMITPNGQDEAWNELLTIAGKTSVSSGSGNSLGRPHFAAFLIKHKIVKNVNQAFARYLGVGKPLYVPKEGLVFEEAAVLIRESGGIPVLAHPISLYVAWGRLPDLIKILKDMGLMGLEAWHPTAKQGSCRRLETLARSLGLYVTEGSDFHGSIRPDRKLGYSSKGRKIDDSLLDAIPELR

SEQ ID NO: 2427 - DNA, 381 bp, Unknown
  Obtained from environmental sample
  misc_feature (1)..(381): n is a, c, g, or t
atgatgagcaggtttcccgaaatagtgattattcccgccgccgccattaccgagagcgcgattgacagatcaagcgcggctccgtcttttttcaatcctgcgggagcaagattaattaaaatcctgtccagcggaaaactaaaccccgaattcctaaaagccgcccgcactctgtcgcgcgcttccctgaccgctccctccgcaagccctgaaatgtcaacgccgggaattcccctgcgtatatccgtctcaacccggacaatgattccgccggcccctgagggcataaatgtaaacacacccataaaatctcctgcctatatatggcgtgcagatgcgtggcgcttgaccgaaaatgagaaaattttaattattttttag

SEQ ID NO: 2428 - protein, 126 aa, Unknown
  Obtained from environmental sample
  misc_feature (1)..(126): Xaa is any amino acid
MMSRFPEIVIIPAAAITESAIDRSSAAPSFFNPAGARLIKILSSGKLNPEFLKAARTLSRASLTAPSASPEMSTPGIPLRISVSTRTMIPPAPEGINVNTPIKSPAYIWRADAWRLTENEKILIIF

SEQ ID NO: 2429 - DNA, 501 bp, Unknown
  Obtained from environmental sample
  misc_feature (1)..(501): n is a, c, g, or t
atgggtgtgtttacatttatgccctcaggggccggcggaatcattgtccgggttgagacggatatacgcaggggaattcccggcgttgacatttcagggcttgcggagggagcggtcagggaagcgcgcgacagagtgcgggcggcttttaggaattcggggtttagttttccgctggacaggattttaattaatcttgctcccgcaggattgaaaaaagacggagccgcgcttgatctgtcaatcgcgctctcggtaatggcggcggcgggaataatcactatttcgggaaacctgctcatcatgggagagcttgagctgtccggcaggattcgccctgtgcgcggcgttcttgcggcaattgtagcgggacttgccgaaggtatatgcgaatttatcgttcccgcgcaaaatgcggcggaagcggcgattttaacggataaaggcgtccattttaccgccgcggaaaattacagggncgcgttcatgcgctgggtatga

SEQ ID NO: 2430 - protein, 166 aa, Unknown
  Obtained from environmental sample
  misc_feature (1)..(166): Xaa is any amino acid
MGVFTFMPSGAGGIIVRVETDIRRGIPGVDISGLAEGAVREARDRVRAAFRNSGFSFPLDRILINLAPAGLKKDGAALDLSIALSVMAAAGIITISGNLLIMGELELSGRIRPVRGVLAAIVAGLAEGICEFIVPAQNAAEAAILTDKGVHFTAAENYRXAFMRWV

SEQ ID NO: 2431 - DNA, 828 bp, Unknown
  Obtained from environmental sample
  misc_feature (1)..(828): n is a, c, g, or t
ttgtatattttagcccttatatatacttgtgaggactatatattatatatgagaaataaatttgatgttatattgataatctttgtaatggttttaccgttctctcttttgtcttgtgaaaaagaagagagctggaaacccggaatgcccttgccaaaagagaaggtaaaagtaggtgtagtacacataaccgaccctttctctgaaagttccggctactctcatgcccatcaaaacgggattgaagatatgaaaaacaggctagaccttgcagacagccaaataatctataaagtccatgtggacgatgcgaatttaatgagcgttgaaaatgcccatcgtgagcttatagcacaaggagctaacatcatcttttccacaagctggggttatatggatatctgcgaaaaactctcgcaggaatatccctctattgtatttgcccatgccacagggaataagtacaataaaaccaactttacaaattactttggcagggtatatcaagcacgctatctagctggcatagtagcgggattaaaaacaaaaactaacaagataggttttgtggctgcgcaaggcaaggaaaacagcgaagtgaccggaggtcttaacgcttttgctataggagtggaaaaagtaaaccccaaggcgcgaatttatgtaaaagttacccatagctggtatgaccctataggggaagcgtttgctgctcgtacccttatcgccgagggtattgatgttattgcacaacacagcgatactccaactcctatgatagaagcggaaaaagctggagtatggggaataggctctcggccaatctga

SEQ ID NO: 2432 - protein, 275 aa, Unknown
  Obtained from environmental sample
  DOMAIN (25)...(274): Basic membrane protein
  misc_feature (1)..(275): Xaa is any amino acid
MYILALIYTCEDYILYMRNKFDVILIIFVMVLPFSLLSCEKEESWKPGMPLPKEKVKVGVVHITDPFSESSGYSHAHQNGIEDMKNRLDLADSQIIYKVHVDDANLMSVENAHRELIAQGANIIFSTSWGYMDICEKLSQEYPSIVFAHATGNKYNKTNFTNYFGRVYQARYLAGIVAGLKTKTNKIGFVAAQGKENSEVTGGLNAFAIGVEKVNPKARIYVKVTHSWYDPIGEAFAARTLIAEGIDVIAQHSDTPTPMIEAEKAGVWGIGSRPI

SEQ ID NO: 2433 - DNA, 714 bp, Unknown
  Obtained from environmental sample
  misc_feature (1)..(714): n is a, c, g, or t
atgattaatgaagaactgatatcaaaaagccctctccgtatccttgagaagtccacacagggcggcgtgggcaagggcaatatcggcattatcgccgcgcgcatgggggtaggcaagaccgcgtgtctggtgcatatcgcgaccgaccagctcttgcagggcaagcacatcatccacgtctccttcgcggctaacaccgcgcatatcacagcgtggtacaagaatatcttcgaggagatcgcgagccgcctgtccgtaaaagacgtgcaggacgagctggacaagatcgcccgcaaccgcgtgatcatgagcttcaagcaggacggcgtgacggtcgaccaggtgctcggcagcgtcaaggcgctgatccgcgacggccacttcgtggcggacgtcgtggttatcgacggctacgacttcaccagttccaacaccgccgacttcgccgcgttcaaggctttcgcggaggagctgcagatttcgatatggttcagcgccaccacacaccgcgacgacccgtctaaggacgacaagggcgtcccgatgctcctctccccctacatgaaggacacggcgatcctgattttgatggagccgatggtgggatacgtccacctgcaccttgtaaaagaccatgacatcttcccggccccggacagcctgcatttgaaattggacccgcaggtgatgttgatagccgaagagcctgcgtag

SEQ ID NO: 2434 - protein, 237 aa, Unknown
  Obtained from environmental sample
  misc_feature (1)..(237): Xaa is any amino acid
MINEELISKSPLRILEKSTQGGVGKGNIGIIAARMGVGKTACLVHIATDQLLQGKHIIHVSFAANTAHITAWYKNIFEEIASRLSVKDVQDELDKIARNRVIMSFKQDGVTVDQVLGSVKALIRDGHFVADVVVIDGYDFTSSNTADFAAFKAFAEELQISIWFSATTHRDDPSKDDKGVPMLLSPYMKDTAILILMEPMVGYVHLHLVKDHDIFPAPDSLHLKLDPQVMLIAEEPA

SEQ ID NO: 2435 - DNA, 489 bp, Unknown
  Obtained from environmental sample
  misc_feature (1)..(489): n is a, c, g, or t
gtgatgctaaacgtcgatctcgtgtggattcacgcgtctgcgaccgtgctggaatcgacgctggcgcactcgctcaacatgcgcggcgttaagacgctggtggtcgagatgggcgtcggaatgcgcataacagaaagcttctgcactcagctcctggacggcatactgaacctgctgcgcaaactgggaatatggaacggggccggcgaaagagcatgtccggaaatacgggcgccgctcgtctcaaaggaccataacgtcggttttctaaactcggacgcgggggggatatttctcccgcgggccgcgcacgccagccatgtaagctcaggcgattgcataggcattgtgatagacccgcttacaggcaatgtcgtcgaagaaacgcaagcgccctgcgacggcttgctgtttacgctgcgggaatacccggtggtattcggcggctcgcttctggcgcggattatggaggactccaaaaatggttaa

SEQ ID NO: 2436 - protein, 162 aa, Unknown
  Obtained from environmental sample
  misc_feature (1)..(162): Xaa is any amino acid
MMLNVDLVWIHASATVLESTLAHSLNMRGVKTLVVEMGVGMRITESFCTQLLDGILNLLRKLGIWNGAGERACPEIRAPLVSKDHNVGFLNSDAGGIFLPRAAHASHVSSGDCIGIVIDPLTGNVVEETQAPCDGLLFTLREYPVVFGGSLLARIMEDSKNG

SEQ ID NO: 2437 - DNA, 702 bp, Unknown
  Obtained from environmental sample
  misc_feature (1)..(702): n is a, c, g, or t
gtgatgaggacgggaagtgctgctgatttgatgcgcgctttattcggatcgctttcggacgacggcggctatcgagcgggtggccgccgttattttgtgcgggcggctgtcgcgttgctgcttgccgcctccgggccgccggcgtcggcgcagtggcttcacgccgcgccgggcgccgcctccgccgccccgaccgtcgctccggagatagtgcggacggtgaaacacgacccgtcggcgttcactcaggggctgctcttccacgattctacgctctacgagagcacggggcttgtgggcttctccggccttcgccgcttggacccgcgcagcggcgcgacgcgttactccgccgcgctcggcggcgactacttcgcggaggggatcgcggtcttgggctccgaactggtgcagctcacgtggaaaaacggggtcgcgctgcgctacgagttaaagacgctgcgccgggggacgctccccccgttcagctataggggcgagggatgggggcttacgaacgacgcgacgcgcttcataatgagcaacggctcagatacgctctacttccgcgacaagaagttcgagatcacgcgggccgtgccggtcacgcttgaacggcaagccgctggcgcacctgaacgaattggaatacgcgcgggggcaacgttctacgccaatggtctggtacaaagaatttcatag

SEQ ID NO: 2438 - protein, 233 aa, Unknown
  Obtained from environmental sample
  DOMAIN (30)...(226): Glutamine cyclotransferase
  misc_feature (1)..(233): Xaa is any amino acid
MMRTGSAADLMRALFGSLSDDGGYRAGGRRYFVRAAVALLLAASGPPASAQWLHAAPGAASAAPTVAPEIVRTVKHDPSAFTQGLLFHDSTLYESTGLVGFSGLRRLDPRSGATRYSAALGGDYFAEGIAVLGSELVQLTWKNGVALRYELKTLRRGTLPPFSYRGEGWGLTNDATRFIMSNGSDTLYFRDKKFEITRAVPVTLERQAAGAPERIGIRAGATFYANGLVQRIS

SEQ ID NO: 2439 - DNA, 852 bp, Unknown
  Obtained from environmental sample
  misc_feature (1)..(852): n is a, c, g, or t
gtgcataacggcaaatataaaggttncacaggcaaggattttacaacggtggtgcagattggcattggcggctccgacctgggacctcgcgccatgtatattgcccttgataactgggcggtcaaggaaggcaaaaagaaacttgacgcgaaatttatttccaatgttgaccctgatgacgcttcagcggtaatcgcgtcctgtaatcttgaacagtgcctgttcattttagtttccaagagcggcacgacccaggaaacattagccaatgagctttttgtaaaagacaaacttaaaaaaatgggtcttcacccaagcaaacagatgattgccgtaacaagcgagacaagccctcttgcgcgtaacagcgagtatcttgactccttctacattgacgactatgtgggaggccgttattcgtcatcatcggccgtaggcggctgtgttctgtccctcgccttcggtcctgatgtgtttaaggagttccttgccggagccgccgaagcggacaaaatggctttagaaaaagatattcttaaaaacgccgcccttcttgacgctttaatcggtatatgggaatgcaactttttaatgtacccgtacacggcggttttaccgtacagtcaggcgctttctcgctttcccgcgcatttacagcagatggacatggaatcaaacggcaagagggtaaaccgctttggggaacccgtcaaatacggaaccggtcccgttatttttggcgaaccgggaacgaacggccaacattcattttatcagcttcttcatcaggggacgggcattgtcccgcttcaatttatcggctttttgaaagccagagaggcgatgacgtga

SEQ ID NO: 2440 - protein, 283 aa, Unknown
  Obtained from environmental sample
  DOMAIN (1)...(283): Phosphoglucose isomerase
  misc_feature (1)..(283): Xaa is any amino acid
MHNGKYKGXTGKDFTTVVQIGIGGSDLGPRAMYIALDNWAVKEGKKKLDAKFISNVDPDDASAVIASCNLEQCLFILVSKSGTTQETLANELFVKDKLKKMGLHPSKQMIAVTSETSPLARNSEYLDSFYIDDYVGGRYSSSSAVGGCVLSLAFGPDVFKEFLAGAAEADKMALEKDILKNAALLDALIGIWECNFLMYPYTAVLPYSQALSRFPAHLQQMDMESNGKRVNRFGEPVKYGTGPVIFGEPGTNGQHSFYQLLHQGTGIVPLQFIGFLKAREAMT

SEQ ID NO: 2441 - DNA, 654 bp, Unknown
  Obtained from environmental sample
  misc_feature (1)..(654): n is a, c, g, or t
ttgggtgatgaaaatcttgccgacgtgttgcgcgacggcgtgtcgtacataatttcaagcatacagtcctctaaaatcgtgcgcaaggcccgcgcgcccgttttaagttccatcgcaagggccgcgacggcctccaccgccccgtggtcaaaatcaagttcgatattgtcaagggcgaacattttcttgtactgcttgattagggcgttctttggcgccgtcaaaatcttgacaagggccgccttgtctagggggttaaggcccacaatgattggcacgcggccgacaaactccgggattattccgtatttgaccaaatcgacgggcgaaacattatgtatattgctaatttccgtgctgtcggtcgtcacgtttttaagtgtagccccaaaacccagcgaggaactgtttagccgcgaggaaacaattttttcaaggccaacaaacgccccgccgacgatgaaaagtatgttttgggtgttgatttggatacattcttggttggggtgtttgcgcccgccctggggtgggacgttggcgacggtcgcctcgatgatttttaacagggcctgttggacgccctcgcccgaaacgtcgcgcgtaatggaccggttttcgccctttttggcgattttgtcgatttcgtcgatataa

SEQ ID NO: 2442 - protein, 217 aa, Unknown
  Obtained from environmental sample
  misc_feature (1)..(217): Xaa is any amino acid
MGDENLADVLRDGVSYIISSIQSSKIVRKARAPVLSSIARAATASTAPWSKSSSILSRANIFLYCLIRAFFGAVKILTRAALSRGLRPTMIGTRPTNSGIIPYLTKSTGETLCILLISVLSVVTFLSVAPKPSEELFSREETIFSRPTNAPPTMKSMFWVLIWIHSWLGCLRPPWGGTLATVASMIFNRACWTPSPETSRVMDRFSPFLAILSISSI

SEQ ID NO: 2443 - DNA, 546 bp, Unknown
  Obtained from environmental sample
  misc_feature (1)..(546): n is a, c, g, or t
atgtttgagaggtatcacgcttggttggtgtccgaaaacagcaagatcaacctattttcaagacagatgaacgcggacgagatatggacggtgcattttttggactcgcttttgtcaaccaagtacgtggagttcggcgggcgcagcgttttggacttcggaaccggcggggggttgccggggattccgctggccattgtctttcgggacgccaaggttacgctgcttgattcaaagaagaagaagatcgcggcggttaggggggcggcggagactttggggcttgggaactgcgagttttcggatcaacggatagaggatattgccgggcgggggtgctttgacataatcgtttcccgctccgtcaagatcgagcctgcctataaaccgatattgctgcggctgctcaaaccggaggggaagattgtcctttataagagcagaattttcgacgacgtgtatcaatttgacaatgtggagatattcaacgcggaggcggcggagttggggctgggggagcgtaggattgcggttataaggggatga

SEQ ID NO: 2444 - protein, 181 aa, Unknown
  Obtained from environmental sample
  DOMAIN (2)...(177): Glucose inhibited division protein
  misc_feature (1)..(181): Xaa is any amino acid
MFERYHAWLVSENSKINLFSRQMNADEIWTVHFLDSLLSTKYVEFGGRSVLDFGTGGGLPGIPLAIVFRDAKVTLLDSKKKKIAAVRGAAETLGLGNCEFSDQRIEDIAGRGCFDIIVSRSVKIEPAYKPILLRLLKPEGKIVLYKSRIFDDVYQFDNVEIFNAEAAELGLGERRIAVIRG

SEQ ID NO: 2445 - DNA, 627 bp, Unknown
  Obtained from environmental sample
  misc_feature (1)..(627): n is a, c, g, or t
atggcaaaacttggtgaaaacactttccacgagcacaagcgcattgtctttaacggcaacaactattccggagaatgggtaacagaagcgagcaatcgcgggctttcaaacctaaagaatacagttgaagccatgccttcctttatttccaaaaagagcatagaagtgttcactcagcaccgtgttctaacagagcaagaaattcactcacgctttgaaattctaatggaaggctactgcaaagtgatccatatagaagctctaactatgatagatatggttaagggagagattattccagcctgcatagattaccaaaacgaattggcaaatcttttgaatcagaaaaaagcttgcgggcaatatgataattcgctagaagctcatttgctggaaaaaatttccaaactatctgctactttgctaaaaaagctgaacactttggaaacctcaattttagattccaaagaagaacaagatgttacagcccacgcaagtttctacagagataaggttttcacatccatatctgagcttagacttgttgttgacgagctagaaacattagtggcaagaaaacattggcctttcccaacttatgcggaactgctttacagcgtaatttaa

SEQ ID NO: 2446 - protein, 208 aa, Unknown
  Obtained from environmental sample
  misc_feature (1)..(208): Xaa is any amino acid
MAKLGENTFHEHKRIVFNGNNYSGEWVTEASNRGLSNLKNTVEAMPSFISKKSIEVFTQHRVLTEQEIHSRFEILMEGYCKVIHIEALTMIDMVKGEIIPACIDYQNELANLLNQKKACGQYDNSLEAHLLEKISKLSATLLKKLNTLETSILDSKEEQDVTAHASFYRDKVFTSISELRLVVDELETLVARKHWPFPTYAELLYSVI

SEQ ID NO: 2447 - DNA, 327 bp, Unknown
  Obtained from environmental sample
  misc_feature (1)..(327): n is a, c, g, or t
atggatacaaaaataccatatatagataaaataattcctataatcgtctctttagcgtcaccggatcaaattatactttttggttcatacgcgcgcggagattataccgataaaagcgatattgatttgctgattattaaaaaaagtttaaaagggggacgcgaaatctgcggcttaatttacagagctttttttgataatggaatcggggttcctgttgatttacttaccattgattataacagatatatagaattaaataatgaaattggatatatatataaaaaaataaaagaagaaggaaaggttatctatggctcgttatga

SEQ ID NO: 2448 - protein, 108 aa, Unknown
  Obtained from environmental sample
  DOMAIN (4)...(104): Nucleotidyltransferase domain
  misc_feature (1)..(108): Xaa is any amino acid
MDTKIPYIDKIIPIIVSLASPDQIILFGSYARGDYTDKSDIDLLIIKKSLKGGREICGLIYRAFFDNGIGVPVDLLTIDYNRYIELNNEIGYIYKKIKEEGKVIYGSL

SEQ ID NO: 2449 - DNA, 381 bp, Unknown
  Obtained from environmental sample
  misc_feature (1)..(381): n is a, c, g, or t
atggctcgttatgatgaatggcttaaacgggcaaaaagcagtcttgaattagcaaaggcaagaatcaataatataatatattttgaagatttatgttatcaatctcaacaagccgttgaaaaggcattgaaagggcttttaatattttattgcgttgaaccggagtacacccacaatattgaaatattattaaatgaagttaaaaaatttacggatattcctgaaaatattaaagaggcggcgctgctaaccaattatgcagttcaaacaaggtatcccggcgaatatgatgaaattacaaaagaagaatatgaaaattgtctaagaattgcaaaaaactgtttggattgggttgaaaataaaataatgaatctgatttag

SEQ ID NO: 2450 - protein, 126 aa, Unknown
  Obtained from environmental sample
  DOMAIN (4)...(121): HEPN domain
  misc_feature (1)..(126): Xaa is any amino acid
MARYDEWLKRAKSSLELAKARINNIIYFEDLCYQSQQAVEKALKGLLIFYCVEPEYTHNIEILLNEVKKFTDIPENIKEAALLTNYAVQTRYPGEYDEITKEEYENCLRIAKNCLDWVENKIMNLI

SEQ ID NO: 2451 - DNA, 816 bp, Unknown
  Obtained from environmental sample
  misc_feature (1)..(816): n is a, c, g, or t
atggatcaaaagcttgatctcctttgggcatctcccgaatgcacgcaccattcaaacgcccgcggcggccggccgcggagcgaacagggcagggcatctgcatggcttatcctaaagtggctttccgagctttacgtcgaccgtgttatcatcgagaacgttgctgagttcctttcctggggcccgcttgatgccgaagggaagcctgttaaatctcagaaaggaaaaacctttaaagctttcgtcgcttcaatccggagccttggctactcagtcgattggcgtgttctctgtgcagcggactatggcgatcctacgacccgcaaaaggcttttcattcaggcagttaaagggcgcaaaaaaattttgtggccgcagattacccatatggacggcagcgccaacctaatgggctacctcccatggcggccggcgcgtgacattatcgacttttccgtcccaggggaatccatattcagccgcaaaaaacccctttcagtgaatacaataaaacgcatagctgcagggattgaaaaatactggggcgatttcgcggagccgtttttggctgttttgtatgggactaacaatacccattctctggataagcccttgtctaccataactggatctggtgcccaccatgcgcttatagagccctttcttttgcctaatgaaggtttttatcgcagaaaccaaccgcgttccattgacgatccaatttcaacgataaccgcttcgcgcggatttggggctttgatagagccagttgcattcatgctcggtcagcaatccggatctgctgcaaggtcataa

SEQ ID NO: 2452 - protein, 271 aa, Unknown
  Obtained from environmental sample
  misc_feature (1)..(271): Xaa is any amino acid
MDQKLDLLWASPECTHHSNARGGRPRSEQGRASAWLILKWLSELYVDRVIIENVAEFLSWGPLDAEGKPVKSQKGKTFKAFVASIRSLGYSVDWRVLCAADYGDPTTRKRLFIQAVKGRKKILWPQITHMDGSANLMGYLPWRPARDIIDFSVPGESIFSRKKPLSVNTIKRIAAGIEKYWGDFAEPFLAVLYGTNNTHSLDKPLSTITGSGAHHALIEPFLLPNEGFYRRNQPRSIDDPISTITASRGFGALIEPVAFMLGQQSGSAARS

SEQ ID NO: 2453 - DNA, 306 bp, Unknown
  Obtained from environmental sample
  misc_feature (1)..(306): n is a, c, g, or t
ttgtccattgaagaaatgcttggcgttaccattaacgaaggcgctctttactattgtactcccaaaaggcggactgtcattgaattcaatgcagatatcagatcagaaacagaggcgacaatttgcagattgcacgagctcattcggtcaagacaaacaccgaaggcaatatatagcgataaatgcaagcagtgctctctcaaagacatttgcttacctcaaatcagtaattatgggactgtaatggactatatagaacaagaacttggcataagcgaggaacattccgatgaaacgactccttaa

SEQ ID NO: 2454 - protein, 101 aa, Unknown
  Obtained from environmental sample
  misc_feature (1)..(101): Xaa is any amino acid
MSIEEMLGVTINEGALYYCTPKRRTVIEFNADIRSETEATICRLHELIRSRQTPKAIYSDKCKQCSLKDICLPQISNYGTVMDYIEQELGISEEHSDETTP

SEQ ID NO: 2455 - DNA, 594 bp, Unknown
  Obtained from environmental sample
  misc_feature (1)..(594): n is a, c, g, or t
atgcataataagcttaataaccgcgccgttcttcaaacatacctgtcttttatgcaaaacaaccttaaccagcgggcaaaaagccgtttgcttgaagaatttgcgcgaatagacatggacaggatcaatatacagacagtagggggaaatctgcgggaagtggcaggaaagatacagcttattccttattacgacggaaaccttgtgaaggatattgtcaggcaggttttaggtacgctgaccaatcctgccgatggtctccatgttgacagggtttatacggtggaagttcttaatgggaccactgtatctggtcttgcgggaaggaccgctgaaattttacggggatttggttatgatgtcatttctatcggtaatgctccccataccggctatgaaaacaccgtagtcatagatcgctcaggcgtggaggggatggcagggtattttgccgggataatccgttgtaaaattatcagccaggagaattccagcagagaaagtccggaagctatgcaaaatgttgagtatcgttctgattttactcttataataggaagggattttaatggaaggtatgttactggaaactga

SEQ ID NO: 2456 - protein, 197 aa, Unknown
  Obtained from environmental sample
  misc_feature (1)..(197): Xaa is any amino acid
MHNKLNNRAVLQTYLSFMQNNLNQRAKSRLLEEFARIDMDRINIQTVGGNLREVAGKIQLIPYYDGNLVKDIVRQVLGTLTNPADGLHVDRVYTVEVLNGTTVSGLAGRTAEILRGFGYDVISIGNAPHTGYENTVVIDRSGVEGMAGYFAGIIRCKIISQENSSRESPEAMQNVEYRSDFTLIIGRDFNGRYVTGN

SEQ ID NO: 2457 - DNA, 666 bp, Unknown
  Obtained from environmental sample
  misc_feature (1)..(666): n is a, c, g, or t
atgaaaaatgttcccatattgttttggaaaaggctccggggtttattcctggttgtacttttcgtattatttttttttcaattacctaaaaccgttttgctctacgcccagagcagcccgaccggaggcatcgccggttctgatctggataccgtccaggccagagaagaattccgcataggcgtacaagcctactatcgtttttcatataacgaagctatccgctcttttgaaagggccctttcgttctggccaggtgagcctttgatcctcgactggcttggaaaatcctattaccgctcaggcattgaaaacaccgctttcagggtctggcaggccgcagccgaagggtacggcatttcatccggccagggaatgttaatctccagccggatggagacgctgaggaaccgccggctcctgttgccggtagccgacgacgaagtgcgctatgtcgagtcaggcagataccccggcaaaaacaacgaaatggtttattttcgtcagccgacttcggtacttgccctgaatgacggttctgcctgggtagtggcctacggaagcaacgaaattctccgcattgatccaaacggcatcatacgcgaaagaaggcgggggccgctcaacggctttgacaggccttacgatctggttaagggctcctga

SEQ ID NO: 2458 - protein, 221 aa, Unknown
  Obtained from environmental sample
  SIGNAL (1)...(30)
  misc_feature (1)..(221): Xaa is any amino acid
MKNVPILFWKRLRGLFLVVLFVLFFFQLPKTVLLYAQSSPTGGIAGSDLDTVQAREEFRIGVQAYYRFSYNEAIRSFERALSFWPGEPLILDWLGKSYYRSGIENTAFRVWQAAAEGYGISSGQGMLISSRMETLRNRRLLLPVADDEVRYVESGRYPGKNNEMVYFRQPTSVLALNDGSAWVVAYGSNEILRIDPNGIIRERRRGPLNGFDRPYDLVKGS

SEQ ID NO: 2459 - DNA, 771 bp, Unknown
  Obtained from environmental sample
  misc_feature (1)..(771): n is a, c, g, or t
atggaccgggccgatatgtacggcgtgtcccagttataccagttgcggggcagggtaggccgcagcgaccgtgtcgcttacgcttacctgctgtacccgcagggcgggacgattacggaactcgccatgaaacgcctccaggttatttccgattttaccgaattgggttcaggtttcaagatcgccatgaaggacatggagatacgcggcgcgggaaatctcctgggccgtgaacagtcaggcgacatttattccgtaggttttgatctgtacctcaagctgctggatgacgctgtcaggcgtcttgagaactcaagttacgagggagaaacggaaaccctgctggagctggaatattccggcttcattccggacagctatattgattctcagcaggaaaaaatggaagcatataaaatgatcgccgcggtaagggacaaggaagagcttgagcgagtctacgcggatctgcaggatcgttttggcccgcctcccgatgaggccgcttcgcttctggcgcttgctgagatcagaataatctgccgcgagcttgccgtgtcgtcgctgagggaaagggaaggcgttgtaagggtggagttcgcaaaggtttcccatgtaaaagttgacaggcttatacggctgatgcaggaatccatgggcaaggtgaaacttgatcccaaaaagcccaatgtgcttatgcttgccgccggcaatataggcttgaaggagaagagtgagtttataagggagaagctggcagtgctggcgtga

SEQ ID NO: 2460 - protein, 256 aa, Unknown
  Obtained from environmental sample
  DOMAIN (116)...(224): TRCF domain
  misc_feature (1)..(256): Xaa is any amino acid
MDRADMYGVSQLYQLRGRVGRSDRVAYAYLLYPQGGTITELAMKRLQVISDFTELGSGFKIAMKDMEIRGAGNLLGREQSGDIYSVGFDLYLKLLDDAVRRLENSSYEGETETLLELEYSGFIPDSYIDSQQEKMEAYKMIAAVRDKEELERVYADLQDRFGPPPDEAASLLALAEIRIICRELAVSSLREREGVVRVEFAKVSHVKVDRLIRLMQESMGKVKLDPKKPNVLMLAAGNIGLKEKSEFIREKLAVLA

SEQ ID NO: 2461 - DNA, 828 bp, Unknown
  Obtained from environmental sample
  misc_feature (1)..(828): n is a, c, g, or t
atgccggttgaagtgctgggtttcgagggaatccccaacgccggagacnccttgcaggtagtggcggatgaaaaagtcgcccgcgaatattcgtccaagcggcaggaactcaaacgtttcgaggatgcgaagaatttcagaaaagtaacggttgacaatcttcatgacatgatcagcgacggaaccatacaggaactgaaagtgatcatcaagtccgacgtgcagggttcggcggaagcgcttaaaagcagcctggaaaaactttccaccaaagaaattcgtcttcatgtcatacaggccctgcccggccccatcaacgagggcgatgtcgatctggcaatcgcttccaaggccattatcatcggctttaatgtgcggcccctgcccaaagccaaaactctggcagaacaggagaaagttgacatacgcaagtacaacgtcatttacaaggcggtcgaggaaattcatcaggcaatggaaggaatgctcaagcccgacaccagagaagaaattatcgcaacggtcgaagtgcgtgataccttcaaagtacccaaaatcggaaccattgccggctgttatgtgcaaaccggtacggtcaagcgtagcgccagcgttaatgtaatccgcgcggagatagtgattcactcgggcaaaattgcctcgttgcggcgtttcaaggacgatgcccgcgaagtcgccgccggttacgagtgcggcatcgggcttgaaggttttgacgatatacaggtaggcgatcagtttgaggtaatcgaaatgatcgaggttgcccgcaaactcagtacgcccaacaacagcgccgctacataa

SEQ ID NO: 2462 - protein, 275 aa, Unknown
  Obtained from environmental sample
  DOMAIN (187)...(255): Elongation factor Tu domain 2
  misc_feature (1)..(275): Xaa is any amino acid
MPVEVLGFEGIPNAGDXLQVVADEKVAREYSSKRQELKRFEDAKNFRKVTVDNLHDMISDGTIQELKVIIKSDVQGSAEALKSSLEKLSTKEIRLHVIQALPGPINEGDVDLAIASKAIIIGFNVRPLPKAKTLAEQEKVDIRKYNVIYKAVEEIHQAMEGMLKPDTREEIIATVEVRDTFKVPKIGTIAGCYVQTGTVKRSASVNVIRAEIVIHSGKIASLRRFKDDAREVAAGYECGIGLEGFDDIQVGDQFEVIEMIEVARKLSTPNNSAAT

SEQ ID NO: 2463 - DNA, 333 bp, Unknown
  Obtained from environmental sample
  misc_feature (1)..(333): n is a, c, g, or t
atgcggcaaaaagtcgcctttgttctttccgtagcccatgatccggatattatcatttttgacgagccaacaaacggcttggacattgttgccgccagaacggtagtggattttctgcttgaaatgaaaagacaagggaagtctattttgctatccacccacattttcagccttgtagaaaagatttgtgacagggtgggaatcatcattgacgggcgattggttttttgtgactccatccctcgaataattcagaaaacaactttagaagattgtttcttctcgctttacgatcagcctcaagttcatagcaatttggaaataaccaattga

SEQ ID NO: 2464 - protein, 110 aa, Unknown
  Obtained from environmental sample
  misc_feature (1)..(110): Xaa is any amino acid
MRQKVAFVLSVAHDPDIIIFDEPTNGLDIVAARTVVDFLLEMKRQGKSILLSTHIFSLVEKICDRVGIIIDGRLVFCDSIPRIIQKTTLEDCFFSLYDQPQVHSNLEITN

SEQ ID NO: 2465 - DNA, 549 bp, Unknown
  Obtained from environmental sample
  misc_feature (1)..(549): n is a, c, g, or t
ttggtcagattcggccgagccggcaggtacgttctgctcctccatgatcaaaaagcgctgctggagggcctggaaaaaggggtaataaccggcgaagaactttacaatcttgacgatcagagcctttttttccttttaaaagaaaaaaaatcaagcgggaagcttgcgcaagcggtatggaacggcagactctatttcacagccgtggaaattccctttaaccaacaggttcacgcccccctgaaggacattgccaaaagatccctccatgaagaacggcttgccggggaattccgccgcgcgggcatcccgcttggcgacggcgaccttatcattgacgtgcccgagccggtctcatttgagacaggccttttcgtgctggacgaaaaccgcagctttgcggaaagctccagcgccttcaagacaacaacgctggattcctttgtaaaaacactgtatacgatcaggatatttattaacccggatttcagtgaaaaggtagagacattaccggaactatctgctatacttaaaaaaggagaattatga

SEQ ID NO: 2466 - protein, 182 aa, Unknown
  Obtained from environmental sample
  misc_feature (1)..(182): Xaa is any amino acid
MVRFGRAGRYVLLLHDQKALLEGLEKGVITGEELYNLDDQSLFFLLKEKKSSGKLAQAVWNGRLYFTAVEIPFNQQVHAPLKDIAKRSLHEERLAGEFRRAGIPLGDGDLIIDVPEPVSFETGLFVLDENRSFAESSSAFKTTTLDSFVKTLYTIRIFINPDFSEKVETLPELSAILKKGEL

SEQ ID NO: 2467 - DNA, 336 bp, Unknown
  Obtained from environmental sample
  misc_feature (1)..(336): n is a, c, g, or t
atggatatacataatatttcagaagacaatgtactccaggcagtgcatgaaatttttgacgccgtaaaaaaacaaggtaacccggaaaaactgtgcctttgtgaacagtgtaaactggatacaatttgttatacgcttaaccgcattgagccgaggtacgtcgtttccaacagggggcttacccgcgttgaacgggacggttcggaacggcatcaggcgcacgccgacgttaccgccctggtttacaagggactgcagcaggttaatcataatctgcgcccaaccgctaaccatgatggttccttgcccgaaaacgtagtaaggaaacttctttga

SEQ ID NO: 2468 - protein, 111 aa, Unknown
  Obtained from environmental sample
  misc_feature (1)..(111): Xaa is any amino acid
MDIHNISEDNVLQAVHEIFDAVKKQGNPEKLCLCEQCKLDTICYTLNRIEPRYVVSNRGLTRVERDGSERHQAHADVTALVYKGLQQVNHNLRPTANHDGSLPENVVRKLL

SEQ ID NO: 2469 - DNA, 744 bp, Unknown
  Obtained from environmental sample
  misc_feature (1)..(744): n is a, c, g, or t
ttgaagagattgacaggaaaaaccgatgaagattatcgactgtatctaaagctgcgtgaagattatatcggttcgcctaccttctattttgacatggcggagtggttttatacgcacaacgacaagaagctcgcgcttcgcgtgcttacctccatagccgatttggatctcgaaaacgcaatgctttaccgattgctcggctatcggctgaaagagtacggcgagtacgcgatggagaagtttgtctgccgaaaggtagttaagtggcgcccgatggaaccgcagagccaccgcgactacgccttagctctcgccgacaacggagaggcgcaggcggcgctcgactcactctacggactgctcaaaaagacctactcggaaaatatcggcaaccgcagcaaagggatagacgagatcgtgattacggaaataaatcaattgatcgccaaaaaaccgaaactgaacacgtcaaagatcgataccagccttataacaaacatcgcaatggatgttcgcgtggtcataaactggaatatgaacaataccgacatcgacctgcacgtgctggatccatacgatgaaatgtgctattaccgccacaacgcaacacaaatcggcggacgaataagcgccgacaatacaaacggctacgggcccgaacaattccttctgaaaaaagncggtaaaggggaaaataccnggcgtctcccgtcaattactacggcgacaaccaatttaccatag

SEQ ID NO: 2470 - protein, 247 aa, Unknown
  Obtained from environmental sample
  misc_feature (1)..(247): Xaa is any amino acid
MKRLTGKTDEDYRLYLKLREDYIGSPTFYFDMAEWFYTHNDKKLALRVLTSIADLDLENAMLYRLLGYRLKEYGEYAMEKFVCRKVVKWRPMEPQSHRDYALALADNGEAQAALDSLYGLLKKTYSENIGNRSKGIDEIVITEINQLIAKKPKLNTSKIDTSLITNIAMDVRVVINWNMNNTDIDLHVLDPYDEMCYYRHNATQIGGRISADNTNGYGPEQFLLKKXGKGENTXRLPSITTATTNLP

SEQ ID NO: 2471 - DNA, 885 bp, Unknown
  Obtained from environmental sample
  misc_feature (1)..(885): n is a, c, g, or t
atgcatttatatgccggtaaaaacaggcattacgctgaacaaggaaagaaaatcgccaataaatactccgcccttgtaacttcctgcatcgataaagacggttggttaaaaaacgaatttgccaggtttaaaaacggcaaatggtcaggcatggaacttgctcaacatatcggttttacaaattggaatgaggatggttgcagatatcccgtaaggattcaagttaaacccgcgtataaaccgcgtttggttgtttcaagaaaaaacggggagaaaatatatgctaaaacttacggcgaccccatgaccgttgaagttaatgattttctttacgccggaaatgaagaagtaatacttgaaatcgccaatgacggaataggtaaaattagattttcaattgaacctgataatgaatacccgtggcttgaaatcagcccgttaaaaggaacggttgagattcaggaagaaataactatcaggtgtaaaagggacaaacttgacggacggcttacggaagaaaaagcgagattcattataaaagataaagagaccgttgtagcggtcgaagtaaaagcaaaagttataaatgtcgatttgcccgaaatgacatttttggaaaacaacaatgttattgtaatgaacgctaatcatttctgcgccaagaaagacgtacccaagggcggctttattgaacttaaaaattacggcagaaccggttgcggcatgaaagtatttcccgtaacgtcagattttaatgaaaatgaaaaaaagccgtcacttacataccgtttcttaatcgaaaaaagcggcgattacgacatagaagtatggacgactcccgttaaatcaattcaaaataaaacgccctctncaagttcagattga

SEQ ID NO: 2472 - protein, 294 aa, Unknown
  Obtained from environmental sample
  misc_feature (1)..(294): Xaa is any amino acid
MHLYAGKNRHYAEQGKKIANKYSALVTSCIDKDGWLKNEFARFKNGKWSGMELAQHIGFTNWNEDGCRYPVRIQVKPAYKPRLVVSRKNGEKIYAKTYGDPMTVEVNDFLYAGNEEVILEIANDGIGKIRFSIEPDNEYPWLEISPLKGTVEIQEEITIRCKRDKLDGRLTEEKARFIIKDKETVVAVEVKAKVINVDLPEMTFLENNNVIVMNANHFCAKKDVPKGGFIELKNYGRTGCGMKVFPVTSDFNENEKKPSLTYRFLIEKSGDYDIEVWTTPVKSIQNKTPSXSSD

SEQ ID NO: 2473 - DNA, 879 bp, Unknown
  Obtained from environmental sample
  misc_feature (1)..(879): n is a, c, g, or t
ttgagcggcttcaataccagcataaatttaagcaagagaagcattgaaaatctggccgcccaacgcgacgcatattggcagggaagagaggacggcctttatcgggttgcccgtacgctggctaatatcttcggtgattttgaagatgatccggtggctcaaaggcgggatatgtataacagtatgatgcaatccgttgcaagggcggaaaccaccatatatcaagtctattctatttggaagccaaacgcggttgacggaatggacgcccgctatattggccgtcccggcagtactgaaacaggacagtatgccaccgcgtttcgcatgatcaacgggcaggcggaactcacgacttccgtcgatgtggcggacgccatggcgtatttaacaggtcccgacgcaaagaaagatcgatatgtacatcctgttgcaataaatatagacgggaaagatacatggtatttcaggataatggttcctatcataaacagacgtaacggcgaagtagtgggaggcgtgggctgtctttgtgttatagacgcaatacagccgacgatagagaataccataaaaaccagggaagaaattgccgcgtcggtaatttactcaagcaacgggtttattattggacactatacgccggagcgcgtaggcaagatgatgaaagacgtagaagttgtctacggcgattatttggatgaagcctttaaggctgttcaaaacggcgaagaatttatgtgctcaagttattcgccggctttgaagtcagacgtagaaattactatacagtctttccccatgggtaattcgggcaagtcatggagcataatggtcgcttcgacgagatcgtacatactgagagaagtaatacaatga

SEQ ID NO: 2474 - protein, 292 aa, Unknown
  Obtained from environmental sample
  misc_feature (1)..(292): Xaa is any amino acid
MSGFNTSINLSKRSIENLAAQRDAYWQGREDGLYRVARTLANIFGDFEDDPVAQRRDMYNSMMQSVARAETTIYQVYSIWKPNAVDGMDARYIGRPGSTETGQYATAFRMINGQAELTTSVDVADAMAYLTGPDAKKDRYVHPVAINIDGKDTWYFRIMVPIINRRNGEVVGGVGCLCVIDAIQPTIENTIKTREEIAASVIYSSNGFIIGHYTPERVGKMMKDVEVVYGDYLDEAFKAVQNGEEFMCSSYSPALKSDVEITIQSFPMGNSGKSWSIMVASTRSYILREVIQ

SEQ ID NO: 2475 - DNA, 705 bp, Unknown
  Obtained from environmental sample
  misc_feature (1)..(705): n is a, c, g, or t
atgcgactagacaaatatttgcaggcgaaatatccagaatattccagaacagatttgcaaaaaataattgcagacaaaaaagttctattaaacggcaaacccttgctcaaaagttttgaagtagaggaaaataatgatttgcctattgaaattttgcagttgcccgttaaaacagaaagtaatttggaaccagaaaatgtcccactgaacatcgtttttgaagacgagtatttagcggtaatcaataagccgcgcgatatggcaatgcacccaggaaacggagtgagcaaaaaaacgctcgctgccgcattgctttggcatttcaaaaatctctcccaagtgaacggcccgctacgccccggaattttgcataggctagataaagacactcccggtcttttggttgtggcaaaaacagatttggctcatagggaattgacccgccaactggaagcgcgaattttggagcgaacataccgagcggtgatttggggaattttacgcgaccaagagggagaaattgatgcgccaatagagcgcgaccaaaggaaccgtcttaaaatgagtgtgcaatcagagggcaaaattgcaaaaacaaattacaaaacgctggaaacttatggcattgcatctttggttgaattcaaactgaacacaggcagaacccaccagataagggtcacgcacatactggaaccgccataa

SEQ ID NO: 2476 - protein, 234 aa, Unknown
  Obtained from environmental sample
  DOMAIN (1)...(47): S4 domain
  misc_feature (1)..(234): Xaa is any amino acid
MRLDKYLQAKYPEYSRTDLQKIIADKKVLLNGKPLLKSFEVEENNDLPIEILQLPVKTESNLEPENVPLNIVFEDEYLAVINKPRDMAMHPGNGVSKKTLAAALLWHFKNLSQVNGPLRPGILHRLDKDTPGLLVVAKTDLAHRELTRQLEARILERTYRAVIWGILRDQEGEIDAPIERDQRNRLKMSVQSEGKIAKTNYKTLETYGIASLVEFKLNTGRTHQIRVTHILEPP

SEQ ID NO: 2477 - DNA, 777 bp, Unknown
  Obtained from environmental sample
  misc_feature (1)..(777): n is a, c, g, or t
atgatcagatcggccgagggtatttccccttgcccaaacgatacttttatctatcaaaacctcattgagggcaagcttgagaccccttgcccaatttcagttgaatatgccgatgttcaaaccttgaatgaaaaagttttgaaaggcgaattggatatggcaaaagtgagttgtgccgtatatccattggttaaagaccattacagaattttagacagcggcggtgcaatgggctatggctgcgggcctctgttgctttcttctttcagcgaaaaatttgaacctgaatttccggtctatttgccaggcgaacaaacgaccgccgccgccttattcaaattttggttcaaaaaaaataaccctaaaattcaaattttaaaatttgacgaactctaccgcgagcttcgcgagaaaaaaataaaacagggagtggtcatacacgagcatcgctttacttggcaaagagacggtttgcatttaatagcagacctcggtgcatattgggaacaggaattgcaagttccaattccgcttggctgcacggttataaaaagagatttgggcgaagaatttgccaaagagatggatttatgcgttcaaaaaagtttgaaactcgcttgggaacgcaaagaacctgttaccgatttcataagaaaactagcccaaatagacgatgatgaggtaattttgcagcatataaagatgtttgtgaatgagtattcgctgaatagaggtgaaaaaagcgaaaaagcatttagtttactatatttgccttag

SEQ ID NO: 2478 - protein, 258 aa, Unknown
  Obtained from environmental sample
  DOMAIN (1)...(258): Uncharacterized ACR, COG2107
  misc_feature (1)..(258): Xaa is any amino acid
MIRSAEGISPCPNDTFIYQNLIEGKLETPCPISVEYADVQTLNEKVLKGELDMAKVSCAVYPLVKDHYRILDSGGAMGYGCGPLLLSSFSEKFEPEFPVYLPGEQTTAAALFKFWFKKNNPKIQILKFDELYRELREKKIKQGVVIHEHRFTWQRDGLHLIADLGAYWEQELQVPIPLGCTVIKRDLGEEFAKEMDLCVQKSLKLAWERKEPVTDFIRKLAQIDDDEVILQHIKMFVNEYSLNRGEKSEKAFSLLYLP

SEQ ID NO: 2479 - DNA, 687 bp, Unknown
  Obtained from environmental sample
  misc_feature (1)..(687): n is a, c, g, or t
ttggcgaaatttctcctgtttttgcttatcgccgttacaaccggtattagtccggcctttgcccaggattccggaagcggcgacaatgaatacctcctggaaagccggcgcctcgcaaaacttgcggaagaggcgtttgccgaagccgactacgacaggtccgccaggttagccgatgatgccgcatggtttgccagacagtccgatgtatatgtcgctattgccacagcaaagcgctgtcttgaccaggctgttgcttcaggtgtttccgagcggttttctgaggaatacagtgaagcggaaaattggtataaggaaagtacaaaagccagagacagcgaagaatgggatatcgccattgatgccgccaacatggccgcgcaattgcttgaagggcttggaagctccggcagcggcagtcctgcgcctgccgctttgccggccacatataccgtgcggccatggtctgtctcaaaggattgtttctggaatattgcgggcatgggctgggcatacgggaatccgcgccaatggagaacgctttacaacgccaacaaatcaaaactgcctaatccgaataatccagatatcctggaaccaggcattgttctggacatccccagcataaagggcgaactgcgccagggcgcgtgggaaagcggcaagacctacgaggcgtttaagtaa

SEQ ID NO: 2480 - protein, 228 aa, Unknown
  Obtained from environmental sample
  SIGNAL (1)...(21)
  misc_feature (1)..(228): Xaa is any amino acid
MAKFLLFLLIAVTTGISPAFAQDSGSGDNEYLLESRRLAKLAEEAFAEADYDRSARLADDAAWFARQSDVYVAIATAKRCLDQAVASGVSERFSEEYSEAENWYKESTKARDSEEWDIAIDAANMAAQLLEGLGSSGSGSPAPAALPATYTVRPWSVSKDCFWNIAGMGWAYGNPRQWRTLYNANKSKLPNPNNPDILEPGIVLDIPSIKGELRQGAWESGKTYEAFK

SEQ ID NO: 2481 - DNA, 339 bp, Unknown
  Obtained from environmental sample
  misc_feature (1)..(339): n is a, c, g, or t
atgaaacagaaaggattttttgatgaagctgacaggctaaggaagttaagcgaacttggggattcattggaaaaactcaatgaacacatagaatggaatgattttcaaaggccgttaagcagagcttttgaaaaagaagcgagaggaccaggcggacggccgccgtttgattatgtaatgatgttcaagatattaatattacaaaaaatatataacataagcgatgaccagactgaataccagataaacgacaggctaagttttcaacggtttatagggatacaattatacgacacggtacccgacgcaaaaacgatatggcattttagggaagtatga

SEQ ID NO: 2482 - protein, 112 aa, Unknown
  Obtained from environmental sample
  misc_feature (1)..(112): Xaa is any amino acid
MKQKGFFDEADRLRKLSELGDSLEKLNEHIEWNDFQRPLSRAFEKEARGPGGRPPFDYVMMFKILILQKIYNISDDQTEYQINDRLSFQRFIGIQLYDTVPDAKTIWHFREV

SEQ ID NO: 2483 - DNA, 513 bp, Unknown
  Obtained from environmental sample
  misc_feature (1)..(513): n is a, c, g, or t
gtgctctttgaaaaacacaattttaagttaaaattatctataatacttatgactaacgaaaatatttttaagccgggagcgcagttttattttgtcgggataaagggaacgggagtttgcgcgctggctgagcttatactcaatgccgggataaaagtgcgcggcagcgatactaacgaagttttttatactgatgaaatactgaaaaatttgcaaattccctactatgaaaattttgacgccgcgcatatcaccgaagatattgatgtcgtgatccattcagccgcttacggcgcggatgccaatcccgaacttgcgcatgctgtaaaactcggcatacctgtcataaaatacaccgacgccctcggaatgtggtcggaaaggtttgactctgccggcgtgtgcggcgttcacgggaaaaacaaccacgaccgcgcttggcgggcgtttgcgcgcgccgagccgggattgccggcgcaaatacttaccggaaacggcgcgttttacttttga

SEQ ID NO: 2484 - protein, 170 aa, Unknown
  Obtained from environmental sample
  DOMAIN (28)...(130): Mur ligase family, catalytic domain
  misc_feature (1)..(170): Xaa is any amino acid
MLFEKHNFKLKLSIILMTNENIFKPGAQFYFVGIKGTGVCALAELILNAGIKVRGSDTNEVFYTDEILKNLQIPYYENFDAAHITEDIDVVIHSAAYGADANPELAHAVKLGIPVIKYTDALGMWSERFDSAGVCGVHGKNNHDRAWRAFARAEPGLPAQILTGNGAFYF

SEQ ID NO: 2485 - DNA, 609 bp, Unknown
  Obtained from environmental sample
  misc_feature (1)..(609): n is a, c, g, or t
ttggaaacgctttttcagaatcgcttgatgttatctgggaaaggggacagcgattctatacggaacaggcgggccaaatgcccggcgggaaaaaatacgattctctgtgcgcagggtgtgatgagtactatacctacaacttttaaccggaatttcccgacatataccgttatcggaggaagggaagtaattaattcaacggggctttctgttgtattactgaacaggggcggacgctatgcccggcgcggtttgttccatgactttgagaaaacaggctttgatgccgttgtttctgttgagccggaacctgttcattatgatcttgaagagctttccgcgcgtttcccgtttgtccggttcgtaataccgcataccaggatcagccttggagaacagatcaaccttgcggtatccgaacttaattcccctctgtttttcgtcctctggaatgatcttaaaatgattgccggcggcactgcccacaggatggcggaaaggctgacccgttccgctgaaaccaatggtaacggaaaggggaaaagtaagttcatgcggctctgtactgtccctgtattcaaaactcacgtcctcggccgccggcgataa

SEQ ID NO: 2486 - protein, 202 aa, Unknown
  Obtained from environmental sample
  misc_feature (1)..(202): Xaa is any amino acid
METLFQNRLMLSGKGDSDSIRNRRAKCPAGKNTILCAQGVMSTIPTTFNRNFPTYTVIGGREVINSTGLSVVLLNRGGRYARRGLFHDFEKTGFDAVVSVEPEPVHYDLEELSARFPFVRFVIPHTRISLGEQINLAVSELNSPLFFVLWNDLKMIAGGTAHRMAERLTRSAETNGNGKGKSKFMRLCTVPVFKTHVLGRRR

SEQ ID NO: 2487 - DNA, 471 bp, Unknown
  Obtained from environmental sample
  misc_feature (1)..(471): n is a, c, g, or t
ttgcccgagcaaaacgaatttgcgaaaaagctcctgaccattttccccaaagacgcttatgtgcaggcggtgcggacggcgggggcggaagacgatatagaaaaattttatcgatcatggaaagaaattacacctaacacatcaaacatcattatacaaaaatacgacgatttttgcggctttatgccaaggaagcaggcatcggatctttccccggtacagaggcagccgtgctggcatcttatgcgggatatgccggtgctgattgacggcgctgtgcccttgtgccgtgaacagattgccgtcggtaatggcggtgtaggtcttggaaacgctttttcagaatcgcttgatgttatctgggaaaggggacagcgattctatacggaacaggcgggccaaatgcccggcgggaaaaaatacgattctctgtgcgcagggtgtgatgagtactatacctacaacttttaa

SEQ ID NO: 2488 - protein, 156 aa, Unknown
  Obtained from environmental sample
  misc_feature (1)..(156): Xaa is any amino acid
MPEQNEFAKKLLTIFPKDAYVQAVRTAGAEDDIEKFYRSWKEITPNTSNIIIQKYDDFCGFMPRKQASDLSPVQRQPCWHLMRDMPVLIDGAVPLCREQIAVGNGGVGLGNAFSESLDVIWERGQRFYTEQAGQMPGGKKYDSLCAGCDEYYTYNF

SEQ ID NO: 2489 - DNA, 843 bp, Unknown
  Obtained from environmental sample
  misc_feature (1)..(843): n is a, c, g, or t
ttggtggtggcggcttttgcggacattgtggcggggacgttcggcgggtttgacaagggggccggcggcgaggttgtcgaggttccggccaacgccgcggtggctactacatccgttctgtttatcgtcgcggcggtggggcttgggctgtttttgcggcgattcaagccgaaggcgcttgtcagcgccgcggtcgcctgtaccgttttggtgctctgcatcgcggcgggtctttggattcctatatatgttgataagagtgtttggctctacctcgtgttcgcctatatattcttggcctccgtcactccggtgtgggcgctgttgcaaccgagggattacctcaactcattcctgcttgtggcgatgatcgcggcggcttttgtcggcgtggtgattgccgcgccgcccatcaatattccggcgtttaccggctttaaggcgggcgacagctacatgttccccatcctatttgtgacggtggcttgcggcgccgtatcaggatttcacagcctcgtttcgtcgggcacgacgagcaagcagatagcgagcgagaagcacattctgcccatcgggttcgggtctatgcttgtggagagctttttggcggttatcgcggtcatcaccgtgggcgcaatcaccattggcgggaagttgccgcagggcattgaaacgcctccgcaggttttcgcctccgcggtggcgagctttctggtgaagaccgggttgccggagagcgtcgtctttacgctgatcaccctgtcgataagcgccttcgccctcacctccttagactcggtggcccgcgtggggcggttggcttttcaggagcttttcacgtag

SEQ ID NO: 2490 - protein, 280 aa, Unknown
  Obtained from environmental sample
  DOMAIN (1)...(257): Carbon starvation protein CstA
  misc_feature (1)..(280): Xaa is any amino acid
MVVAAFADIVAGTFGGFDKGAGGEVVEVPANAAVATTSVLFIVAAVGLGLFLRRFKPKALVSAAVACTVLVLCIAAGLWIPIYVDKSVWLYLVFAYIFLASVTPVWALLQPRDYLNSFLLVAMIAAAFVGVVIAAPPINIPAFTGFKAGDSYMFPILFVTVACGAVSGFHSLVSSGTTSKQIASEKHILPIGFGSMLVESFLAVIAVITVGAITIGGKLPQGIETPPQVFASAVASFLVKTGLPESVVFTLITLSISAFALTSLDSVARVGRLAFQELFT

SEQ ID NO: 2491 - DNA, 675 bp, Unknown
  Obtained from environmental sample
  misc_feature (1)..(675): n is a, c, g, or t
gtggaacccggacgcttcattaacggcgaaaccctagtccttgaggtcggatggacggtcttcaacgccggctatcttatactctcagccacacacatgcgcagccgcggactgctccgcgcaaacgccaaggcaataacaaacaataccgtaagcgcaatctacaaggtacgcaaccatgaaatatcatggattgacgccgacggcctctacccggtcttctttgaacaacacgtacgcgaaggcaagaaatacaaagccgacaactacttagtctacgacaatatcgccaataagctcttcttcaaaaaaagcgatgggttgaaaatattcgacaccccaaaattcacacacgactacatatccgtaatttactacgtccgctcaatgccgctaaatcccggcgatgtgtttgaagcttccctgttctcaaggcccaaaacgtacccgctgaagttcaaggtgcatgataaacgcgaaacgataaacgttggcggaaaaagctacaactgcgtaagagtcgaaatcgctatggtcggagaagggcgcgtattcacaaaaaaagacaaaatggaaatatgggtcaccgacgatgaaagtcactatccggtaatgctaaaatcaaaagccaagatcgggtcgctcaacgccaaattggttcaggtcattaaataa

SEQ ID NO: 2492 - protein, 224 aa, Unknown
  Obtained from environmental sample
  misc_feature (1)..(224): Xaa is any amino acid
MEPGRFINGETLVLEVGWTVFNAGYLILSATHMRSRGLLRANAKAITNNTVSAIYKVRNHEISWIDADGLYPVFFEQHVREGKKYKADNYLVYDNIANKLFFKKSDGLKIFDTPKFTHDYISVIYYVRSMPLNPGDVFEASLFSRPKTYPLKFKVHDKRETINVGGKSYNCVRVEIAMVGEGRVFTKKDKMEIWVTDDESHYPVMLKSKAKIGSLNAKLVQVIK

SEQ ID NO: 2493 - DNA, 699 bp, Unknown
  Obtained from environmental sample
  misc_feature (1)..(699): n is a, c, g, or t
atggcgggcataaacgcagcgatgaaactgcttggccgctcaccgctggtgctgacaagggcagaagcctatatcggcgtgctggtcgatgatcttaccacgctgggaacgaaagagccgtaccggatgttcaccagccgcgccgaacaccgtctcgtactgcgccacgacaccgccgatacaaggctctgtcccaaaggcagagatgtcggcctggttgacgatgaacactgggaaattttccaaaagaaaaccgaggccctagagtcgatcggagaacttttgaagcagagaaaattttccccctcagttgacaaaaccgtgaacgaagcccttgtttcccacgcgggcgagagccttgagcgctgtcttaccgatcctagcgtcgagctagcgttcatccttccctttgccccggagctttccgcttatcccgccgaatggcttgaacgagccaggctggacatccgctacgcgggttatattgaaaaggaaaaccgcgccgcggcaaaagcggcaaaaatggacgcgataaaactggatcccggacttgactactctgcccttaccggcctttcctcggaggccagggaaaaattaaaaaccgtaaggcccatcaccgtcggacaggcggcgcgcatacccggcgtaaggcagggagatatagctttgttgatggtgctgacctccaagaaataa

SEQ ID NO: 2494 - protein, 232 aa, Unknown
  Obtained from environmental sample
  misc_feature (1)..(232): Xaa is any amino acid
MAGINAAMKLLGRSPLVLTRAEAYIGVLVDDLTTLGTKEPYRMFTSRAEHRLVLRHDTADTRLCPKGRDVGLVDDEHWEIFQKKTEALESIGELLKQRKFSPSVDKTVNEALVSHAGESLERCLTDPSVELAFILPFAPELSAYPAEWLERARLDIRYAGYIEKENRAAAKAAKMDAIKLDPGLDYSALTGLSSEAREKLKTVRPITVGQAARIPGVRQGDIALLMVLTSKK

SEQ ID NO: 2495 - DNA, 777 bp, Unknown
  Obtained from environmental sample
  misc_feature (1)..(777): n is a, c, g, or t
atgatgctgatgtatttcgcgaagcttacgctaaacttgatgacgatggcgggcctggttttgggaatagggatgctggtggataactcgattgttatattggaaaatatttaccattacagggagaaaggcgcgaagctggctactgcttcggtaattggtacccaggaaatgctcgttgccatcgcggcttctaccttgacaaccatttgcgttttcgcgcccctggttatgttccagggcctgttggaaatggctggagagcttttcgcgggccttgcctttacggtggttatttcccttgggatttcacttgttaccgccatgttcctggtgcctgtgctttccagccattatcttccgcttgttacccgcaaacaaaaaccccttagagggttgctgaaaattcttgacgacgtattcgcgtttttacttaccggccttgataacggctaccgttgggcggtcagcaaggtgcttaagcataaggccatcgtaattatctttcttcttattctctttgcggggagcatcttccttgtccccgtgatcggctgggttttcatgcccacgcaggagtcggacaatatcagcgtcagcgtaacccttcccatgggtacaccgcttcaggaaaccgaggctgttttaatgcagcttcaggaaattgtaaaacgggatgtaaaggcttacggaagcatggtgataaacgccggcggcggcggcataatgggtatgttaagcggtgggagcggcggcaattccggttctcttagataa

SEQ ID NO: 2496 - protein, 258 aa, Unknown
  Obtained from environmental sample
  misc_feature (1)..(258): Xaa is any amino acid
MMLMYFAKLTLNLMTMAGLVLGIGMLVDNSIVILENIYHYREKGAKLATASVIGTQEMLVAIAASTLTTICVFAPLVMFQGLLEMAGELFAGLAFTVVISLGISLVTAMFLVPVLSSHYLPLVTRKQKPLRGLLKILDDVFAFLLTGLDNGYRWAVSKVLKHKAIVIIFLLILFAGSIFLVPVIGWVFMPTQESDNISVSVTLPMGTPLQETEAVLMQLQEIVKRDVKAYGSMVINAGGGGIMGMLSGGSGGNSGSLR

SEQ ID NO: 2497 - DNA, 330 bp, Unknown
  Obtained from environmental sample
  misc_feature (1)..(330): n is a, c, g, or t
gtgacggacgcttgtggaaaaaaacgtaaaattgcccataacgagattgccaaggaccggggcggctattaccggactgaaattattgatatcaccaagaacgggtattatacctttaccgtaaggctgaaacggggttttcgccatcagatacgctgccaccttgcatggataggctgtccggttgtcaacgacccgctgtatggacaacagcccgtaagcggctttctggccttgcggtcaaacgggcttatgtttaccgatccccgcagcggcaagccccgtgaataccgcattgaaccgcttgaaataccgtcaaatccaatgtaa

SEQ ID NO: 2498 - protein, 109 aa, Unknown
  Obtained from environmental sample
  misc_feature (1)..(109): Xaa is any amino acid
MTDACGKKRKIAHNEIAKDRGGYYRTEIIDITKNGYYTFTVRLKRGFRHQIRCHLAWIGCPVVNDPLYGQQPVSGFLALRSNGLMFTDPRSGKPREYRIEPLEIPSNPM

SEQ ID NO: 2499 - DNA, 528 bp, Unknown
  Obtained from environmental sample
  misc_feature (1)..(528): n is a, c, g, or t
atgataaataataatcaaatacaagttattttaggagacatcacccgccagactgctgatgctattgtcaatgccgcaaatgaatccctgcttggcggaggaggcgtagacggcgcaatccattctgccgccggcaaagaacttgatttggcttgccggaagattcatgaagaaaagggaggatgtaaaacaggcgatgcggtgattacaaccggaggtaatttgccggcaaaatttgtcattcatacggttggtcctgtttggcgcggagggaagcagcaggaagctgaattgttatctcgcgcgtatttaagttctttactattggcatcagagaatgggattaggactattgccttcccgaatatcagcacaggaatttacggttttccgaaagaacaggcctctaaaatagctgtttccgctgttgtagattttcttaacaataacaaaacttcgattgaaaaggttatttttgtttgctttgatcaggaaaattatgagctttataaaaagcttgttttttaa

SEQ ID NO: 2500 - protein, 175 aa, Unknown
  Obtained from environmental sample
  DOMAIN (23)...(139): Appr-1-p processing enzyme family
  misc_feature (1)..(175): Xaa is any amino acid
MINNNQIQVILGDITRQTADAIVNAANESLLGGGGVDGAIHSAAGKELDLACRKIHEEKGGCKTGDAVITTGGNLPAKFVIHTVGPVWRGGKQQEAELLSRAYLSSLLLASENGIRTIAFPNISTGIYGFPKEQASKIAVSAVVDFLNNNKTSIEKVIFVCFDQENYELYKKLVF

SEQ ID NO: 2501 - DNA, 489 bp, Unknown
  Obtained from environmental sample
  misc_feature (1)..(489): n is a, c, g, or t
atgatgaaatacacgccaagggacatacagaggagggagttcgagaccgccttccgagggttcaacgtggacgaggtgcgcgagttcctgcgggaggtggccgccgaatgggaggagctgctgtcggagaaccagcggctgaagaacgacctgctggacacgcgggagcgcgttgaccagtacgcggagcaggaccgcatattcaaagagacgctgatgcaggcgcagaagacgcgggaagagatgatggacgtggcgcagaaggagcgcgagctgataatcaaggaggcgcggttccaaggcgaggagatagccagggaggcgcaggagcacgtcgcaaggctggaggcccacatgcggaacctgaagctggagagggtccgcttcctccaagacatggacgcgctggcggcccgcacaaagaggttcctgagccaggaggccccggagatgttcccgccagccgatgcgactagacagttggattag

SEQ ID NO: 2502 - protein, 162 aa, Unknown
  Obtained from environmental sample
  DOMAIN (1)...(157): DivIVA protein
  misc_feature (1)..(162): Xaa is any amino acid
MMKYTPRDIQRREFETAFRGFNVDEVREFLREVAAEWEELLSENQRLKNDLLDTRERVDQYAEQDRIFKETLMQAQKTREEMMDVAQKERELIIKEARFQGEEIAREAQEHVARLEAHMRNLKLERVRFLQDMDALAARTKRFLSQEAPEMFPPADATRQLD

SEQ ID NO: 2503 - DNA, 591 bp, Unknown
  Obtained from environmental sample
  misc_feature (1)..(591): n is a, c, g, or t
atgcgtttttacgacgttacggagggaagcatagcggttaacggcgtggatgtaagagcgctttcccaaaaggagcttcgcggcggaatcggttatgtgccgcaaaagagcatcctcctttccgggcctgtgtccttcaacctccgttacgggaaaactgacgcgtctgatgcggagattcgcgaaggagcggagatcgcgcagattatagattttatagaagaaaagccggaaggttttgaatcaagcatcgcgcaggggggagccaatgtctcaggcggacagaaacagcggctttccattgcacgcgctcttgtgcgcggcccgcagcttctcatttttgacgacagcttttcctgtctggattttgccacagacgcgcggctgcggcaggcgctggaagaaaagaggaagtccgtcaccaagatcattgtcgcccagcgggtgggaacaatcatgcacgccgaaaagatcatcgtgttggaagaaggcagaatcgccggcatgggtaaacaccaagaattgatggaaacctgcgctgaataccgggaaattgccgaatcccaattttcacaggaagccgcgttatga

SEQ ID NO: 2504 - protein, 196 aa, Unknown
  Obtained from environmental sample
  DOMAIN (1)...(164): ABC transporter
  misc_feature (1)..(196): Xaa is any amino acid
MRFYDVTEGSIAVNGVDVRALSQKELRGGIGYVPQKSILLSGPVSFNLRYGKTDASDAEIREGAEIAQIIDFIEEKPEGFESSIAQGGANVSGGQKQRLSIARALVRGPQLLIFDDSFSCLDFATDARLRQALEEKRKSVTKIIVAQRVGTIMHAEKIIVLEEGRIAGMGKHQELMETCAEYREIAESQFSQEAAL

SEQ ID NO: 2505 - DNA, 693 bp, Unknown
  Obtained from environmental sample
  misc_feature (1)..(693): n is a, c, g, or t
ttgcgtatactaattaagtacctaaagccctttaccctccttttatttctggcggtgatgattctttttcttcaggtgttttgcgatctcagtctgccaaatctcatgtcccgtcttgtgaacagcatcctcgcgcagagcgcggcgcagaacacgccggaaacaagcgcggaggacagcaatatcatcagacttggtttaaaaatgctgataatcgcgctagccgggggcgcggcggcggtgagcgtgagttttctttcaaccagaattgccgcggggattgcccgtgatctccggttcgctgttttccaaaaggtggaaagtttctccagtcgcgaattcgacactttttccacggcttccctcatcacccgctgtaccaacgacatcaatcaggtgcaggggatcttcataatgggaatccgcatgatctgttacgctccgattatgggaattggcgggattatcatggcggtgaaccatgctcccggcatgagctggatcattgtactggcggtggttgtccttatctgtctggtgatagcgctcgtttcccttgttatgcccaaattcaaaatgattcaaaatctggtggatcgtatgaacagaatcgcaagggaaaccctgaacggcctcatggtgatacgcgctttcggagcgcaggatcacgaaaagaaaggttttgacgcctaa

SEQ ID NO: 2506 - protein, 230 aa, Unknown
  Obtained from environmental sample
  SIGNAL (1)...(24)
  DOMAIN (15)...(230): ABC transporter transmembrane region
  misc_feature (1)..(230): Xaa is any amino acid
MRILIKYLKPFTLLLFLAVMILFLQVFCDLSLPNLMSRLVNSILAQSAAQNTPETSAEDSNIIRLGLKMLIIALAGGAAAVSVSFLSTRIAAGIARDLRFAVFQKVESFSSREFDTFSTASLITRCTNDINQVQGIFIMGIRMICYAPIMGIGGIIMAVNHAPGMSWIIVLAVVVLICLVIALVSLVMPKFKMIQNLVDRMNRIARETLNGLMVIRAFGAQDHEKKGFDA

SEQ ID NO: 2507 - DNA, 726 bp, Unknown
  Obtained from environmental sample
  misc_feature (1)..(726): n is a, c, g, or t
atgtcaaacgatattaacccgatttttcacagagtcgcccttctaacaggcgaagatagactagaaaaaattaagcagacaaatgtacttgtcttcggcgcgggcggcgtaggaagctggtgcgcggaagcgttagtcagaagcggtataggtaaaataggaattgttgattttgatacagtatgcgaaagcaatattaaccgccaggcagaggcgactgtaaacacgcttggacgtgttaaagttgacgttttaaaacagcgtcttttggaaataaacccggaatgtgaagttactgccgtaaacaaacttttttgcggtgaagactcatcttcctttaatattaataaggcggattatgtaatagacgcaatcgactcaattaatcacaagattgatcttattgaaataacctgtaatgcgaatgttacgctctactcttcaatgggtatggcgctaaaaatggacccttcgcagataaaaacagcgtcaatttgggataccagggtttgtcccctagcgcgtcttgtaaggcaggaacttaggaaacacggcttttcttcaaatttcaccgtagtctattcaagcgaaacgccaatccgcgctcaaactgcctatgccgcctctaccggagaaaaaacgcctaacggcagcattgttaccgttacggcaagcgcgggttttctgctcgcaagcctcgtgttacgtgatattacggggttatga

SEQ ID NO: 2508 - protein, 241 aa, Unknown
  Obtained from environmental sample
  DOMAIN (25)...(160): ThiF family
  misc_feature (1)..(241): Xaa is any amino acid
MSNDINPIFHRVALLTGEDRLEKIKQTNVLVFGAGGVGSWCAEALVRSGIGKIGIVDFDTVCESNINRQAEATVNTLGRVKVDVLKQRLLEINPECEVTAVNKLFCGEDSSSFNINKADYVIDAIDSINHKIDLIEITCNANVTLYSSMGMALKMDPSQIKTASIWDTRVCPLARLVRQELRKHGFSSNFTVVYSSETPIRAQTAYAASTGEKTPNGSIVTVTASAGFLLASLVLRDITGL

SEQ ID NO: 2509 - DNA, 465 bp, Unknown
  Obtained from environmental sample
  misc_feature (1)..(465): n is a, c, g, or t
ttgaacttgacaatgcatagtgaatgtggtacctactataacatgaggggattggtttttattcgcctaacggcggtttttataatcctgatagcggcccttatagggctggccttggggctggggattgccgttacgggaaatatttcaagtacagaaaactataaagtcctaaatcccgcccttcccacgcgggtttatgattcagcgggggaattggtaacggaattttccgccgaaaagagggaactaatcaccttaaatgaactgccccggcatctgatcctggcggctttagcccgggaggatccggatttttacaaccaccggggttttagtcttcgggcgattgccagggctgtatatggtaaaatcattggaaagcccttgggcggcgttccaccattacccagcaggtggcgggaactctctacctggaccgccgggaaaaaacatctcccgtaa

SEQ ID NO: 2510 - protein, 154 aa, Unknown
  Obtained from environmental sample
  DOMAIN (64)...(143): Transglycosylase
  misc_feature (1)..(154): Xaa is any amino acid
MNLTMHSECGTYYNMRGLVFIRLTAVFIILIAALIGLALGLGIAVTGNISSTENYKVLNPALPTRVYDSAGELVTEFSAEKRELITLNELPRHLILAALAREDPDFYNHRGFSLRAIARAVYGKIIGKPLGGVPPLPSRWRELSTWTAGKKHLP

SEQ ID NO: 2511 - DNA, 411 bp, Unknown
  Obtained from environmental sample
  misc_feature (1)..(411): n is a, c, g, or t
atgagagatgaaaatgcctttatggacacgaatttgatagtttatctgtattcaaaaaatgatattgaaaaacaaaaacaagtgattaatctcctgtcaaattatgattgttttgtaagtacgcaggtgttgaatgaattttgcaatgttgcaatgaaaaagcaggaaaagcaaatcttggaaatagacaaaaatatagatgaaattttagatacttgcaatcttttagctgttaggcatagtacaattaagaagtctcttgtgcttaatggacgttatggatattcgtattacgattgtcttataattgcttccgctttagaggcggattgtaaatatctttttaccgaagatatgcaaaatgggcaaatagtggaaaatacgcttaaaattgtaaatccatttatatga

SEQ ID NO: 2512 - protein, 136 aa, Unknown
  Obtained from environmental sample
  DOMAIN (6)...(125): PIN domain
  misc_feature (1)..(136): Xaa is any amino acid
MRDENAFMDTNLIVYLYSKNDIEKQKQVINLLSNYDCFVSTQVLNEFCNVAMKKQEKQILEIDKNIDEILDTCNLLAVRHSTIKKSLVLNGRYGYSYYDCLIIASALEADCKYLFTEDMQNGQIVENTLKIVNPFI

SEQ ID NO: 2513 - DNA, 813 bp, Unknown
  Obtained from environmental sample
  misc_feature (1)..(813): n is a, c, g, or t
atgtacaagatacgaatggccattgtggcaatgccgcatctggaacagtcaaaaatgacggaaatgataaattattcggtttccgctttcaggtacaatgtgcttattcccgactttttcagcttcaataatatctggatggcggtaagggattttgacggtattcttggttttgccacaagccataggctcaatatgtactggaacctggctataaagcgtttttcggatcttgttttggtttccattggcgggttagtgattcttccatttcttctcttaatttcccttgtaataaagatcagctctccggggccggttctctacgcccataagaggctgggacttaacgggaagtacttcaatgcttacaaattccgttccatggaaattaatgccgaaaagaaacttgagagcgtattggatgcggatcccaggctaagggaggaatgggaagcaacccataaactaaaggacgatcccagggtaacaaaaataggcaaaattctaaggaggacaagctttgatgaatggccccagctcatcaatattctgaagggggagatgagcctggttggcccccgtccggtaaccgatcctgaaatcgaaaagtacggagaaaacgcccttagggttttgactgtaaagccgggcctcaccgggctttggcaagtatcaggcagatccgatacggattatgttgaaagggtgtcttatgatttatattacattcaaagctggtccgtctggctggatctgtggattttataccgcacaccgggggcaattcttaaagnaaagggagcatattga

SEQ ID NO: 2514 - protein, 270 aa, Unknown
  Obtained from environmental sample
  DOMAIN (73)...(270): Bacterial sugar transferase
  misc_feature (1)..(270): Xaa is any amino acid
MYKIRMAIVAMPHLEQSKMTEMINYSVSAFRYNVLIPDFFSFNNIWMAVRDFDGILGFATSHRLNMYWNLAIKRFSDLVLVSIGGLVILPFLLLISLVIKISSPGPVLYAHKRLGLNGKYFNAYKFRSMEINAEKKLESVLDADPRLREEWEATHKLKDDPRVTKIGKILRRTSFDEWPQLINILKGEMSLVGPRPVTDPEIEKYGENALRVLTVKPGLTGLWQVSGRSDTDYVERVSYDLYYIQSWSVWLDLWILYRTPGAILKXKGAY

SEQ ID NO: 2515 - DNA, 579 bp, Unknown
  Obtained from environmental sample
  misc_feature (1)..(579): n is a, c, g, or t
ttgggtattaaagaagaacccggcctgggaataatactgggccttgaaggggttttggaaatcgaaactgacagggacgctgaaaagtaccgggcttttattgaggctgtccttgcttccgcgtcggatcaggcggaagccgagcgtgcgcgggaaggcaggcacacgatggaggatatactttcccatatcgccgttttggaagaatccgccaaaagcataagcgcccatgtgcctgagatcgaaaaaaatataagggaaaacttgcgaatacgctttgccgagctattgggagataaaatcgatgaaaaccgcattctggcggaaaccgcggttcttttaatgaaatataccatttccgaggagctttccaggctttcttcgcatttgaaagaattcaggctggaaacggaaagaaacccaagccctggcaagaagcttgattttctttcccaggaaattaaccgtgaaattaacactgtaagttcaaaaacgcccatgcttgaagtgagcaggatcgttgttgaaatgaaaaacgcattggaaaatataagggagcagttaagaaatgttgagtga

SEQ ID NO: 2516 - protein, 192 aa, Unknown
  Obtained from environmental sample
  DOMAIN (105)...(192): Domain of unknown function (DUF1732)
  misc_feature (1)..(192): Xaa is any amino acid
MGIKEEPGLGIILGLEGVLEIETDRDAEKYRAFIEAVLASASDQAEAERAREGRHTMEDILSHIAVLEESAKSISAHVPEIEKNIRENLRIRFAELLGDKIDENRILAETAVLLMKYTISEELSRLSSHLKEFRLETERNPSPGKKLDFLSQEINREINTVSSKTPMLEVSRIVVEMKNALENIREQLRNVE

SEQ ID NO: 2517 - DNA, 795 bp, Unknown
  Obtained from environmental sample
  misc_feature (1)..(795): n is a, c, g, or t
ttgggattaaatgtattcggtaacaaggtgcataatctggaatcgaagataaaagcgttacgtgaacaggaaggcgaagtgccgtttgttgaaatgctgaacctgactgtagatatagaaaaaatatcaaatgaaagagaaggctttaaggaaattctcgataaattgcagtcttatgccggcggcggcggcggattggccggattaggcggcacgggcggagaaaggcagaacgttaaagttttggttgaatcgcttgctaaaaccacggccagagttgcgcaggacatgggaaaacaaattaaatttatagcttctgaagtagaacctgaagcgcttgataacagtccaaggcgcgttattaaagatattcttatgcagttaatccgcaactccgccgtacatggaattgaagttccggaagaacgcaagaaaaaaggcaagaacgagaccggtatagtaaaattatcaattaagagatctgaagatcgcaagaatatcatcgtaaaacttaccgacgacggaaacggtcttgattacaaaaagattgcccaaaaagcgctgcaaaagaaaatgatcaagaaagaagacgcggtaaataaagatatgttattaaaagtgatctttatgccgggctttagtactgcggatactgagacggttcacggcggcaggggtatcggcttaaatcttgtgcgcgacagaataaaagaagtaaacggctctataaaaataaactccgaagtcggcaaaggaacagtgttctctattacgcttccgcctcagaataaataa

SEQ ID NO: 2518 - protein, 264 aa, Unknown
  Obtained from environmental sample
  DOMAIN (120)...(262): Histidine kinase-, DNA gyrase B-, and HSP90-like ATPase
  misc_feature (1)..(264): Xaa is any amino acid
MGLNVFGNKVHNLESKIKALREQEGEVPFVEMLNLTVDIEKISNEREGFKEILDKLQSYAGGGGGLAGLGGTGGERQNVKVLVESLAKTTARVAQDMGKQIKFIASEVEPEALDNSPRRVIKDILMQLIRNSAVHGIEVPEERKKKGKNETGIVKLSIKRSEDRKNIIVKLTDDGNGLDYKKIAQKALQKKMIKKEDAVNKDMLLKVIFMPGFSTADTETVHGGRGIGLNLVRDRIKEVNGSIKINSEVGKGTVFSITLPPQNK

SEQ ID NO: 2519 - DNA, 456 bp, Unknown
  Obtained from environmental sample
  misc_feature (1)..(456): n is a, c, g, or t
ttgcctgtagaaaatatttcatttcgtgaggcaatcatattttgtaataaattatctgtaaaagaagggtataatgaagtatatacaataactgatgatataatccgatggaatgaaaaagcaaatggctatagattaccttttgaggtagaatgggagtatgcacttggctataataacaaagaaatacaagaaaatttgaatacacttgcttggtattgcaataattcaaagaatagaacccacgaagttggattgaaaaaagaaaatgtttatggactttttgatttattaggtaacgtatgggaatggtgttttgataattataaagataatcctcttcaaactccagtatttgaatatgaaaatcgacttagagtattaagaggaggttcttttgctgattttgatactatgttctcaaaggaaaatgcatttagaaaaaaaacaagttga

SEQ ID NO: 2520 - protein, 151 aa, Unknown
  Obtained from environmental sample
  DOMAIN (1)...(151): Domain of unknown function (DUF323)
  misc_feature (1)..(151): Xaa is any amino acid
MPVENISFREAIIFCNKLSVKEGYNEVYTITDDIIRWNEKANGYRLPFEVEWEYALGYNNKEIQENLNTLAWYCNNSKNRTHEVGLKKENVYGLFDLLGNVWEWCFDNYKDNPLQTPVFEYENRLRVLRGGSFADFDTMFSKENAFRKKTS

SEQ ID NO: 2521 - DNA, 618 bp, Unknown
  Obtained from environmental sample
  misc_feature (1)..(618): n is a, c, g, or t
gtgggcaaccctgacctaaaacccgaagatggctggggaggggacattggtttgtcatggtgttttaaggagctatttaattttgaaagtaccttttttacacactggttaaaagattcaattcactggtattccggagccaatggtatctggcggcctgaaaatgtggggaaggcaatgttttttggcctggacagcaaactgcgttttgagattccggtgagtttgggaacgataaaaaaaattatcccttcggtttcgtatcagtaccttttaagctacctgttgagttttggctatgaattcgcggataataaaagagtgccgtatagtcccatgcataccatcggcggctctcttgagattccctggggaagcggctctgtaataatcagcgggcattacgaaagtccgcgttatgacgacagggccaaccttacacaactgaaaccgcattttctgcttaacgccaatgttaatcaaaaaatagggaaaaactttacagtatttggcgtactgcggaatatccttaatgaatcatatcaatcgtttaacgattatccaatgccggggattacgctgactattggattacgcgccagtttggaggtaaaatga

SEQ ID NO: 2522 - protein, 205 aa, Unknown
  Obtained from environmental sample
  misc_feature (1)..(205): Xaa is any amino acid
MGNPDLKPEDGWGGDIGLSWCFKELFNFESTFFTHWLKDSIHWYSGANGIWRPENVGKAMFFGLDSKLRFEIPVSLGTIKKIIPSVSYQYLLSYLLSFGYEFADNKRVPYSPMHTIGGSLEIPWGSGSVIISGHYESPRYDDRANLTQLKPHFLLNANVNQKIGKNFTVFGVLRNILNESYQSFNDYPMPGITLTIGLRASLEVK

SEQ ID NO: 2523 - DNA, 576 bp, Unknown
  Obtained from environmental sample
  misc_feature (1)..(576): n is a, c, g, or t
ttgcaaaattatacttttgagaattttcgcgtgccaatagaaaatcataaaggtttgctactaaacacgcttttcagtcggaataaaataatcccgcaaaattttaaatggggagataccataagcggttcaatggatttgagttttttcagcaaatatgcccgcacaggatttttaacccgctataatcccaatatgctgcaaaaaagcattttcggcagccgccttgttggctacgatgcctttgacggttcgcaattagaagacttggaagccaatgtagcacttgaggatagtttggaattgaaatggcaaataacagtgaacggaaaacctgttaatcaatacactgtaaaagaccaagtttattttatgatgggcgataaccgcgacaattctgcagacggtcgctattggggttttgtgagcgcaaggaatataaaagccaaagcctttataatatattttagcctagacaaagaatctagagttgaactgctaaagccttggacttgggtttacctgccagccgacatccgctggggtcgcatagctaggataatacattttatatag

SEQ ID NO: 2524 - protein, 191 aa, Unknown
  Obtained from environmental sample
  misc_feature (1)..(191): Xaa is any amino acid
MQNYTFENFRVPIENHKGLLLNTLFSRNKIIPQNFKWGDTISGSMDLSFFSKYARTGFLTRYNPNMLQKSIFGSRLVGYDAFDGSQLEDLEANVALEDSLELKWQITVNGKPVNQYTVKDQVYFMMGDNRDNSADGRYWGFVSARNIKAKAFIIYFSLDKESRVELLKPWTWVYLPADIRWGRIARIIHFI

SEQ ID NO: 2525 - DNA, 840 bp, Unknown
  Obtained from environmental sample
  misc_feature (1)..(840): n is a, c, g, or t
ttgtggtcatggccattggcgtctcggcggccgtgggtctgctcgctggctgggttcccgccagaagggccgccggcctgctggtcattgacgcgctcagggcggagtaggcaaatggctttcaccctgtacaaattcagattcctgcgggccttcaacgcagaaaacatccgcttggccgccaattccatccgcgcacaaaaattgaggtcattcctcacgctgctcggcatagtggtgggcgttgcgtctgtgatagccatggtcagccttgtcgcgggcttcaatagctctattaacacagcattttcccagtttgggtcaaacgtggtgaggcttaggaagtttagcccactgtacactgcgggggactctaccattccacaggagcaacgttcgcgccccaacctgacgaccgacgacgccgaggcgctcaaacgttacctgacgttcgcaaaagcggtcagttgccataggggcttgtggtggggttctggtgtaagcgtaaaaaactccacgggcgatgaggcctacgcccccagcataaccggcgtcactccagaatttgccaccgtccgaaacgtcgaaatagaggacggccgcttttttgcccaagcggacatgtaccacgccaccagaacctgcgtcatcggctacgatgttgtaaaagccctctttccacaaaaggatcctctgggcaggcaagtgtatttcgatggcgtgcccatgcgggtcgtgggtgtgctaaaaaggaaaggctctgtcttgggcgataatttggacaatgtgatatatgtcccctttgccacattgacgaaatgggccggatcccctccataa

SEQ ID NO: 2526 - protein, 279 aa, Unknown
  Obtained from environmental sample
  misc_feature (1)..(279): Xaa is any amino acid
MWSWPLASRRPWVCSLAGFPPEGPPACWSLTRSGRSRQMAFTLYKFRFLRAFNAENIRLAANSIRAQKLRSFLTLLGIVVGVASVIAMVSLVAGFNSSINTAFSQFGSNVVRLRKFSPLYTAGDSTIPQEQRSRPNLTTDDAEALKRYLTFAKAVSCHRGLWWGSGVSVKNSTGDEAYAPSITGVTPEFATVRNVEIEDGRFFAQADMYHATRTCVIGYDVVKALFPQKDPLGRQVYFDGVPMRVVGVLKRKGSVLGDNLDNVIYVPFATLTKWAGSPP

SEQ ID NO: 2527 - DNA, 516 bp, Unknown
  Obtained from environmental sample
  misc_feature (1)..(516): n is a, c, g, or t
ttggatggccttgacggcgcgggaaatacgaccaccctctcgcactatatgcggctccttgacgaggccggcatagtctgcggtttgcagaaatactcgaaaaaaaatattgtccaaaagcagtcaatcccaaaatttcaggtgcacaatcagtctttgctgtgcgcgctccatccatactcgtacccggaaataacggtggattgcgcggcgtggggcaggttcgtggagagcgcagtgggggcgcacctgatagcggagaagtcgcggctacgcggcggtaaaatcgggtactggagaaaaacggagggacgcaatacctacgagatcgacttcatattcgagtacaacggcaagatactcggaatagaggtgaaaagcggagcgggtagcggccggtttaaaggtttcggcaagttcaaagaatacttcccggaggccatgacgctcgtcgtcggcagggacggaattccgtgggaggaattcattgccggaaagatcgagcacctgttttaa

SEQ ID NO: 2528 - protein, 171 aa, Unknown
  Obtained from environmental sample
  misc_feature (1)..(171): Xaa is any amino acid
MDGLDGAGNTTTLSHYMRLLDEAGIVCGLQKYSKKNIVQKQSIPKFQVHNQSLLCALHPYSYPEITVDCAAWGRFVESAVGAHLIAEKSRLRGGKIGYWRKTEGRNTYEIDFIFEYNGKILGIEVKSGAGSGRFKGFGKFKEYFPEAMTLVVGRDGIPWEEFIAGKIEHLF

SEQ ID NO: 2529 - DNA, 516 bp, Unknown
  Obtained from environmental sample
  misc_feature (1)..(516): n is a, c, g, or t
atgatcagatggccgagacaatctgtgttcccagntatgcaaggaggtccccacgaccattcaactgcagcaaaagcggtgacttttgaagaagcattgcatcctgagtttcaaacttatgcaaagaatgttatagaaaatgcacgtgcaatggcggcagagcttatggcatctggttttaaaataatttctgatggcactgataatcaccttatggttgtggacgtaactagcaaaggaatttccggcaaagaagcggagcaggttttggatttggtgggcatttcttcaagccgttcaactattccttttgacccacgcaaaccaatggatccgtctggggttcgcttgggaacagcggctatcacaaccagaggctttgatacccaagacaccaaagcagttgcgaaagcaattgcacaggctattgagaatcacaaagacgaggcaaagctgaaaagcattagggaaagcattttggatctgtgcagaaaaaggcctttgtataagaactaa

SEQ ID NO: 2530 - protein, 171 aa, Unknown
  Obtained from environmental sample
  DOMAIN (1)...(139): Serine hydroxymethyltransferase
  misc_feature (1)..(171): Xaa is any amino acid
MIRWPRQSVFPXMQGGPHDHSTAAKAVTFEEALHPEFQTYAKNVIENARAMAAELMASGFKIISDGTDNHLMVVDVTSKGISGKEAEQVLDLVGISSSRSTIPFDPRKPMDPSGVRLGTAAITTRGFDTQDTKAVAKAIAQAIENHKDEAKLKSIRESILDLCRKRPLYKN

SEQ ID NO: 2531 - DNA, 444 bp, Unknown
  Obtained from environmental sample
  misc_feature (1)..(444): n is a, c, g, or t
ttgggctgccagttatgcgcttctatttgcccaaacgatgtgttgtctataaaagctcatggatccacaaaaccaaatatgtcttatgagcgcggctattgcaggccggaatgtgtcaagtgctctgaggtttgcccaaccggagcgataaagcccatcacaagagccgaaaaatcttccatacaaataggctgtgcagtgtggaacaaagaactttgcattataaatacagacaaagtggcttgcgatttatgctcacgcaaatgccccagtgccgcaataaccatgataccgcaaagcgcagatgtccccccagacactccaaaaatccctatgatagatacagaacgctgcattggctgcggtgcttgcgagcatttatgtcccgcccgcccgcatagcgcaattgttgtggaaggggttgaggttcatagaacgatttag

SEQ ID NO: 2532 - protein, 147 aa, Unknown
  Obtained from environmental sample
  DOMAIN (111)...(134): 4Fe-4S binding domain
  misc_feature (1)..(147): Xaa is any amino acid
MGCQLCASICPNDVLSIKAHGSTKPNMSYERGYCRPECVKCSEVCPTGAIKPITRAEKSSIQIGCAVWNKELCIINTDKVACDLCSRKCPSAAITMIPQSADVPPDTPKIPMIDTERCIGCGACEHLCPARPHSAIVVEGVEVHRTI

SEQ ID NO: 2533 - DNA, 549 bp, Unknown
  Obtained from environmental sample
  misc_feature (1)..(549): n is a, c, g, or t
ttgcgtttagacgccgcaaatgttatttccgttgattttttaagagagttatcgctttttagcaaaaatataaagaaatcattttggctcatgggagaaattgtcgagggtgattaccgcagtctggcaaatgaaggctgtcttgattcagtaacaaattatgagttatataaaagtctttggtcgagttttcatgaccaaaacatttatgagctatcatggacgctgaaaaggcaattctcaaataccggtctgtatcagaaccttgctttgtataactttgcggacaaccatgatgtaaaccgcgcagcgtcttcattaaaggatcaagccaatctttttccgttatacggcgctttattttgtgtacccggcattccttcaatctattatggcagtgagtacggtgtttacggaaaacggggcgctcatagtgattatgatttacggcctgcctgggaagataattggtcggaaacaaatatcggaaaagatcttttcagggaaatatgccgcttctccaaattgcgtcatgaatcagacgcataa

SEQ ID NO: 2534 - protein, 182 aa, Unknown
  Obtained from environmental sample
  misc_feature (1)..(182): Xaa is any amino acid
MRLDAANVISVDFLRELSLFSKNIKKSFWLMGEIVEGDYRSLANEGCLDSVTNYELYKSLWSSFHDQNIYELSWTLKRQFSNTGLYQNLALYNFADNHDVNRAASSLKDQANLFPLYGALFCVPGIPSIYYGSEYGVYGKRGAHSDYDLRPAWEDNWSETNIGKDLFREICRFSKLRHESDA

SEQ ID NO: 2535 - DNA, 747 bp, Unknown
  Obtained from environmental sample
  misc_feature (1)..(747): n is a, c, g, or t
atgattatgccggtcaatttgtttttgaaaagatttctcattcccatgacaatgaaaaaatcaaccgcgttattgccggtatccgagtacatcagaaaagagttgattaagttttatccttacgtggaatcgtcgcggaagattataaaaatcgtgggcaatgccgttaaatatcgaggtgtggagattaaaccccgtaagcgtgagaattttttattcttcccgggcaatttagaaccgcgcaaaaaccatcttaggcttattaaggcgctcgaaatcgtaaacacctcgggatttgagctgaatttacatctcgtcggacccgccggatggaaaaacgccgagttgcgcaaacaaataaactccgggccgctcaaagaccgcataaagtatctgggagtcgtcacagacgaggaattgcgcaatcagtacctgtcgtgcgcggcgttggttttcccgtccatctacgaggggttcggcataccggtactggaagcgctgatgttagacacgcccgtactgacgtcacggggaacggtaatggaggaaatcgcgggcgcgaacgcaatgtatttcgacccgtataacgcggaatctatcgccgggactataattgagtttctgaaatcgggaggaccggcaatcgacaaaacgagtttgaacggatatacttgggaaaaagcggctgaaaacctgctgacggtctttgaggagataggacggactatggaaagcgccgccgtatag

SEQ ID NO: 2536 - protein, 248 aa, Unknown
  Obtained from environmental sample
  DOMAIN (56)...(225): Glycosyl transferases group 1
  misc_feature (1)..(248): Xaa is any amino acid
MIMPVNLFLKRFLIPMTMKKSTALLPVSEYIRKELIKFYPYVESSRKIIKIVGNAVKYRGVEIKPRKRENFLFFPGNLEPRKNHLRLIKALEIVNTSGFELNLHLVGPAGWKNAELRKQINSGPLKDRIKYLGVVTDEELRNQYLSCAALVFPSIYEGFGIPVLEALMLDTPVLTSRGTVMEEIAGANAMYFDPYNAESIAGTIIEFLKSGGPAIDKTSLNGYTWEKAAENLLTVFEEIGRTMESAAV

SEQ ID NO: 2537 - DNA, 780 bp, Unknown
  Obtained from environmental sample
  misc_feature (1)..(780): n is a, c, g, or t
ttgtttcgggatcagtctttcggggttcgttctgatttaagtgtagaaggattaaattttaacgacttgaacaaaggttcgttgctaacttatagaaatagagttaaaagtcagaatccgcaattaccatataacaatttatccgatgaagcattttgcgaaaagttaggcattactaaagatggagctttaacttatggggggctattaacgcttggtaaagaagattctattaaaagaatattttcttcattctggatagattatcttgaaattccgggtgtttcttattctgacgctaaaacaagatatacttttcgtattcaggaacaggaaaacctatgggaatactacaatgtgcttattcaaagacttagaaactatgctgacaacccttttagaatgggtgataacggatttgcgtatgaagacgatacccaattggatgccttgcgtgaagggcttgtaaatatgctgatgcatgctgattattttagtgtaatgcactcaacaataagaacttataataacagaattgtttttcaaaatccgggaagatttgatataaatatttcagagtggcataaaaatgctatttccaaaccgcgaaatcctgtaattgccagaatttttcgatgggcaaagctggcggagaacgccggttttggatacgataaaatgattgcatggaaacataaagtggaatttaatacgcatattgattattcggaagctgcattttttctggatgataaagtttcagattctggngaagggtaa

SEQ ID NO: 2538 - protein, 259 aa, Unknown
  Obtained from environmental sample
  misc_feature (1)..(259): Xaa is any amino acid
MFRDQSFGVRSDLSVEGLNFNDLNKGSLLTYRNRVKSQNPQLPYNNLSDEAFCEKLGITKDGALTYGGLLTLGKEDSIKRIFSSFWIDYLEIPGVSYSDAKTRYTFRIQEQENLWEYYNVLIQRLRNYADNPFRMGDNGFAYEDDTQLDALREGLVNMLMHADYFSVMHSTIRTYNNRIVFQNPGRFDINISEWHKNAISKPRNPVIARIFRWAKLAENAGFGYDKMIAWKHKVEFNTHIDYSEAAFFLDDKVSDSGEG

SEQ ID NO: 2539 - DNA, 627 bp, Unknown
  Obtained from environmental sample
  misc_feature (1)..(627): n is a, c, g, or t
atgtacgacaaagccgataattttgacgccgatacgggaggccatcattttgtttttaccgtaaaaacccttgaaagaaacggcatatcagcggtaattatagaagacaagacaggtcttaagaaaaattcactttttggaactgatgtaaaccaggaattatgctccattcccgaattctgcggcaaaatcaaagccggaaaacacgcgcaggttacaaaagaatttatgattatagcgcgtcttgaaagtttaatcgcgggtttccctgttccccacgcgctggaaagggcgcgcgcttttgtagacgccggcgctgacggcgttatgatccatagcaaagaaaaaacaggcgaggacattaaagaattttgttctcttttccgcgccgaatatccgcatgtgccgctggtgctggttccgacaacgtataacaagttcacggaaaaagaacttgcctcatggggcgcgaatatcattatatacgcaaaccacatgctccgctcggcgtatcccgcgatggtcaacaccgcaaaaatgatcttgcaaaacgagcgctctcttgaggcggattcgctttgtatgcctattaaagagatacttgaattaattcccggcggtaaataa

SEQ ID NO: 2540 - protein, 208 aa, Unknown
  Obtained from environmental sample
  misc_feature (1)..(208): Xaa is any amino acid
MYDKADNFDADTGGHHFVFTVKTLERNGISAVIIEDKTGLKKNSLFGTDVNQELCSIPEFCGKIKAGKHAQVTKEFMIIARLESLIAGFPVPHALERARAFVDAGADGVMIHSKEKTGEDIKEFCSLFRAEYPHVPLVLVPTTYNKFTEKELASWGANIIIYANHMLRSAYPAMVNTAKMILQNERSLEADSLCMPIKEILELIPGGK

SEQ ID NO: 2541 - DNA, 393 bp, Unknown
  Obtained from environmental sample
  misc_feature (1)..(393): n is a, c, g, or t
ttggctatgagcggcgcggcgcccgtgccgacgccgccgcccatgccggcaacggcgatgaccgtgtgggcgtcgccgagagcctgcttgatcgcggcaaggctttcgatcgcggcgttgcggccgatttgcggatcggcaccgcaaccgagtcccttggcgcgctnttcgccgagccggatgcgcccgatctccttgggaagctccgccagggccgatgcgtccgtatcggcgcagatgaagtcaatgccccgcaattccgcgttcagcatattcctcacggcgttgccgccccccccgccgacgcctatgaccgtgattttcgccgtcatgcgcatccctttgaaaacgctctcatgcatttcgtatttgagacgccccgctcggcgctga

SEQ ID NO: 2542 - protein, 130 aa, Unknown
  Obtained from environmental sample
  SIGNAL (1)...(19)
  misc_feature (1)..(130): Xaa is any amino acid
MAMSGAAPVPTPPPMPATAMTVWASPRACLIAARLSIAALRPICGSAPQPSPLARXSPSRMRPISLGSSARADASVSAQMKSMPRNSAFSIFLTALPPPPPTPMTVIFAVMRIPLKTLSCISYLRRPARR

SEQ ID NO: 2543 - DNA, 765 bp, Unknown
  Obtained from environmental sample
  misc_feature (1)..(765): n is a, c, g, or t
ttggggagagggattaatatggctagttttcagggaatgaaaataaatccgaaaagatttcatatatcccagctaaaattttatatggtgataatccccatcgccatattcatgacattgcccataatctatattataaaccaggcatttaaacccctggatgaaattttccgctttccccctacgtttattgtacgccgtcccaccatgcaaaatttccgcatgattttaactcttacttccaatacgggcattcctatgtcccggtttcttattaacactatcattattactgttttaaccgttactttatccatttttattaccgctatgtcggcatacgccttttccaagaaaaaattcggcgctaaagaatggctgttcaggttaaaccaggcggcgcttatgtttgtacccgcggctgtgagcattccaaggtatttgattatcgttaaattggggcttaacaataattttctggtgcatattttaccgattattgcaatgccggtaggtttatttttggtaaagcaattcgtagaccaggtgccggattcattgattgaatccgcgagaatagacggagccggggaaatcatagtgatgtttaggatcgtattccctctgataaaacccgctcttgccacggtgggtatcctctgcttccaaatagtatggggggcaacagaagcatccaatttatacctggtggacgatacgttaaaatcctttgctttttatttaaatacccctggccacccttga

SEQ ID NO: 2544 - protein, 254 aa, Unknown
  Obtained from environmental sample
  misc_feature (1)..(254): Xaa is any amino acid
MGRGINMASFQGMKINPKRFHISQLKFYMVIIPIAIFMTLPIIYIINQAFKPLDEIFRFPPTFIVRRPTMQNFRMILTLTSNTGIPMSRFLINTIIITVLTVTLSIFITAMSAYAFSKKKFGAKEWLFRLNQAALMFVPAAVSIPRYLIIVKLGLNNNFLVHILPIIAMPVGLFLVKQFVDQVPDSLIESARIDGAGEIIVMFRIVFPLIKPALATVGILCFQIVWGATEASNLYLVDDTLKSFAFYLNTPGHP

SEQ ID NO: 2545 - DNA, 813 bp, Unknown
  Obtained from environmental sample
  misc_feature (1)..(813): n is a, c, g, or t
atggggtctgtgtcttcttcagaagaggaagagttatcaggaacgttaatcggcggttcagaagtatctgaagatgaatattcatcaaaagacgaatactcaacaaaagacgaggaactttccaagccgctgttattattgccgttgttattgcaggcaaaaatcaacaaaacaacgaaaaatacaaaccaacatttatacttcataaatgcctcctattgctttaatatagtaattttctatattaaaattatgcaaaatgaaaacttttgttggtggaagcacggtgttatttatcacatttacccgcagagtttttacgactccaatggcgatggcattggggatttgcagggcataatccaaaaattggattaccttgtggaactcggcattgaggctatatggctctcgcccatttatccctcgcctttgatagacggcggttatgatataaccgaccataaaggcataaatccaatttacggtgatatgaacgattttaagcaattgcttgaaactgcacaccaaaagggaattcgcgttatattagatttggtgttgaaccacacatcagaccagcatccttggtttttggagtcgcggagttcaagggataatcccaaacgcgattggtatatttggcaggctcctaaaaacaaacaaattccgccgaataattggcgaactaattttgggaaaaaggcttggaaatttgaccagactactggcgagtattattatcactcgtttttttatgagcagcccgatttgaattggcgaaaccccgaagtgaaaaaagcntatgtttga

SEQ ID NO: 2546 - protein, 270 aa, Unknown
  Obtained from environmental sample
  DOMAIN (100)...(270): Alpha amylase, catalytic domain
  misc_feature (1)..(270): Xaa is any amino acid
MGSVSSSEEEELSGTLIGGSEVSEDEYSSKDEYSTKDEELSKPLLLLPLLLQAKINKTTKNTNQHLYFINASYCFNIVIFYIKIMQNENFCWWKHGVIYHIYPQSFYDSNGDGIGDLQGIIQKLDYLVELGIEAIWLSPIYPSPLIDGGYDITDHKGINPIYGDMNDFKQLLETAHQKGIRVILDLVLNHTSDQHPWFLESRSSRDNPKRDWYIWQAPKNKQIPPNNWRTNFGKKAWKFDQTTGEYYYHSFFYEQPDLNWRNPEVKKAYV

SEQ ID NO: 2547 - DNA, 720 bp, Unknown
  Obtained from environmental sample
  misc_feature (1)..(720): n is a, c, g, or t
atggaaagcggaatggaactggaaatgaaacttgaaaacataagttcacccaaagatataaaggaatgcaaaattgaggagctagaagctctggcagatgaaataagggctgccattttgcggcaggtgtctgaacatggcgggcatttatcgtctagccttggaaccgttgaacttgccattgccctgcactatgtttacgacaccccaaaagacattttaatatgggatgtggggcaccaagcttatgcgcacaaattgctcacagggcgttatgaaaaatttttcaccatgaggcaacgcggcggaatttccggtttcccaaaaagaagcgaaagcatttacgacccctttggcaccgggcacgcaagcacatccatttctgcggctcttggttttgcggttgcgcgcgacattgttcaaaaaaacaatcaggttgtagcggttataggcgatggctcaatgacaggcggaatggtttttgaggcacttaacaactcaaggcaaacaaaaaagaatttcaccattatattaaacgacaacaaaatgagcataagcccaagcgttggtgctctttcaaaattattcagcaagctctctgttaaacacagccattccatagaagaaataggcaaatttttacgctccattccagaccacattggcggcggaaagttgcgggaatttatggagagcggaaagctagtttggaaaatatag

SEQ ID NO: 2548 - protein, 239 aa, Unknown
  Obtained from environmental sample
  misc_feature (1)..(239): Xaa is any amino acid
MESGMELEMKLENISSPKDIKECKIEELEALADEIRAAILRQVSEHGGHLSSSLGTVELAIALHYVYDTPKDILIWDVGHQAYAHKLLTGRYEKFFTMRQRGGISGFPKRSESIYDPFGTGHASTSISAALGFAVARDIVQKNNQVVAVIGDGSMTGGMVFEALNNSRQTKKNFTIILNDNKMSISPSVGALSKLFSKLSVKHSHSIEEIGKFLRSIPDHIGGGKLREFMESGKLVWKI

SEQ ID NO: 2549 - DNA, 798 bp, Unknown
  Obtained from environmental sample
  misc_feature (1)..(798): n is a, c, g, or t
atgggtatcaagacatacaaaccaataacaccgggcatgcgtcaatggacaagccttgatttttctgatcttacaaaagacgctaaacccgaaaaatccctgacaaagggcatgaaagaaagagccggacgcgattccttcggaagaatcagcgtaaggcacaagggcggcggacacaaacgccgttaccgtgaaattgattttaagcgcgacaaaaccggaattcccggcaaagtcgcttctatagaatacgatccgaaccgcagttcgaatatcgccctcattcattacaaagacggcgaaaagcgttacatcatagctcccaaagatttaaaggtcggcgctgtggttgtaagcgggccggacgccgcgattgaaccgggcaacgctcttcctctggaaaatatcccgttagggtttaccgtatacaacattgagttgacattgggcaagggcggacaactggttcgttcagccggaacaagcgcccttatcgccgcgaaagaaggcgattacgtcacaataaagttaccctcgggcgagatgagaatggttttcaaaaaatgttatgcgacaatcggaaacgtcggcaacgaagaccacatgaacataacttttggaaaagccggccgcaaacgctggctaggagtgcgccccacggtacgcggtatggtaatgaaccctgtggatcacccgcacggcggcggcgaaggaaagaacaagggtattcaccctgttactccctggggacagccgacaaagggatacaagacacgcaagaacacaanccggccataa

SEQ ID NO: 2550 - protein, 265 aa, Unknown
  Obtained from environmental sample
  DOMAIN (43)...(119): Ribosomal Proteins L2, RNA binding domain
  misc_feature (1)..(265): Xaa is any amino acid
MGIKTYKPITPGMRQWTSLDFSDLTKDAKPEKSLTKGMKERAGRDSFGRISVRHKGGGHKRRYREIDFKRDKTGIPGKVASIEYDPNRSSNIALIHYKDGEKRYIIAPKDLKVGAVVVSGPDAAIEPGNALPLENIPLGFTVYNIELTLGKGGQLVRSAGTSALIAAKEGDYVTIKLPSGEMRMVFKKCYATIGNVGNEDHMNITFGKAGRKRWLGVRPTVRGMVMNPVDHPHGGGEGKNKGIHPVTPWGQPTKGYKTRKNTXRP

SEQ ID NO: 2551 - DNA, 798 bp, Unknown
  Obtained from environmental sample
  misc_feature (1)..(798): n is a, c, g, or t
gtgatccatgtgatcacccaaaggggcaggggctatagttttgccgaagaagatcctggctcctatcacggtgttccggcgtttcgtatagatagggatctagaagccggttctggcgcgaaaacttttaccgcggctttcggcagcgccctggttgaagcagccggagcggacgataggattgtggcgattaccgcggcaatggaagagggaaccggcctttccacatttaggcgtgcgtttcccgaccgcttttttgacgttggaatcgcggaagcccacgcggttacctttgccgccggccttgccgcggcgggccttcgtccgattgtggctgtttattccacctttattcagcggggagcggatcaggtaatccacgatgtctgcttgcaaaacctgccggtgatcttcgcgcttgatcgctcggggctggttggcgaagacggcgagacccatcagggcgtctttgacattgctctcttccgttccgcacctgccatcgcgatccttgccccggcaggggaagaggagcttgcgcaaatgctgcgatgggctctttcccgccctgggccggtgatgatccgctatcctaaggcaatttgcccggcttcatgcccgccgggcgagccggctttttttcttcctatcgaagaggggaggggagtctggataaggcgcacaggcgcaagtatctgcattatgttttcaggcggtctttatacccaggcagtacaggcggaagaaattcttggaaaagaaaaaatagccgtagacttgtataatatccggttttaa

SEQ ID NO: 2552 - protein, 265 aa, Unknown
  Obtained from environmental sample
  DOMAIN (41)...(205): Transketolase, pyridine binding domain
  misc_feature (1)..(265): Xaa is any amino acid
MIHVITQRGRGYSFAEEDPGSYHGVPAFRIDRDLEAGSGAKTFTAAFGSALVEAAGADDRIVAITAAMEEGTGLSTFRRAFPDRFFDVGIAEAHAVTFAAGLAAAGLRPIVAVYSTFIQRGADQVIHDVCLQNLPVIFALDRSGLVGEDGETHQGVFDIALFRSAPAIAILAPAGEEELAQMLRWALSRPGPVMIRYPKAICPASCPPGEPAFFLPIEEGRGVWIRRTGASICIMFSGGLYTQAVQAEEILGKEKIAVDLYNIRF

SEQ ID NO: 2553 - DNA, 642 bp, Unknown
  Obtained from environmental sample
  misc_feature (1)..(642): n is a, c, g, or t
atgttcagattggccgagcgattatntcggggattaagaaaacggattttggaaaacatcgggcagattcgcaagatggggacggattatcttgcctattcattgattgatactgtggttgacgaatattttattacactgactcatttggaaaatgatattgaagatctggaagatcgcgccgtgaagacagataatgacgcgttcatttccgaaatacaggaaacaaaaaaatttcttttctatataaaacgggcaatgctgccgctgcgggagaatcttatgattatatcccgccaggatatgctgttgacaaacgaggaattaaaaccgttccttcaggacttgcgggaaaatttatctaacgcaatagaatccgtagaaacatatcgtgaatggctgacaaacataatggatgtaaacctttcggttctgtcataccaattaaacaaagtgatgaaaatactggctgttatatcggcaatatttatcccattaacttttattgcggggatatatggcatgaattttgaatttatgcccgaactggcgcagcccatgggttatccttttgtgctgggattcatggggactgtcgcgctggcaatggtcgtattatttaaaacacggaaatggttttaa

SEQ ID NO: 2554 - protein, 213 aa, Unknown
  Obtained from environmental sample
  DOMAIN (4)...(213): CorA-like Mg2+ transporter protein
  misc_feature (1)..(213): Xaa is any amino acid
MFRLAERLXRGLRKRILENIGQIRKMGTDYLAYSLIDTVVDEYFITLTHLENDIEDLEDRAVKTDNDAFISEIQETKKFLFYIKRAMLPLRENLMIISRQDMLLTNEELKPFLQDLRENLSNAIESVETYREWLTNIMDVNLSVLSYQLNKVMKILAVISAIFIPLTFIAGIYGMNFEFMPELAQPMGYPFVLGFMGTVALAMVVLFKTRKWF

SEQ ID NO: 2555 - DNA, 390 bp, Unknown
  Obtained from environmental sample
  misc_feature (1)..(390): n is a, c, g, or t
ttgcgcttgcacgcagaactgtggcaaaatacaggaaggaacttgatatgggctcttcttacacccgaaagatacgggaaacaaattcaggaggttaaaatgaacacggaaatcaaagcagtacattttacaatgcacgatgacgcgagggactaccttaataaaaaaatagaaagaatacacaatgccgaaaatatgattgttgacttgatcatcaccataaaaaaagaaaaagattttgacgcggaagctacagtcaatttccgctggggagtttcgattcatgtcaaagaagctgattttgacattataaaagcaattgaccagatgatggacaaactggaatctaaaatcaccaaagaaaaagaaaaagtaaaggaaaaaagatag

SEQ ID NO: 2556 - protein, 129 aa, Unknown
  Obtained from environmental sample
  DOMAIN (35)...(128): Sigma 54 modulation protein / S30EA ribosomal protein
  misc_feature (1)..(129): Xaa is any amino acid
MRLHAELWQNTGRNLIWALLTPERYGKQIQEVKMNTEIKAVHFTMHDDARDYLNKKIERIHNAENMIVDLIITIKKEKDFDAEATVNFRWGVSIHVKEADFDIIKAIDQMMDKLESKITKEKEKVKEKR

SEQ ID NO: 2557 - DNA, 330 bp, Unknown
  Obtained from environmental sample
  misc_feature (1)..(330): n is a, c, g, or t
ttgaaactccatgaaacaacggtttcgcgtatcgcaaacggaaaatatatgcaaactgaatggggtatttttgaaattcgatacttttttacaaattcaataggcaaaaacagctcaaacggttcaaatttttcaaaagaaggagtaaaacaggtaataaaagagataataaccgcagaaaacagattgctttcggatcaagatatttccgattttttaagcaaaaggggaattgcgcttgcacgcagaactgtggcaaaatacaggaaggaacttgatatgggctcttcttacacccgaaagatacgggaaacaaattcaggaggttaa

SEQ ID NO: 2558 - protein, 109 aa, Unknown
  Obtained from environmental sample
  DOMAIN (2)...(102): Sigma-54, DNA binding domain
  misc_feature (1)..(109): Xaa is any amino acid
MKLHETTVSRIANGKYMQTEWGIFEIRYFFTNSIGKNSSNGSNFSKEGVKQVIKEIITAENRLLSDQDISDFLSKRGIALARRTVAKYRKELDMGSSYTRKIRETNSGG

SEQ ID NO: 2559 - DNA, 801 bp, Unknown
  Obtained from environmental sample
  misc_feature (1)..(801): n is a, c, g, or t
gtgaaccgcgaaagaatacagaaatatccgtttagttttgtctgtttcggcgagcggaaacaatggggcaagttaagttatgtcgcgcgccctgtaaccatgatgaaaatgatcgacagatttatgccgaaagccgggtctcttggaataaagaatatagcgttcagaaattttggttcaaggcttgccggagattatcatgaaaaaaggcacataagccgcgaagcttctatgataatgcgccaggaaaaacttgaacagttaaaacaatccggaaaagaagttatcgttaatacagggtttgtctatgcggcgccctggtcagatttaattaccgacatgattattgaagatcaggcgtttggcataacggatacctcagtcccgttcctgcctattgttttgcacggcatagtgccgtataccggaaaggcgataaaccttgcggaagattacacaaagaatttattaaaatcgattgaatgcggggcagggctctactttagtttcatgaaagaagatacagccgagttacaggaaacaaagttcaggcaattctacgcgaacgagtatgacaaatgggcgtcagacgcgaacgcgttatacaaaagatttacggccgattttgggaatctgtataaccagaagatagttaaccatgtgattttatcgcctgatgtaacaattacggaatacgaggacggaacgaaggtttttgtaaacgcgagcgactttgacgcaagttacaacggaatgaatatcgaagcggatacttataaaataatcgaaaagggaaggtga

SEQ ID NO: 2560 - protein, 266 aa, Unknown
  Obtained from environmental sample
  misc_feature (1)..(266): Xaa is any amino acid
MNRERIQKYPFSFVCFGERKQWGKLSYVARPVTMMKMIDRFMPKAGSLGIKNIAFRNFGSRLAGDYHEKRHISREASMIMRQEKLEQLKQSGKEVIVNTGFVYAAPWSDLITDMIIEDQAFGITDTSVPFLPIVLHGIVPYTGKAINLAEDYTKNLLKSIECGAGLYFSFMKEDTAELQETKFRQFYANEYDKWASDANALYKRFTADFGNLYNQKIVNHVILSPDVTITEYEDGTKVFVNASDFDASYNGMNIEADTYKIIEKGR

SEQ ID NO: 2561 - DNA, 627 bp, Unknown
  Obtained from environmental sample
  misc_feature (1)..(627): n is a, c, g, or t
atgggcggcaacgcaatccggtgcgtggcgaaatacctttttgacaacggtatagtaaaaaaacaaaaaatgcggatagaaaccttaagcggcatcagggaactttttcttacgacaagaaacgaaacggtattgtcggtaaaagtagacatgggccgcgcggaattgcacccctcaaaaattcccgtaaaacttttcggcgagaacgtaatcgcaagaccggtaagaatcggcggcagggaatataagatcacctgtgtttcgatgggcaacccccatgccgtagttttctgcgatagaataggaaaacttgacctgcacgaaataggtccgttgtttgaaaatgatccgatgtttccggaaagggtaaacacggagtttgttgaaatcatggacaggaatcatcttaagatacgggtatgggagcgcggaaacggagaaactcaagcctgcggaacgggagcctgcgcctccgcggttgccgccgtcctgaacggatacagcgacaaggggactgatatcaaagtacagcttcccggcgggaatctgattattaattacaccgatgaagcggtttacatgacgggcgattgcgtgaaggtgtttgacggcgttgttgagatttag

SEQ ID NO: 2562 - protein, 208 aa, Unknown
  Obtained from environmental sample
  DOMAIN (85)...(201): Diaminopimelate epimerase
  misc_feature (1)..(208): Xaa is any amino acid
MGGNAIRCVAKYLFDNGIVKKQKMRIETLSGIRELFLTTRNETVLSVKVDMGRAELHPSKIPVKLFGENVIARPVRIGGREYKITCVSMGNPHAVVFCDRIGKLDLHEIGPLFENDPMFPERVNTEFVEIMDRNHLKIRVWERGNGETQACGTGACASAVAAVLNGYSDKGTDIKVQLPGGNLIINYTDEAVYMTGDCVKVFDGVVEI

SEQ ID NO: 2563 - DNA, 504 bp, Unknown
  Obtained from environmental sample
  misc_feature (1)..(504): n is a, c, g, or t
atgtcaaaagaacaatttcaagtttctttgagttctaatatatttggaaatagggctcttaattttatatttataaattattgcgagtttatttctgcaaaaacatataacatagatgaactaaaaaaaataaatgtattaaatgcaaatattgaacatattttgtcgcagactcctaattttgctcccgcagcattgggcttttcagacgaagaagattatataaattatgaacatcgtttgggaaatttaacattactagaaaaatcattaaattcaagtgtacaaaataaatcggcaattgaaaaagtggattattacgacaaaagttatttaattataacaaaacaactcagttcaaatattaatagtttaaaggaatttacgaaaaaagatctaaatgatagaacaagaattctggctgaatatatagcaaaccgttggtggtgtgaaataagttctattgatgataatttaaaatacgcagagcaagaagaaatataa

SEQ ID NO: 2564 - protein, 167 aa, Unknown
  Obtained from environmental sample
  DOMAIN (51)...(142): Protein of unknown function (DUF1524)
  misc_feature (1)..(167): Xaa is any amino acid
MSKEQFQVSLSSNIFGNRALNFIFINYCEFISAKTYNIDELKKINVLNANIEHILSQTPNFAPAALGFSDEEDYINYEHRLGNLTLLEKSLNSSVQNKSAIEKVDYYDKSYLIITKQLSSNINSLKEFTKKDLNDRTRILAEYIANRWWCEISSIDDNLKYAEQEEI

SEQ ID NO: 2565 - DNA, 864 bp, Unknown
  Obtained from environmental sample
  misc_feature (1)..(864): n is a, c, g, or t
ttgtatatcaggggggaacttcgcaaggcggcgtacagctcccttttacgcgctgaaatgatgacacgtgaaaacggaaaatttattccgtcattaatacagcatgattttgattttgacggcgtaaaagaatttattttccaggatgcgatgattaactgttatattcaaccaaggggagcctgtatttttgaacttgattatctgcccaaggaatggaactatcttgactgcggttcaaacgactacggaagacgcgccacctttgccgacgtattgattccgtttgagataaagactgataaacctgaagacattattacggaaaaatcaaggctttgctttattgagcaatatgaatcggtagcgcaggataaaaaaggaaaatcatgttttaaacttccggccttaggcgatgatatgccatttggagacatagaaataaataaatgttttttaattaaaaaggacgttctaactgtttcatataatttaaaaaacacgggcaaatatacgcaaaaatttaaattcagcccaataatttatttttctttcgcgaatatgacggacgagtatgtccgcttttacgcggttgacaataatggaaaagatacccatttacacaataaatttgacgcgggcaatttaaaaatccttgatgtaaaaaacgaggtgcagattttaatcggctccataaggcctttttcaggatttctcaaccctattttcaataatgatttctatcaggcgacaataatactgccggtgtttccaatctccattaaaagcggagaggcgtgngcgaatgagtttagctttaagtttcacattagtattgaattacccatttttttagtatcataa

SEQ ID NO: 2566 - protein, 287 aa, Unknown
  Obtained from environmental sample
  misc_feature (1)..(287): Xaa is any amino acid
MYIRGELRKAAYSSLLRAEMMTRENGKFIPSLIQHDFDFDGVKEFIFQDAMINCYIQPRGACIFELDYLPKEWNYLDCGSNDYGRRATFADVLIPFEIKTDKPEDIITEKSRLCFIEQYESVAQDKKGKSCFKLPALGDDMPFGDIEINKCFLIKKDVLTVSYNLKNTGKYTQKFKFSPIIYFSFANMTDEYVRFYAVDNNGKDTHLHNKFDAGNLKILDVKNEVQILIGSIRPFSGFLNPIFNNDFYQATIILPVFPISIKSGEAXANEFSFKFHISIELPIFLVS

SEQ ID NO: 2567 - DNA, 717 bp, Unknown
  Obtained from environmental sample
  misc_feature (1)..(717): n is a, c, g, or t
gtggattcttcccatgttacggtggacggctatgccgaagaggcgctgatttcttcaggcggcaaagccacggtaactatgggctttaagggcggtggaaagggagttctcaaggccagggccggtgtttccgccgcgtttgttgaacgagcttcggtggtggcattgggagacgttcagctcaacaagggatccattctttcaagtattaaaacaaacggaaaactttctattacctctgaaagcgggaagctctccggcggagtctgccaggcaagacagggaattgacgccgccgatattggatccgagaaaggccttcgtaccgaattatcctttggtcaggactacttcatcaaggagcagatagccgcctgcgaggaagaaattgctaaaaccaggaacgacctttcagagctggaagaaaaaataactgagcttcgaaaagaaaagcggaagcttcctgatgatttaaaaattgaaaaaataaggttggtaaagcttttggagcagaaaaatttaaagatttttaccctaagagaaaaatttgaggaacactttgaatctgaaattcgctgccgcggtactgttttttcaggggtggtgatagaaagccacaacaggtattatgaggttcagcaaaaacgaaatcaggtggttttttattttgaccgcgaatccggaagaataaaagaaaagcccatgacagaattctaa

SEQ ID NO: 2568 - protein, 238 aa, Unknown
  Obtained from environmental sample
  misc_feature (1)..(238): Xaa is any amino acid
MDSSHVTVDGYAEEALISSGGKATVTMGFKGGGKGVLKARAGVSAAFVERASVVALGDVQLNKGSILSSIKTNGKLSITSESGKLSGGVCQARQGIDAADIGSEKGLRTELSFGQDYFIKEQIAACEEEIAKTRNDLSELEEKITELRKEKRKLPDDLKIEKIRLVKLLEQKNLKIFTLREKFEEHFESEIRCRGTVFSGVVIESHNRYYEVQQKRNQVVFYFDRESGRIKEKPMTEF

SEQ ID NO: 2569 - DNA, 345 bp, Unknown
  Obtained from environmental sample
  misc_feature (1)..(345): n is a, c, g, or t
gtggaccgggngaaacgagaaggtaaactacctggcccagccgncttcatccggcggtggctccgtttgataaaaatgaccattgacgcggcccacaagcacggcctcagggccgccatgtgcggggagatggcgggagaccccctgtttacgcccgtgctgttgggactgggccttgatgaattcagcatgacttcctcatccattccccggataaaaaaggttatccgggagttgtccatggaagactgcaaagcccttgcggaagaaacgctgcgcggaaaaaccgcggcagcgaacaacgcgctggctgcgtcatggatgaaagaacggaaactaaaatga

SEQ ID NO: 2570 - protein, 114 aa, Unknown
  Obtained from environmental sample
  misc_feature (1)..(114): Xaa is any amino acid
MDRXKREGKLPGPAXFIRRWLRLIKMTIDAAHKHGLRAAMCGEMAGDPLFTPVLLGLGLDEFSMTSSSIPRIKKVIRELSMEDCKALAEETLRGKTAAANNALAASWMKERKLK

SEQ ID NO: 2571 - DNA, 321 bp, Unknown
  Obtained from environmental sample
  misc_feature (1)..(321): n is a, c, g, or t
atggcagtttataccatgacccatgccagggaactactgcaggttaaggcccatgtgatccggtactgggaacaggaaatcccgcttattcagagcggcaaggacaggtacggccgcagaatatattcggcaagggatctccagattttgctgcgtctgaagcacctgctgtacaaccgccgttttacgctggaaggggccaaagaagaactctaccgggaactgaccgggaataaccaggatttaagaagcggcatttccacgctccgttcggaactcctggatttatatttctttataaaggaaagaaaacaaaattaa

SEQ ID NO: 2572 - protein, 106 aa, Unknown
  Obtained from environmental sample
  misc_feature (1)..(106): Xaa is any amino acid
MAVYTMTHARELLQVKAHVIRYWEQEIPLIQSGKDRYGRRIYSARDLQILLRLKHLLYNRRFTLEGAKEELYRELTGNNQDLRSGISTLRSELLDLYFFIKERKQN

SEQ ID NO: 2573 - DNA, 582 bp, Unknown
  Obtained from environmental sample
  misc_feature (1)..(582): n is a, c, g, or t
atgaaaaggaatttttgtacggcagttgtgtccctggcgatgattctcggcggcctgcaaacggtgtgcgcccagcagaacagcggcgattctgccggagtaattatcaatcattatgcggcgcggaattttacggcgggcgccattcctgccgttgatcttgatcgtatcatccaggcgggaatccgtgcgcccagtgcgcgaaacctccagccctggcattttaccgtagtgcaaaaccagaatctggcaaaaaaaatggtttccgacaatgcggacggaaatgtccttatcattgtttccgcccagggagacggtaaaaccaacggcgttcaaattcttgactgcgcactggcggtagaaagcatttatctggcggcccaggccctgggttacggctcccgcatatacaccggccccatggacagcctgaataaaaacctcaaagccgagttgagccttccatccggccacagcgccgtagccctggtcagggtaggaaaagtccagggcggagtcgatgcggtcagcgcggcctcaagccggaagaaagctgaagaaatggntacttatcagaaataa

SEQ ID NO: 2574 - protein, 193 aa, Unknown
  Obtained from environmental sample
  SIGNAL (1)...(24)
  DOMAIN (35)...(168): Nitroreductase family
  misc_feature (1)..(193): Xaa is any amino acid
MKRNFCTAVVSLAMILGGLQTVCAQQNSGDSAGVIINHYAARNFTAGAIPAVDLDRIIQAGIRAPSARNLQPWHFTVVQNQNLAKKMVSDNADGNVLIIVSAQGDGKTNGVQILDCALAVESIYLAAQALGYGSRIYTGPMDSLNKNLKAELSLPSGHSAVALVRVGKVQGGVDAVSAASSRKKAEEMXTYQK

SEQ ID NO: 2575 - DNA, 819 bp, Unknown
  Obtained from environmental sample
  misc_feature (1)..(819): n is a, c, g, or t
atgatcgaaacagcgcggcttctgtcctcggatgccgttccccaggtcgcaaaaatagccctngccggtttcgcgacctttgccgtactgcccaacgcgggcgtttttgccgtggaactaacggcggcgggggcggcgggcgtccatggagtaggggcggtaaaccttcccggagccggcgcgttaagcgatctgcgctacgagccgttcagcctccgtttcctgctcttacttattggcgagggcattatcggcataataatcggcttttacctgacgattatttttgcgactttttccacagccggtcagtttttttccctgcaaatgggcctgggcgcgtcggaaacattcgaccccctggcgcagattgaaaacccgctgatgggccaatattttaacttggtttcttatctggttttcctggtcgtaggcggtttcagagaactgtttctgggcggtttctggcgttccgtgcagagcattaatatcgcaatgcttattgagggcagggaacatgtcattggtatgatggcgtcggggcttgccaagctcttcctcgacgctatggttatatccctgcccattcttggaaccctttttcttacatcgctcgcgaccgggcttatttccaaagccgcgccccagatcaacatactttcggaaggtttccccattgcgattcttgccgcgtatcttttactgttcgcgactctccctttccttgtcgaaacatttgcacatgtcatggacgagggttttgccaacatacagaagctctacaccttgattggacagcagatagggggcggatcatga

SEQ ID NO: 2576 - protein, 272 aa, Unknown
  Obtained from environmental sample
  DOMAIN (10)...(258): Bacterial export proteins, family 1
  misc_feature (1)..(272): Xaa is any amino acid
MIETARLLSSDAVPQVAKIALAGFATFAVLPNAGVFAVELTAAGAAGVHGVGAVNLPGAGALSDLRYEPFSLRFLLLLIGEGIIGIIIGFYLTIIFATFSTAGQFFSLQMGLGASETFDPLAQIENPLMGQYFNLVSYLVFLVVGGFRELFLGGFWRSVQSINIAMLIEGREHVIGMMASGLAKLFLDAMVISLPILGTLFLTSLATGLISKAAPQINILSEGFPIAILAAYLLLFATLPFLVETFAHVMDEGFANIQKLYTLIGQQIGGGS

SEQ ID NO: 2577 - DNA, 858 bp, Unknown
  Obtained from environmental sample
  misc_feature (1)..(858): n is a, c, g, or t
atggtcagattggccgagcggccgaggtggcgcattgtgtgggattttcgcctgccccgcgcactctcggcaactcttgccggagcctcgctctctttgagcgggcttttattgcagagcatttttagaaatccgttagcaggtccttttgtgcttggcataagttccggtgcctcacttggagttgcgttttttttgctcgcgggttttggtctaggctcgctgggtttgctctctgcggcagctttgggagctatggcggttctcgcctttatagccacattctccaaatttatccccggcaaaacaagtcttttggtgctgggtttaatggcgggttattttgcggatgccattgtttcaattttaatacacggcacacattcggaagccttgcgaggttttatatcttggggctttggttcttttggcaggttgcgttgggaagaattgccgtatttcgcaggctgcgttttgcttgggcttgcgttgtctgttttttgcgtaaagtatttgaacgcaatagctcttggcgatgacggcgcaaaaagtttggggataaatgttaagcaaaagcgactgctttcgcttttggcggcagcggtgttagcggcaaccgccacttcgttttgcggtccgataggttttataggaatggcaactccgcatttggcgaggggatttttcaatagcgataatcagaggattttaattcccgcttcgcttttaacgggtgctttgctcgcacttgcggcagggcttttgtcgcaggggttgtggggaattccgccgcttccgttaaatgcggtggctagtttgatgggtgcgcctgtggtgatttgggtgttggtgaggtaa

SEQ ID NO: 2578 - protein, 285 aa, Unknown
  Obtained from environmental sample
  DOMAIN (4)...(285): FecCD transport family
  misc_feature (1)..(285): Xaa is any amino acid
MVRLAERPRWRIVWDFRLPRALSATLAGASLSLSGLLLQSIFRNPLAGPFVLGISSGASLGVAFFLLAGFGLGSLGLLSAAALGAMAVLAFIATFSKFIPGKTSLLVLGLMAGYFADAIVSILIHGTHSEALRGFISWGFGSFGRLRWEELPYFAGCVLLGLALSVFCVKYLNAIALGDDGAKSLGINVKQKRLLSLLAAAVLAATATSFCGPIGFIGMATPHLARGFFNSDNQRILIPASLLTGALLALAAGLLSQGLWGIPPLPLNAVASLMGAPVVIWVLVR

SEQ ID NO: 2579 - DNA, 738 bp, Unknown
  Obtained from environmental sample
  misc_feature (1)..(738): n is a, c, g, or t
gtggcggattttatttaccatgaatatgatccggggaacccctatccctatggagacataggcgctgttctgggaaaccggatccgcgtctgccctgttctgaaccggatagaaagaatggttcccaaagagactatccgggctacggtggtgggggcaggttccaatgccgtcgatatttccggctccaccatcgcatggaatgacaaatcaatacttccggtccggaacgtcccgatagtcaaaatgacggctgatgatgagggggatgcctacaggcttttccccggcaggcttgccgaaaaacttacatggttcaaggatgagtccggaaactgccagcttgcggcggttggttttacgggcatacataacccttcattcgaacttatcaaggatctgagcgtaaaaataatacagggcatgggtgattaccttaaaacagacaacccggttatcctgattattgaaaatgacatggctaaatcactgggttacgccctgatgaacgctttgccggaaaaaaaattcattgttcttgacagcatcaaggtggatacgggtgattatattgatattggcctgccggcagcggcaggcagggtgatcccggtagttgtaaaaacacntggtgtttggaaaatgaagaagcggctaatccggttttgccggggtactagcataccatccctattttctatatactcccaaatgtgggcagcaaattcaccagcgtga

SEQ ID NO: 2580 - protein, 245 aa, Unknown
  Obtained from environmental sample
  DOMAIN (1)...(214): Ethanolamine utilisation protein EutA
  misc_feature (1)..(245): Xaa is any amino acid
MADFIYHEYDPGNPYPYGDIGAVLGNRIRVCPVLNRIERMVPKETIRATVVGAGSNAVDISGSTIAWNDKSILPVRNVPIVKMTADDEGDAYRLFPGRLAEKLTWFKDESGNCQLAAVGFTGIHNPSFELIKDLSVKIIQGMGDYLKTDNPVILIIENDMAKSLGYALMNALPEKKFIVLDSIKVDTGDYIDIGLPAAAGRVIPVVVKTXGVWKMKKRLIRFCRGTSIPSLFSIYSQMWAANSPA

SEQ ID NO: 2581 - DNA, 654 bp, Unknown
  Obtained from environmental sample
  misc_feature (1)..(654): n is a, c, g, or t
atgcaagcagttaaattaaaacccacttcccatttcagcggcgaagttagagttccgggttcaaaaagcatttccaacagagtattgctcatgggagctttggcagagggagagagcaaattcattggaattttagaaagcgaagataccagatatatgagagaggcacttgaaaaactgggcaaaaacttttcaaacgaaaaagcggaattgtttttgggcaatgcaggaacggctatgcgttctttaacagccgccttgtgcctgaaacacggcgaatacattttgcgcggcgaaccgagaatgcacgagagacccataaaagatttggtggatgcactgagaacattgggagcaaatattgaatacttgggaactgagggctgcccgcctttgaaaataaaggcaagtggattaagtgggggagttgttcatataaaaggaaatatatccagccagtttttgtctgccttgttgattgccgctccatattgcagagaaccgctggaaataattgtagatggagaattgatatccagaccttatgtgtatatgacaattcgtttgatggaaaaatttggaataaagcgggagaataacgactatanaagttttcaggttggaaaaaggagtttacaaagcccagactcttga

SEQ ID NO: 2582 - protein, 217 aa, Unknown
  Obtained from environmental sample
  DOMAIN (6)...(217): EPSP synthase (3-phosphoshikimate 1-carboxyvinyltransferase)
  misc_feature (1)..(217): Xaa is any amino acid
MQAVKLKPTSHFSGEVRVPGSKSISNRVLLMGALAEGESKFIGILESEDTRYMREALEKLGKNFSNEKAELFLGNAGTAMRSLTAALCLKHGEYILRGEPRMHERPIKDLVDALRTLGANIEYLGTEGCPPLKIKASGLSGGVVHIKGNISSQFLSALLIAAPYCREPLEIIVDGELISRPYVYMTIRLMEKFGIKRENNDYXSFQVGKRSLQSPDS

SEQ ID NO: 2583 - DNA, 360 bp, Unknown
  Obtained from environmental sample
  misc_feature (1)..(360): n is a, c, g, or t
atgactgcgctcacgataaaacttggggcaaaaattcgtaatttgcggacaaaccgtcactattctcaagagcaactggctggattggcgggaataaacgctaaatatctgagtgaagtcgagcggggggaaaggaatctttctgtggaacttttggtggccttggcgaacgtgctggaagtttcacctgcggatctgttgaccgacgagcagtgcccaagccgtgaggagatgatcgccaaaatagtccggctgattcagcctatgccaatgaatttgcttgtttttgtgtatcaaaacttgctgttgattcaagtattgaacaaaagggaacgacgggctgaggcattgcgcagttga

SEQ ID NO: 2584 - protein, 119 aa, Unknown
  Obtained from environmental sample
  DOMAIN (12)...(66): Helix-turn-helix
  misc_feature (1)..(119): Xaa is any amino acid
MTALTIKLGAKIRNLRTNRHYSQEQLAGLAGINAKYLSEVERGERNLSVELLVALANVLEVSPADLLTDEQCPSREEMIAKIVRLIQPMPMNLLVFVYQNLLLIQVLNKRERRAEALRS

SEQ ID NO: 2585 - DNA, 714 bp, Unknown
  Obtained from environmental sample
  misc_feature (1)..(714): n is a, c, g, or t
atgatgtccctgatagacaagtttactcgtaattccgcgaaatttaacctgcataacatcgcatttagaagtctgggcgcgaaactttcaggcgactaccatgaaaagaggcttgtcagccgtgaagcctcaatgaagatacggcaggaaaaactcaatgaattgtcaggcaagggaaccggcgttatgttgaacacgggttttgcttatgccgcgccatgggcaagcttcattaccgacatggtcattgatgatcaaggattcggcatcaccgatgtttctgtgccattttaccagattgttcttcacgggcttgtgccgtacacgggaccggcaataaaccttgccgaagattacacgatgaatctgcttaaaacggttgaaagcggggcgggactgtacttcagttttatgaccgaagaaactaccgtgttgcaggaaacaaagttcaggcaattttatgccaatgaatatgataaatgggcgccggatgccaatgccctgtaccagaaatttaccgttgattttgcgggactttataatcaggcaattaccaatcatatcattatatccacgggactgacgcttaccgaatatgaagacggaaggcgcgttatagtgaacagtacaagcaatgatgttaattataacnggtgttgttatcggcgcgtacagttacgcggtactacggcggggggaatgatgtatttttaa

SEQ ID NO: 2586 - protein, 237 aa, Unknown
  Obtained from environmental sample
  misc_feature (1)..(237): Xaa is any amino acid
MMSLIDKFTRNSAKFNLHNIAFRSLGAKLSGDYHEKRLVSREASMKIRQEKLNELSGKGTGVMLNTGFAYAAPWASFITDMVIDDQGFGITDVSVPFYQIVLHGLVPYTGPAINLAEDYTMNLLKTVESGAGLYFSFMTEETTVLQETKFRQFYANEYDKWAPDANALYQKFTVDFAGLYNQAITNHIIISTGLTLTEYEDGRRVIVNSTSNDVNYNXCCYRRVQLRGTTAGGMMYF

SEQ ID NO: 2587 - DNA, 624 bp, Unknown
  Obtained from environmental sample
  misc_feature (1)..(624): n is a, c, g, or t
ttgccgccgtatcagacagcgtgcggagttacggatatgctggctcatataatggaacgctattttacaaaagagcccaatgtggaactaacggacgaactttgcgagggcgcgatgaggacaatcataagaaacgcccgtaaagttttttccggcggagaaaccaattacgacgcgagggcggaaattatgtgggcgggcgcgttggcgcataacggccttcttgacacggggcgcataggcgactgggcaagccacgcccttgatcacgaactgtccgcgctcttcgaccttgcgcacggcgcggggctggcgattatttttccggcgtggctcaggtacaacatcaaggagaacacttcccgcctcgcgcgttttgcggcgaaagtttggggcgtagacggcgctttctatgatttagagcaggcggcccttgaagggataatcagaatggaaaactttttcagttctatagggatgccggtaagatttgcagacgcaaaaatcgatccgtcttacatacctgaaatggcaaaacgcgccgtccacttcggtcctataggcaattaccgcaaactgaatgaaaaagacgcggaagcaatttataaactggcggcgcagtag

SEQ ID NO: 2588 - protein, 207 aa, Unknown
  Obtained from environmental sample
  misc_feature (1)..(207): Xaa is any amino acid
MPPYQTACGVTDMLAHIMERYFTKEPNVELTDELCEGAMRTIIRNARKVFSGGETNYDARAEIMWAGALAHNGLLDTGRIGDWASHALDHELSALFDLAHGAGLAIIFPAWLRYNIKENTSRLARFAAKVWGVDGAFYDLEQAALEGIIRMENFFSSIGMPVRFADAKIDPSYIPEMAKRAVHFGPIGNYRKLNEKDAEAIYKLAAQ

SEQ ID NO: 2589 - DNA, 462 bp, Unknown
  Obtained from environmental sample
  misc_feature (1)..(462): n is a, c, g, or t
atggatcagggaagcgcaaaaaaaccgcaaaacaagcgaaagaagctcatccagcttatccatgtcggcaaggcaaaaatggccttaagcgacgacgcctacagggctttcctcgaaggcgcaacagggaagaagtcctgcgccgacatgggcgtgcgccagcttgaggccgtgctccgcgccatgcggcgcaacggcttcagccagcccccaaagcgggtaaagccggaagagcaaggcatggcaagcccggagcagcttgagtacatcaagggcatgtggcagaaatgcgcccggaacaaaagcgacgcggccctttcggccttcgcaagccgcatcgccggggtcgcttcgctccgcttccttactatccacacagcgcagaaagtaatattagcgctgcgcgacatgatggcgaaagccggcttcgaccccgacacgtcggaggcgctggatggctaa

SEQ ID NO: 2590 - protein, 153 aa, Unknown
  Obtained from environmental sample
  DOMAIN (12)...(144): Protein of unknown function (DUF1018)
  misc_feature (1)..(153): Xaa is any amino acid
MDQGSAKKPQNKRKKLIQLIHVGKAKMALSDDAYRAFLEGATGKKSCADMGVRQLEAVLRAMRRNGFSQPPKRVKPEEQGMASPEQLEYIKGMWQKCARNKSDAALSAFASRIAGVASLRFLTIHTAQKVILALRDMMAKAGFDPDTSEALDG

SEQ ID NO: 2591 - DNA, 696 bp, Unknown
  Obtained from environmental sample
  misc_feature (1)..(696): n is a, c, g, or t
ttgccaaaaagaaataccggttcatttcccccggttttnttgttcaacgaaaaaagcgaaatcaactgcatcctccgcgccgcgcttaccaactcgccaaacctgcaattgccggccctcaattccgaacagcaaccgggcgaagggcagggaaaaaatattatcaaggagacatccatggatctcaaagcattgtgcgcggccttgggcttgcccgaaaccgcgaccgaagccgaggcgcttgccgcggcgaaagcattgaacgcgtcgaaggcatccgcctcggcgcaaacggacacgtcaagggtagacctgacggcctacgcgcccagggcagacctgtgcgcgatggaagccagggcggtaactgcggaaaagcagcttgccgaactgaatgcggcccagcttaaaaaggacgcggaagcggcggtagacgaggcgatcaaaaacaggaagttcgccccggcaagccgggccgagtacctcgccctttgctccacccaggcggggcttgagtccttcaaaaagatcgccgccgctaccccggcggttataagcgcggatgcccaggcccctgaaggcgcgcctccggcttccggaagagggacggcgctgaacgccgaggatgtcagcgtaaggaaagcgcttggctacagcgacgaagagattaagaaactcaagggggatgcaaaatga

SEQ ID NO: 2592 - protein, 231 aa, Unknown
  Obtained from environmental sample
  misc_feature (1)..(231): Xaa is any amino acid
MPKRNTGSFPPVXLFNEKSEINCILRAALTNSPNLQLPALNSEQQPGEGQGKNIIKETSMDLKALCAALGLPETATEAEALAAAKALNASKASASAQTDTSRVDLTAYAPRADLCAMEARAVTAEKQLAELNAAQLKKDAEAAVDEAIKNRKFAPASRAEYLALCSTQAGLESFKKIAAATPAVISADAQAPEGAPPASGRGTALNAEDVSVRKALGYSDEEIKKLKGDAK

SEQ ID NO: 2593 - DNA, 456 bp, Unknown
  Obtained from environmental sample
  misc_feature (1)..(456): n is a, c, g, or t
ttgatgttgtctttgaataatataaatccgggaaagtccaaagttaagggcagaaagagaattggcagaggtccaggctctggctggggaacaactgctggcagagggcaaaagggcgcaggagcacgcaaaagcgcaaaagctggcagagttgcctttgagggcggtcaaatgccaattcatcgccgcttgcccaagcgcggctttaaaagcaaattcccaaaagatacccaaattgtgaatttggcaaaattagaaaaggcaacagaaacaacaacattcaatgccgttgttctttttgaccttggctttattcgctctgtggaaaaacccattaaaattttgggcacaggtaaaataacaagagccatagaaattaaagttaatgccgtgagcgaaacagcaaaaaaagctattgaagctgccggtggaaaaatagagataataacagagtaa

SEQ ID NO: 2594 - protein, 151 aa, Unknown
  Obtained from environmental sample
  DOMAIN (113)...(144): Ribosomal protein L15
  misc_feature (1)..(151): Xaa is any amino acid
MMLSLNNINPGKSKVKGRKRIGRGPGSGWGTTAGRGQKGAGARKSAKAGRVAFEGGQMPIHRRLPKRGFKSKFPKDTQIVNLAKLEKATETTTFNAVVLFDLGFIRSVEKPIKILGTGKITRAIEIKVNAVSETAKKAIEAAGGKIEIITE

SEQ ID NO: 2595 - DNA, 531 bp, Unknown
  Obtained from environmental sample
  misc_feature (1)..(531): n is a, c, g, or t
gtggcggggcttgtccaggacgaacacgatcaaatcgccgatgtccttgccaagttcgcgggccacgcgctccagattgaccttgaccggcgcatcgagatcgacggcgtcgcgggctgccgggccgaccacgagcttctgcatgtagtagctggggcccggatcgtacatggcgccggccggacaggcgccgatcacggcgatggcgttcggccgcccataagccaaaagattggtgccttccacaggatccacggccacgtcaagcgaaggggcgcctccgctgcccacgatctcgccgttgtacagcatgggcgcctcgtccttcgcgccttcgccgatgacaatccggccgctgacagacagcgcgttgaacgaaatgcgcatggcgtcaacagccgcgccgtcgcctgcctgcttgtcgcccttgcccagccagcgggccgaggccagcgcggcggcttcagtgatccggaccagatcaagggccaggttcctggtggggatttccatcatctgctccaggtttga

SEQ ID NO: 2596 - protein, 176 aa, Unknown
  Obtained from environmental sample
  misc_feature (1)..(176): Xaa is any amino acid
MAGLVQDEHDQIADVLAKFAGHALQIDLDRRIEIDGVAGCRADHELLHVVAGARIVHGAGRTGADHGDGVRPPISQKIGAFHRIHGHVKRRGASAAHDLAVVQHGRLVLRAFADDNPAADRQRVERNAHGVNSRAVACLLVALAQPAGRGQRGGFSDPDQIKGQVPGGDFHHLLQV

SEQ ID NO: 2597 - DNA, 384 bp, Unknown
  Obtained from environmental sample
  misc_feature (1)..(384): n is a, c, g, or t
ttggtgccttccacaggatccacggccacgtcaagcgaaggggcgcctccgctgcccacgatctcgccgttgtacagcatgggcgcctcgtccttcgcgccttcgccgatgacaatccggccgctgacagacagcgcgttgaacgaaatgcgcatggcgtcaacagccgcgccgtcgcctgcctgcttgtcgcccttgcccagccagcgggccgaggccagcgcggcggcttcagtgatccggaccagatcaagggccaggttcctggtggggatttccatcatctgctccaggtttgagctgacggcgaaaatgaatttcgcttactcctcgtgggcgcggccgatgcttttgctatcggccgttagagcattttcaaagtga

SEQ ID NO: 2598 - protein, 127 aa, Unknown
  Obtained from environmental sample
  misc_feature (1)..(127): Xaa is any amino acid
MVPSTGSTATSSEGAPPLPTISPLYSMGASSFAPSPMTIRPLTDSALNEMRMASTAAPSPACLSPLPSQRAEASAAASVIRTRSRARFLVGISIICSRFELTAKMNFAYSSWARPMLLLSAVRAFSK

SEQ ID NO: 2599 - DNA, 867 bp, Unknown
  Obtained from environmental sample
  misc_feature (1)..(867): n is a, c, g, or t
atggaacttaaagatcatagagaacatcttggtaaagatgataacatcgacatgattttttcaggtaacaatgaggcgcatgcatttacagtggcgtttggcggtcttgacgccagacctgtaacgtctttgttttatgttaaccgtctgtctgaatattctgtcgaattttaccgtgattttttaattcccggcgcggcttccggcggcgatgataaattccgcctgactaaacgatatgattttaagccgagagattatatgtttgaactgaacgttactcttgacagcgcatatcagtcgcagagctttaattttggaggtaacgcgtatacgctggcttttggtccgcagattggtcccagatttgaaaaacttgataaccgttacgattaccgtcaatatgttaccttcaccaacggcaaacgtaaaaatgtaaaggtaaatgaaataatagatacgcgtccttcatgggcggcaatatcgggtaagtattttacttttattgcaattccctatctggcgcagtacagcatcagtttttccgaagcggcggaaagcgggctgccgtcggcttcaagattttttttgatccgtcccgctgttaatgtgtccaaaatagctgatacttaccgtttctatctaggccccaaatcccaggaggcgcttgcgatttataataccggcaaaaatgaatttaatttaaaagataccaatcttgtcgatgttgccaatacgcgcggaattcttgctccgctggaaaaattattaaaatggctgcttcttgttttttacaaaattattcctaactacggcgtgtcaattatcctgcttacgttatttgtaaaaattctattcttcccttaa

SEQ ID NO: 2600 - protein, 288 aa, Unknown
  Obtained from environmental sample
  misc_feature (1)..(288): Xaa is any amino acid
MELKDHREHLGKDDNIDMIFSGNNEAHAFTVAFGGLDARPVTSLFYVNRLSEYSVEFYRDFLIPGAASGGDDKFRLTKRYDFKPRDYMFELNVTLDSAYQSQSFNFGGNAYTLAFGPQIGPRFEKLDNRYDYRQYVTFTNGKRKNVKVNEIIDTRPSWAAISGKYFTFIAIPYLAQYSISFSEAAESGLPSASRFFLIRPAVNVSKIADTYRFYLGPKSQEALAIYNTGKNEFNLKDTNLVDVANTRGILAPLEKLLKWLLLVFYKIIPNYGVSIILLTLFVKILFFP

SEQ ID NO: 2601 - DNA, 519 bp, Unknown
  Obtained from environmental sample
  misc_feature (1)..(519): n is a, c, g, or t
atggtcaaagagcgcgtctatccagcggacatcgaggaaaaggacattgaacacattgtgcgatcgtctcagctccacgacgttgggaaaatagccatcccggacagaatcctcaaaaagcctggaaagcttacagaccaagaatttgagctgatgaagcagcacacaataatcggcatggagacaatctccaagatagccagccgggcagaagaaagcgattttttgaagcacgcccagatcatggcttacagccaccacgagagatgggacggcaagggttacccgctggggttatcgggcgaaagcatcccaatccagggcagactgatggccatcgccgacgtgtacgacgcgctggtcacggcgaggccatacaaacccgccttcgagcacgaaatggcagagggaatcattattgctggcaagggaagccagtttgacccgctgctgggcgagctttttgaagacctttccacagaattcaataaaatcgcaaagaaagctattcaacgatga

SEQ ID NO: 2602 - protein, 172 aa, Unknown
  Obtained from environmental sample
  DOMAIN (10)...(120): HD domain
  misc_feature (1)..(172): Xaa is any amino acid
MVKERVYPADIEEKDIEHIVRSSQLHDVGKIAIPDRILKKPGKLTDQEFELMKQHTIIGMETISKIASRAEESDFLKHAQIMAYSHHERWDGKGYPLGLSGESIPIQGRLMAIADVYDALVTARPYKPAFEHEMAEGIIIAGKGSQFDPLLGELFEDLSTEFNKIAKKAIQR

SEQ ID NO: 2603 - DNA, 780 bp, Unknown
  Obtained from environmental sample
  misc_feature (1)..(780): n is a, c, g, or t
atggtcatcgctaccgacggcggctgtggggcgttaaaacacatataccctttttacagaaattacaaaaacgggaacacaagcgctcttgccgtaaatctatgcgccgccctgccctcccaatgttctgacgcggcgcagttgattataaacgacggcagtttttggcaaagcatcgttcttcatgaacttaatttaccgtccgtgattatcccgcaaagaggaacggtaacagctaccgccgtcgaactcgcgatgattcttacaagcggcgatatttaccttgccggtttggatttttcagttaacgatataagaacacacgcaaggccatatagttttgacagcttatttttcaaccgcgcaaaccgttttattcccttttactcgcaaagttacgcgagggcaagcctgcttcacaggggcggcagtatgggcatatacgaatcatggtttaaagagcagttggataagtggccaaagaggatattctctatcggcggtaataaaatttttgaaaacggaaaacctacggcgtatcacggtttaaaaaacacagacggattttttagcgtagccaagcatgaaaacacaaataatttttttgaaaaaggaatacaagcccttctaaacgcgataaaacaacctgaatactcgcaaaatttaaaacaggaactcagctccctgcttttccccggcgaaaataaagtaacacagaatgaattggaaacggcgataagagccgcctgtacgaaacaaaatcacaaaggccgcacatga

SEQ ID NO: 2604 - protein, 259 aa, Unknown
  Obtained from environmental sample
  misc_feature (1)..(259): Xaa is any amino acid
MVIATDGGCGALKHIYPFYRNYKNGNTSALAVNLCAALPSQCSDAAQLIINDGSFWQSIVLHELNLPSVIIPQRGTVTATAVELAMILTSGDIYLAGLDFSVNDIRTHARPYSFDSLFFNRANRFIPFYSQSYARASLLHRGGSMGIYESWFKEQLDKWPKRIFSIGGNKIFENGKPTAYHGLKNTDGFFSVAKHENTNNFFEKGIQALLNAIKQPEYSQNLKQELSSLLFPGENKVTQNELETAIRAACTKQNHKGRT

SEQ ID NO: 2605 - DNA, 930 bp, Unknown
  Obtained from environmental sample
  misc_feature (1)..(930): n is a, c, g, or t
ttgcgcgtaaaacaaatacttacaacctttcttactaacgcgattaagtacacccgcgagggaaacattgaacttatcatacgctccacgaagataaacgacaaggtctggctggacgccgccgtctgcgatacaggcatgggtatcccggaagaagacatctcaagccttttccttgatttttatcaggtttcctcaaacgccacccgcaatattgaaggcacaggattgggccttgcgattaccaaaaagctcgtggaaatgatggaaggggaaataggagtcgccagcgagtacggaaaaggttcaactttcagtttccgcataaagcagggttatatagacgattcggttctggggtcggaagtttccgaaaaactccgcacgttcagcttcttcgacgacaaacgcattgtttccaaaaaactgataagggtgaatttaagctatgtcagagtgcttgtcgtggacgacatgcagaccaacctggatgtcgcagccggaatcttgcgcaaatacaagatgcaggtagacttattaaccaacgggccggccgcgattgacaggatacgcgccgggactcctgtttacgatctggtgtttatggatcatatgatgccgggaatggacggcatagaaacggcggacaatatccgcgctataggcactgaatacgctaaaaaaatacctattatcgctcttaccgcaaacgccatacagggaaccgacaagatgttttacgcgcacgattttcaggggtttgtgaccaaacccatagacgtaatagagatggactgtgtcttaagaaaatggctgtatgatccaaaacgcgatgtccctgatctttccgagcctgccgaggatgaagaaaaaaagaataacatattaatagaaataccgggagtggacggaaaaaagccctatccctga

SEQ ID NO: 2606 - protein, 309 aa, Unknown
  Obtained from environmental sample
  DOMAIN (151)...(269): Response regulator receiver domain
  misc_feature (1)..(309): Xaa is any amino acid
MRVKQILTTFLTNAIKYTREGNIELIIRSTKINDKVWLDAAVCDTGMGIPEEDISSLFLDFYQVSSNATRNIEGTGLGLAITKKLVEMMEGEIGVASEYGKGSTFSFRIKQGYIDDSVLGSEVSEKLRTFSFFDDKRIVSKKLIRVNLSYVRVLVVDDMQTNLDVAAGILRKYKMQVDLLTNGPAAIDRIRAGTPVYDLVFMDHMMPGMDGIETADNIRAIGTEYAKKIPIIALTANAIQGTDKMFYAHDFQGFVTKPIDVIEMDCVLRKWLYDPKRDVPDLSEPAEDEEKKNNILIEIPGVDGKKPYP

SEQ ID NO: 2607 - DNA, 639 bp, Unknown
  Obtained from environmental sample
  misc_feature (1)..(639): n is a, c, g, or t
gtgaacgttgccgatgaagcctcggttgaggcaatgtttaacaccgttgcaaaaaatgccggcgggcttgacctgtgcgtcagcaacgccggggtactcaaggccggcagcgtgcttgaacaggaactcgccgattttaagtttgttactgatattaactacaccggttttttcatcatcagcaaatacgccgggcggttgttgcgggcgcagcaccgtgccgccccccgctggaaaacggacatcatccagatcaactcaaaatcgggtttggaaggctccaacaaaaacggcgcgtatgcgggcggcaaattcggcgggctgggccttgttgccagcttcgccgtggaactggtggaatacaacgtcaaggtgaacgcaatctgccccggcaattttcttgacggcccgctgtggtcgcatcccgaaaagggcctgtttgcccagtaccttaacgccggcaaagtccccggcgcgaaaaccgttgccgacgtgcgggccttttacgaatcaaaagtccccatgaagcggggctgcacaggcaaggatttggtcagggcaatttactacattgtggaacaggaatacgaaaccggccaggccgtccccgttaccggcgggcaggttatgctgcactag

SEQ ID NO: 2608 - protein, 212 aa, Unknown
  Obtained from environmental sample
  misc_feature (1)..(212): Xaa is any amino acid
MNVADEASVEAMFNTVAKNAGGLDLCVSNAGVLKAGSVLEQELADFKFVTDINYTGFFIISKYAGRLLRAQHRAAPRWKTDIIQINSKSGLEGSNKNGAYAGGKFGGLGLVASFAVELVEYNVKVNAICPGNFLDGPLWSHPEKGLFAQYLNAGKVPGAKTVADVRAFYESKVPMKRGCTGKDLVRAIYYIVEQEYETGQAVPVTGGQVMLH

SEQ ID NO: 2609 - DNA, 717 bp, Unknown
  Obtained from environmental sample
  misc_feature (1)..(717): n is a, c, g, or t
ttgtattttttgcagaatttcaaggagcttgggttggaaaaactgatttgtactcattatggaggcggattggatatatttaatcaaggtgcaaaaggttatgtattcacttatatattcacaaggaatggtttcaaggaaataaaagaatacccaagaggttatacaggcagttttgacgacccgttgtcaataaaaatacttaaagaagaatcggacatagtatgtaccaatccaccattttcaaaaatgatagagtattggaaacttgtcattgaaagcggaaaaaagtttttaatcatatccaatatatccaatgctataaatacggcatacattccatatttcaaggaaaataaagtatgggcaggatttaatgaagtagattggtttttaacacctaaaaaggaaattacacgggcggctggttattggtttacaaacatccccataaaaaacagaccaaaatataaacaattaaaaataatgccattgaaagaaattcccgaaaaatataaagaatatgacgattcaaaaatattgttagtagaaaattgctttattcctagcgactataaaaaaccctttgccgtatctgcccgaccaatactaaacggattattggaaaaaggatacaaaattgttcaagataagagatacactccatatacgaatggcaaggagtgttttgcaagagtgttggttcaaaaaatataa

SEQ ID NO: 2610 - protein, 238 aa, Unknown
  Obtained from environmental sample
  misc_feature (1)..(238): Xaa is any amino acid
MYFLQNFKELGLEKLICTHYGGGLDIFNQGAKGYVFTYIFTRNGFKEIKEYPRGYTGSFDDPLSIKILKEESDIVCTNPPFSKMIEYWKLVIESGKKFLIISNISNAINTAYIPYFKENKVWAGFNEVDWFLTPKKEITRAAGYWFTNIPIKNRPKYKQLKIMPLKEIPEKYKEYDDSKILLVENCFIPSDYKKPFAVSARPILNGLLEKGYKIVQDKRYTPYTNGKECFARVLVQKI

SEQ ID NO: 2611 - DNA, 744 bp, Unknown
  Obtained from environmental sample
  misc_feature (1)..(744): n is a, c, g, or t
atgagcatcgaagaatgcgtcgagcgcggggccacaatggccgccccgctaaacatccgcatccgcatcattcagcgcgacaaggatgacaagggcatcgtgcagttcaagcagagccaagagtccgatgtctatttgggcgacctgccgatgatgacggacaggggcaccttcgtcataaatggcacagagcgcgtcatagtcagccagttgcaccgcagtccaggcgcattcttttcgatagctccagacaagagcctgtacagcgcacagataatcccgtaccgtgggtcttgggtggagttcgaaatagacaccaagggcctgttctacgccaggattgaccgcaagcggaagttcttcgggactacattcctgcgcgcgatgctcgccgtgttctgcatagacaatctgaaggcgaagtggatggcggacaaccgggacaatcaggcggtgctaggtctgttcgacaaggtgctcgatgaattcgacaaaaagatcgagaagtctggcgtgctggacaagttgcttgatgccgccgataaggttgcggcgctaggcgcgtccgacaaatcgtccgacggccgcacgaaacatgtgaaattcgatgaggtcgtgaaaaaagcggtgcccgacgagttcgacaagctgatncacgactacgagaagaatggggcccccaacgtagtcggcaaactgctctgcgaacttgcgagcatatatccaaagacaaacaccaagtga

SEQ ID NO: 2612 - protein, 247 aa, Unknown
  Obtained from environmental sample
  DOMAIN (1)...(124): RNA polymerase beta subunit
  misc_feature (1)..(247): Xaa is any amino acid
MSIEECVERGATMAAPLNIRIRIIQRDKDDKGIVQFKQSQESDVYLGDLPMMTDRGTFVINGTERVIVSQLHRSPGAFFSIAPDKSLYSAQIIPYRGSWVEFEIDTKGLFYARIDRKRKFFGTTFLRAMLAVFCIDNLKAKWMADNRDNQAVLGLFDKVLDEFDKKIEKSGVLDKLLDAADKVAALGASDKSSDGRTKHVKFDEVVKKAVPDEFDKLXHDYEKNGAPNVVGKLLCELASIYPKTNTK

SEQ ID NO: 2613 - DNA, 774 bp, Unknown
  Obtained from environmental sample
  misc_feature (1)..(774): n is a, c, g, or t
atggtaaagccgaatgacattgttgaatgtatgatcctcggctacgatctgcaggcgggcagggtgtcgctggggcttaaacaagttacagctaacccctgggatgacattgacgagcgctacactgtcggcaccaggctgagccgcaaggtagtcaaaattaccaatgccggagcctttgtccagttggaggagggaatcgacggcttcctccacggggacgatatttcatggacgaagaaagttaagcacccgggcagcgaactctcggtcgggcaggaaatcgaggtgatgataattgccattgacaaggacaaccgccacattaaattgggaatcaaacagctttccagggatccctggcagagcttctgcgaaacctataaacccggctcccatatagaaggggaagtcgcgtccgtaacagatttcggcattttcatacgggtgccgggcggtatcgaagggcttatccataaaagcaaccttaccgaaaaccgtgaagagaatcccgatgaggcccttaagaaatacaaagtcggcgacaagatcaaggcggttgttttggaaatccagagcgataagcagaaactggctttttcaatcagggattaccagaaaaagattcagcgggaagaactttcccgctacatggccgaagaggaatcgggcggctccgtttttacgctgggcgatttcctgaaatcaaaaaattccggcgacgatgcgcaggacaaagcggaaccggaggcttccacccaggcaagcggctag

SEQ ID NO: 2614 - protein, 257 aa, Unknown
  Obtained from environmental sample
  DOMAIN (127)...(203): S1 RNA binding domain
  misc_feature (1)..(257): Xaa is any amino acid
MVKPNDIVECMILGYDLQAGRVSLGLKQVTANPWDDIDERYTVGTRLSRKVVKITNAGAFVQLEEGIDGFLHGDDISWTKKVKHPGSELSVGQEIEVMIIAIDKDNRHIKLGIKQLSRDPWQSFCETYKPGSHIEGEVASVTDFGIFIRVPGGIEGLIHKSNLTENREENPDEALKKYKVGDKIKAVVLEIQSDKQKLAFSIRDYQKKIQREELSRYMAEEESGGSVFTLGDFLKSKNSGDDAQDKAEPEASTQASG

SEQ ID NO: 2615 - DNA, 726 bp, Unknown
  Obtained from environmental sample
  misc_feature (1)..(726): n is a, c, g, or t
gtgaacatgcagaaacaaaatgaaaaacagggcgcggataaagacgccagttttagtgaaaagctcaatgagtttatccaaaaaaacagaaagcccatatttattatggccgcctcgctgtttgtgcttttaatcgcggtcattgccgcgttatcacttatggacgtgttcaggaacagggccattgccgccgtagaagatttgagcgaccgctatgaaacactgctcccttcgatcaccggtaccgaagaggattttcctgatgatgttaatgcattgcttgaagaattaacggcttttgcggaaaagaattcaggttatcccggcgggcgcgcatggcttttaatcggcggcctttactcggcgaaaaaagactgggcaggggccgagaccgcctatgtttcagccgccgaaacagcggcaaaaaattatctgtcgccgcttgcatggtttaatgccgcggtagccgctgaagagcagggcaagacgcctgaggccattgagtactatggcaacagccttgcggctccggttgtgtttcccgcggcgccccgcgcccagttttcagtcggacggctgcatgaaaccctgaacgaagacgaaaaggcgattgaagcctaccgcgccgtcatttcaggctggtcctatgacgaagtatggacaaaccttgcccgcagcaggatcatcgcgctggaggcgaaaacaagtgaagaaaatgaagagtga

SEQ ID NO: 2616 - protein, 241 aa, Unknown
  Obtained from environmental sample
  misc_feature (1)..(241): Xaa is any amino acid
MNMQKQNEKQGADKDASFSEKLNEFIQKNRKPIFIMAASLFVLLIAVIAALSLMDVFRNRAIAAVEDLSDRYETLLPSITGTEEDFPDDVNALLEELTAFAEKNSGYPGGRAWLLIGGLYSAKKDWAGAETAYVSAAETAAKNYLSPLAWFNAAVAAEEQGKTPEAIEYYGNSLAAPVVFPAAPRAQFSVGRLHETLNEDEKAIEAYRAVISGWSYDEVWTNLARSRIIALEAKTSEENEE

SEQ ID NO: 2617 - DNA, 840 bp, Unknown
  Obtained from environmental sample
  misc_feature (1)..(840): n is a, c, g, or t
atgattaaacagctttaccaaaaatgtaaaaaatatcttattcccattttttacgcgctggcaatgcttattgtagttttttacgcgtggaacgaacaaaataaaaccaggcacggagggaacagtcctctttacatcaacctgcgggaatgtccctcgtttgccaggaagggttttgatcccgccgacttgctgaagattcctgatgaggggccgcaggccgggggcgaatggaaacgcttcgaaggcaaatcacggcgtatcggtgatgccgggctgaagattccaaaacgtaaatacctttcaccctggggaaatgacacggaggaatttaccattgttttcctcgtggaaatggacagcgcggccatggcgtttctcgaggggaatatttcagtagtccctggatttttctttgccggcataggcgagagctgggaagtttatttcaacggaaaattagtcctatcggagatacacctggacgaaaatggccgaatcagggaacgccgaacgtggaatgatgtgtcttttccggtggatggcgcgcttgtccgtcccggaaccaacatccttgccctgcgcatcctgggggatcccacctataggggtacagggctgtactattcatcggcccccatatatatggacaactatagaaacatcgagagagggcggtttgattatctgtatacttttttatgcggcttctttgcctttaccggcctctattatctgatgctgtttttttctgtcaaagagaagactgaagtttttaacctctactttgggattttttcgattcttattggcgtttatatgtcagttnccccgcgataa

SEQ ID NO: 2618 - protein, 279 aa, Unknown
  Obtained from environmental sample
  misc_feature (1)..(279): Xaa is any amino acid
MIKQLYQKCKKYLIPIFYALAMLIVVFYAWNEQNKTRHGGNSPLYINLRECPSFARKGFDPADLLKIPDEGPQAGGEWKRFEGKSRRIGDAGLKIPKRKYLSPWGNDTEEFTIVFLVEMDSAAMAFLEGNISVVPGFFFAGIGESWEVYFNGKLVLSEIHLDENGRIRERRTWNDVSFPVDGALVRPGTNILALRILGDPTYRGTGLYYSSAPIYMDNYRNIERGRFDYLYTFLCGFFAFTGLYYLMLFFSVKEKTEVFNLYFGIFSILIGVYMSVXPR

SEQ ID NO: 2619 - DNA, 807 bp, Unknown
  Obtained from environmental sample
  misc_feature (1)..(807): n is a, c, g, or t
gtggacgacgctcccaataatctcgtatacttccgcggtgaggcgtcccggctctctatttcntgcgatatcgcgttaagcggagaggcggcgcttgagatgatcgggaaaaacagcctgtatgacatctgctttatcgactggaaaatgccgggcatgaacggcattgaaaccgccgccaaaatcagggaactgggcgccggtaaaatttccgttgttttaatgagctccgcggctgaatggaagctggtagaggctgacgcaaaaaaagcgggcgttaaatattatttacagaagccgctgttccgttccgatattattgactgtcttaataactgcttcggccccaagtccgcggaagaggcgcgggaacaggataaaaaatatgatttttccggcttccgtatcctgcttgttgaggacctggagataaaccgtgaaattgtacttacacttttggaaccgaccgggttggcgatagattgcgccgcaaacggcaaggtcgccctgaaaatggttacgagagcggaaaaaccctacgatataattttcatggatctgcaaatgcccgagatggacgggtatgaagccacccttaaaatcaggcaattcgaggaataccgctatggagaaagcgtcaaaggagccgtgaagcaaactccgatcatcgccatgaccgcaagcatatcccgttatgatgttacaagatgtcttgagacaggcatgaatgatcagatatgcctgcctatggatattgaagatgtgctgaaaaaactgcgtttttacctgaacccgccgctgcgctga

SEQ ID NO: 2620 - protein, 268 aa, Unknown
  Obtained from environmental sample
  DOMAIN (1)...(111): Response regulator receiver domain
  misc_feature (1)..(268): Xaa is any amino acid
MDDAPNNLVYFRGEASRLSISCDIALSGEAALEMIGKNSLYDICFIDWKMPGMNGIETAAKIRELGAGKISVVLMSSAAEWKLVEADAKKAGVKYYLQKPLFRSDIIDCLNNCFGPKSAEEAREQDKKYDFSGFRILLVEDLEINREIVLTLLEPTGLAIDCAANGKVALKMVTRAEKPYDIIFMDLQMPEMDGYEATLKIRQFEEYRYGESVKGAVKQTPIIAMTASISRYDVTRCLETGMNDQICLPMDIEDVLKKLRFYLNPPLR

SEQ ID NO: 2621 - DNA, 387 bp, Unknown
  Obtained from environmental sample
  misc_feature (1)..(387): n is a, c, g, or t
gtggaagcgtttacaaaagcgttcaaaacaggttcggtttcagataatttattaatgtctatagcgcgttcatatatggcgatgggtgaatacaatatggcggcgggttatcttcagcggtgtattgaactatcgccggattccaggtcgatatttaccgcccgtctcttgctggcggaagtttttatacattcaggcgatcataacggggcgcaggcgcagtattttaaaattctaaatgatacgggagagaacgcggaagttcgttaccggcttggcgaattgtttagccttatgggggacacggcgcgcgcccgcgccgaatggagaatcgcgtacagacaggatccggcgcacgcgaaagcgagagcgcggctcaatatataa

SEQ ID NO: 2622 - protein, 128 aa, Unknown
  Obtained from environmental sample
  DOMAIN (15)...(48): Tetratricopeptide repeat
  misc_feature (1)..(128): Xaa is any amino acid
MEAFTKAFKTGSVSDNLLMSIARSYMAMGEYNMAAGYLQRCIELSPDSRSIFTARLLLAEVFIHSGDHNGAQAQYFKILNDTGENAEVRYRLGELFSLMGDTARARAEWRIAYRQDPAHAKARARLNI

SEQ ID NO: 2623 - DNA, 636 bp, Unknown
  Obtained from environmental sample
  misc_feature (1)..(636): n is a, c, g, or t
ttgaaggaagtaaaagacgagcgtagcgcaaaaagcaatgatgaaatcacaaatattaaaaacgaaatcgctaagaaagatgaaacactaaaaatgttagaacaaaaaattacacacgataaagaaaaagccgtgaaaaaagccaacgaggaaaaatcagatgaagaatctacctccgcggctcaaaacgaagctgtcgccgtggattccaacattcaacacaatattaaggatctccgtgcggcaataaataaattgaaaagcgatgaagtgcaaaagaataaggatatcactacaatggaaaataagtttcaaagcgatgtcggtaaaattaagaacgatatcaaacgagcgcaagctgagattgatcgtttggaaaaaagtaaacgtcacaccgtagcaccgcaaaataaggaatcgtctttaaatatttttaatagaaacaaaaatcaaaacgaaaataaaaacgtgcttcccgtaccgacacacttacgcaaacctcaaataggaaagttgtatcaagtcggaggaaataacggaagcggttatttggccatatcggattgggatgatgttgattcgggaaaacaagaggcaaaaagattatccgcaaaactttgcgtggaaaggagttag

SEQ ID NO: 2624 - protein, 211 aa, Unknown
  Obtained from environmental sample
  misc_feature (1)..(211): Xaa is any amino acid
MKEVKDERSAKSNDEITNIKNEIAKKDETLKMLEQKITHDKEKAVKKANEEKSDEESTSAAQNEAVAVDSNIQHNIKDLRAAINKLKSDEVQKNKDITTMENKFQSDVGKIKNDIKRAQAEIDRLEKSKRHTVAPQNKESSLNIFNRNKNQNENKNVLPVPTHLRKPQIGKLYQVGGNNGSGYLAISDWDDVDSGKQEAKRLSAKLCVERS

SEQ ID NO: 2625 - DNA, 741 bp, Unknown
  Obtained from environmental sample
  misc_feature (1)..(741): n is a, c, g, or t
atgagtttcancaaagtcgttcctgcccagctgcgcggggtggattatcttgaaaaaatggcaaaaaaaattaaaggccctttgttaaaaggacctntgctaaaaagccccttgctgacaggacctctgcgaatcggcggtcattcaaaggggggaaatctggcggtgtacgccgcttcccaatgcggcaaaaagatacaacggcgcatcactgctgtttacagtaacgacgcgcccggctttcatgaaagcgtcattgccagcgaaggttttgcggcaataagggaacgtatacatacatttattccgcagtcatcggttgtgggtatgctttttgaacacggcactgcctataaggtagtaaagagttccgtgaacggcctgttacagcatgaactgtatacatgggaagttgcacctaacgatatggtgtatgttgatgacattactcaaggcagtcgttttgtgaataaaaccctgaaagactggattgccacgcttgacaacacgcgccgcgaacaatttattgaagccctgtataacattctgcgcgcgtctcgggcaaaaacagttcccgaatttgaacgttcgtggctgcaatccacagcccgtatgctgcaatctctgggcgacattggcgaaccaaccaggaatattatcaaaacagccctggcggcgctgttccattccgcccggaataatcttgttttgttacaaaaaaagaatgagcgaaccgcatga

SEQ ID NO: 2626 - protein, 246 aa, Unknown
  Obtained from environmental sample
  misc_feature (1)..(246): Xaa is any amino acid
MSFXKVVPAQLRGVDYLEKMAKKIKGPLLKGPXLKSPLLTGPLRIGGHSKGGNLAVYAASQCGKKIQRRITAVYSNDAPGFHESVIASEGFAAIRERIHTFIPQSSVVGMLFEHGTAYKVVKSSVNGLLQHELYTWEVAPNDMVYVDDITQGSRFVNKTLKDWIATLDNTRREQFIEALYNILRASRAKTVPEFERSWLQSTARMLQSLGDIGEPTRNIIKTALAALFHSARNNLVLLQKKNERTA

SEQ ID NO: 2627 - DNA, 846 bp, Unknown
  Obtained from environmental sample
  misc_feature (1)..(846): n is a, c, g, or t
atgagggaacttgcgaaagacgagttgaaggaactggaaacaaaactgcgggacagcgaggaaaagttgaaattcctccttatcccaaaagacccattggatgaaaaaaatataatcatggaaataagggcaggaaccggcggagaggaagcggccctgttcgcctcggatatgtaccgcctgtattcccgcttcgcggaaacaaaaggctggaaattcgagataatgaattccaacgaaaccgagcttggcggcataaaggaaattgttttttcgatcagcggaaacaacgtgtacgaaaacctgcgttacgaatccggcgtccaccgcgtgcagagggttccggctacagagtcctcaggcagaatccacacatcggcggttacggtggcggttctgcccgaggcggatgaaacagaaattgacattaaaccggacgatcttcgcatagatgtaatgcgggcaggcggccccggcggacagtgcgtcaacacgacggactccgccgtacgcataacccatctcccatccggcattacagtccactgccaggacgaaaaaagccagattaaaaacaaggccaaggcgatgagaattctgcgggcgcgcatatacgaaatggaagaggcgaaagccgccgccgaacgcgccgaagccagaaaatcccaggttggaacaggcgaccgctccgaaaggatcaggacttacaattttccggacaaccgcgtcacggatcaccgcatcggcctgaccctttacaaacttgaccgcataatggaaggcggagtcgccgaggtctttgacgcccttaaactctncgcgcgtgaagaaatgctgaanaactaa

SEQ ID NO: 2628 - protein, 281 aa, Unknown
  Obtained from environmental sample
  DOMAIN (1)...(105): PCRF domain
  misc_feature (1)..(281): Xaa is any amino acid
MRELAKDELKELETKLRDSEEKLKFLLIPKDPLDEKNIIMEIRAGTGGEEAALFASDMYRLYSRFAETKGWKFEIMNSNETELGGIKEIVFSISGNNVYENLRYESGVHRVQRVPATESSGRIHTSAVTVAVLPEADETEIDIKPDDLRIDVMRAGGPGGQCVNTTDSAVRITHLPSGITVHCQDEKSQIKNKAKAMRILRARIYEMEEAKAAAERAEARKSQVGTGDRSERIRTYNFPDNRVTDHRIGLTLYKLDRIMEGGVAEVFDALKLXAREEMLXN

SEQ ID NO: 2629 - DNA, 504 bp, Unknown
  Obtained from environmental sample
  misc_feature (1)..(504): n is a, c, g, or t
atggtcatggggcaattagttnttcagcatttcttcacgcgcgnagagtttaagggcgtcaaagacctcggcgactccgccttccattatgcggtcaagtttgtaaagggtcaggccgatgcggtgatccgtgacgcggttgtccggaaaattgtaagtcctgatcctttcggagcggtcgcctgttccaacctgggattttctggcttcggcgcgttcggcggcggctttcgcctcttccatttcgtatatgcgcgcccgcagaattctcatcgccttggccttgtttttaatctggcttttttcgtcctggcagtggactgtaatgccggatgggagatgggttatgcgtacggcggagtccgtcgtgttgacgcactgtccgccggggccgcctgcccgcattacatctatgcgaagatcgtccggtttaatgtcaatttctgtttcatccgcctcgggcagaaccgccaccgtaaccgccgatgtgtggattctgcctga

SEQ ID NO: 2630 - protein, 167 aa, Unknown
  Obtained from environmental sample
  misc_feature (1)..(167): Xaa is any amino acid
MVMGQLVXQHFFTRXEFKGVKDLGDSAFHYAVKFVKGQADAVIRDAVVRKIVSPDPFGAVACSNLGFSGFGAFGGGFRLFHFVYARPQNSHRLGLVFNLAFFVLAVDCNAGWEMGYAYGGVRRVDALSAGAACPHYIYAKIVRFNVNFCFIRLGQNRHRNRRCVDSA

SEQ ID NO: 2631 - DNA, 720 bp, Unknown
  Obtained from environmental sample
  misc_feature (1)..(720): n is a, c, g, or t
ttgcgtatgcaggaaataattttcaaaacctccgctcaagtctatgaaacaattccctctaactggaaagataaaggaactccctatgccatgctcgggcaagttttccgctgggtagaacgctaccttgaatcaggtaaaataataatagaaccaccgctttttatgcaggatgatgacccgcttaaaagaaaaataatgtatatgctgaatatgaataagatagtacagcatctctggaaatttattgaatgtcagatgaccaaacggattataccgatgtttaatcccaacagcaaagtccgctctacaacagatatgccgacatggtggactgtaaaacaccgcgaacccctgaaaaaatctcatatcagccatgttgtctatgacagcacatgggaagccaccgaagcctacaaacttgagaaaaatccacatgtaaccgcctttgccaaaaatgaccatcttggctttggcgttcaatacacttttaatggcgtatctcgcacatattaccctgatttcctcataaaactggacaacggtaaaactctggtactggaaacaaaagggcaagacaaccagcaagtacaggcaaaacaagccgctctcgccgaatgggtagaagccgtaaactcattaaaagagtacggcgaatggtgcagtgacatttccttcaatgtcgccgatgttgacgggattatcgggaagtatttgtaa

SEQ ID NO: 2632 - protein, 239 aa, Unknown
  Obtained from environmental sample
  misc_feature (1)..(239): Xaa is any amino acid
MRMQEIIFKTSAQVYETIPSNWKDKGTPYAMLGQVFRWVERYLESGKIIIEPPLFMQDDDPLKRKIMYMLNMNKIVQHLWKFIECQMTKRIIPMFNPNSKVRSTTDMPTWWTVKHREPLKKSHISHVVYDSTWEATEAYKLEKNPHVTAFAKNDHLGFGVQYTFNGVSRTYYPDFLIKLDNGKTLVLETKGQDNQQVQAKQAALAEWVEAVNSLKEYGEWCSDISFNVADVDGIIGKYL

SEQ ID NO: 2633 - DNA, 600 bp, Unknown
  Obtained from environmental sample
  misc_feature (1)..(600): n is a, c, g, or t
atggaaggaacaatgcaaataatatttggaattttaacggggcttctgggattatactccctgctgattatcgtcaggatcattcttacctggttctcgggcgcggaatttggaaggccggcggagattttggcccgcgttaccgatccctatcttgactggtggcggcggaggctcaacctcagggccggctacctggatctctcccccattatagcaatggcggccctttccgtcgctcagacgatctgttccgccattgcgcagacgggaaggatcactatcgggcttttgcttgccgtgtgtctttccgcattgtggtcggcggtttcatttatactgggcttctgcatcgtcgtgcttgtcctccgcctgattggctatcttatcaacgccgatatgttcggcgtgttctggcgggtcatagattccatatcacggcctctcctgtaccgcgtcagccggatcattttcagaaaccggctggttcattttacaacaggcatcatcgtctcaattctcgttctgaccgttctttggattggcggcggcgtcgccatacagttcgtttccggcgttttattcaggttcacgttttaa

SEQ ID NO: 2634 - protein, 199 aa, Unknown
  Obtained from environmental sample
  DOMAIN (5)...(87): YGGT family
  misc_feature (1)..(199): Xaa is any amino acid
MEGTMQIIFGILTGLLGLYSLLIIVRIILTWFSGAEFGRPAEILARVTDPYLDWWRRRLNLRAGYLDLSPIIAMAALSVAQTICSAIAQTGRITIGLLLAVCLSALWSAVSFILGFCIVVLVLRLIGYLINADMFGVFWRVIDSISRPLLYRVSRIIFRNRLVHFTTGIIVSILVLTVLWIGGGVAIQFVSGVLFRFTF

SEQ ID NO: 2635 - DNA, 417 bp, Unknown
  Obtained from environmental sample
  misc_feature (1)..(417): n is a, c, g, or t
atgcctgtaaaatatcaatttccggaaggctttgactggggaactgccagcgcttcttatcaggttgaaggtgcttgggatgccgatggcaagggcgagagtatttgggatcggttttgccatataccagggaatatcaatgacaattcaagcggcgatattgcgtgcgatttttatcaccgctacgaggacgatataagaatcgtcaaagacctgggaataaaagtatgccgaatttcaatttcctggcccaggatttttcccaacgggacaggagagatcaatgaggcaggtattgaattttaccggaaggttcttaaatgcctgcatgacaatggtataaaatcggctgttaccatataccattgggatttaccccaaaaattgcaggatcggggcggttgggcaaaccngtga

SEQ ID NO: 2636 - protein, 138 aa, Unknown
  Obtained from environmental sample
  DOMAIN (3)...(138): Glycosyl hydrolase family 1
  misc_feature (1)..(138): Xaa is any amino acid
MPVKYQFPEGFDWGTASASYQVEGAWDADGKGESIWDRFCHIPGNINDNSSGDIACDFYHRYEDDIRIVKDLGIKVCRISISWPRIFPNGTGEINEAGIEFYRKVLKCLHDNGIKSAVTIYHWDLPQKLQDRGGWANX

SEQ ID NO: 2637 - DNA, 654 bp, Unknown
  Obtained from environmental sample
  misc_feature (1)..(654): n is a, c, g, or t
atgaaagtagagctatggaacggccacgcgattaggttcgtggagaaagacagattgtggtgggcaattgcaaaggacatttgcgacgcattggggataaaggatgtggaggggaatcttcgcagtatgccaactgattatttgagcaaaatacgaattgaggaaactaaaggtgatccggataaaacctacaccacattcgagggaaaaggtgatccggataatatacgggtcacctctgaaaagcgcaagaatgggttgcgtaagacacaggaaatgctctgccttaatgagcttggtatctaccgcctgataatgcggagcaacaagcccgaggctctggccttccaggattgggttttcaaccttttaaaatccctccgcgaagccctaggctatgagcagtaccggataatgacattcaccgattcggtgaagaatcatcacttgaacatggacttaatcaaagaggcattgaagcctgttgataaagtcccatacatcaaggcccacagtgtaaccaataagtgtatggcaaccattgtaggcgaaccgaaggctatcagcaaggatgagctaaaagataaataccctgagatgatgcctttgagggatgaagtgctgacttcaaccgcggaagcttatggcgattaa

SEQ ID NO: 2638 - protein, 217 aa, Unknown
  Obtained from environmental sample
  DOMAIN (10)...(126): BRO family, N-terminal domain
  misc_feature (1)..(217): Xaa is any amino acid
MKVELWNGHAIRFVEKDRLWWAIAKDICDALGIKDVEGNLRSMPTDYLSKIRIEETKGDPDKTYTTFEGKGDPDNIRVTSEKRKNGLRKTQEMLCLNELGIYRLIMRSNKPEALAFQDWVFNLLKSLREALGYEQYRIMTFTDSVKNHHLNMDLIKEALKPVDKVPYIKAHSVTNKCMATIVGEPKAISKDELKDKYPEMMPLRDEVLTSTAEAYGD

SEQ ID NO: 2639 - DNA, 585 bp, Unknown
  Obtained from environmental sample
  misc_feature (1)..(585): n is a, c, g, or t
atgaacctaaacggcaaaaaatccattatcaccgataaacgatttttttctctggaacaacttacgggaaaaactcgcttgaatagttttttctgtccgattgaagaatacaataactatttatttcaagaagctctaagatcacaaaatgaccaaatggcccttacatggctcctacttgagcgttccaacaaaaccgttgtcgcttatatgtcacttatagccgatgccataaaattatcagtcacagaaaaagaactccataatcttgattacccattcaaaactgttcctgcaatgaaaatcgcaaaattggctgtttccgctccatttcaggaaaaataccgtggtattggctcattaatgatagacatggcgattcagatcgccgaatcctgtaatgaacaacatttcgcctgtcgtttcattaccgttgacgcagacattgaacacaatgaaaatgttatgaacttttacctaaaaaacggctttatccccaacgaagaaaccaacaacaaacgccgaaaaacaatcagtatgcgaagggatatattgtttatggctgatatatctcacgcattataa

SEQ ID NO: 2640 - protein, 194 aa, Unknown
  Obtained from environmental sample
  misc_feature (1)..(194): Xaa is any amino acid
MNLNGKKSIITDKRFFSLEQLTGKTRLNSFFCPIEEYNNYLFQEALRSQNDQMALTWLLLERSNKTVVAYMSLIADAIKLSVTEKELHNLDYPFKTVPAMKIAKLAVSAPFQEKYRGIGSLMIDMAIQIAESCNEQHFACRFITVDADIEHNENVMNFYLKNGFIPNEETNNKRRKTISMRRDILFMADISHAL

SEQ ID NO: 2641 - DNA, 738 bp, Unknown
  Obtained from environmental sample
  misc_feature (1)..(738): n is a, c, g, or t
gtgaatgaagggcttgtgggcaaaaacggttcgggaaaatctaccacggcaaaatgtatttgcggttttgtacgcccggattcgggaacaatctgttttaacgggaaggatctggcgcagctttcaattatggaaagggcggaaaaaatcggttatgttatgcagaatcccaatcaaatgatctcttttccaatgatttatgatgaaaccgcgtttggattaagaacaaggggcatagcggaaacggaaataaaggagcgggtacacgaggcgcttaaggtgtgcggattgtaccctttcaggaattggcctgttaacgccttaagttacggacaaaaaaaacggcttaccatcgcgtcgattctggttacgcgatcttcgttcttaatccttgacgagcctacggcgggacaggattacaggcactataccgaatttatggaatttctggtggggcttaatcaagacatgggaatatctcttattcttatcacacacgatatgcacctaatgcttgaatatacaacaagggcggtagttctttcagagggcctatgcgttgccgaccgggaaccttttgaggttcttaccgacaacgcgattattgaaaaggcaaacctgaaacggacaagcctgtacgaactggcgcttaataccggccttcccgacccgcgtggttttgtcgcgcgttacatttcctatgaccgtgaaaaacgcagggctaggagcgaaatatga

SEQ ID NO: 2642 - protein, 245 aa, Unknown
  Obtained from environmental sample
  DOMAIN (4)...(184): ABC transporter
  misc_feature (1)..(245): Xaa is any amino acid
MNEGLVGKNGSGKSTTAKCICGFVRPDSGTICFNGKDLAQLSIMERAEKIGYVMQNPNQMISFPMIYDETAFGLRTRGIAETEIKERVHEALKVCGLYPFRNWPVNALSYGQKKRLTIASILVTRSSFLILDEPTAGQDYRHYTEFMEFLVGLNQDMGISLILITHDMHLMLEYTTRAVVLSEGLCVADREPFEVLTDNAIIEKANLKRTSLYELALNTGLPDPRGFVARYISYDREKRRARSEI

SEQ ID NO: 2643 - DNA, 897 bp, Unknown
  Obtained from environmental sample
  misc_feature (1)..(897): n is a, c, g, or t
ttgtgtcttttcctggaggaatcgttttctttggcggattctccgattccgctggcgacattggacaggcgggacnttagacatcttcccgcttttgccattgacagtccctggagtaacgacccggatgacgccctttccctggaagatgataacggccgtcgtattctttatgttcatgtggcagatccggctttggcgattgaaagcggttctcccggcgacaactttgcccgcgccaggggagccactctttaccttcccgaaggatcctggcccatgctggacaaggatgtccttgcccgctttattttaaagggaacctcaaacgaggcgctcacttttaagatacttttcaacagcgacagttccattgaaaaaacggagatttttccttctattgtaaatgttacccgtcttagctatgaagaagcagataaactgattgaaaccgcaaaaacaggagagtcggctgcggcagcttcaaccgataataacaatgccaccgtgcttaaggaattgtatgtactggcggaggcaaatctggaacgccgtctgaatacgggggctgtaatcattaccttgccggaagttcacatttccgctgccgatcaccgggtgaagatcctgcccatcgtcctccatcgatccgccgatatggtaagggaatgtatgctgatcgccggcgagggagccgccacgtgggctgccagacggcggctcccctttccctacattgcccaggaaatgggagaacttcctgccaaacccctttccggtttggcaggaagtctccaactccgccgctgcatgcggccccggatggtatccgcaaggcccggtatcactgggggctgggctggacggtacagccaggaaccatccccggccatctga

SEQ ID NO: 2644 - protein, 298 aa, Unknown
  Obtained from environmental sample
  DOMAIN (24)...(248): RNB-like protein
  misc_feature (1)..(298): Xaa is any amino acid
MCLFLEESFSLADSPIPLATLDRRDXRHLPAFAIDSPWSNDPDDALSLEDDNGRRILYVHVADPALAIESGSPGDNFARARGATLYLPEGSWPMLDKDVLARFILKGTSNEALTFKILFNSDSSIEKTEIFPSIVNVTRLSYEEADKLIETAKTGESAAAASTDNNNATVLKELYVLAEANLERRLNTGAVIITLPEVHISAADHRVKILPIVLHRSADMVRECMLIAGEGAATWAARRRLPFPYIAQEMGELPAKPLSGLAGSLQLRRCMRPRMVSARPGITGGWAGRYSQEPSPAI

SEQ ID NO: 2645 - DNA, 696 bp, Unknown
  Obtained from environmental sample
  misc_feature (1)..(696): n is a, c, g, or t
gtggtcatcgcgggaggcaccgaagccaccatcgttccctttgccgtcggcggcttccagatgctcaaggccctttccacaaaacgctgcaacgaacctacaaaagcgtcccgcccctttgacgctgaccgcgacggttttgttattgcagaaggatcgggcgttctaattcttgaaagcgaggaacacgccaaagcgcgcggggcaaagattttggccgaacttgccggttacggggcgagcgccgacgcgtatcacataacggcgccggatcccacgggcaccagcggggccaacgcggtgaaacttgccattgccgacgcgggccttaaacccgaagacattcagtactacaacgcccacggaacctcaacggaaatcaacgaccccacggaaacaaaaatgctcaaaatggtttttggggatcacgcctataagatgaaggtgtccagcaccaagagcatgcacggacactgcatcgccggcggcggcggcattgaggccatagcctgcatactcgcgatccgcgacagtttctatccccccacgatcaacctggacaaccccgacccggaatgtgatctggactatgtcgcaaacaaagcccagtacggcgaaattaacgctgccgcttccggctcgctaggtttcggcggccataacggcgtggttgtcttcaaaaaatataaaggttaa

SEQ ID NO: 2646 - protein, 231 aa, Unknown
  Obtained from environmental sample
  DOMAIN (72)...(229): Beta-ketoacyl synthase, C-terminal domain
  misc_feature (1)..(231): Xaa is any amino acid
MVIAGGTEATIVPFAVGGFQMLKALSTKRCNEPTKASRPFDADRDGFVIAEGSGVLILESEEHAKARGAKILAELAGYGASADAYHITAPDPTGTSGANAVKLAIADAGLKPEDIQYYNAHGTSTEINDPTETKMLKMVFGDHAYKMKVSSTKSMHGHCIAGGGGIEAIACILAIRDSFYPPTINLDNPDPECDLDYVANKAQYGEINAAASGSLGFGGHNGVVVFKKYKG

SEQ ID NO: 2647 - DNA, 876 bp, Unknown
  Obtained from environmental sample
  misc_feature (1)..(876): n is a, c, g, or t
ttgacacttccggacttgcgaaaacgcttgtctttcggatatacgcgcgttccccgcgttcaggaatgcggcgaatatgccctgcgcggcgaagtcattgatatcttcatgggcggcgacgatttggcgtatcgtattctttttgattttgacaaggtcgaatccatcaaaaaatttgatcctgtaaaccagactacggaacaaaacgcccaaaccgaaaaaccgcgggaaatgaagatccgccctatgcgcgaagttgtatggacggacgatcgtattgaaattctggaaaaaaatctcgcttcttttaaggaattttcaaacggcggaaaagaaataatcgaagagctgatcttacacaggagcgtaaaaggcgaggaaatcttttttccctttgcgtttgaaaaaggcgcaagccttatggattaccttggcggcggaacccttcttttacttgacagggaacggctggataacactaaagaaacaattttcagcgaataccgggggatgtactcccaaaccgtaagggaaactaaatgcgaatatcctctgccggaacgcctgcttcttgattttggcgatttgataaaaaaccacaaaaagacagtttcctttatgacaatcaaaagcgcgcccaaagacggcgtctgccgtattgatctttcatgcgagccttcgcgcagtttcttcggcaatatcgactacatgaaagatgaattcgcgtccctgctttcctgcggatggcatataacagtcgccgcagaatctgaagtgcaggctcagaggattaacatgatctttgtgccgcgcgtagatacggaaacagaacagtctgcgtcaaaatggccggttgaaagtttctccctctcttaa

SEQ ID NO: 2648 - protein, 291 aa, Unknown
  Obtained from environmental sample
  misc_feature (1)..(291): Xaa is any amino acid
MTLPDLRKRLSFGYTRVPRVQECGEYALRGEVIDIFMGGDDLAYRILFDFDKVESIKKFDPVNQTTEQNAQTEKPREMKIRPMREVVWTDDRIEILEKNLASFKEFSNGGKEIIEELILHRSVKGEEIFFPFAFEKGASLMDYLGGGTLLLLDRERLDNTKETIFSEYRGMYSQTVRETKCEYPLPERLLLDFGDLIKNHKKTVSFMTIKSAPKDGVCRIDLSCEPSRSFFGNIDYMKDEFASLLSCGWHITVAAESEVQAQRINMIFVPRVDTETEQSASKWPVESFSLS

SEQ ID NO: 2649 - DNA, 684 bp, Unknown
  Obtained from environmental sample
  misc_feature (1)..(684): n is a, c, g, or t
gtgctcgccgcttcgattcagcttgacgccgtggcagcagcagccccgcgcccggatatgcaggtttttttccgttccaaaggccatcctgacgtaaaagtggatatttcagatcattcagtaagagaggaagaagagggaaagaccgaagcccttgtacgtggaattgcggcagagttggccgcgcggaaacttccgttgcgcggttttaccgccaacgcggataacatggttctgtccggctcgggactttcttcaagcgcggtggttgaggttctaattggaaaaatctttgactgcctttacggcgacggaaaaacaagcgcccttgagctggcgaaaatcgggcagaaagcggaaaatatctactttggaaaaccttgcggcctgatggatcaaaccgcctgcgcgacaggcggggcggtagccattgactttgaagatcccgacaacccgcgggttagggaaattggctttgatccggcttccgcgagttttgccctttgcattgttaatacaaaaggaagccatgtggatcttaccgccgactatgcggcgattcccacggagatgaaggcggcagcttctttctttgggaaacatgtgcttagagaattggacgagagaacattcttttcccgttgccggatttacggagcgctgccggcgaccgggcgattctaa

SEQ ID NO: 2650 - protein, 227 aa, Unknown
  Obtained from environmental sample
  DOMAIN (71)...(140): GHMP kinases N terminal domain
  misc_feature (1)..(227): Xaa is any amino acid
MLAASIQLDAVAAAAPRPDMQVFFRSKGHPDVKVDISDHSVREEEEGKTEALVRGIAAELAARKLPLRGFTANADNMVLSGSGLSSSAVVEVLIGKIFDCLYGDGKTSALELAKIGQKAENIYFGKPCGLMDQTACATGGAVAIDFEDPDNPRVREIGFDPASASFALCIVNTKGSHVDLTADYAAIPTEMKAAASFFGKHVLRELDERTFFSRCRIYGALPATGRF

SEQ ID NO: 2651 - DNA, 798 bp, Unknown
  Obtained from environmental sample
  misc_feature (1)..(798): n is a, c, g, or t
ttgtctgtcagggcgaagggcggagagacgaacaggcaggattcccctacacttgaaagaaccgattaccttattgaccaccgtccttatgtgcccggcgacgatccccggcgcattaactggaaactgtacagccacggcggagaacttattgtccgtcagggagaacgcgaaccgccgccttcttccagcatgacaattttaattgatacccaatacgattcgctctactcctcaaataatgaagcggcaaacagcgccgctgcttgcagcgcagttgaatcggtggatttactttgtgaaaacgcgcttgctattatcaacaatgccgggaaggagataaatgttcaaattggttatacgagccgcggcgtcacagcaagcagcgtcgcagcaagcagcagcgcggcaaataacggcgcaaaaaacaacgtcgcagaatacggcgaaaaaagcggcaattcactgactcaggcggatttaggattttttttatcttacccggcggcgttgcccgcggaagccgaaacatcgccaaaggcggcgccaaaggcgaaacttcccgccgtaacggaagaccggggaataattattttagcgctgccaagactcaatacgggtaatttcgcgctggagaaatttctagcggataacgctaaccgttcgatagaattgttttttatttacgccgccgacgaanacgccttacgcgaaaagttggcggaagcggcccaaacatgcgcgggtttttataacaggcattacggcgtaaaagcgcaagttgtcgaggtgcggtaa

SEQ ID NO: 2652 - protein, 265 aa, Unknown
  Obtained from environmental sample
  misc_feature (1)..(265): Xaa is any amino acid
MSVRAKGGETNRQDSPTLERTDYLIDHRPYVPGDDPRRINWKLYSHGGELIVRQGEREPPPSSSMTILIDTQYDSLYSSNNEAANSAAACSAVESVDLLCENALAIINNAGKEINVQIGYTSRGVTASSVAASSSAANNGAKNNVAEYGEKSGNSLTQADLGFFLSYPAALPAEAETSPKAAPKAKLPAVTEDRGIIILALPRLNTGNFALEKFLADNANRSIELFFIYAADEXALREKLAEAAQTCAGFYNRHYGVKAQVVEVR

SEQ ID NO: 2653 - DNA, 870 bp, Unknown
  Obtained from environmental sample
  misc_feature (1)..(870): n is a, c, g, or t
atgtctttcaatttaatcaaagaagaaaattcctcggtcttgnatgataaaccccttcaggttcttgacgaaccggaccggaaaaaatatatacatggtcagaagatttattactctattcgggaaaaagccgcgtccgaaagcatcagttctttggttacggagttgtggtataaagaaggctaccgttacgagacagaatggaatccggcggctaatgtataccgcgagttatacgattatcttttccaccttgcagtccttgccgataccgctaacgaagggcttgcgtccttcgcggactcaatgcgggaacttagggattcaaacgggcgtcttaccgacatagaaataccgcttgaacggcaaggcgcggttcacttaatgacaatacataaaagcaaggggttggaatttccggttgtctttttatgctgctgcggaaagcacagccagacagacagaagcgaggtagtatttttttccgagaactcaggcgttgtcttcagccctccccttcccgattcatgcaattcaattgccggtaattcaataggcggcatacgcaaaaattttctttgggaaaattcaatcgccgaaattaagctaaaaagaacggcggaactgcgccgccttctgtatgtagggatgacaagagcggaaaaagaactgtacctgacaggcagtctggaaataaaagacatagctgaatcaggcgaattttcggatacgctaaaaaattatatcgaaagaaaatgcgaagacaatgaaaattccatttcaggcgattctattttgaataacgatacctttttcggactatttctgccttcaattgcctcccgaataccgcagggattttcaacctga

SEQ ID NO: 2654 - protein, 289 aa, Unknown
  Obtained from environmental sample
  misc_feature (1)..(289): Xaa is any amino acid
MSFNLIKEENSSVLXDKPLQVLDEPDRKKYIHGQKIYYSIREKAASESISSLVTELWYKEGYRYETEWNPAANVYRELYDYLFHLAVLADTANEGLASFADSMRELRDSNGRLTDIEIPLERQGAVHLMTIHKSKGLEFPVVFLCCCGKHSQTDRSEVVFFSENSGVVFSPPLPDSCNSIAGNSIGGIRKNFLWENSIAEIKLKRTAELRRLLYVGMTRAEKELYLTGSLEIKDIAESGEFSDTLKNYIERKCEDNENSISGDSILNNDTFFGLFLPSIASRIPQGFST

SEQ ID NO: 2655 - DNA, 315 bp, Unknown
  Obtained from environmental sample
  misc_feature (1)..(315): n is a, c, g, or t
atgataacaagaaacccctatatagcgaatctcaaagcgggttatcttttccctgaaattgccaagaggcggcgcgaatttgccgcggcgcacccggacgcgaaaattatcagtttgggggtcggcaataccaccgaacctgtcttgccccatataaacaaaggacttgttgagggagcaaaacggcttggaaccgtaaagggctactccggctatcaggatgaggggatggcgcagctgcgggagaagatttcttcggttttttaccagggaaaattttcaatagacgagattttatctcgacgggcaaagtga

SEQ ID NO: 2656 - protein, 104 aa, Unknown
  Obtained from environmental sample
  misc_feature (1)..(104): Xaa is any amino acid
MITRNPYIANLKAGYLFPEIAKRRREFAAAHPDAKIISLGVGNTTEPVLPHINKGLVEGAKRLGTVKGYSGYQDEGMAQLREKISSVFYQGKFSIDEILSRRAK

SEQ ID NO: 2657 - DNA, 495 bp, Unknown
  Obtained from environmental sample
  misc_feature (1)..(495): n is a, c, g, or t
atgttatcaaacccgccggttttgcatccgctgggtattcgaaccgaatgggcgcgggttgttaccgggccttacggctggctggtggcaaaggcgattcataaaaaggaaatttaccgtaattacatcggtttggacgcctgtatggcggacttgatgcgtccggcgctttacggcgcttatcaccacatcaccattccgggaaaggaaaacgcgccgttaagcgaaacgtatgatgtagtgggcagtctgtgtgaaaataacgacaaatttgccattcagcgaaagctgcccaaaatcgacattggcgatgactttgtggtaatccacgacgccggggcgcacggcagggcgatgggttttaactataatggcaaactgcgctgcggggagttgttgttgcggcaggacggttctgtcatacagataaggcggcctgaaacggcggatgattattttgccacgttggatattgcgggcgtgaagattttttaa

SEQ ID NO: 2658 - protein, 164 aa, Unknown
  Obtained from environmental sample
  DOMAIN (27)...(134): Pyridoxal-dependent decarboxylase, C-terminal sheet domain
  misc_feature (1)..(164): Xaa is any amino acid
MLSNPPVLHPLGIRTEWARVVTGPYGWLVAKAIHKKEIYRNYIGLDACMADLMRPALYGAYHHITIPGKENAPLSETYDVVGSLCENNDKFAIQRKLPKIDIGDDFVVIHDAGAHGRAMGFNYNGKLRCGELLLRQDGSVIQIRRPETADDYFATLDIAGVKIF

SEQ ID NO: 2659 - DNA, 537 bp, Unknown
  Obtained from environmental sample
  misc_feature (1)..(537): n is a, c, g, or t
atgcaggcggtttccggcgcgggttatccgggcgtaccaagtctggacatcatcgacaatatcatcccctacatcggcggcgaggaagacaaaaccgaaaaggagccgctcaagatattcggggccattgcgaacgggatttttaataacgccgcctttccgaagatttccgcatgttgcaaccgtgtgccgattgttgacgggcatacagcctgtgtttctctgggatttgggacaaagaagccttcaattgatgaaataagaaaaatctgggcttctttcaaaggactgcctcaggagttaaatctccctatggctccggaacagcctattatataccgagaggagaataaccggccccagccccgcaaggatcgcgaccacgacaagggaatggcggtggtggttggccgcctgcggccctgtaatgtgcttgacatccgctttaccgctctttcgcataacaccgtgcgcggcgcggcgggcggcggcatactcaatgcggaacttttaaggcataagggctttttaggctga

SEQ ID NO: 2660 - protein, 178 aa, Unknown
  Obtained from environmental sample
  DOMAIN (1)...(158): Semialdehyde dehydrogenase, dimerisation domain
  misc_feature (1)..(178): Xaa is any amino acid
MQAVSGAGYPGVPSLDIIDNIIPYIGGEEDKTEKEPLKIFGAIANGIFNNAAFPKISACCNRVPIVDGHTACVSLGFGTKKPSIDEIRKIWASFKGLPQELNLPMAPEQPIIYREENNRPQPRKDRDHDKGMAVVVGRLRPCNVLDIRFTALSHNTVRGAAGGGILNAELLRHKGFLG

SEQ ID NO: 2661 - DNA, 321 bp, Unknown
  Obtained from environmental sample
  misc_feature (1)..(321): n is a, c, g, or t
ttggagcacgcgaagatattggtaagcgcgcaccacgaaaagtgggacggaagcgggtaccccaagggcatcaaagggcgcgacataccgcttttgggtaggcttatggctatagtagacgtctacgacgcgctcgtgtccgaaagaccgtacaaaaggaagctttcccacgatgaagccgtggatatcatacagaaaggcagagggtcgcacttcgatcccgagcttgtcgatctgtttgtcaaagtcgccgatgaatttaagacggttggcgacgctatcggcaatgatagaatgcccccactggaagcgggcgcgtaa

SEQ ID NO: 2662 - protein, 106 aa, Unknown
  Obtained from environmental sample
  misc_feature (1)..(106): Xaa is any amino acid
MEHAKILVSAHHEKWDGSGYPKGIKGRDIPLLGRLMAIVDVYDALVSERPYKRKLSHDEAVDIIQKGRGSHFDPELVDLFVKVADEFKTVGDAIGNDRMPPLEAGA

SEQ ID NO: 2663 - DNA, 666 bp, Unknown
  Obtained from environmental sample
  misc_feature (1)..(666): n is a, c, g, or t
gtgagatatcttccggtcactttcgctggatcgatcgacagttacactacgcttgattatttgcttttgataactgatatttcagacggtaccaatacttatacggcaatagttaatgaactaacgcacgattttgccatatttcagtatcctgattatgttcccaaaatggatgttactgaccggggtaacggaccttttgcgggagaaaaaacctaccacgcgctgacggcttcttttttgcttttgggaaaatggtttgagtttttacaggaacagggggtttatgacaatacccggattgttatcgtttccgatcacgggtatcaggtaagaagtgaatatcccggtaatatacttctccccaataatgatatgctttcaggttatcatgcgcttcttatggtcaaggatttcaacgcgcatggagaacttgccgcggattcaacatttatgaccaacggggatgttccggtcatcgccatgaatggattaattgataatccaaagaatcccttttcaaataatccggttacaaccggcaagaaaaacagcgttaccattactacttctaaagttcttcaatataaaattgcggatgatcagtggttaagcgtacatgataatatatttgatcccaataattgggaaaaggcggtaaaatga

SEQ ID NO: 2664 - protein, 221 aa, Unknown
  Obtained from environmental sample
  misc_feature (1)..(221): Xaa is any amino acid
MRYLPVTFAGSIDSYTTLDYLLLITDISDGTNTYTAIVNELTHDFAIFQYPDYVPKMDVTDRGNGPFAGEKTYHALTASFLLLGKWFEFLQEQGVYDNTRIVIVSDHGYQVRSEYPGNILLPNNDMLSGYHALLMVKDFNAHGELAADSTFMTNGDVPVIAMNGLIDNPKNPFSNNPVTTGKKNSVTITTSKVLQYKIADDQWLSVHDNIFDPNNWEKAVK

SEQ ID NO: 2665 - DNA, 651 bp, Unknown
  Obtained from environmental sample
  misc_feature (1)..(651): n is a, c, g, or t
ttggggcccggcgggctggcttctttccagggcggccatgaaaccggcctcatccatgaacaggtcgcccggcgtcacttccggcccggcggccaggagtaccccccgggccacggtgttttccagttcccggatattgccgggccagtcgtaggattccaggcgggccaaggcctccggggagaggccggtgacctgcttgttgttcaggcgggcgtatttccgccggaaatggtcggccaggaggggcagatcgtccagcctttccttcaagggcggcagaaagaagggaatgacgttcaggcggtagtaaaggtcggaccggaaacggccgctttcggcccaggccttcaaattgcggttggtggtggcgatgacccggacatcgatcttctggggctccttgccgcccacccggtcgatttcgccttcttgaagcacccggagaagcttggcttgcagggccaggtccatttcgctgatttcatccagaagaatgcttccgccgtcggccaactcgaattttccctgcttgcgggccaccgcaccggtgaaggcccctttttcatggccgaaaagctcgctttccaaaaggttttccggcaggctggcgcagttgacggccacgaagggaccgtcagcccgaggtga

SEQ ID NO: 2666 - protein, 216 aa, Unknown
  Obtained from environmental sample
  misc_feature (1)..(216): Xaa is any amino acid
MGPGGLASFQGGHETGLIHEQVARRHFRPGGQEYPPGHGVFQFPDIAGPVVGFQAGQGLRGEAGDLLVVQAGVFPPEMVGQEGQIVQPFLQGRQKEGNDVQAVVKVGPETAAFGPGLQIAVGGGDDPDIDLLGLLAAHPVDFAFLKHPEKLGLQGQVHFADFIQKNASAVGQLEFSLLAGHRTGEGPFFMAEKLAFQKVFRQAGAVDGHEGTVSPR

SEQ ID NO: 2667 - DNA, 597 bp, Unknown
  Obtained from environmental sample
  misc_feature (1)..(597): n is a, c, g, or t
ttgactttattattttatatccatcatggaaacaaaatacatcttcgtaaccggcggcgtagtctccggcctaggcaaaggcataacagccgcctccctcggccgtctcctcaaacagcgcggtctcaaagtcgccgcccaaaagctcgacccgtacatgaacatagacccaggaactatgagcccgttccagcacggcgaggtcttcgtcaccgacgacggcgcagagaccgacctcgacctaggccactacgagcgcttcatagacgagaacctgacgaagttctcgaacctcacctccgggaaggtctactggaaggttctcgaacgcgaacgcgccggcgggtacttaggcggcactgttcaggtcatcccgcacgttacggaggtgatcaaggagttcatctacgcgggcgccaagggcacgggcgccgaggttcttataaccgagatcggcgggacgaccggcgacatcgagagccagccgtttttggaggcgatccgccaaatttcgctcgaaaacccgcgcccgaactgcttgttcatacacgtgacgctggttccgtacctaaagggttcgggcgagcacaagtctaa

SEQ ID NO: 2668 - protein, 198 aa, Unknown
  Obtained from environmental sample
  misc_feature (1)..(198): Xaa is any amino acid
MTLLFYIHHGNKIHLRNRRRSLRPRQRHNSRLPRPSPQTARSQSRRPKARPVHEHRPRNYEPVPARRGLRHRRRRRDRPRPRPLRALHRREPDEVLEPHLREGLLEGSRTRTRRRVLRRHCSGHPARYGGDQGVHLRGRQGHGRRGSYNRDRRDDRRHREPAVFGGDPPNFARKPAPELLVHTRDAGSVPKGFGRAQV

SEQ ID NO: 2669 - DNA, 438 bp, Unknown
  Obtained from environmental sample
  misc_feature (1)..(438): n is a, c, g, or t
gtggctcattcaggagaggacatggggtgggaacaaatcggtgaaacaataacttatcttgatccggaacgtataggacacggagtaagcgcaattcaaaatcccaaactggttaaatatattgccgaaaataaaatccctcttgaaatatgccccacgagtaatttatttacacgcaaatatgtgtcagaaatagaaacacatcctgtaaaacagttttatgaaaataatctttttgtaaccattaattcagatgatcctgtactgttttccacctctcttgttgatgaatatatgctgctttttaataaaggagttttttctcaaaatgatattcttacccttataaaaaacaatatatacgccagctttttaaccgaagataaaaagaatacactttggaaaaattgcaatacgatatataaaaataaattgtaa

SEQ ID NO: 2670 - protein, 145 aa, Unknown
  Obtained from environmental sample
  misc_feature (1)..(145): Xaa is any amino acid
MAHSGEDMGWEQIGETITYLDPERIGHGVSAIQNPKLVKYIAENKIPLEICPTSNLFTRKYVSEIETHPVKQFYENNLFVTINSDDPVLFSTSLVDEYMLLFNKGVFSQNDILTLIKNNIYASFLTEDKKNTLWKNCNTIYKNKL

SEQ ID NO: 2671 - DNA, 717 bp, Unknown
  Obtained from environmental sample
  misc_feature (1)..(717): n is a, c, g, or t
atgactgtgttcgactcgaagggcgggcttcacaaaggccgcgaagatgttaaaaacgacaagctcaattaccgcaagtgggaaatctgcgagaagaccaattccggcggggtcaattccatggacgaggcgatgaagggcgctgacgtgctaatcgcgctttcaactccaaaccccgataccgtgaaacgcccgtggatccgttccatggcgcaacgttccattgtgtttacctgcgccaaccccgtgcccgaaatttggccctatgccgcgaaagaggagggagcttttatcgttgcgacaggccgcgccgattttccgaaccaggtgaacaactcggtttgctttcccggcattcttaaaggcgctttgcttgttcgcgccaaaaagatcaccgacggcatggcaatacgctgcgcccattcaattgcgaatttttccgaaaagcgcgggatcactccggaaaatattattgcctcgatggacgaaaccgaagtctttgccgtggaggctgccgatgtagcgcaagaggccatcgcggaaggcgtaaccggggtgaacctcgtatgggacgaagtgtatcgccgcgccaagtccgacatagaagcctcccgctctgttgtcgaagatttgaaaaagctggggtacatttccgagccgccgttggagctgcttgagaaagctttggaagaggcgatagcctcggcgcgaaaataa

SEQ ID NO: 2672 - protein, 238 aa, Unknown
  Obtained from environmental sample
  DOMAIN (1)...(179): Malic enzyme, NAD binding domain
  misc_feature (1)..(238): Xaa is any amino acid
MTVFDSKGGLHKGREDVKNDKLNYRKWEICEKTNSGGVNSMDEAMKGADVLIALSTPNPDTVKRPWIRSMAQRSIVFTCANPVPEIWPYAAKEEGAFIVATGRADFPNQVNNSVCFPGILKGALLVRAKKITDGMAIRCAHSIANFSEKRGITPENIIASMDETEVFAVEAADVAQEAIAEGVTGVNLVWDEVYRRAKSDIEASRSVVEDLKKLGYISEPPLELLEKALEEAIASARK

SEQ ID NO: 2673 - DNA, 807 bp, Unknown
  Obtained from environmental sample
  misc_feature (1)..(807): n is a, c, g, or t
atggccgagctatccaaaggcagggtctctcccttgcaggagaggcagattgccgggcttgggggcaacacctccgcgattgctgtggaaggcagtttcgacgattgccagcgccttgtaaaaaaggcttttgccgacgcggatctgaaaaaaaggtttgttttgtcttcggccaattcgattaacatatcccgcctcataccgcaggcggcttattatgccgcagccgcaggaggagcgccggaagggacgttctcggttccctccggcaattttgggaacctgatcgccggcctttacgcatggaaaatgggtgcgcccatcgggaaattcatcgcggccacaaacataaataaaacggtgccggattaccttgaaagcggaagctacgaggagaggctttcacaagccacgttgtccaacgcgatggatgttggtgctcccagcaactttgagcgcatggcggcgcatttctctttggctcaaatgcgcgatatcattatgggcgcttcggtcagcgacggcgagaccaaagagacaatttccggggtgtttgctcgatgcggttattacctggatccccacagcgccgtggcctggaaagccgcagataaattaaaggggaaactggcgaaagaaaaaccacttgcgattttttcaaccgctcatccggccaagttcgccgaaacggttgaaccgcttaccgggcccgtgcctgttcccccttcgcttcagaaggcaatggagcggacggtcaaagcaaaaaccattcctgctgaactgaaagcgctaaaggaagatctatga

SEQ ID NO: 2674 - protein, 268 aa, Unknown
  Obtained from environmental sample
  misc_feature (1)..(268): Xaa is any amino acid
MAELSKGRVSPLQERQIAGLGGNTSAIAVEGSFDDCQRLVKKAFADADLKKRFVLSSANSINISRLIPQAAYYAAAAGGAPEGTFSVPSGNFGNLIAGLYAWKMGAPIGKFIAATNINKTVPDYLESGSYEERLSQATLSNAMDVGAPSNFERMAAHFSLAQMRDIIMGASVSDGETKETISGVFARCGYYLDPHSAVAWKAADKLKGKLAKEKPLAIFSTAHPAKFAETVEPLTGPVPVPPSLQKAMERTVKAKTIPAELKALKEDL

SEQ ID NO: 2675 - DNA, 786 bp, Unknown
  Obtained from environmental sample
  misc_feature (1)..(786): n is a, c, g, or t
atgttgatatttttgcaatcagacacgagaaggactctgtccatgagcgcgcgcgtcatccgcagcgtcggcgttgacatcggcacaacgacgacacaggtgattttctcccggctggagctggtcaatcgcgcgcctgcctcgcaggtgccgcattacgagttttccagccgggaaatcacctatgtcagcccggtggttttcacgccgttcgacagcaacggccgcgtgggccagaaggatttggaaacattcatccgctcgcagtacgcggcggcctccctgagcgtggaagaagtcgaatccggggccatcatcattaccggcgaaagctcaaaagccagaaacgcccgcgacacgatcatggaccttgcccggctgctgggcgatttcgtcgtcgccacagccggtccccatctggagtccatcatcgcgggacatggttccggagcgggcgagtattcgaaagatcgcgcctgccgcgtgctcaacatggacataggcggcggcacgtccaactacgccgtctttgaaggggggcgggttgttgatacggcctgcctgaacataggcgggcatctcatcgaaacattcagcgacggaagcgtaaaaaccgtgcgcgaaccggcgcaacgcctgtgcgaggcgtatttcggcaaacgccgcgacccggtgcggctcggcaggcaggaactggacacgctggccgagggcatggccggcctgatcatggaagtgctgcatggaacgccttccgatctggcctcgtgccgctcggccatctga

SEQ ID NO: 2676 - protein, 261 aa, Unknown
  Obtained from environmental sample
  DOMAIN (16)...(261): Ethanolamine utilisation protein EutA
  misc_feature (1)..(261): Xaa is any amino acid
MLIFLQSDTRRTLSMSARVIRSVGVDIGTTTTQVIFSRLELVNRAPASQVPHYEFSSREITYVSPVVFTPFDSNGRVGQKDLETFIRSQYAAASLSVEEVESGAIIITGESSKARNARDTIMDLARLLGDFVVATAGPHLESIIAGHGSGAGEYSKDRACRVLNMDIGGGTSNYAVFEGGRVVDTACLNIGGHLIETFSDGSVKTVREPAQRLCEAYFGKRRDPVRLGRQELDTLAEGMAGLIMEVLHGTPSDLASCRSAI

SEQ ID NO: 2677 - DNA, 570 bp, Unknown
  Obtained from environmental sample
  misc_feature (1)..(570): n is a, c, g, or t
atggcggattccggactggtacaaacacttgattatatcctcaataaaagcgatgccgcttcaattgaagtactggcggaagcggtcatacgccgtcgccgtgatttaatggtttttgacacagtgggcaatatgcccgaccctcaaagaatgtccaaagaaataactgaaaaaatcaacgctgggataggcggcggcattgagaccatgaaaaagtccgttcaggaaatgattcaaaaaatactgaaagaacacgcccccgaacttaacgagaagcaaagaaacgaattatgccaggcatggatgccggacggaatcggaaaaaacaccactggcagcggattaccgcccgacgtcctcctttccatgatcgaacaatttatttccttctcccacggcgaaatgaaagaatcagtggacaaaagcctccgcgatgaaatgggcgcatggccggaacgctactggaacagcttcccccccgttgtacggcagataattacggaatatttaaaaaataaaacaaccgacaaagaatttaagagtaagatttgcatcgctttgggactttga

SEQ ID NO: 2678 - protein, 189 aa, Unknown
  Obtained from environmental sample
  misc_feature (1)..(189): Xaa is any amino acid
MADSGLVQTLDYILNKSDAASIEVLAEAVIRRRRDLMVFDTVGNMPDPQRMSKEITEKINAGIGGGIETMKKSVQEMIQKILKEHAPELNEKQRNELCQAWMPDGIGKNTTGSGLPPDVLLSMIEQFISFSHGEMKESVDKSLRDEMGAWPERYWNSFPPVVRQIITEYLKNKTTDKEFKSKICIALGL

SEQ ID NO: 2679 - DNA, 576 bp, Unknown
  Obtained from environmental sample
  misc_feature (1)..(576): n is a, c, g, or t
atgaagcccaaatggcgctacaatgcagggctggcgtcaaaaaaaggggtaccagtaaaacaggctgagaaaagtgaaagtgaaattgaagtnttttatacacttcttaaagagacttcaaaaagagataaaattgcgatacacggctttgagtattacaaggcgcttttttccggcaattacgatacacccgacataagactttactttgccatgtatgaaggagatacgcttgcaggtatagtaacgcttttccgaggtgctgacgccgtttatctttacggcgcttcatcagacaataagcgaaatttaatgcctacatatgcgcttcaattaaaggctatcgaagacgcgaaaaatcatggctgcaaaaattatgactttttcgggataccaccggttaacgataaatcacatccaatggcaggcttgtaccaatttaaaaccggctttggcggaaaaataattcatcgtcccggaagctgggattatccataccgttatatcatgtatcatttttttcgcgttgttgaaaagctaagaagctgtttaaaaaattttagaaaaaagaaataa

SEQ ID NO: 2680 - protein, 191 aa, Unknown
  Obtained from environmental sample
  DOMAIN (1)...(179): FemAB family
  misc_feature (1)..(191): Xaa is any amino acid
MKPKWRYNAGLASKKGVPVKQAEKSESEIEVFYTLLKETSKRDKIAIHGFEYYKALFSGNYDTPDIRLYFAMYEGDTLAGIVTLFRGADAVYLYGASSDNKRNLMPTYALQLKAIEDAKNHGCKNYDFFGIPPVNDKSHPMAGLYQFKTGFGGKIIHRPGSWDYPYRYIMYHFFRVVEKLRSCLKNFRKKK

SEQ ID NO: 2681 - DNA, 510 bp, Unknown
  Obtained from environmental sample
  misc_feature (1)..(510): n is a, c, g, or t
atgtatcttatggaaatgaaattcaaaaaaatgttgacggtagttttgacggcggcggtaatatgcggcttttccgcttgtaatgaaaagaaaaacgttcagaatgtcgaacttaacaagagaaacccggtaattattgatcaggatttaattatccaaaccaaggacatcacgagaaacgctcttttttttcctgttgaaattgacggaaaacaaatggaagtgattgcggtgaaaacgccggacggtaaaatacgcacggcgtttaacgcttgtcatgtgtgttacaagctgggaaagggttattacgtgcaggttgatacgatgttggtttgccagagatgtaaaaaacgttttcgcatggaagtgatagaggtaaaaacaggaggctgtaaccccatatctattttcccggaagataaaacggaaacagattcggctattaccatatcaaaggaatatttagcccaaaacagcgcgatgtttaagaactgggatgaaaacaaataa

SEQ ID NO: 2682 - protein, 169 aa, Unknown
  Obtained from environmental sample
  SIGNAL (1)...(26)
  misc_feature (1)..(169): Xaa is any amino acid
MYLMEMKFKKMLTVVLTAAVICGFSACNEKKNVQNVELNKRNPVIIDQDLIIQTKDITRNALFFPVEIDGKQMEVIAVKTPDGKIRTAFNACHVCYKLGKGYYVQVDTMLVCQRCKKRFRMEVIEVKTGGCNPISIFPEDKTETDSAITISKEYLAQNSAMFKNWDENK

SEQ ID NO: 2683 - DNA, 408 bp, Unknown
  Obtained from environmental sample
  misc_feature (1)..(408): n is a, c, g, or t
atgtctatatatgacgtattatgtattcaaaagatngacgccgttctttcgggggaatggcagacgctggctaacctgagcatacactcaaattttggcgctgcgggaaaaagcctttacaaggtggaagctattaaattttctgggaaaacagatgaattggcaaaagcctgtgtccagctaggagggatcgaaacaacaaaagctgatgttgggtttatgtttaacgcttttccgttcctccccgtgatattccagtattgggatggcgacgatgaatttgcgccaagaatcaacttccttttcgacagaaacacgctctactatatccattttgaaactgcgtggtatgtagccggacatctgattgatcttattgagacagaaataaacagcatagaggcgtaa

SEQ ID NO: 2684 - protein, 135 aa, Unknown
  Obtained from environmental sample
  misc_feature (1)..(135): Xaa is any amino acid
MSIYDVLCIQKXDAVLSGEWQTLANLSIHSNFGAAGKSLYKVEAIKFSGKTDELAKACVQLGGIETTKADVGFMFNAFPFLPVIFQYWDGDDEFAPRINFLFDRNTLYYIHFETAWYVAGHLIDLIETEINSIEA

SEQ ID NO: 2685 - DNA, 798 bp, Unknown
  Obtained from environmental sample
  misc_feature (1)..(798): n is a, c, g, or t
atgcaagttgtaataatggccggaggaaaaggcacccgcgtttcttcaatagcgagcgacattcccaagccgatgatcccaatctgcggcaggccgatacttgaacatcaaattgagtgtcttaaaaaaaatggtttaacggaaattatccttgttatcgggcatctcggcggttatatcaaagattattttggaaatggcggacgtttcggatgcggcatttcttactatgacgaaacagagccgcttggaacggcgggagcgttatataaattaaaaaatatttctgacgattttattttattaaacggcgatattatttttgacattgatttccagcggatgataaactttcaccgtgaaaaaaaggcccaggttacgcttgcggtgcatcccaacagccacccctttgacagcgccttgatagtcacaaacgataataaccaggtaacgcgatggcttaataaagaagatgaacgcgcatattacaaaaatcaggtaaacgccggaattcatatcatatccgcggagtttatagaaaactgtccgcagtcaaaagagaaagtcgatcttgaccgcgatatgttaaaaccttcaatttcaggcggaaagatattcgcctattctactcccgaatacataaaggatatgggcactccagagcgttacgcgcaagtcacctcagatattgaaaatgggattgtcaggcaaaaaaacctgtctgtaaaacaaaaatgcgtttttctggacagggacggaacccatcataaaattcatggctttataccnaaaccctga

SEQ ID NO: 2686 - protein, 265 aa, Unknown
  Obtained from environmental sample
  DOMAIN (2)...(233): Nucleotidyl transferase
  misc_feature (1)..(265): Xaa is any amino acid
MQVVIMAGGKGTRVSSIASDIPKPMIPICGRPILEHQIECLKKNGLTEIILVIGHLGGYIKDYFGNGGRFGCGISYYDETEPLGTAGALYKLKNISDDFILLNGDIIFDIDFQRMINFHREKKAQVTLAVHPNSHPFDSALIVTNDNNQVTRWLNKEDERAYYKNQVNAGIHIISAEFIENCPQSKEKVDLDRDMLKPSISGGKIFAYSTPEYIKDMGTPERYAQVTSDIENGIVRQKNLSVKQKCVFLDRDGTHHKIHGFIPKP

SEQ ID NO: 2687 - DNA, 615 bp, Unknown
  Obtained from environmental sample
  misc_feature (1)..(615): n is a, c, g, or t
gtgggctgcgctatttgggcggatttgtactttgattttgattcggtgcagccgccccacggcagaacccccgccgcggctaccggcattaagcgggtattgcccgatcatctagtaatctgttatcagggagacggcgatatggcggctatcggcacggcggagatgatccacgcggcgaaccgcggcgaaaaatttaccacgatttttgtcaataatgccatttatggcatgaccggcggtcagatggccccgaccacactgatagggcaaaaggcggcgaccgccccctatggccgcgaccccgatgccgccggtatgggctaccccatccgtgtcggggaattgcttgccagccttgacggtacgcgctacattgcccgcggtgcggtgaacaatgcggcaaatatccgcaaaacgcggcaatatatcaaaaaggcgctggaagcccagcgcacgggcaaaggttttaccatggtagaagtcctttcaccctgtccgaccaactggggtatggaaccaatcgcgtcggtagaatggctggaacagaacatgatccccgtgtttcccctgggagagataaaaaacacactggatacggaggcagcaaaatga

SEQ ID NO: 2688 - protein, 204 aa, Unknown
  Obtained from environmental sample
  DOMAIN (1)...(162): Thiamine pyrophosphate enzyme, C-terminal TPP binding domain
  misc_feature (1)..(204): Xaa is any amino acid
MGCAIWADLYFDFDSVQPPHGRTPAAATGIKRVLPDHLVICYQGDGDMAAIGTAEMIHAANRGEKFTTIFVNNAIYGMTGGQMAPTTLIGQKAATAPYGRDPDAAGMGYPIRVGELLASLDGTRYIARGAVNNAANIRKTRQYIKKALEAQRTGKGFTMVEVLSPCPTNWGMEPIASVEWLEQNMIPVFPLGEIKNTLDTEAAK

SEQ ID NO: 2689 - DNA, 849 bp, Unknown
  Obtained from environmental sample
  misc_feature (1)..(849): n is a, c, g, or t
gtggtgtgccacgagatagtggagacgagccgcgtgttcgccagaaccgtggcggcgatcaaaccggagtggttggaggagttggccgccgatttttgcaagcggacgttcgagacgccgttnttcgacgcggagagcgggtgcgtgagggctgtggagcgcgtcatgctcttcggtcttccgctcgccgtcaaaaaaaacgccttgtacagcaaagcggagccggaggcggctacggaaatctttatcagggacgggttggtcgaagagaaccttgtatgccatcacaaattttatgaccataacaaaaagctcaaacaaaaaatcctctcatacgaggcgaaattgcggtcgcggggttattacaagggcgacggggcgatatttgatttctacaagaagcaagtgccggttatggcctcaatacacgatttaaacaaagcgatacgggccgccggtaatgataaatttttgtttatgagcgaggaggatataattgaggaatcgatcccggcggaggctcacgcttaccccgaccacgtcaatataggcaatcaaaacttcgcgttgaaatacgctttcgatccgggaaatgaagacgacggcgtgacgttggcgttgccgcaaaaggtgttgccgtttattgctaaggagactatagggtggcttcttccggcgctgtggccggcgcagataaagagtttattgcaacagctgccgcgcagtcagcgaaaggtattcgtacctgtaggcgaagcggcgcaaaagcttgcggacaacatcgttgctccgccggctacgcatgaatcgttcgcggcggagttatcatcagccataactcgccaataa

SEQ ID NO: 2690 - protein, 282 aa, Unknown
  Obtained from environmental sample
  misc_feature (1)..(282): Xaa is any amino acid
MVCHEIVETSRVFARTVAAIKPEWLEELAADFCKRTFETPXFDAESGCVRAVERVMLFGLPLAVKKNALYSKAEPEAATEIFIRDGLVEENLVCHHKFYDHNKKLKQKILSYEAKLRSRGYYKGDGAIFDFYKKQVPVMASIHDLNKAIRAAGNDKFLFMSEEDIIEESIPAEAHAYPDHVNIGNQNFALKYAFDPGNEDDGVTLALPQKVLPFIAKETIGWLLPALWPAQIKSLLQQLPRSQRKVFVPVGEAAQKLADNIVAPPATHESFAAELSSAITRQ

SEQ ID NO: 2691 - DNA, 474 bp, Unknown
  Obtained from environmental sample
  misc_feature (1)..(474): n is a, c, g, or t
ttgccgaatttaccgcctacggcggttcggggtacgcccgaagtgatgaaccaggctgtaaaacgcaatattagacgctttccgtccgattttatgttccaattgactaatgaagattggaaaaatctaaggtcacaaattatgacctttagtaaagatgtaagaaaatacaagccttatgcttttacagaacaaggcgtttcaatgctgtcaagcgttataaactctgaacgagcaattgaggtaaacattaacatcatgcgggcttttgcaaaattaaggcactatgtactttcaaaaagcgacacaaacgaacaaatagccgaattaaggaaactgctcatggtttacattgaaaatactgattataagctgtcaaaacacgacaagacaattgaacaaataattattgcactgaataaccttatagagaaaccgccaaagaccaaaaagattggttttataaaagaatga

SEQ ID NO: 2692 - protein, 157 aa, Unknown
  Obtained from environmental sample
  misc_feature (1)..(157): Xaa is any amino acid
MPNLPPTAVRGTPEVMNQAVKRNIRRFPSDFMFQLTNEDWKNLRSQIMTFSKDVRKYKPYAFTEQGVSMLSSVINSERAIEVNINIMRAFAKLRHYVLSKSDTNEQIAELRKLLMVYIENTDYKLSKHDKTIEQIIIALNNLIEKPPKTKKIGFIKE

SEQ ID NO: 2693 - DNA, 894 bp, Unknown
  Obtained from environmental sample
  misc_feature (1)..(894): n is a, c, g, or t
ttgccatcaaatgtgcgttttgtatttccctcgcaaaccgcggcaagcctgtgggccaggaggacctgtaccttgggcatagtacgttcggttgcggcagaccgcttccttgcctgggacaagttcaaggaagaaatcaccgaggagaaggaaaaggaaccagctaccgcaatcatgcggaagctctttgccgaagccttgacacggaaaaacgccgaagccgcggcgggctcatccggtgtggaggggtttccattgaagtccctcattcccctggagtatgcccaaagcggtgggattttcgctcccttcatagcccggcttcttccgtctctggcctactgggaagccttgatgaaacaggccggggccgaacctcaagacgcggaagaccgggattatgaacatatcaaaagggaatatgccgcctttctcgaaggccacaaactttttgaaccttcctgggaggaactgaaaattcaaaggggggggtatcgttatgtgattttcttccctgaacttatcgaagactttgcggaatacgatgccctgctggatacccctcagtttatccgcgtaaaggcggacacagtttcctcaggcgggggccagagtcttgtgttctaccaatccagccgggaagaaatccggagcgcggtcatggaactccaaaggctccacgaggaggaaagcgttccttacgaggacatggcaataagcgttcctgaactggaagaaatggaaccctggctggttaaagaattctccctccgccatattccctttacccggcgggccgggaagaacctgggggaaaccggggcgggccggcttttctcgttggtaaatgaatgtggggcttcccggttttcttttacagccttcaggccctga

SEQ ID NO: 2694 - protein, 297 aa, Unknown
  Obtained from environmental sample
  misc_feature (1)..(297): Xaa is any amino acid
MPSNVRFVFPSQTAASLWARRTCTLGIVRSVAADRFLAWDKFKEEITEEKEKEPATAIMRKLFAEALTRKNAEAAAGSSGVEGFPLKSLIPLEYAQSGGIFAPFIARLLPSLAYWEALMKQAGAEPQDAEDRDYEHIKREYAAFLEGHKLFEPSWEELKIQRGGYRYVIFFPELIEDFAEYDALLDTPQFIRVKADTVSSGGGQSLVFYQSSREEIRSAVMELQRLHEEESVPYEDMAISVPELEEMEPWLVKEFSLRHIPFTRRAGKNLGETGAGRLFSLVNECGASRFSFTAFRP

SEQ ID NO: 2695 - DNA, 855 bp, Unknown
  Obtained from environmental sample
  misc_feature (1)..(855): n is a, c, g, or t
ttgcaaaaactatttcctttacaaaaacgttcctacgatatttggaaagataccntggttcaaaaaggaaatgatttttcttttttttcttctccggttccggcagtggagccggtcaaagaactcctggaacacgctattttgggcaaagataattaccttaccgttacgcctaccagggatctcaatgtgtattataactgtccggtattctggctttatatgagggtctttaaggctgaagagttttctcttgaggctgctcttttggacgacacttctctgggattgctctaccataatattctggaagcgctttttagaaagataaaaaatgaggatgggcggttttattcccagcgcatagatatttataaacgctgggccctggaaatcaccaggcaagaaatagaagaacatcccgcattccggggccccttggcagtacctctggtatctccgcaagcagcgggaatggcaaagaaaatcgcgggtcttctggacgtagaagcgaattatttcgatggctataaagttgcggaactggaactcccggtcagttttaagtccggagacctccttattaaggggatcattgacagggtttcaatttccccggagggagagccggttatcatggactataagacatcgtatcttcctgaacagattagcccggataaactccacgaagtccccctctcggaatttcagatgcccctttacataaaactctacgaagaaatagccggtacacaaagtgaagaaaacccctccaaagtacaaggggcgtatttctacagcatccacaaccggaaaataaaaagcgtcgtaggtcctctcggccgattctga

SEQ ID NO: 2696 - protein, 284 aa, Unknown
  Obtained from environmental sample
  misc_feature (1)..(284): Xaa is any amino acid
MQKLFPLQKRSYDIWKDTXVQKGNDFSFFSSPVPAVEPVKELLEHAILGKDNYLTVTPTRDLNVYYNCPVFWLYMRVFKAEEFSLEAALLDDTSLGLLYHNILEALFRKIKNEDGRFYSQRIDIYKRWALEITRQEIEEHPAFRGPLAVPLVSPQAAGMAKKIAGLLDVEANYFDGYKVAELELPVSFKSGDLLIKGIIDRVSISPEGEPVIMDYKTSYLPEQISPDKLHEVPLSEFQMPLYIKLYEEIAGTQSEENPSKVQGAYFYSIHNRKIKSVVGPLGRF

SEQ ID NO: 2697 - DNA, 879 bp, Unknown
  Obtained from environmental sample
  misc_feature (1)..(879): n is a, c, g, or t
ttgatggccgagcccatccgcacgctgctcttgaccttcttctaccgccagatgccgcagatcatcgagcgcggctacctgtatatcgcgcagccgcccctctacaaggccaagcgcggcgcctcggaggtgtatctcaaggacaacgcggccatggaggcctacctcgtcgacaacgcggtcaaggacttggtgctggagcgccagggcggcgagcgcatatcgcagaaccatctgcgcgaggtcatcgccggcgcgcaggcggccaagcggctgctggagctcctgcccaagaaggcgccgatcgcggtcatggagcagatggcaatactcggaatgctcggcggcaggccgacggaagcgggcgccaaggagctgtgcgcgcggctggactccttcctgcccgagcacgagcgcggcttcgcctaccagctttccgacgagggcctgaccatctccaagaccctgcgcggcgtgctggagcgccacttcctgcccggcgacttcatcggctcgccggaggccggcaagatgggcgagcaccacgccttcctgcgcgagaacttcctcatgcccgcgcgcctcatacgcggcgacaagagctacgcggtgggcgggccggtcggcctcgtcaggcacgtgatggacgtgggccgctccggcatcgcgctctcgcgctacaagggcctgggcgagatgaacccggagcagctgtgggaaaccacgctggatcccgagagccgcaccctgctgcaggtgaaggtcggcgattccgccgccgccgacgaggtgttctcggtgctgatgggcgacgtggtggagccgcggcgcgacttcatatcaagcaacgccatgaacgtggtcaatctggacgtgtag

SEQ ID NO: 2698 - protein, 292 aa, Unknown
  Obtained from environmental sample
  DOMAIN (215)...(281): DNA gyrase B subunit, carboxyl terminus
  misc_feature (1)..(292): Xaa is any amino acid
MMAEPIRTLLLTFFYRQMPQIIERGYLYIAQPPLYKAKRGASEVYLKDNAAMEAYLVDNAVKDLVLERQGGERISQNHLREVIAGAQAAKRLLELLPKKAPIAVMEQMAILGMLGGRPTEAGAKELCARLDSFLPEHERGFAYQLSDEGLTISKTLRGVLERHFLPGDFIGSPEAGKMGEHHAFLRENFLMPARLIRGDKSYAVGGPVGLVRHVMDVGRSGIALSRYKGLGEMNPEQLWETTLDPESRTLLQVKVGDSAAADEVFSVLMGDVVEPRRDFISSNAMNVVNLDV

SEQ ID NO: 2699 - DNA, 585 bp, Unknown
  Obtained from environmental sample
  misc_feature (1)..(585): n is a, c, g, or t
atgcgcgaagaattcccatcttaccttgaaccgctcaacgaagaacagagacgcgccgtgcttcatacggggaagccgcttttgatactcgcgggtgcggggtcggggaagacgagagtaattactacaaagatcgcttggcttatcagggaacagggaatggatccgcgttccattctggcggtgacatttaccaacaaggccgcaagggaaatggcggaacgcgccgtattgattgaaccccgcgcacaagacacgatgctgaggacgttccactcctttggagcctggtttctcaggcgcaacggaaattttgccgggcttgactcatcctttgtcatttacgatgacgacgacgttgtttccctgctatccggcattatggaaaacgacccgaaaccggaagttaaacagtgcgcccgcaatatttcccgcgccaaagattattttctctctcccgacgatcccttactcgctaatatagacagccggaaaaaattccggatcatctacgcaagttatgaggagcgtatggcgcagatcggcaatgtcgatttcggggatttaattaaaaaaccctgttga

SEQ ID NO: 2700 - protein, 194 aa, Unknown
  Obtained from environmental sample
  misc_feature (1)..(194): Xaa is any amino acid
MREEFPSYLEPLNEEQRRAVLHTGKPLLILAGAGSGKTRVITTKIAWLIREQGMDPRSILAVTFTNKAAREMAERAVLIEPRAQDTMLRTFHSFGAWFLRRNGNFAGLDSSFVIYDDDDVVSLLSGIMENDPKPEVKQCARNISRAKDYFLSPDDPLLANIDSRKKFRIIYASYEERMAQIGNVDFGDLIKKPC

SEQ ID NO: 2701 - DNA, 525 bp, Unknown
  Obtained from environmental sample
  misc_feature (1)..(525): n is a, c, g, or t
atgattgacggctcgctggggcagcagcccgaaaaaacatccggtttagcggctttattgccgaatttactgaaatttatagccattggattgggtgcgttaatttttattgttaccgtttcggtaattacctataacattctgaataagggcgggcaatcccagactatgcttccttcggcttctccctttgtcggcgccaggcctgagtaccagatcttctcctccattgggacaatcaggacaagcaccaaagatcccctgccatattctgtagttgtagatatggttatagggtacgatcttaatgacagtacggcccaggccgaattaacagcccgcctttacgagttacgggattttgtgcgggtttttttcaaaggcaaaatagccgatgatctcaggccggaaaacgaaccccgtataaagcaggaaatactcgagcagctcaacaccaaaatcctgaattccgccagggcaaggattattttgttcaaccagcttgatgtaatgtcaatgcaataa

SEQ ID NO: 2702 - protein, 174 aa, Unknown
  Obtained from environmental sample
  DOMAIN (20)...(171): Flagellar basal body-associated protein FliL
  misc_feature (1)..(174): Xaa is any amino acid
MIDGSLGQQPEKTSGLAALLPNLLKFIAIGLGALIFIVTVSVITYNILNKGGQSQTMLPSASPFVGARPEYQIFSSIGTIRTSTKDPLPYSVVVDMVIGYDLNDSTAQAELTARLYELRDFVRVFFKGKIADDLRPENEPRIKQEILEQLNTKILNSARARIILFNQLDVMSMQ

SEQ ID NO: 2703 - DNA, 429 bp, Unknown
  Obtained from environmental sample
  misc_feature (1)..(429): n is a, c, g, or t
gtgtggntagacgacagccttgaaagcctgaagcccttaaaaaatattctgaaagatttttacgaggtatatccctgcccttccgtagaggaggcgtttgagttgctggaacacgttcagcctgatttaatactgctggatgtgggaatgccggaaatgaatgggtatcaagtaataaaaaagctgaaaaacaacgataaatacagtggaatacctgttattttcctgtccgccatgaacgacgagcagagcgaaatggagggcctgaaactcggcgctgttgattatatacacaagccctttgttactccgctattgctgcagcggataaaaatacacctttccatgtcggaacaacaaaagataatactggaaaggaataaagaaattgaggaatttcttaagaagatctctaaaagctcagggtga

SEQ ID NO: 2704 - protein, 142 aa, Unknown
  Obtained from environmental sample
  DOMAIN (4)...(111): Response regulator receiver domain
  misc_feature (1)..(142): Xaa is any amino acid
MWXDDSLESLKPLKNILKDFYEVYPCPSVEEAFELLEHVQPDLILLDVGMPEMNGYQVIKKLKNNDKYSGIPVIFLSAMNDEQSEMEGLKLGAVDYIHKPFVTPLLLQRIKIHLSMSEQQKIILERNKEIEEFLKKISKSSG

SEQ ID NO: 2705 - DNA, 642 bp, Unknown
  Obtained from environmental sample
  misc_feature (1)..(642): n is a, c, g, or t
ttgtataacaaagaaaaaaccgccctgcttcgataccctgccggaaaaaccgattcttcttttaccgtgccgaacggcgtaaccgttatcgggaagtccgcttttgaggaatgtattgctcttgaagttttaaatttagggagcaatgtcagcatctttaaagaagactctttttaccactgtgtcaatcttacagcgataaatgttgataaaaataatacagaatacagttccgctaacggtgtattgtatgataaaaagaaaataattttgtatagatatcctaaagaaaaacaggattcttcctttgctataccgcacagcgttaccgaaatcagagccagagcgttttggaactgcaaaaatcttaaaagcgtaaccatacccaaaaacgtaaccgctattcaagaaggcgctttttactactgcgacaatcttgccgaggtaacatttgaaggtataatccgtgaggattattttagtgaaacagagacattctgcggagacttgcgtaagaaatatattgaaagcggcgtagggacatatactacagaaaaccccggcttagaagcggaatggtcaaccggtcaaaaaaacagggaaagagatatctggtcgcttggagaatactatgattcataa

SEQ ID NO: 2706 - protein, 213 aa, Unknown
  Obtained from environmental sample
  misc_feature (1)..(213): Xaa is any amino acid
MYNKEKTALLRYPAGKTDSSFTVPNGVTVIGKSAFEECIALEVLNLGSNVSIFKEDSFYHCVNLTAINVDKNNTEYSSANGVLYDKKKIILYRYPKEKQDSSFAIPHSVTEIRARAFWNCKNLKSVTIPKNVTAIQEGAFYYCDNLAEVTFEGIIREDYFSETETFCGDLRKKYIESGVGTYTTENPGLEAEWSTGQKNRERDIWSLGEYYDS

SEQ ID NO: 2707 - DNA, 417 bp, Unknown
  Obtained from environmental sample
  misc_feature (1)..(417): n is a, c, g, or t
ttgcgcatatcagagaatatgcagaacagtttatatcatcggacgcgagaatatgaaaaacatggggaaaggttgatgaatataaagacaagccgcacaaaactaaatagtgagcaaaaaaaagccgcatattgcacagaaaacgctgtcgtcgccgccggagcaggttcaggaaaaactatggtgcttgcaaatcgttttgcatggcttctcacagagaaaggttataaagtaaatgaaatattaacccttacatttacaaaaaaagccgcagcacaaatgttcagacggatttattcgctggtttcggaaattgccgaaagtgatacgggaataagggcggaaagggcgcgtcaggccttaaatgattttgttcatgcgaggatacaaacgctgatctacagctcggccatctga

SEQ ID NO: 2708 - protein, 138 aa, Unknown
  Obtained from environmental sample
  misc_feature (1)..(138): Xaa is any amino acid
MRISENMQNSLYHRTREYEKHGERLMNIKTSRTKLNSEQKKAAYCTENAVVAAGAGSGKTMVLANRFAWLLTEKGYKVNEILTLTFTKKAAAQMFRRIYSLVSEIAESDTGIRAERARQALNDFVHARIQTLIYSSAI

SEQ ID NO: 2709 - DNA, 1002 bp, Unknown
  Obtained from environmental sample
  misc_feature (1)..(1002): n is a, c, g, or t
ttgtgcggacgtaatatttcgacaaatggcatataccacgtggagacgcttgacctttccggtcttatggtaatgctcatctttgataacggctcgacggaagacgtggcgtacgataattttggcgcttacaatatattggtaagcctgacgcagggaacgccgcttactttagcgcataacggaacacacattactgtaaccgcaagcggtaaaaccgcaaataccggtaatttatcggtcaacaaggcaagcgcgcccgacgttacattccccacaacatcggcaatcacctacggtgagacaatttcgtcatcaacatttagcggcggtactacagggcgcggtacttttgcgtggtctgacggaagaatagttccattagcagtagtttcagacgaatatgatgttgagtttaccccgaatgacatagatacttacgattataccaacgtacccggctggaacatcagcaggaatatggttataaggcttgttcctattaaaatcaacaaaaaatccatcactattaccccgaccgccggacaaagcaaagtgtacggtacggctgacccgacatttacctatacaccgagcgaagcgttacttcccggcaacagctttacaggcgcgttagcctacgcaggtacaaatgtaggaacgtatccatttacgctaggctcgctttccgcaggaggcaactacgagctgactttagccggaagcgttacgtttgccataaccaaagccccaggctctaatgtaaccaaaccgtccggcgcatggaactttagtacgaaaacgattaacgttaccgccgtaagcttaagcacagcgaccggacaggatattgaatacgccataagcacatcaggttcggcatcagccgcttcattaacatggaaacgtaacaaacttacattcgatattaccgcaatcgacacaacctactttatatatgcgcgttcaagagaagcgtccactacagcgtctgtacggtaa

SEQ ID NO: 2710 - protein, 333 aa, Unknown
  Obtained from environmental sample
  misc_feature (1)..(333): Xaa is any amino acid
MCGRNISTNGIYHVETLDLSGLMVMLIFDNGSTEDVAYDNFGAYNILVSLTQGTPLTLAHNGTHITVTASGKTANTGNLSVNKASAPDVTFPTTSAITYGETISSSTFSGGTTGRGTFAWSDGRIVPLAVVSDEYDVEFTPNDIDTYDYTNVPGWNISRNMVIRLVPIKINKKSITITPTAGQSKVYGTADPTFTYTPSEALLPGNSFTGALAYAGTNVGTYPFTLGSLSAGGNYELTLAGSVTFAITKAPGSNVTKPSGAWNFSTKTINVTAVSLSTATGQDIEYAISTSGSASAASLTWKRNKLTFDITAIDTTYFIYARSREASTTASVR

SEQ ID NO: 2711 - DNA, 444 bp, Unknown
  Obtained from environmental sample
  misc_feature (1)..(444): n is a, c, g, or t
ttgggcatagacacagattatcagcgtctgcttgcccttgataaagacagcgaggaactgctgatatctctggaacattttcaaaacaatctggaccttttgattcaaaaaacatgggtggaaaaatccgaggaacggcgcaaagagcatcttcaggataaaatacccgttttaatgggattaattaaaaaaggcgagttattgcttgctatagaagattttgccttgattcttgaagaactgtcatttctctttttcggcgttcaaagcagcaagaatgattttacagaatacacattccgtattgacgcgcaaatggggcttttttggtggtacagcgcaaggcttaacaagcttaaagagttaaacgaaaatatcagccgtgacgataaaatcctgtgggcgattttactgcttggcctttgttatttaacgaatttttaa

SEQ ID NO: 2712 - protein, 147 aa, Unknown
  Obtained from environmental sample
  misc_feature (1)..(147): Xaa is any amino acid
MGIDTDYQRLLALDKDSEELLISLEHFQNNLDLLIQKTWVEKSEERRKEHLQDKIPVLMGLIKKGELLLAIEDFALILEELSFLFFGVQSSKNDFTEYTFRIDAQMGLFWWYSARLNKLKELNENISRDDKILWAILLLGLCYLTNF

SEQ ID NO: 2713 - DNA, 957 bp, Unknown
  Obtained from environmental sample
  misc_feature (1)..(957): n is a, c, g, or t
atgatgccgagcgcagtggatgagacaaataaatcgcttgcctatgagcgtacaaaagaggaaacttttcaggcaatggaaggctttatttacaatctcaataccatgcactcaagggcaggggcgcaggttcctttttcaagcatcaactttggaaccgatacaagcgaagcgggcagaatggttactgagtgttttttgcttgcttacgagaaaggtttaggcaaaggcgaatcgcctttattccccaatgtatgttttaaaattaaggaagatattaattttgaggaaggcgatccaaattacgatttgtttcaattaagcatgcgcgttgcctgcaagcggctttttccctctttttcttttcaggattccagttttaacaaaccgtatcgtgatgaggaagtagcctacatgggctgccgtacgcgcgttatttcaaactgcaacggagccgaaataaccgattcgaggggaaacctgtcttttacaaccattaacctgccgcgccttggcatacgcgcaaacaaggatttatcccagttctggaaattccttgatgagattgtcgagctttgtattgaacaattattgacaaggtataacgtacaaaaaaaactcaaggtaaaagattttccgtttttaatgggacaaaaactgtaccttgacagcgagggactgtccgccaatgatacgattgaaaaagcaatccgtcatggaacgctcagtgtcggatttataggtctggcggaatgtcttaccgcgttgatgggcaaacatcacggggaaagcgccgagtctcaggcccttggcattgccattgtcagccacataaggcgcaggtgtgatgaggcgacaaaaaaacacagtctcaatttttcgctgcttgctacgcccgccgaacagttaagcggaagatttactcagcttgatgttgagcgatacgggcgtaattaa

SEQ ID NO: 2714 - protein, 318 aa, Unknown
  Obtained from environmental sample
  misc_feature (1)..(318): Xaa is any amino acid
MMPSAVDETNKSLAYERTKEETFQAMEGFIYNLNTMHSRAGAQVPFSSINFGTDTSEAGRMVTECFLLAYEKGLGKGESPLFPNVCFKIKEDINFEEGDPNYDLFQLSMRVACKRLFPSFSFQDSSFNKPYRDEEVAYMGCRTRVISNCNGAEITDSRGNLSFTTINLPRLGIRANKDLSQFWKFLDEIVELCIEQLLTRYNVQKKLKVKDFPFLMGQKLYLDSEGLSANDTIEKAIRHGTLSVGFIGLAECLTALMGKHHGESAESQALGIAIVSHIRRRCDEATKKHSLNFSLLATPAEQLSGRFTQLDVERYGRN

SEQ ID NO: 2715 - DNA, 522 bp, Unknown
  Obtained from environmental sample
  misc_feature (1)..(522): n is a, c, g, or t
ttgaatattgacaatgacggttctcagttgcaggttgacccacacatgggttccaccatgatgtatataaacttgaatgttgatggccctggcgactttagaggcataacccagtttgcaagtgcttcaacaataaatatcgtagctcaagacggctacacaccaggcaacctgatagaagtcaccatagatgaatatggattagtggaaggaaccttctcaaacggaaccaaccgctcaatagcccagataatgatgattgactttgcaaacccaggcggcttgctagacttaagcgatagcatttactcaacatctgccaactctggcgacccagtttggggtctgccaataacgcagagctcctctaaaataaaacccggagcagttgaaatgtctaacgttgacttgtctgctgaattcaccaacatgataaccacgcagagaggttatcaggcaaacagccgcgtgataacggttagcgatacaatgctagaagaattggtgaacttgaagagataa

SEQ ID NO: 2716 - protein, 173 aa, Unknown
  Obtained from environmental sample
  DOMAIN (133)...(171): Domain of unknown function (DUF1078)
  misc_feature (1)..(173): Xaa is any amino acid
MNIDNDGSQLQVDPHMGSTMMYINLNVDGPGDFRGITQFASASTINIVAQDGYTPGNLIEVTIDEYGLVEGTFSNGTNRSIAQIMMIDFANPGGLLDLSDSIYSTSANSGDPVWGLPITQSSSKIKPGAVEMSNVDLSAEFTNMITTQRGYQANSRVITVSDTMLEELVNLKR

SEQ ID NO: 2717 - DNA, 720 bp, Unknown
  Obtained from environmental sample
  misc_feature (1)..(720): n is a, c, g, or t
ttgggacgaccaactgagacactcccctacgttgctcaacaccacaacgacacgagcgtctttcatataacacaatatcctggagtatccatgtctctcagcatcggcatcgtcggcctgcccaatgtcggcaaatccacgctcttcaacgcgctcaccaagacccggaacgcccaggcggccaagtatcctttttcgaccattgaagccaacaaagccacggtagccgtgccggacgaacgcctgaacacgctggcggaactggtgcggccccggaaaaccacctatgcctccgtggattttttcgacatcgcgggtctggcgcatggcgcaagccggggggaaggactgggcaaccgctttctggcccaaatccgcgaatgcgcggttctcctccatgtggtgcgctgtttcgaagatgacgccgttgtgtatgccggcggcgggatgaacccgctccgcgacatggaaatcatcgagacggaactgctgctggcggatgtgcagtccgtggagcgccgcatcgaacgcctgcgcaaactggccaagggcgatgccggatcacgggccgctctggagggtatggagcagcttttcaaccacctgaacgacggcaaaccggcaggctgctttgaaatccccgcgcatgacgccttccgccaggcatggcgggaactcggcctgctgacggccaaaaaagtcatttatgcgccaatatga

SEQ ID NO: 2718 - protein, 239 aa, Unknown
  Obtained from environmental sample
  DOMAIN (33)...(185): GTPase of unknown function
  misc_feature (1)..(239): Xaa is any amino acid
MGRPTETLPYVAQHHNDTSVFHITQYPGVSMSLSIGIVGLPNVGKSTLFNALTKTRNAQAAKYPFSTIEANKATVAVPDERLNTLAELVRPRKTTYASVDFFDIAGLAHGASRGEGLGNRFLAQIRECAVLLHVVRCFEDDAVVYAGGGMNPLRDMEIIETELLLADVQSVERRIERLRKLAKGDAGSRAALEGMEQLFNHLNDGKPAGCFEIPAHDAFRQAWRELGLLTAKKVIYAPI

SEQ ID NO: 2719 - DNA, 651 bp, Unknown
  Obtained from environmental sample
  misc_feature (1)..(651): n is a, c, g, or t
atggaggagaaccgcgcattcgcggatttgggccagaaagcggttgcccagtccttccccccggcttgcgccatgcgccagacccgcgatgtcgaaaaaatccacggaggcataggtggttttccggggccgcaccagttccgccagcgtgttcaggcgttcgtccggcacggctaccgtggctttgttggcttcaatggtcgaaaaaggatacttggccgcctgggcgttccgggtcttggtgagcgcgttgaagagcgtggatttgccgacattgggcaggccgacgatgccgatgctgagagacatggatactccaggatattgtgttatatgaaagacgctcgtgtcgttgtggtgttgagcaacgtaggggagtgtctcagttggtcgtcccaaaattgttccatagcgcggtcacggcccgctcctgcgcctccagggaatacgcggcggcggtcatttgtccggcgcggcgcagggccgcgagttcttcgccgccgcgcgcgaatacgtccaaggccgcttccagggcgaagaccgctcccggcacatcggcgtccgcggcataaaaccgttccggcccatggctttcccgcagggccacaggggtctggccgcgccggggaaatcccccctccgacccaataa

SEQ ID NO: 2720 - protein, 216 aa, Unknown
  Obtained from environmental sample
  misc_feature (1)..(216): Xaa is any amino acid
MEENRAFADLGQKAVAQSFPPACAMRQTRDVEKIHGGIGGFPGPHQFRQRVQAFVRHGYRGFVGFNGRKRILGRLGVPGLGERVEERGFADIGQADDADAERHGYSRILCYMKDARVVVVLSNVGECLSWSSQNCSIARSRPAPAPPGNTRRRSFVRRGAGPRVLRRRARIRPRPLPGRRPLPAHRRPRHKTVPAHGFPAGPQGSGRAGEIPPPTQ

SEQ ID NO: 2721 - DNA, 621 bp, Unknown
  Obtained from environmental sample
  misc_feature (1)..(621): n is a, c, g, or t
atggaggacgtattagaggtttataaacgtccgtatgatgaaaaacaaccagtagtttgcattgacgagaccaaccggcagctcattggggaaatgcactccccccgccctgtcaaggccggacagactgccttatatgattacgaatatgtgcgtaacggagtggtcaatctctttatgttgtttgagcctctggttggaatgcgtgaggttatagtaacggaacggcgtaccatgaaagacttcgcccattgtctgcggtatttggctgaagaacggtatccggatgctgagaaaataattgtggtgatggacaatcttaacacccactcgctggcttcattatacgccgcctttgaacctgaagtggcgttgcgccttgcccagcgatttgaaatccattacaccccaaaacacggttcctggctgaatatggctgagttggaaataggggtaatgagccggcagtgccttaagcggagaatagcgactattgaaaagatggcaagtgaagtacaaacatgggtaactgaacggaacaatcataaaaccaccgttcattggcagttcactaccgcggatgcccgtattaaactcaggcatttgtacccatgtttatag

SEQ ID NO: 2722 - protein, 206 aa, Unknown
  Obtained from environmental sample
  misc_feature (1)..(206): Xaa is any amino acid
MEDVLEVYKRPYDEKQPVVCIDETNRQLIGEMHSPRPVKAGQTALYDYEYVRNGVVNLFMLFEPLVGMREVIVTERRTMKDFAHCLRYLAEERYPDAEKIIVVMDNLNTHSLASLYAAFEPEVALRLAQRFEIHYTPKHGSWLNMAELEIGVMSRQCLKRRIATIEKMASEVQTWVTERNNHKTTVHWQFTTADARIKLRHLYPCL

SEQ ID NO: 2723 - DNA, 837 bp, Unknown
  Obtained from environmental sample
  misc_feature (1)..(837): n is a, c, g, or t
atgtcggtctatgaaaacatggcgttcggtttaaggataaagaaagtccccaaagccgaaattgacaagcgcgtaaacgaagcggcgcgtattctggacattgaaaaattcctggatcgcaagcctaaggccctctccggcggtcagagacagcgtgtcgcggtaggccgcgccatagtccgtaaccccaaggtcttcctctttgacgagcccctttcaaacctggacgcgaaattgcgcgtacagatgagggcggaactttccgacctgcacctccgcctgaacgcgacaatgatctacgttacccacgaccaggtagaagccatgaccatggcgaataaaatcgttgttatgaaagacggaaaagtccagcagattggttcccctctgttcctctataaccacccgattaacaagtttgtagccggatttatcggttcgccgcccatgaacttcctcaacgtaaaagttcaggaagaaggcagttccataatattgaatgaaagttcctttaagattaaagccgacggctctcatgttgaatatttaagaaaatatgtcggaaaagaagttttcttcggtatccgcccggaagatttgacttatgttgaatccgccggcaataacagcatgaccgtaaaagttacggttgttgaacccttaggcgccgatatccacctgtggctgacaaccgatacccagcctctggtagcccgcacagaaccccagcacatcttcaaagtaggcgacaccgcgaatttcattcccagaatggaaaaagcgcgctatttcgacaaagacaccgagcttgcgattgtcccggcccccgacgcttga

SEQ ID NO: 2724 - protein, 278 aa, Unknown
  Obtained from environmental sample
  DOMAIN (193)...(264): TOBE domain
  misc_feature (1)..(278): Xaa is any amino acid
MSVYENMAFGLRIKKVPKAEIDKRVNEAARILDIEKFLDRKPKALSGGQRQRVAVGRAIVRNPKVFLFDEPLSNLDAKLRVQMRAELSDLHLRLNATMIYVTHDQVEAMTMANKIVVMKDGKVQQIGSPLFLYNHPINKFVAGFIGSPPMNFLNVKVQEEGSSIILNESSFKIKADGSHVEYLRKYVGKEVFFGIRPEDLTYVESAGNNSMTVKVTVVEPLGADIHLWLTTDTQPLVARTEPQHIFKVGDTANFIPRMEKARYFDKDTELAIVPAPDA

SEQ ID NO: 2725 - DNA, 321 bp, Unknown
  Obtained from environmental sample
  misc_feature (1)..(321): n is a, c, g, or t
atgagagccgtcggctttaatcttaaaggaactttcattcaatattatggaactgccttcttcctgaacttttacgttgaggaagttcatgggcggcgaaccgataaatccggctacaaacttgttaatcgggtggttatagaggaacagaggggaaccaatctgctggacttttccgtctttcataacaacgattttattcgccatggtcatggcttctacctggtcgtgggtaacgtagatcattgtcgcgttcaggcggaggtgcaggtcggaaagttccgccctcatctgtacgcgcaatttcgcgtccaggtttga

SEQ ID NO: 2726 - protein, 106 aa, Unknown
  Obtained from environmental sample
  misc_feature (1)..(106): Xaa is any amino acid
MRAVGFNLKGTFIQYYGTAFFLNFYVEEVHGRRTDKSGYKLVNRVVIEEQRGTNLLDFSVFHNNDFIRHGHGFYLVVGNVDHCRVQAEVQVGKFRPHLYAQFRVQV

SEQ ID NO: 2727 - DNA, 648 bp, Unknown
  Obtained from environmental sample
  misc_feature (1)..(648): n is a, c, g, or t
gtgctgataaccgttatctcattcgccctgggggtatatttttccacaaaggcgggaaccaaaacagacatcgcggttacattcatcgcgcttgccctccacgcctttcccggccttttgcttttgatactcttgcagttgttcgcctccgtgacagggctttttccggtaaccggctatccgcccttccctttctccgaatcgccggcgaaattcgtcttttcctacgcccaccatatttttctgccgctcctttccgcgtttctgggcggcataggcggtacattacgcatgatacgcgccacaatgctggatcagctaggccagccatacataacaagcctaaggtcgcggggcatttccgaaatgcgggtatatttcgcccatgccctgcgcaatacccttaacccctacataacaggcagcgcgaacctcctcgcaagccttttttcaggctcgctgatacttgaaattattttcgcgtatcccgggataggcaggctcatgtacgaggccgttatgcaacaggacattaacctcgtacttgccaatataatgtttatctcttttttggttctggtgggcatggcattggccgacatagcgctagcccttgtcgatccgagaattcgctatgggaaagagtga

SEQ ID NO: 2728 - protein, 215 aa, Unknown
  Obtained from environmental sample
  SIGNAL (1)...(18)
  DOMAIN (1)...(212): Binding-protein-dependent transport system inner membrane component
  misc_feature (1)..(215): Xaa is any amino acid
MLITVISFALGVYFSTKAGTKTDIAVTFIALALHAFPGLLLLILLQLFASVTGLFPVTGYPPFPFSESPAKFVFSYAHHIFLPLLSAFLGGIGGTLRMIRATMLDQLGQPYITSLRSRGISEMRVYFAHALRNTLNPYITGSANLLASLFSGSLILEIIFAYPGIGRLMYEAVMQQDINLVLANIMFISFLVLVGMALADIALALVDPRIRYGKE

SEQ ID NO: 2729 - DNA, 813 bp, Unknown
  Obtained from environmental sample
  misc_feature (1)..(813): n is a, c, g, or t
atgtccggcctggtgcgggacgaatccgttgtgcctatcggccaatacatcggggccaaggtggtcatcaccggcgatttttccatctatgccgagttcagccagctccgcatccgcgccgtggacgtggcgacacaagtggctattggcacttacccggtgcggataaaaaacaacgaccccatactaaaaaacattaccgcttcttttggcatggcccccgggcctcgcgttaaagaagatgcccttgcccacctgaaccgaggcaaagacttctatagggaaagcaagtatgacgcggccatagaggagtttggcaaggcccttgccatagataaggaacttgcagaggcatattatttccggggttcttcatatgtcttgaaaggcgatcttgacaaggccattgcggacttaaaccaggcgctccggcttaaccccaattatgacgaagcctataaaagccgaggcattgcgtatgccaacaagggcgactatgaaaaggcaatcgctgactttgaccaggcaatccggcttgaccccaattactcgaactatatcgtccgcgccattgcatatagaaacaagggtgacaataacagagccattgcggactatactcaggcgatcgcgttaatgcctgatttttccattacttactatttccgtggtcttacttactatatccgtggtcttacttatgacgacaaaggcgactatgacagagccattgctgacttcacccagatgatctggcttaaccctaatgatgccttagcctatataatccgtggaatgctatacccgcgataa

SEQ ID NO: 2730 - protein, 270 aa, Unknown
  Obtained from environmental sample
  DOMAIN (224)...(257): Tetratricopeptide repeat
  misc_feature (1)..(270): Xaa is any amino acid
MSGLVRDESVVPIGQYIGAKVVITGDFSIYAEFSQLRIRAVDVATQVAIGTYPVRIKNNDPILKNITASFGMAPGPRVKEDALAHLNRGKDFYRESKYDAAIEEFGKALAIDKELAEAYYFRGSSYVLKGDLDKAIADLNQALRLNPNYDEAYKSRGIAYANKGDYEKAIADFDQAIRLDPNYSNYIVRAIAYRNKGDNNRAIADYTQAIALMPDFSITYYFRGLTYYIRGLTYDDKGDYDRAIADFTQMIWLNPNDALAYIIRGMLYPR

SEQ ID NO: 2731 - DNA, 912 bp, Unknown
  Obtained from environmental sample
  misc_feature (1)..(912): n is a, c, g, or t
atgttgctgctgttgttgataacaacagccaaagtccaagctcaaggacagatggagcttgatctcgacctcaacgtcaccccggaaaaggccctctccgccgccataatgaaagtggccgacgaggctttccagctgaatctcaagggtctcgacgccctcgagcgtaaggacaacggcgccgcgctcgacctctttacgcaggcgctctccatcttcccgcagtacaccgacgcgataaacaaccgcggcgtggcgctctacaggcgcggggacgtagccggggcgcagagggcttgggaggaggcggtgaggcgcgacccgcagtatcacgtggcctattacaatatagggctgatatacttgtacggcaaaaaaacggaggaggctaagcggcagtttgagcttgcgctgaagtataacgctaagttcacagaggcgattttgcgcttgggcgcaataagtatgcaggccggcaagacggccgcggcgcttgaatatttcgccaaggcctacaagggcgcgccgactaatcaggacgcttggaacttttactcctacgggctgctggtcgccaaggacacggcgggggctgttaccgtgctgaaaaatgtcggggacgacccggaggccttggcgcagctgggccggatagaggggctgcggaagcgctacgcccaggccgcggagtacctgtccagggccgttgaccgcggggcgtcgccgcaggctatgcttgacctcgcgtctgtgcagctcgatgccggaaagtgcggcgacgcgttaacctccgtgtcaaattacttcgccaaggagacaaaacccagcgtgaactcgtggctgctcgccggattctcggcaaggagtgccaccgcgcggcaaaggcgctcgaatactacgggcagggtctga

SEQ ID NO: 2732 - protein, 303 aa, Unknown
  Obtained from environmental sample
  DOMAIN (111)...(144): Tetratricopeptide repeat
  misc_feature (1)..(303): Xaa is any amino acid
MLLLLLITTAKVQAQGQMELDLDLNVTPEKALSAAIMKVADEAFQLNLKGLDALERKDNGAALDLFTQALSIFPQYTDAINNRGVALYRRGDVAGAQRAWEEAVRRDPQYHVAYYNIGLIYLYGKKTEEAKRQFELALKYNAKFTEAILRLGAISMQAGKTAAALEYFAKAYKGAPTNQDAWNFYSYGLLVAKDTAGAVTVLKNVGDDPEALAQLGRIEGLRKRYAQAAEYLSRAVDRGASPQAMLDLASVQLDAGKCGDALTSVSNYFAKETKPSVNSWLLAGFSARSATARQRRSNTTGRV

SEQ ID NO: 2733 - DNA, 624 bp, Unknown
  Obtained from environmental sample
  misc_feature (1)..(624): n is a, c, g, or t
atggagcatactctccgtaatgccgatattcaatatatagtgaaaatagtctttaaaataacagccgtcctcgttttgctcgccgccgcaattcccgtaaacggatattttgtcacttacaaggaacagtattacaggcttttccatctgcattatatccaatatccggatgacaccatggaaaatatttactggcttgaacacgccgtaaaagccgatttcgccaatcctttatacgctctagcgttaattgaaaatgaaacccaatgggaaaaataccgttatctttttttaatgcacataaatataaaattgatagaacaatatttactgttgggcgacaaatggaacaaacgcaacgcctatttttacaacgccccctggcgggatcaaaaccttgaaagccttgaaacggcggagacctgttaccgcaccgctctccattactgggatgaagcgcttgtatggtggaaaaaagccaacgacagacgtttcagatggattgatcttcccaaagttcaattctggcaggatgaggcttataggatagaaaacggcacgttgaattacgccaggacaattaaccgcgagcttgatttattgcanaaggtcgcgataatttaa

SEQ ID NO: 2734 - protein, 207 aa, Unknown
  Obtained from environmental sample
  misc_feature (1)..(207): Xaa is any amino acid
MEHTLRNADIQYIVKIVFKITAVLVLLAAAIPVNGYFVTYKEQYYRLFHLHYIQYPDDTMENIYWLEHAVKADFANPLYALALIENETQWEKYRYLFLMHINIKLIEQYLLLGDKWNKRNAYFYNAPWRDQNLESLETAETCYRTALHYWDEALVWWKKANDRRFRWIDLPKVQFWQDEAYRIENGTLNYARTINRELDLLXKVAII

SEQ ID NO: 2735 - DNA, 978 bp, Unknown
  Obtained from environmental sample
  misc_feature (1)..(978): n is a, c, g, or t
atggtcgaagaactgacattcagtgcagncgcgccagtagcgacggctaaagcagctccgccgccaacagcagttccgccgccaacagcagctccgccgccaacagcagcaactcatccagtcgcagatggcggaggcctccatccggtagactcagcggctggtggtatgcccaaatctgacaagagcgcggacacaatccgcgtcagccaagcaaagttggacaacttcatgaacgttgtcggtgagctcatcatgagcaaaacgatggtcaaccatgtggtggaacgatttgaaggctccaacttcggcgaagccgtagcggcgttggtcgcagaactccatagggctagcacctccttggatcaagtctccaaagagatacaggcctccgttatgagcatccgcatggtacccgtcaagtccgtgttcagcaaattcccacgcatgttgagggacttggcaaaaggaagcggtaaaaaaattgagttgcagatggtcggcgaagatactgaaattgacaagagcctgatcgaagaactgggcgacccgctgatccacctcatccgcaactcggcggaccacgggatagaactccccgaagtccgtaaagccgccggcaaaccagaaactggtctggtagtgctgcgcgccagacatgaaggcgacagcgtcgtcgttgagatcgaagacgacggcaaggggatcgaccctgttatcatcaaggcaaaagctgttgaaaagggcttgatcactcaagaaagggcggacgtactcaccaacgatgagatcatcaatctcatctttgcccctggtttcagcaccgccgccacaataactgacatctctgggcgaggcgtagggatggacgttgtccgctccaatgtccgtcgcctcaatggaagcgttttggtgactagcgtacccggcaaaggttcgctgttcacgctcaaactgcctctcacctggcgatcatga

SEQ ID NO: 2736 - protein, 325 aa, Unknown
  Obtained from environmental sample
  SIGNAL (1)...(18)
  DOMAIN (64)...(135): Signal transducing histidine kinase, homodimeric domain
  misc_feature (1)..(325): Xaa is any amino acid
MVEELTFSAXAPVATAKAAPPPTAVPPPTAAPPPTAATHPVADGGGLHPVDSAAGGMPKSDKSADTIRVSQAKLDNFMNVVGELIMSKTMVNHVVERFEGSNFGEAVAALVAELHRASTSLDQVSKEIQASVMSIRMVPVKSVFSKFPRMLRDLAKGSGKKIELQMVGEDTEIDKSLIEELGDPLIHLIRNSADHGIELPEVRKAAGKPETGLVVLRARHEGDSVVVEIEDDGKGIDPVIIKAKAVEKGLITQERADVLTNDEIINLIFAPGFSTAATITDISGRGVGMDVVRSNVRRLNGSVLVTSVPGKGSLFTLKLPLTWRS

SEQ ID NO: 2737 - DNA, 606 bp, Unknown
  Obtained from environmental sample
  misc_feature (1)..(606): n is a, c, g, or t
ttgagtgatcaagcccttttcaacagcttttgccttgatgataacagggtcgatccccttgccgtcgtcttcgatctcaacgacgacgctgtcgccttcatgtctggcgcgcagcactaccagaccagtttctggtttgccggcggctttacggacttcggggagttctatcccgtggtccgccgagttgcggatgaggtggatcagcgggtcgcccagttcttcgatcaggctcttgtcaatttcagtatcttcgccgaccatctgcaactcaatttttttaccgcttccttttgccaagtccctcaacatgcgtgggaatttgctgaacacggacttgacgggtaccatgcggatgctcataacggaggcctgtatctctttggagacttgatccaaggaggtgctagccctatggagttctgcgaccaacgccgctacggcttcgccgaagttggagccttcaaatcgttccaccacatggttgaccatcgttttgctcatgatgagctcaccgacaacgttcatgaagttgtccaactttgcttggctgacgcggattgtgtccgcgctcttgtcagatttgggcataccaccagccgctga

SEQ ID NO: 2738 - protein, 201 aa, Unknown
  Obtained from environmental sample
  misc_feature (1)..(201): Xaa is any amino acid
MSDQALFNSFCLDDNRVDPLAVVFDLNDDAVAFMSGAQHYQTSFWFAGGFTDFGEFYPVVRRVADEVDQRVAQFFDQALVNFSIFADHLQLNFFTASFCQVPQHAWEFAEHGLDGYHADAHNGGLYLFGDLIQGGASPMEFCDQRRYGFAEVGAFKSFHHMVDHRFAHDELTDNVHEVVQLCLADADCVRALVRFGHTTSR

SEQ ID NO: 2739 - DNA, 723 bp, Unknown
  Obtained from environmental sample
  misc_feature (1)..(723): n is a, c, g, or t
atgagcgacttcatacatgacgacccaagcttctatgaagatttcctcgttgaggctcaagaacacttttcttcaatggaggagaatttcctcacgctggagagccatccgggtgaccttgagatcctgaacagcattttccgtagcgtgcacaccatcaaaggggcctcgggctttttgggccttgatgcagtgcaaggtctggcccatcacggcgaaaacattttggacgacctccgcaaaggaagaatggccgtcacgcccgatgtcatggaaacgctatttgaaaccgtggacgtgctgaaggtgctggtcaacgatgttggcatagcattgcgtgggcaaggcgagctagcgaatccggatacttcggggatcatcaatcgcctagaggcactacgcggtggcggctcggcggcccctgcggcagacagcggtgcaaaaccggccccgaaaaaagcctcggtcaatttccctgattctttttctgacgttccccaagacgccaagactaagatagccgatgcggtcaccgagggtaaaaaagtaatggcgctgagggcgaagctgctccccgccatagtcgggacgctctttgaccccgtgaggatgttctccatggttgaacttttgtgggagagccaatctcttcactcaaattgcccgtccctgaaatcgctcgccagccctggccaacagaacaatatgcttttgatctgctga

SEQ ID NO: 2740 - protein, 240 aa, Unknown
  Obtained from environmental sample
  DOMAIN (10)...(111): Hpt domain
  misc_feature (1)..(240): Xaa is any amino acid
MSDFIHDDPSFYEDFLVEAQEHFSSMEENFLTLESHPGDLEILNSIFRSVHTIKGASGFLGLDAVQGLAHHGENILDDLRKGRMAVTPDVMETLFETVDVLKVLVNDVGIALRGQGELANPDTSGIINRLEALRGGGSAAPAADSGAKPAPKKASVNFPDSFSDVPQDAKTKIADAVTEGKKVMALRAKLLPAIVGTLFDPVRMFSMVELLWESQSLHSNCPSLKSLASPGQQNNMLLIC

SEQ ID NO: 2741 - DNA, 900 bp, Unknown
  Obtained from environmental sample
  misc_feature (1)..(900): n is a, c, g, or t
ttgttccgttccgacccttctgatgtagctcgcgtagaaagccgtacctacattgcaagcaaaagccaagacgatgcaggtcccacaaataactggattgacccaaaagagcttaaaaaagagatgactgctctctacaaaggctgcatgcacggcagaaccatgtttgtaattcctttctcaatgggtcccattggctcccctatcgcaaaaattggtgttgaattatcagattctccttatgttgtgataaatatgcacataatggctcgcgttggcacaaaggttttggacgttttgggcaccaaaggcgaatttattccctgcttgcactccataggcaagccgcttctctcttgccaagacgataacggcaagtggccctgcgctccgattgaaaaaaaatacattgctcatttccccgaagaaagaacaatctggagctatggttccggctacggtggaaatgcgttgctaggcaaaaaatgcctcgcccttcgcattgcaagcattgccgccaaaaacgaaggctggcttgcagagcatatgctaatcttgaaaatcacaagagaatccgacaaaaaagtgaaatacattgccgccgctttcccaagtgcctgcggaaaaaccaatctcgctatgcttgttccaacaatcccaggctggaaagttgaaacagtgggtgacgatattgcgtggatgcgtcctggcaaagatggcaagttatatgcaatcaacccagaagctggtttctttggagttgcccccggcacttctatggattctaatccaaatgccatgcactccatagaagagaacaccattttcacaaacgttgccttaaccgaagacggcgatgtgtggtgggaacaaatggctacgatgctccgggcaagttaa

SEQ ID NO: 2742 - protein, 299 aa, Unknown
  Obtained from environmental sample
  DOMAIN (1)...(299): Phosphoenolpyruvate carboxykinase
  misc_feature (1)..(299): Xaa is any amino acid
MFRSDPSDVARVESRTYIASKSQDDAGPTNNWIDPKELKKEMTALYKGCMHGRTMFVIPFSMGPIGSPIAKIGVELSDSPYVVINMHIMARVGTKVLDVLGTKGEFIPCLHSIGKPLLSCQDDNGKWPCAPIEKKYIAHFPEERTIWSYGSGYGGNALLGKKCLALRIASIAAKNEGWLAEHMLILKITRESDKKVKYIAAAFPSACGKTNLAMLVPTIPGWKVETVGDDIAWMRPGKDGKLYAINPEAGFFGVAPGTSMDSNPNAMHSIEENTIFTNVALTEDGDVWWEQMATMLRAS

SEQ ID NO: 2743 - DNA, 939 bp, Unknown
  Obtained from environmental sample
  misc_feature (1)..(939): n is a, c, g, or t
ttgatttttatcaatacgaaattgataccacatctaaaatcatggcgtacattacccaatgcgacacctcgncaaagggtaatcagcgaaataatgtcaggcgttgatcgtgtccgcatgnatactgaaaaaaactttctggatatttgcgataaaatagacggcattacaaatgacaatgtagacgatacccatatattcacactgtcccaaatatacgaaggtctgctgttaaaaatgggggaaaaaggaaatgacggcggtcaattctttaccccaagagaaataatccgcgcaatggtaaaaacagtgaatccaaaagttggcgagacggtttatgacccatgctgcggcacaggcggctttttagtccagtcatataattttatgcttggaaaagcaagaaacaacacaaacgatttacacattctaaaacatgaaacattatttgggcgtgaaaaagaaaacttaatttatccgataacactggcaaatatgattttacacggcattgaacaacccgccatttggcacggcaatacccttactggaaatgaaatattcggcggcttatttacaagcccttcatcaacttatgatgtaattttaaccaatcccccattcggcggcaaggaagggaaagaagcccaaaccaaattcgctttcaggacaagcgcgacgcaagtattattcctacagcacgtcattgacagtctgaaagaaaacggacgttgtggaattgtcattgatgaaggcgttttatttcgttccaatgaaaacgcgtttgtccagactaaaagaaaattattggatgaatgtaacgtgtattgtatagtgtccctgccttccggcgttttctccgccgccggcgcgggagtaaaagccaacataatattttttgaaaaagagcagttctacggaaaaaatctggtattatga

SEQ ID NO: 2744 - protein, 312 aa, Unknown
  Obtained from environmental sample
  DOMAIN (64)...(311): N-6 DNA Methylase
  misc_feature (1)..(312): Xaa is any amino acid
MIFINTKLIPHLKSWRTLPNATPRQRVISEIMSGVDRVRMXTEKNFLDICDKIDGITNDNVDDTHIFTLSQIYEGLLLKMGEKGNDGGQFFTPREIIRAMVKTVNPKVGETVYDPCCGTGGFLVQSYNFMLGKARNNTNDLHILKHETLFGREKENLIYPITLANMILHGIEQPAIWHGNTLTGNEIFGGLFTSPSSTYDVILTNPPFGGKEGKEAQTKFAFRTSATQVLFLQHVIDSLKENGRCGIVIDEGVLFRSNENAFVQTKRKLLDECNVYCIVSLPSGVFSAAGAGVKANIIFFEKEQFYGKNLVL

SEQ ID NO: 2745 - DNA, 732 bp, Unknown
  Obtained from environmental sample
  misc_feature (1)..(732): n is a, c, g, or t
gtgcataatcccaaagaaaacctgggtatcatcatgtcgcggtcgggagttgaaaccgcgtcggcgataaaggcaaaagccattgtaacgccaaccctcagcggcaataccgcgcgaatcctcagcgtgttcaggccggatgaacctattcttgccgtaacgacggacgcgcgttctgaacgcgttatgcagttatactggggcgttaatacctgtatcaggtcgcaggttgacgattcggaacgcatgataaacgacaccatgaaggttgtttcggagagcggtgcggcgggcatatcggataaaataatactcattgccggcctgccgcttgaaagccccaacatgataaatactgtccgcgttgtcattgtcgggacggttctcgcgcgttcaaacgccggcggttattcaaatcccgaccttacccgcacgcagggcaagataatccacgccacaactgccgatgaagcctgcagaaaaatcaaatcttcaggcggcggtggaatacttatttgcaaagtgatcaccgaagactacatgtctgttatcaatatggtaagcgggatcatttgtgagggagtttcggaaataagcgaacaaaagttacgcgtactcaatcccaatcttgtctggcttacccacatcagggacgcggcgaaaaaactcgaacctggattaacggtgaccatagacggaaaagaactgctggtatacgaaggggcgatttag

SEQ ID NO: 2746 - protein, 243 aa, Unknown
  Obtained from environmental sample
  DOMAIN (12)...(124): Pyruvate kinase, alpha/beta domain
  misc_feature (1)..(243): Xaa is any amino acid
MHNPKENLGIIMSRSGVETASAIKAKAIVTPTLSGNTARILSVFRPDEPILAVTTDARSERVMQLYWGVNTCIRSQVDDSERMINDTMKVVSESGAAGISDKIILIAGLPLESPNMINTVRVVIVGTVLARSNAGGYSNPDLTRTQGKIIHATTADEACRKIKSSGGGGILICKVITEDYMSVINMVSGIICEGVSEISEQKLRVLNPNLVWLTHIRDAAKKLEPGLTVTIDGKELLVYEGAI

SEQ ID NO: 2747 - DNA, 867 bp, Unknown
  Obtained from environmental sample
  misc_feature (1)..(867): n is a, c, g, or t
atgccggaaaaccgcgcgtatcttacgctggcggtgaaagccggctccgtgcttgaagaagacaacgagcagggacttgcccattttgtagagcatatggcgtttaacggtactgagcgcttccccgaattgaaactggtaagttaccttcgttcgctgggaatgcgttttggccctgaggtaaacgcctacacttcctttgaccagaccgtgtacggcattgaagtacccgttgaaatcgacgagcagaagacaaggcgaattcccgaaaccgcgctcgccgttattgacgactggacgcgggcagtcactttttcccccgcggatgtggacgatgaacgtcccgtgataatggaagaataccgcatgcggcttggcgcatgggaaaggctcaggcataaatggctgcctgtgctgttcaggggatcgccttacgcgaaccgcatgaccataggcctgccggaaattatcgaaggcgcgccggcatcccggctggagggcttttacaaaaaatggtacaaggcggataacatggccctgatccttgtgggcgattttgacggggccgcgcttgaggcctcgttaaccgatcattttttgatagagaaaccagccgagccgacaaaccgacccttttacgatctgccccttccccaaaaagggaacgtggaagtgcttacccttaccgactctgagctgaccgccgcctatatcaacctttattttaagcgcgatcctcaggcgcggaaaaacgatctgacgtattaccgcggcgaaattattgaataccttattgacaccatgctggggctgcgttttgaagaagacgctcctgaaaccctgaaaccccgtcagtgtaagcattaa

SEQ ID NO: 2748 - protein, 288 aa, Unknown
  Obtained from environmental sample
  DOMAIN (2)...(142): Insulinase (Peptidase family M16)
  misc_feature (1)..(288): Xaa is any amino acid
MPENRAYLTLAVKAGSVLEEDNEQGLAHFVEHMAFNGTERFPELKLVSYLRSLGMRFGPEVNAYTSFDQTVYGIEVPVEIDEQKTRRIPETALAVIDDWTRAVTFSPADVDDERPVIMEEYRMRLGAWERLRHKWLPVLFRGSPYANRMTIGLPEIIEGAPASRLEGFYKKWYKADNMALILVGDFDGAALEASLTDHFLIEKPAEPTNRPFYDLPLPQKGNVEVLTLTDSELTAAYINLYFKRDPQARKNDLTYYRGEIIEYLIDTMLGLRFEEDAPETLKPRQCKH

SEQ ID NO: 2749 - DNA, 789 bp, Unknown
  Obtained from environmental sample
  misc_feature (1)..(789): n is a, c, g, or t
gtgggaatgagggaaatgtttatcgaaaacggcttcaatgattttatctccaaaccaatagatgtttccaaattggatgaaatgcttgaccgctggatacccagagaaaagaaagaaagaaactctgttcgccccctttcccttagacaaactcaaggagcggacgggaatgcgcctgagactgaggaaggaaacgcgttatattccattcccggcgttgatacggcaaaaggcatcgccatgaccggcggaactttggacgcatataagagcgtactaaaaatattctgccaagacgttgaagacagactgccgatgcttcacactattccgctggaggagactttgcctgaattcgcaacccagtttcatgccctaaaaagcgcgtccgggagtctgggagcgtcggaaatttcctcacaagccgcaaagcttgaagccgcgagcaaagacgcggatatgatatttatctacgaacatttacttgtatttgtacataatattatagaattggtatacaatattaaagaagctcttaaatacagcgaacctgaaaataactccgattcctcatcccccgccgagcattccccgttatttgaagaacttgccgaggctttaaagaaaaagaattccgcggatatagaccgtattatcgccgcgttaggcgaagaaccgctggattcaaaaaccaaaacagcgctggaaaaaatttccgatgaagtgcttatgaccgaatttgacaacgctttaaaaatcattaacagcctgattctggcgcanaagtaa

SEQ ID NO: 2750 - protein, 262 aa, Unknown
  Obtained from environmental sample
  DOMAIN (91)...(178): Hpt domain
  misc_feature (1)..(262): Xaa is any amino acid
MGMREMFIENGFNDFISKPIDVSKLDEMLDRWIPREKKERNSVRPLSLRQTQGADGNAPETEEGNALYSIPGVDTAKGIAMTGGTLDAYKSVLKIFCQDVEDRLPMLHTIPLEETLPEFATQFHALKSASGSLGASEISSQAAKLEAASKDADMIFIYEHLLVFVHNIIELVYNIKEALKYSEPENNSDSSSPAEHSPLFEELAEALKKKNSADIDRIIAALGEEPLDSKTKTALEKISDEVLMTEFDNALKIINSLILAXK

SEQ ID NO: 2751 - DNA, 795 bp, Unknown
  Obtained from environmental sample
  misc_feature (1)..(795): n is a, c, g, or t
atgtttcaggaaatcgaatcccttgccgttattcaggatgtcgccgaaggcctgtccggcggctatgtttacagccacttcgcgaaaaatccggacgcggctttgggagtgggtattataagccgctttccgcttatcgagcctaaaactcactctattacgataggcagcgaaacaacgccgcggcctgtgttggaaacaaggattcaagcagaaaaggaatttgttgtttttgtctgccattggaagtcaaaactgggcggggatgataataccgagagaacccgcagggcttccgcaagagttatcctgcggcggattcgggaattgtgggaagaagagccggatctcggtgtgatcgtcgcgggcgatttgaacgagaatcacaatgaatttttcaggcggaacgcgaaagtaatctgcgccctgcttcccgatgatccctactgcgcccaactggcgggcggtacgcaaaaggactttatcgttctcggcaaaaataagccgccggaacctgtcaattttccgcgagagaccatcgttcttttttcggcatggatgcgcgatgttgaaaaaggctcttattattacaagaatgaatgggaaacaatcgatcactttttggtgtcggaacaattttttaataataccggctggagttttgaaaaagcacagcctgcggattttcctccgtttacgaacgcttacggggttcctgtttcatacaacatacggacaggcgcgggccttagcgatcatctgcctttgttaatgacattgaagaaaacggattga

SEQ ID NO: 2752 - protein, 264 aa, Unknown
  Obtained from environmental sample
  DOMAIN (1)...(260): Endonuclease/Exonuclease/phosphatase family
  misc_feature (1)..(264): Xaa is any amino acid
MFQEIESLAVIQDVAEGLSGGYVYSHFAKNPDAALGVGIISRFPLIEPKTHSITIGSETTPRPVLETRIQAEKEFVVFVCHWKSKLGGDDNTERTRRASARVILRRIRELWEEEPDLGVIVAGDLNENHNEFFRRNAKVICALLPDDPYCAQLAGGTQKDFIVLGKNKPPEPVNFPRETIVLFSAWMRDVEKGSYYYKNEWETIDHFLVSEQFFNNTGWSFEKAQPADFPPFTNAYGVPVSYNIRTGAGLSDHLPLLMTLKKTD

SEQ ID NO: 2753 - DNA, 870 bp, Unknown
  Obtained from environmental sample
  misc_feature (1)..(870): n is a, c, g, or t
gtgacccctgttttgcagggcggctgtatcggcgggccatgctttggacgcgaagaatccgcagcctccggcggcagtcaaaatctgtttacccggcgggaaaacgtgatccggtacgccgaggcgtcgggtacagccgacatcgcggcttcatcgcgcgtgatttcccatcaggcgaattttgcgttggatgaacagcagccggaagagataacggaaaatcaaatccagaaaatactggagcgcacaggaaaagtcgatccggagcatcagctcaactgcggcgcctgcgggtacaaaagctgcatggcgaacgccgccgcagtggtgcgcggcatggcagaaccggagatgtgtatcccctatatgcggcggctcgcgcagcagcgcaccgaccggatcatagacacaacgcccaacggcgtggtggttctggacagcgaactgcgcatggttaagatgaatcccgccttccaaaagatgtttatgtgcaacaacggcatcctgggaagacgcatctcctatcttgtgaacgccgatggcttcgagaccctgcaatccggctctaccgacaaatacgagtccatccagacaaaatacggggtcaagtatcacgaaatcctctacgcgctgcgggaagaagcgcagtttgtcgggatctattccgatatttccaaaatcaaatatgacgccggacagttggataccatcaaggcgcagaccctgatgcacgcgcgggaatttttggatcaccagatacggtttgcgcaggagatggcgcattatctgggcaagagcaccgcccagagcgaggagatcgcaaagcgcctgatcggtctgtatgaagaagacaatggcaaaccgtcatga

SEQ ID NO: 2754 - protein, 289 aa, Unknown
  Obtained from environmental sample
  DOMAIN (91)...(122): Putative Fe-S cluster
  misc_feature (1)..(289): Xaa is any amino acid
MTPVLQGGCIGGPCFGREESAASGGSQNLFTRRENVIRYAEASGTADIAASSRVISHQANFALDEQQPEEITENQIQKILERTGKVDPEHQLNCGACGYKSCMANAAAVVRGMAEPEMCIPYMRRLAQQRTDRIIDTTPNGVVVLDSELRMVKMNPAFQKMFMCNNGILGRRISYLVNADGFETLQSGSTDKYESIQTKYGVKYHEILYALREEAQFVGIYSDISKIKYDAGQLDTIKAQTLMHAREFLDHQIRFAQEMAHYLGKSTAQSEEIAKRLIGLYEEDNGKPS

SEQ ID NO: 2755 - DNA, 432 bp, Unknown
  Obtained from environmental sample
  misc_feature (1)..(432): n is a, c, g, or t
atgcatgtacacagagtcgtggacgcatttgtacgtaaaagcaatctcactacgataaaacctgacctgcggcattatggctttaactcgccgaatcccgtagacgaaacaggccgccacggttatgaggtttgggttactattcccgatggtttttctgtgccggaacctcttgtgaaaaaacactatgagggtggattatatgccgctcacatgattccattcggggcgtttgatgaatggggcatgcttaaccagtggatggagaataacggcaaatatgaattccgaagctctggtgatcatcgaaatatgtttgggcttatggaagaacatttaaactacgtcaatcgtgtacatttggatgatcccgaagaagaaggctgtcaattagaccttctgatgccgatcaaggagaagggaaaagaataa

SEQ ID NO: 2756 - protein, 143 aa, Unknown
  Obtained from environmental sample
  misc_feature (1)..(143): Xaa is any amino acid
MHVHRVVDAFVRKSNLTTIKPDLRHYGFNSPNPVDETGRHGYEVWVTIPDGFSVPEPLVKKHYEGGLYAAHMIPFGAFDEWGMLNQWMENNGKYEFRSSGDHRNMFGLMEEHLNYVNRVHLDDPEEEGCQLDLLMPIKEKGKE

SEQ ID NO: 2757 - DNA, 981 bp, Unknown
  Obtained from environmental sample
  misc_feature (1)..(981): n is a, c, g, or t
ttggtcagattggccgagagaatcgcggaagaaagcgaaacgaatatctngtttatcaatatcagattggtatggcttttgccgtatgtggaaaatccggaagaaatgttaactttgcggttggcaaaagaatttggcatcgcttctgaaaaactggttatagaaattacggaagaagattttaattcaagcgaggaatatctccgcgccatagtccattataagaaagcaggctgccgcatcgcgcttgatgattacggaaagaaagccagcaatattgacaggttggcaaaacttcaccccgacattataaaaatcaatattgattatatccataacagcgaaatgtcttatcattatcgtgaatatttacacgctattgccgctttcgccgattccgtaggtatcgaaattttgtatgaaggaatagagacggagtgtcagcttgatatttgcatttcttcaaagggaaggttttttcagggatttttatttgccgtccctcaaccatctatgcgtgatgcgaatattaacacgtttgttttttccactttaatggcagccgcttattcggcaatacaaactaacgcagtcaatgtggaatccttaaagaattcttttgatgttcatgttgaacgtttttttcttgaaaatccgtttgatcgcgaaaaaataaacaacgacgaatatcttattaaacttttccgtgaattgccggaggtgatacggatttatctgtgcagcagagaaggcatccagctttccaataatattgaacggcagtcgggtgatattgtatgcagaaattataaagataanaattgggcatggcgtggatattttcatggaataataaaggcttttatcaggggcaggaatagctgcctgaccaactcttatcgtgattttactacaaaagaaaagatacgtacctattgttgcgcgatcaacatgatatatttttatttgcggaatatataa

SEQ ID NO: 2758 - protein, 326 aa, Unknown
  Obtained from environmental sample
  DOMAIN (6)...(168): EAL domain
  misc_feature (1)..(326): Xaa is any amino acid
MVRLAERIAEESETNIXFINIRLVWLLPYVENPEEMLTLRLAKEFGIASEKLVIEITEEDFNSSEEYLRAIVHYKKAGCRIALDDYGKKASNIDRLAKLHPDIIKINIDYIHNSEMSYHYREYLHAIAAFADSVGIEILYEGIETECQLDICISSKGRFFQGFLFAVPQPSMRDANINTFVFSTLMAAAYSAIQTNAVNVESLKNSFDVHVERFFLENPFDREKINNDEYLIKLFRELPEVIRIYLCSREGIQLSNNIERQSGDIVCRNYKDXNWAWRGYFHGIIKAFIRGRNSCLTNSYRDFTTKEKIRTYCCAINMIYFYLRNI

SEQ ID NO: 2759 - DNA, 561 bp, Unknown
  Obtained from environmental sample
  misc_feature (1)..(561): n is a, c, g, or t
atggattcagaatacgcgcgtaagataccgattatcgcacttacggcaaacgcgattcagggaactcaaaatatgtttttggaacatgggtttcaggcttttatttccaaacccatcaacataatagaattggactccgttatcaaaaaatggatacacaataaaccggcggcaaataatgaaaaagacccggagataatcattccaggagtagatacaaaagagggacttgctttatacggcggtgatatggagatttacctgccggcgcttcattcttacgtttcctacactaccggcgttctagaaaaactaaagactgtttcaagggaaagcttgcctgagtacgttattaatatacatggactgaaaggtgccagcgccagcataggcgcggaaatagtaagagaatcggccatgaacctggaaaagctggccagagacggcgatttacagggggttctggcaagaaacgacaggttcattaaaggtacagaaaatattgtggtcaatataaaaaagtggctggaaacacacaatggggagaaacagaatttatga

SEQ ID NO: 2760 - protein, 186 aa, Unknown
  Obtained from environmental sample
  misc_feature (1)..(186): Xaa is any amino acid
MDSEYARKIPIIALTANAIQGTQNMFLEHGFQAFISKPINIIELDSVIKKWIHNKPAANNEKDPEIIIPGVDTKEGLALYGGDMEIYLPALHSYVSYTTGVLEKLKTVSRESLPEYVINIHGLKGASASIGAEIVRESAMNLEKLARDGDLQGVLARNDRFIKGTENIVVNIKKWLETHNGEKQNL

SEQ ID NO: 2761 - DNA, 858 bp, Unknown
  Obtained from environmental sample
  misc_feature (1)..(858): n is a, c, g, or t
ttgaaccggggttacgaaactcagccgtcgggcggcgggggcagaaaaatacagtttttacgcccgcctttgcttcagttccttaattgctcaaaaataaggcttgaaggcgtaacgcttcaaaattcaccgttctggactttacatccgctgtactgccgtgacattgttatttccggccttaccattaaaaatccttttgacgctcccaacacggacggcatggatattgattcctgcgaggacgtgttaatcgaaaactgcatggtctcggtgggggatgacggtatcgtactcaaatcgggggcgggcgaagacggcatacgcgtggggaaaccatgccgccgcataaccgtgcgcaactgtacgatagaagacggccacgggggaatcgttatcggcagtgaaaccgcggcgggagtgtctgaagtgctgacggaagaatgtcttttcaagggaaccgaccgtgggatcaggataaaaacccgacggggacgcggggggaaaattcacgaccttgaattccgtaatctcaccatggaaaataacctttgtccccttgcgattaatatgttttaccgcccgggcgcggttataactgacggctatttcagccagagcgcccttcccgttaacgcggccacgccttcgattaaaaatatccgcatatcgggtattagggcttccggctgtcgggcttcagcgggttttatcgccggtttgcccgaatcgccggtggaaaacgtcaccatcaattgttgtgaattttccactgatgaacgctccggcgtaagccccgatgaatctgatatgtttttaggaattccagccattaaagaaaagagtatacggctgtga

SEQ ID NO: 2762 - protein, 285 aa, Unknown
  Obtained from environmental sample
  DOMAIN (1)...(254): Glycosyl hydrolases family 28
  misc_feature (1)..(285): Xaa is any amino acid
MNRGYETQPSGGGGRKIQFLRPPLLQFLNCSKIRLEGVTLQNSPFWTLHPLYCRDIVISGLTIKNPFDAPNTDGMDIDSCEDVLIENCMVSVGDDGIVLKSGAGEDGIRVGKPCRRITVRNCTIEDGHGGIVIGSETAAGVSEVLTEECLFKGTDRGIRIKTRRGRGGKIHDLEFRNLTMENNLCPLAINMFYRPGAVITDGYFSQSALPVNAATPSIKNIRISGIRASGCRASAGFIAGLPESPVENVTINCCEFSTDERSGVSPDESDMFLGIPAIKEKSIRL

SEQ ID NO: 2763 - DNA, 642 bp, Unknown
  Obtained from environmental sample
  misc_feature (1)..(642): n is a, c, g, or t
ttgtcagttgaggaatcgtatctgcaggaagctgtggatttgatgattgtcagggaaacaagcaagcaggacagccttaaccagaaattaacggcgcttgattttattggcaccctcatagaacagggcaataccagcgatgaaatccgtctcacgctggaacgcctttcccttgagggaaccaatgtccaatcaagggaaagaggccgcctcaagaacgattttcccgaagtaaggaggctggcggcaaagcacctgggagcctttgtctccgaggaagccaagatcgcgcttctgaaagtctgcgtctctgacaatgagccgctggtactgcaggaagcggtcagatcgcttggcacgatcggcatagataaagacggcgaagtagtcggcaccattgtctgggtaaccaacaaattcaccaactccatatccccggataaccttcttgcccttgccgcgatagactctatacaaaaaatagccaaaaacaacaatggcgtaagggaagaagccttcaatctcctcatcaagatatctgaaggcccttatcccccgtcgatcagggaaaaagccaggcaaaccttaatagatatccgtactctggtctccaataacgcaaaagcaagaaagggccagtaa

SEQ ID NO: 2764 - protein, 213 aa, Unknown
  Obtained from environmental sample
  misc_feature (1)..(213): Xaa is any amino acid
MSVEESYLQEAVDLMIVRETSKQDSLNQKLTALDFIGTLIEQGNTSDEIRLTLERLSLEGTNVQSRERGRLKNDFPEVRRLAAKHLGAFVSEEAKIALLKVCVSDNEPLVLQEAVRSLGTIGIDKDGEVVGTIVWVTNKFTNSISPDNLLALAAIDSIQKIAKNNNGVREEAFNLLIKISEGPYPPSIREKARQTLIDIRTLVSNNAKARKGQ

SEQ ID NO: 2765 - DNA, 966 bp, Unknown
  Obtained from environmental sample
  misc_feature (1)..(966): n is a, c, g, or t
atggttacgcccgacgtgtacagaaagatgacctccaccttcgcgaagggcgagaccgttgacgttgactctctgatgaggcgttttgttgaattgcaatacgagcgcaacgacgcggtgctggatcgggggcgtttccgccgcaggggggacacccttgaaattttccccgcgtacatggaagaagcctaccgcgttgatctggactgggaccgcgtcgagcgcataaggcgctttaaccccgtgtcgggtgaaatactggaagagcttgacagagcgcttatctacccggcaaaacagttcgtcatgcccgcggaaatggtgtttaacgcgatgggggccataaagcgggagctggaagaaaggcttgagtttttcaagagccagggaaaaataattgaggcggaacggctgaaaacccgcgtcgagtatgatattgaaatgctcaatgaaatgggctactgttccggcattgagaattattccgcccttttggcgggccgcaaaccgggcgagaccccggacaccctggttgattaccttccccagaggcaccttacttttattgacgaaagccacgttacgctcccacagttaggcgcaatgtatacgggcgaccgcagccgcaagcagagcctggtggactacggcttccgcctgccctgcgccctggacaaccggcccctgcgctacgatgaatttgtcgatcgcctggacaagaccgtttttgtgtcggccacgcccggtaaaaccgagattgagcagtccgcccgcgtggtgcagcagctaatcaggccgacgggtcttttggatcctgaaatcgaagtacgccccagcgaggggcagatggaagacatctacggcgaagtgcanagcgcatcaaggcgggggagcgctcgcttattctcaccctcaccaaaaaatggcggaagaacctaccgattaccttttccgactgggccttga

SEQ ID NO: 2766 - protein, 321 aa, Unknown
  Obtained from environmental sample
  misc_feature (1)..(321): Xaa is any amino acid
MVTPDVYRKMTSTFAKGETVDVDSLMRRFVELQYERNDAVLDRGRFRRRGDTLEIFPAYMEEAYRVDLDWDRVERIRRFNPVSGEILEELDRALIYPAKQFVMPAEMVFNAMGAIKRELEERLEFFKSQGKIIEAERLKTRVEYDIEMLNEMGYCSGIENYSALLAGRKPGETPDTLVDYLPQRHLTFIDESHVTLPQLGAMYTGDRSRKQSLVDYGFRLPCALDNRPLRYDEFVDRLDKTVFVSATPGKTEIEQSARVVQQLIRPTGLLDPEIEVRPSEGQMEDIYGEVXSASRRGSARLFSPSPKNGGRTYRLPFPTGP

SEQ ID NO: 2767 - DNA, 756 bp, Unknown
  Obtained from environmental sample
  misc_feature (1)..(756): n is a, c, g, or t
atggacgaatataaggctatctggaaggatcttgtaaaagccgatttgggccatcctgaaacttttgttttgggcaaccagatccttgtagggcttgtaaagaacgtcaaagtgattaccacaagcaagggagatcgaatggccttcgcgacgctggaagattacaacggcgtaattgagctgactttttttcctgcggcctggactcaatgcggggaaaagatagagaatgacaaagttgctatacttaaggggagaattgattatcagcagaaaaaggataaatacagtttcaccgtagaagaatttctggaaatgaatgaagctggaattgcttctgaaattattcaattcagtaatgataaaaatgtaaaagaggaaaatatagaagatacgcggcaaccggacaggtttgcgaatttacggaagtacgcgaaagatatggagctgaacctgctggattttagtaaagcagaagccggaacctatattgccattggaactttaaagtctgtaagaacccacattgataaaaagggcaacgaaatggctttcggtactttgcaggatgatcttggcgaagatactatcgatctattgttttttgcgagggcatgggaaaattgcaaggcaaaggcaataatcaatgaggtgttggcggtcaaggggactatcgaagcgcagcanaatcgaaataacggtcaaaacaacggagaaaacaccctcattgtgtccagcatacaggatgtcaaataa

SEQ ID NO: 2768 - protein, 251 aa, Unknown
  Obtained from environmental sample
  DOMAIN (163)...(250): OB-fold nucleic acid binding domain
  misc_feature (1)..(251): Xaa is any amino acid
MDEYKAIWKDLVKADLGHPETFVLGNQILVGLVKNVKVITTSKGDRMAFATLEDYNGVIELTFFPAAWTQCGEKIENDKVAILKGRIDYQQKKDKYSFTVEEFLEMNEAGIASEIIQFSNDKNVKEENIEDTRQPDRFANLRKYAKDMELNLLDFSKAEAGTYIAIGTLKSVRTHIDKKGNEMAFGTLQDDLGEDTIDLLFFARAWENCKAKAIINEVLAVKGTIEAQXNRNNGQNNGENTLIVSSIQDVK

SEQ ID NO: 2769 - DNA, 630 bp, Unknown
  Obtained from environmental sample
  misc_feature (1)..(630): n is a, c, g, or t
atgccagagttttttcaaaagagcgaattcgaaggaagaacaattttagtaaaaaaactaaaaatactgccgtttgaatttatcgttaggggatatatgttcggtaatatgtgggaagcgtactctaagggaaaagaattctgcggtcaaaaaatagaaggcgattataaactggctgaaaaacttgacatccctctttttaccccctcgacaaaagcgcatatagggcatgacgaatatatttcggttcaatatgtcgaggataagatcggcgtacacttgacaaaaagaattgaaaaaatcgcatttgaactttataacacctgttacaattacgcctataacaaagacattatcatcgccgacactaaatttgaattcggtcttgatgaaaacaacgatcttttccttgcggacgagatatttactcccgattcaagcagattctggagtctccccgattatcaggagggaatttcgccaaagagttacgacaaacagtttgtacgcgactggcttcttaacaataaaaaagacggcgaaatgcaatttgacaatgtacctgacgatgtgttaaacaaaacatctgaaatttacgccgagtgcctacggaggctggttaatgcctga

SEQ ID NO: 2770 - protein, 209 aa, Unknown
  Obtained from environmental sample
  DOMAIN (1)...(191): SAICAR synthetase
  misc_feature (1)..(209): Xaa is any amino acid
MPEFFQKSEFEGRTILVKKLKILPFEFIVRGYMFGNMWEAYSKGKEFCGQKIEGDYKLAEKLDIPLFTPSTKAHIGHDEYISVQYVEDKIGVHLTKRIEKIAFELYNTCYNYAYNKDIIIADTKFEFGLDENNDLFLADEIFTPDSSRFWSLPDYQEGISPKSYDKQFVRDWLLNNKKDGEMQFDNVPDDVLNKTSEIYAECLRRLVNA

SEQ ID NO: 2771 - DNA, 357 bp, Unknown
  Obtained from environmental sample
  misc_feature (1)..(357): n is a, c, g, or t
gtgaacagggttctgttttttctcattcctcccgcagtaggcgcggttatcggctttatcacaaacgcaatcgccataaaaatgcttttccgcccgcttaacccaatccgtattttcggaataagactgccgttcactcccggaattctgccccgccagcgtaaaaaactggctctcagcataggcgcaatggtggagagggaactgttaacggcggaagttttaagaaaccgccttgccaatattgatgttgcgaattttcaggggattgttacggaattcctgcgccgagacgatatacgcaaagaatttgagtctaaagggcgtatacttatgcgtaacattttttcaagatga

SEQ ID NO: 2772 - protein, 118 aa, Unknown
  Obtained from environmental sample
  SIGNAL (1)...(25)
  misc_feature (1)..(118): Xaa is any amino acid
MNRVLFFLIPPAVGAVIGFITNAIAIKMLFRPLNPIRIFGIRLPFTPGILPRQRKKLALSIGAMVERELLTAEVLRNRLANIDVANFQGIVTEFLRRDDIRKEFESKGRILMRNIFSR

SEQ ID NO: 2773 - DNA, 873 bp, Unknown
  Obtained from environmental sample
  misc_feature (1)..(873): n is a, c, g, or t
atgaataacgtacaaattaaatttatcaataccgataaaacggtaacctgcccttacggcacaatcgcttcaactcttattgagcattttggaattccgcctgagaaaattgcggcagtcaaagaaaataatgaattacgccctcttggaacgtctttccttgtgaacgcgtcggttgagcccgtccttatggactctatcgaaggcgctatggtttaccgccgcacgctttcttttgttcttgctattgcggcgcggaaaatatttccaaataacggcgtgtatgtcggacattctcttggaaacagttattattattcgttaagttcaggagaaaagccgaaagaaagcgacgttaaagccctcgccgatgaaatgtgcaatattataaaggaaaatcttccaataacatttaaatatctttcttatgaagaagccttgcagttatttaaagaaaacaaacaaacggatacggttcttcttctggatcatagaagctccccgcttatcaaggtaaacgaatgtaagggttacatggatatttatgtacaaccgcttcttgatcgtaccgggcttcttagcgtttttgagcttatgccatatcaagacggtttcttgctgcgttttcccggtattggcaagggtgaaactatcgctccttttgttgacgagcctcagctttttcagatttacagcaattataaaaagtggggaaagattatcggagtgcgcgtcgtaggggaactgaacgcgcgtatcgccaacaggaattttctggagtatataagaatagcggaaacccatcaggaaagaatgttaggtgatattgcccgccttatttgcgaacagcgcgaaaatatcaaaatgatttaa

SEQ ID NO: 2774 - protein, 290 aa, Unknown
  Obtained from environmental sample
  misc_feature (1)..(290): Xaa is any amino acid
MNNVQIKFINTDKTVTCPYGTIASTLIEHFGIPPEKIAAVKENNELRPLGTSFLVNASVEPVLMDSIEGAMVYRRTLSFVLAIAARKIFPNNGVYVGHSLGNSYYYSLSSGEKPKESDVKALADEMCNIIKENLPITFKYLSYEEALQLFKENKQTDTVLLLDHRSSPLIKVNECKGYMDIYVQPLLDRTGLLSVFELMPYQDGFLLRFPGIGKGETIAPFVDEPQLFQIYSNYKKWGKIIGVRVVGELNARIANRNFLEYIRIAETHQERMLGDIARLICEQRENIKMI

SEQ ID NO: 2775 - DNA, 675 bp, Unknown
  Obtained from environmental sample
  misc_feature (1)..(675): n is a, c, g, or t
ttgtttttccgatatacatttcgatgctcttttcaaaaaagcaaactggagcgaatagtcgattccctcagaattntgcgacctgatgcgatattcttcgcaggcgatttagccgatattccactagaaaaactgcaagcaaggggttatgattccctgttcaggcaaataagcgccccgctcggtttttacgctaccacaggcaaccacgaatcctttatgaaccccggtgggcgaaccattgaatggctgcaaggctttgacaacgttacgctcctgctggatagcacggcttgcaatgatttcttttgcgtaacgggacgtttagaccatcaatatgcaaagcggcattccaacggcagaactgcgttaatggaacttatgccagcagccaacattatcccttggtttttaattgaccatcaaccaaagggattggacgttgaggatgcaaatataacaagaaaaccggactttgcctttagtggacatacgcatgcagggcaatttttccctataactattttggtcaagctcatatggcatttgagttatggtttgggcgagcttgatggcattccttggtatgtgaccagcggcataggtcaatgggggcctcctgtgcgcataggctcaagagcggagttggttttatttgaattttctacaccttga

SEQ ID NO: 2776 - protein, 224 aa, Unknown
  Obtained from environmental sample
  DOMAIN (9)...(168): Calcineurin-like phosphoesterase
  misc_feature (1)..(224): Xaa is any amino acid
MFFRYTFRCSFQKSKLERIVDSLRIXRPDAIFFAGDLADIPLEKLQARGYDSLFRQISAPLGFYATTGNHESFMNPGGRTIEWLQGFDNVTLLLDSTACNDFFCVTGRLDHQYAKRHSNGRTALMELMPAANIIPWFLIDHQPKGLDVEDANITRKPDFAFSGHTHAGQFFPITILVKLIWHLSYGLGELDGIPWYVTSGIGQWGPPVRIGSRAELVLFEFSTP

SEQ ID NO: 2777 - DNA, 747 bp, Unknown
  Obtained from environmental sample
  misc_feature (1)..(747): n is a, c, g, or t
atgcgtaatttagttaccattcaaaaagtgaaagagatcagcggtattgcggattcggattttcttgaacttgcccatgttatgggctggcaatgtgttgtcaagaaaggggacttcagggcgggagagctgggcgtatattttgaagtggacagttttctgcctatccaggagcgttatgaatttttgcgcaattcatcgtatcgcgataatgcagacaatggcaaaggtttccgcataagaaccgttaaaatgcgtgggcagctttcccagggcctgcttctgccgcttgcgcagttccctgaactaaatggtatggacgagggtgacgatgttacggaaaaattaggcgtaaaaaaatggtatattccggaaacatcgacacctggcgggactatcatcggagagcggccgaacggaattccggcttccgatgaaatccgtattcaatccgctttggaattgctggatcagttgaaagggaagccctactacatcaccacaaaaatggacgggacatcgggaattgtgtattacatagacggaaaaatcgggtgctgtagcaggaacatggagattaaagacgaggaaggtgcgctttattggctacctgtttataaatacggtctaaaagaaaaattggcaaagtacggaaaaaacattgtcattaccggggaaatttgcggtactggaatacagaaaaacaacttcggctactcgcgattgagtggtatgtgtttgatgtaa

SEQ ID NO: 2778 - protein, 248 aa, Unknown
  Obtained from environmental sample
  misc_feature (1)..(248): Xaa is any amino acid
MRNLVTIQKVKEISGIADSDFLELAHVMGWQCVVKKGDFRAGELGVYFEVDSFLPIQERYEFLRNSSYRDNADNGKGFRIRTVKMRGQLSQGLLLPLAQFPELNGMDEGDDVTEKLGVKKWYIPETSTPGGTIIGERPNGIPASDEIRIQSALELLDQLKGKPYYITTKMDGTSGIVYYIDGKIGCCSRNMEIKDEEGALYWLPVYKYGLKEKLAKYGKNIVITGEICGTGIQKNNFGYSRLSGMCLM

SEQ ID NO: 2779 - DNA, 348 bp, Unknown
  Obtained from environmental sample
  misc_feature (1)..(348): n is a, c, g, or t
atgattttctggaagacgcggattttgacacgattctgtctccggatattgattttacagggacattacgcttttgaaaagcctttttgtataaggggaaaagtttccggagaaattaacgccgcaggtttgcttgttatagatgaaaacgccgtagtaaacgccaatattcacgccttgcgcgttttaatccgcggacaggtaaaaggcgacgtaaccgctgttgaaaaagtggaagttacattatccggcaaattatcgggaaatgttacggctcctgaaatttttatggaaacaggatgcgtgtttaacggcagatgcacaatggttggaaaaaatctgttatga

SEQ ID NO: 2780 - protein, 115 aa, Unknown
  Obtained from environmental sample
  DOMAIN (6)...(113): Protein of unknown function, DUF583
  misc_feature (1)..(115): Xaa is any amino acid
MIFWKTRILTRFCLRILILQGHYAFEKPFCIRGKVSGEINAAGLLVIDENAVVNANIHALRVLIRGQVKGDVTAVEKVEVTLSGKLSGNVTAPEIFMETGCVFNGRCTMVGKNLL

SEQ ID NO: 2781 - DNA, 606 bp, Unknown
  Obtained from environmental sample
  misc_feature (1)..(606): n is a, c, g, or t
atgcacaatggttggaaaaaatctgttatgaagataaatgttaaattttttatcactagttttttgtttatcctcacgcttaacgtttacgctcagacacgacccgatgcgttagctgaatatcgcgccggaaattttgaaagggctgttcttatttgccgcgaggaacttgccgaaaatcccaataatctggagtcgcacgttgttatctgctgggctttaatccggctgaaccgtctggaagaagccatgcgctatgcccgcgcaggaagggctttaaaccgctttgacgtaagagttacccagattatgggcgaaatcagttattatcagggcagaaacgacgaagcgctgcagtatttccaggaatacgcaagcgccgctcccgaagggcagcgcattgatttggtttattacctgatgggagaagtttacatccgtcaggggaagtttcgccatgccgatatcgccctttcaaccgccgttcactgggtgccaaataacgcggcgtggtgngtcaggcttgcgtacacaagagaaaacgcgggcgatttatccagcgcgatagaagcttatgaacgcgctctttccctttattccaantaa

SEQ ID NO: 2782 - protein, 201 aa, Unknown
  Obtained from environmental sample
  misc_feature (1)..(201): Xaa is any amino acid
MHNGWKKSVMKINVKFFITSFLFILTLNVYAQTRPDALAEYRAGNFERAVLICREELAENPNNLESHVVICWALIRLNRLEEAMRYARAGRALNRFDVRVTQIMGEISYYQGRNDEALQYFQEYASAAPEGQRIDLVYYLMGEVYIRQGKFRHADIALSTAVHWVPNNAAWXVRLAYTRENAGDLSSAIEAYERALSLYSX

SEQ ID NO: 2783 - DNA, 318 bp, Unknown
  Obtained from environmental sample
  misc_feature (1)..(318): n is a, c, g, or t
ttggccgagatgccccaatgcggaagggtgctgaaaccggcgataacgtttttcggcgaaagccttcctatagacgctttaagggaagcgaccgaagaggcccaaaaatcagacttaatgctggttctcggaacaagccttacggtataccccgccgcgtcaataccacagtacacgctttccaggggcggggagattgtgatcgtaaacaatatggcaactcccctggacggtcgggcggttctgcactacgacgatcttgaagaagtttttagcgcactgaatgaaattattggaagcaaacaaaaacttcgataa

SEQ ID NO: 2784 - protein, 105 aa, Unknown
  Obtained from environmental sample
  misc_feature (1)..(105): Xaa is any amino acid
MAEMPQCGRVLKPAITFFGESLPIDALREATEEAQKSDLMLVLGTSLTVYPAASIPQYTLSRGGEIVIVNNMATPLDGRAVLHYDDLEEVFSALNEIIGSKQKLR

SEQ ID NO: 2785 - DNA, 627 bp, Unknown
  Obtained from environmental sample
  misc_feature (1)..(627): n is a, c, g, or t
atgcctatcaagattccaagggatctgcccgcctacaacgccttaacggaagagcgggtatttgtaatgaccgacgatcgggcggaacatcaggacatacgcccgcttaagattgcgattgtaaacctgatgccgactacggtggacacggagatacagttgcttcgccttttggggaacaccccactgcaagttgacataagctttctgcgaatgggaagccatgaatcccgaaacgcccctccgggacatctggataagttttacaccaacgtcgttgacataatgaagcagggttcctgttacgacggcttcatcatcaccggtgcgccagttgaaacccttccttttgaagaagtggattactggaacgagcttgtttctgttattgattttacaaatacaaacgtgtggtcaactctgcacatatgctggggcgcgcaggccggcctttatcggcgctacggcattacaaaaaagccgcttgaccaaaaactttttggaatttttccccacggtgtgaacgagcgtttttccacgcttttccgcggcttgacgacaatatctcgcgccccagtcacgcacaccgctagcgacagggacgctatcgctggcgaaaagcactga

SEQ ID NO: 2786 - protein, 208 aa, Unknown
  Obtained from environmental sample
  DOMAIN (2)...(206): Homoserine O-succinyltransferase
  misc_feature (1)..(208): Xaa is any amino acid
MPIKIPRDLPAYNALTEERVFVMTDDRAEHQDIRPLKIAIVNLMPTTVDTEIQLLRLLGNTPLQVDISFLRMGSHESRNAPPGHLDKFYTNVVDIMKQGSCYDGFIITGAPVETLPFEEVDYWNELVSVIDFTNTNVWSTLHICWGAQAGLYRRYGITKKPLDQKLFGIFPHGVNERFSTLFRGLTTISRAPVTHTASDRDAIAGEKH

SEQ ID NO: 2787 - DNA, 618 bp, Unknown
  Obtained from environmental sample
  misc_feature (1)..(618): n is a, c, g, or t
ttgctgaattttgtattcggttttattatcgcatggattttggcacggcataacttcttcggaaagaaaatagttgatgcttgcatagacctgccttttgccattcccactgccgtagctggtatttcgcttgctatggtattttcgtccaacggttttatgggaaaatttctctcattgttcaatatttcgcttgaatattccagagtgggcatagtgattgcgcttgtctttatagggttgccgtttgtggtgcgtaccgtgcaacccgttatagaggaatttgacagcggagtggaagaagctgctgcaagtcttggggctaattatttccagattttttttaaggttatttttccctcggtgctgcccgctattattaccggagcggcaatggcttttgcccgcggactaggcgaatacggttcagttatctttatatccagcaatatgccttacgagagcgaaatagttccgctgttaatcataaaaaaacttatgcagtttgattatgcgggcgcgagtgctatcggcgcaactatgcttgtaatagcttttattatgctgtttgttaccaacattcttcaaaactacatgataaaggagcgttcctcatga

SEQ ID NO: 2788 - protein, 205 aa, Unknown
  Obtained from environmental sample
  DOMAIN (1)...(201): Binding-protein-dependent transport system inner membrane component
  misc_feature (1)..(205): Xaa is any amino acid
MLNFVFGFIIAWILARHNFFGKKIVDACIDLPFAIPTAVAGISLAMVFSSNGFMGKFLSLFNISLEYSRVGIVIALVFIGLPFVVRTVQPVIEEFDSGVEEAAASLGANYFQIFFKVIFPSVLPAIITGAAMAFARGLGEYGSVIFISSNMPYESEIVPLLIIKKLMQFDYAGASAIGATMLVIAFIMLFVTNILQNYMIKERSS

SEQ ID NO: 2789 - DNA, 405 bp, Unknown
  Obtained from environmental sample
  misc_feature (1)..(405): n is a, c, g, or t
gtgaaaccgcttccttcggagctttctggcgagcagagacagcgcgttgcgcttgcgagagcacttgccgtagagcctaccgtgttgctgctagacgaacctttcggtgcgcttgatgccaaagtccgcaaggaattgaggatttggctccgccgattgcatgacgaaattcacgtcacaagtatttttgtaactcacgaccaagacgaggctcttgaagtttcggactctatagccattgtgaacaaagggaaaatagagcagataggaagcccagaagaagtatgcgactccccgaaaaatccgtttgttaccgagtttttaagcgatgtgaacagacccttagtaaaaaataaaaagaaaaagttgttcgatgtgataaatgacggtcggcaagggatttaa

SEQ ID NO: 2790 - protein, 134 aa, Unknown
  Obtained from environmental sample
  DOMAIN (1)...(84): ABC transporter
  misc_feature (1)..(134): Xaa is any amino acid
MKPLPSELSGEQRQRVALARALAVEPTVLLLDEPFGALDAKVRKELRIWLRRLHDEIHVTSIFVTHDQDEALEVSDSIAIVNKGKIEQIGSPEEVCDSPKNPFVTEFLSDVNRPLVKNKKKKLFDVINDGRQGI

SEQ ID NO: 2791 - DNA, 540 bp, Unknown
  Obtained from environmental sample
  misc_feature (1)..(540): n is a, c, g, or t
atggcaaaagttttagtaatgtatttttcaagatatggcacaacaaaaaaatatgcggaatggatagcttcggaattaaacggagatgtttatgatataaaaaatgttaagcaaaataatttaaaaaattatgacacaataattttaggcgctgctttatatgccggacaacttaaaggtttagacataataataaataattatgaaaaaataaaaaataaaaaaacgataatatttacctgcggagtggctgattacagtaaagaggaaaatgtaaacgctatacaaaaaagaatagcaaataaattgcctgaaaaaataatggaaaatataaaaatatattatttaaggggcggtatagactataagaaattaaatttaaagcataaaataatgatgtggatggtaaaaaaaatgataacgaaaaaacaaactgaagaattaaatgaagaaaacaaagaatttttagaaacttacggaaaagcaatagattttacaaataaagataatataaatgagataataaaatattgtaaataa

SEQ ID NO: 2792 - protein, 179 aa, Unknown
  Obtained from environmental sample
  misc_feature (1)..(179): Xaa is any amino acid
MAKVLVMYFSRYGTTKKYAEWIASELNGDVYDIKNVKQNNLKNYDTIILGAALYAGQLKGLDIIINNYEKIKNKKTIIFTCGVADYSKEENVNAIQKRIANKLPEKIMENIKIYYLRGGIDYKKLNLKHKIMMWMVKKMITKKQTEELNEENKEFLETYGKAIDFTNKDNINEIIKYCK

SEQ ID NO: 2793 - DNA, 690 bp, Unknown
  Obtained from environmental sample
  misc_feature (1)..(690): n is a, c, g, or t
atggaattattggagatatacgccaaaccatttgtcaaagcaacgctcaacacatttaaaacctttgcaggatttgatctgatcgtgggaaacccgcatttttcaggccggacacggggctttcagcaggatattgcggcgataatcggcttttcaggcgatattcgcggtgcggtcattatagccatgaagaaagatctggttatcaaactcgccgatacgcttaccaaggtaccgcacagccaaattgatgacgatgcgatagacgccatcggggaaattgtcaacattatcgccggaaacataaaacgggaagtaccgggcggggagaaaattgaaatttcgctgccaacggttataaaagggagcggaacttcgttttcctggcccggcagacaatcgcggtcactgtgtatccacttcaagtataaagacgatacattccatttattggtagacatggagaaagagaaggtaaaagtacaggaagaagacctcacaaaaaacggagtaattcccggatggatcaactggggtcgggaacaagaaaaaagaatgatagcgcagaatttgctcaatacgggtatgtccgttgaggaagttgcgcgcatcaccgaactgtctgttgaaaaaatttctgatattgttttcgatccgagcaatcatccctccgctgggactcataagtaa

SEQ ID NO: 2794 - protein, 229 aa, Unknown
  Obtained from environmental sample
  misc_feature (1)..(229): Xaa is any amino acid
MELLEIYAKPFVKATLNTFKTFAGFDLIVGNPHFSGRTRGFQQDIAAIIGFSGDIRGAVIIAMKKDLVIKLADTLTKVPHSQIDDDAIDAIGEIVNIIAGNIKREVPGGEKIEISLPTVIKGSGTSFSWPGRQSRSLCIHFKYKDDTFHLLVDMEKEKVKVQEEDLTKNGVIPGWINWGREQEKRMIAQNLLNTGMSVEEVARITELSVEKISDIVFDPSNHPSAGTHK

SEQ ID NO: 2795 - DNA, 648 bp, Unknown
  Obtained from environmental sample
  misc_feature (1)..(648): n is a, c, g, or t
atgggaaacagcccgttttatatcacgattaacaattacatcataaatcccgaaaaaccggcctcgccgaaaaacaggcaggaataccctacccaaaaagaccagactgatattaccagagtaccggatagagtggcggaagcggtcgtgccgttgtcagccgtcccgttgtcggccttgccgcctgtcttaccgacggtacagccgtcagcgttgccggtggatcagcctcctgtggctgaactgcctgtttcacccgtggcggcacaaccgccagtccagccggaagcgtcaccaccggagcagccggcgaccttgtcggcgacctcatcggcgaacttgtcggcagctcagccggtcaaaccgcctctgtttactgccccgccggtatacgatccccagattataccgagtctgccgaatcccaatacggacaaaatataccgtctattggtagggacctatcccggcgtagacagtgccttccctatctatcagcagttacaggctgcgggctttgacgtagttcaggagcaggccggggagatgtgcaaggtatttgccgccggtattcccgcttcccgggtatattatgccgcaaaacgcctgggagcaataggattctctcaaatatggattcaagaataa

SEQ ID NO: 2796 - protein, 215 aa, Unknown
  Obtained from environmental sample
  misc_feature (1)..(215): Xaa is any amino acid
MGNSPFYITINNYIINPEKPASPKNRQEYPTQKDQTDITRVPDRVAEAVVPLSAVPLSALPPVLPTVQPSALPVDQPPVAELPVSPVAAQPPVQPEASPPEQPATLSATSSANLSAAQPVKPPLFTAPPVYDPQIIPSLPNPNTDKIYRLLVGTYPGVDSAFPIYQQLQAAGFDVVQEQAGEMCKVFAAGIPASRVYYAAKRLGAIGFSQIWIQE

SEQ ID NO: 2797 - DNA, 378 bp, Unknown
  Obtained from environmental sample
  misc_feature (1)..(378): n is a, c, g, or t
ttgatggccgaggcacctacccggaaggcattggccgggccggccgccttccctatttggtcttgctccggacggggtttgccgagcctgccgcgtcgccgcggcagctggtgggctcttaccccaccgtttcacccttaccgcaaagacgcgctttacggcggtttgctttctgtggcgctgtccggggatttcgccccctgggcgttacccagcgccctgccctgcggagcccggactttcctccccgcggcccgggcgaacccgaaccgcgcagcggcggtctgtccggctttgcgagatatggtgggagtgccgccnacaaagcggggcactcccggcgttgttcacgccgcggatccgcgaatatggcgctag

SEQ ID NO: 2798 - protein, 125 aa, Unknown
  Obtained from environmental sample
  misc_feature (1)..(125): Xaa is any amino acid
MMAEAPTRKALAGPAAFPIWSCSGRGLPSLPRRRGSWWALTPPFHPYRKDALYGGLLSVALSGDFAPWALPSALPCGARTFLPAARANPNRAAAVCPALRDMVGVPPTKRGTPGVVHAADPRIWR

SEQ ID NO: 2799 - DNA, 399 bp, Unknown
  Obtained from environmental sample
  misc_feature (1)..(399): n is a, c, g, or t
atgctggcttatatttgcaatttaatggaagtcgccaaagttactcctgaaattgcgtcctctatcgttctggaaattgaaaaccagaggaaacgcgtaaaattgatcgcaagcgaaaattactgctctatggcggttcagcttgctatggggaacctcttaaccgacaaatacgccgagggtgtgcctttccaccgcttctatgcgggtaacgaaaatgtcgacgctatcgaatctttagcggcgcaagaggcttgtaaacttttcggcgcacagtacgcaaatgtgcaggctcattgcggcgcagacgctaacctgctcgcttactgggcaattctaagtacacggattgaaaacccggcgttggaaaaatgggcgagactaatctttacaaattaa

SEQ ID NO: 2800 - protein, 132 aa, Unknown
  Obtained from environmental sample
  misc_feature (1)..(132): Xaa is any amino acid
MLAYICNLMEVAKVTPEIASSIVLEIENQRKRVKLIASENYCSMAVQLAMGNLLTDKYAEGVPFHRFYAGNENVDAIESLAAQEACKLFGAQYANVQAHCGADANLLAYWAILSTRIENPALEKWARLIFTN

SEQ ID NO: 2801 - DNA, 420 bp, Unknown
  Obtained from environmental sample
  misc_feature (1)..(420): n is a, c, g, or t
atggaaacgtcgatttatgagcagaacagaggtctttatgaaaaatataagaaagaaatcaaaccatatcttcgaactcttcagttgtttcctgccagtctgcagaaattagaatggaattgtcaaggagagccgcgagatttatggcgatatattctacaatttagggcatccggattacgagttaagcgaccaacaacatcgccttcgcttgtcgcaatgactactacacaaataccgattattggatggttaaaacgttatatgacattgcgtgaatgtgccagacttcaatccatgcatgaccttcattggctgcctgaaggagatgcaggctttaaagctcttggaaatgcggtgaatgtagatgttgcccatgccatcctggaacaattagtaaaaaattcgcccagtaaatga

SEQ ID NO: 2802 - protein, 139 aa, Unknown
  Obtained from environmental sample
  misc_feature (1)..(139): Xaa is any amino acid
METSIYEQNRGLYEKYKKEIKPYLRTLQLFPASLQKLEWNCQGEPRDLWRYILQFRASGLRVKRPTTSPSLVAMTTTQIPIIGWLKRYMTLRECARLQSMHDLHWLPEGDAGFKALGNAVNVDVAHAILEQLVKNSPSK

SEQ ID NO: 2803 - DNA, 915 bp, Unknown
  Obtained from environmental sample
  misc_feature (1)..(915): n is a, c, g, or t
gtggtagcggttcgggtcgaagaacatgcccttcagcagcgcgtcagaactctccactgtcggcggctcgccaggacggatgcgcttgtacagctcgatcagcccttcttcatatgttttcgcgatatccttttcgattgtggcgagtaccttgggctcctcgccgaacagcgcgagtatctcgctgtcgctgccacgcccctcgcccagcagcgagcggatcagcaccgtcaccggcaccttgcgtgtccggtccacgcgcacgtagaacacgtcgttggagtcggtctcgtattccagccacgcgcccctgttcgggatgatggtggcggaagtcagcatcttgccggccttgtccaggctcgccccgaaatagatgccgggggagcgcatcagctggctgacgatgacgcgttccgcgccgttgatgatgaaggtgccggtccgggtcatcagggggaaatcccccatgaagatctcctgctcctttatctcgtccacctctttgttgcgcagccggcatttgacgcgaagcggcgcggcgtaggtggcgtcgcgctccttgcactcctcgatggtgtgcttgggcttgtcgtccagcgtgaagtcgataaactccaggatgagattgccgctgtagtcggtgatcggcgatatgtcgcggaacacctcgtgcagcccttctttcaggaaccagcggtagctgtccttctggacctctatgaggtccggcatctccaaaacttccgcgattctggaatagctggcgcgcgtcgggccgccgccgcgtgttggctgaactctgtttttttccaccgtaacaaccccttatatgatgatagaagtgattcaatacgcggtgaacggaaaggcaacagctttaagaagcagggcgcagccccaccttggatttga

SEQ ID NO: 2804 - protein, 304 aa, Unknown
  Obtained from environmental sample
  misc_feature (1)..(304): Xaa is any amino acid
MVAVRVEEHALQQRVRTLHCRRLARTDALVQLDQPFFICFRDILFDCGEYLGLLAEQREYLAVAATPLAQQRADQHRHRHLACPVHAHVEHVVGVGLVFQPRAPVRDDGGGSQHLAGLVQARPEIDAGGAHQLADDDAFRAVDDEGAGPGHQGEIPHEDLLLLYLVHLFVAQPAFDAKRRGVGGVALLALLDGVLGLVVQREVDKLQDEIAAVVGDRRYVAEHLVQPFFQEPAVAVLLDLYEVRHLQNFRDSGIAGARRAAAACWLNSVFFHRNNPLYDDRSDSIRGERKGNSFKKQGAAPPWI

SEQ ID NO: 2805 - DNA, 744 bp, Unknown
  Obtained from environmental sample
  misc_feature (1)..(744): n is a, c, g, or t
ttgaatcacttctatcatcatataaggggttgttacggtggaaaaaaacagagttcagccaacacgcggcggcggcccgacgcgcgccagctattccagaatcgcggaagttttggagatgccggacctcatagaggtccagaaggacagctaccgctggttcctgaaagaagggctgcacgaggtgttccgcgacatatcgccgatcaccgactacagcggcaatctcatcctggagtttatcgacttcacgctggacgacaagcccaagcacaccatcgaggagtgcaaggagcgcgacgccacctacgccgcgccgcttcgcgtcaaatgccggctgcgcaacaaagaggtggacgagataaaggagcaggagatcttcatgggggatttccccctgatgacccggaccggcaccttcatcatcaacggcgcggaacgcgtcatcgtcagccagctgatgcgctcccccggcatctatttcggggcgagcctggacaaggccggcaagatgctgacttccgccaccatcatcccgaacaggggcgcgtggctggaatacgagaccgactccaacgacgtgttctacgtgcgcgtggaccggacacgcaaggtgccggtgacggtgctgatccgctcgctgctgggcgaggggcgtggcagcgacagcgagatactcgcgctgttcggcgaggagcccaaggtactcgccacaatcgaaaaggatatcgcgaaaacatatga

SEQ ID NO: 2806 - protein, 247 aa, Unknown
  Obtained from environmental sample
  misc_feature (1)..(247): Xaa is any amino acid
MNHFYHHIRGCYGGKKQSSANTRRRPDARQLFQNRGSFGDAGPHRGPEGQLPLVPERRAARGVPRHIADHRLQRQSHPGVYRLHAGRQAQAHHRGVQGARRHLRRAASRQMPAAQQRGGRDKGAGDLHGGFPPDDPDRHLHHQRRGTRHRQPADALPRHLFRGEPGQGRQDADFRHHHPEQGRVAGIRDRLQRRVLRARGPDTQGAGDGADPLAAGRGAWQRQRDTRAVRRGAQGTRHNRKGYRENI

SEQ ID NO: 2807 - DNA, 339 bp, Unknown
  Obtained from environmental sample
  misc_feature (1)..(339): n is a, c, g, or t
atgattaaaaagatgcgtgagatggctccgatgataatgatcgttatcattgtggcttttgtaggcggcaccctcttcctcgattggggaatgaacatcatgggccaaggcaggaagacgccggtcgggaagattgacgggaaggatattccgatagagtattttgacaagttagtcaacatggagcgctatcggttgcaggagggcgggcgcgaggtgccgcctatgcagtaccgccagattccggcgcaggtgtggaatcaggaggtcaatagggtgctcctcgacaaggccatcaaatccatgcggctcgagaccaccgatcctcggccaatctga

SEQ ID NO: 2808 - protein, 112 aa, Unknown
  Obtained from environmental sample
  SIGNAL (1)...(21)
  misc_feature (1)..(112): Xaa is any amino acid
MIKKMREMAPMIMIVIIVAFVGGTLFLDWGMNIMGQGRKTPVGKIDGKDIPIEYFDKLVNMERYRLQEGGREVPPMQYRQIPAQVWNQEVNRVLLDKAIKSMRLETTDPRPI

SEQ ID NO: 2809 - DNA, 384 bp, Unknown
  Obtained from environmental sample
  misc_feature (1)..(384): n is a, c, g, or t
atgagtaatatcgcaaaagcgttccaaaacggcaaagcgtttataggttttgtaaccggcggggatcccagtatcgaaaaaacaaaagagttcgcgctggaaatgatcagggcaggtgctgacctggtagaaatcggcattcccttttcagaccccatagccgaaggccctgtgatacaggaggcgaacatccgcgccctgggtaacggagccacagtggaaaaactgtttacccttgttcaagacttacgaaaagaaacccaggtcccgattgtgttttttacgtaccttagtccggtttttcattacgttacgacgcatttttcaaacgctcaaggctctgccggtctggacgggatcatcatcccccaattgcctttttaa

SEQ ID NO: 2810 - protein, 127 aa, Unknown
  Obtained from environmental sample
  DOMAIN (8)...(127): Tryptophan synthase alpha chain
  misc_feature (1)..(127): Xaa is any amino acid
MSNIAKAFQNGKAFIGFVTGGDPSIEKTKEFALEMIRAGADLVEIGIPFSDPIAEGPVIQEANIRALGNGATVEKLFTLVQDLRKETQVPIVFFTYLSPVFHYVTTHFSNAQGSAGLDGIIIPQLPF

SEQ ID NO: 2811 - DNA, 897 bp, Unknown
  Obtained from environmental sample
  misc_feature (1)..(897): n is a, c, g, or t
gtggttctttgcaatattggcaagaaaagttttacgcagggcatttctattatcgcttcccatatagactccccacggcttgattttaaaatgcggcctctatacgaagattccggcatggctttttttgacacccattattatggaatgattaaaccctatcagtggacgggcattccccttgcccttcacggttttctaattcttaaagacggacaagagcttaacatacaaattggcgaagggcatgacgaccctcgtttctttattacggatctcctaccgcatcttgcggaagaacagatgaagaaatctgtaaaagacgcggttccggcggaaaaccttgatattcttgcaggactcaattcagcgccgggcgaaagtggcgcaggggcggtcaaactcaatatactcagattactttacgaaaaatacggtattaccgaaaaagaccttgtgtcggcggagatttgcgcggttccggcattcgccgcttcggatatcggactcgacaggagcatgataggagcctacggtcaggatgacaaggcgtgcgcttaccctgcacttaccgcgtttctttccgtcaatgagcctgaatacacatcgtgtctggttctcgctgacaaagaagaaacaagctcttttgggattagcggaatgaagtcggcttttttcccctgttttatcaatgagcttgttgaagctgcgggagagtccgaggcgaggcacgaagttttttcaaattcgttttgcatttctgcggatgttaatacctgctggtatcctctttataaagaagtttttgacgaacatggagaggcaaaattaaatcatggcatcgtactcttccgctattgnggagaaaaaggggaaagaaaacacaaacgacgctga

SEQ ID NO: 2812 - protein, 298 aa, Unknown
  Obtained from environmental sample
  DOMAIN (3)...(294): Aminopeptidase I zinc metalloprotease (M18)
  misc_feature (1)..(298): Xaa is any amino acid
MVLCNIGKKSFTQGISIIASHIDSPRLDFKMRPLYEDSGMAFFDTHYYGMIKPYQWTGIPLALHGFLILKDGQELNIQIGEGHDDPRFFITDLLPHLAEEQMKKSVKDAVPAENLDILAGLNSAPGESGAGAVKLNILRLLYEKYGITEKDLVSAEICAVPAFAASDIGLDRSMIGAYGQDDKACAYPALTAFLSVNEPEYTSCLVLADKEETSSFGISGMKSAFFPCFINELVEAAGESEARHEVFSNSFCISADVNTCWYPLYKEVFDEHGEAKLNHGIVLFRYXGEKGERKHKRR

SEQ ID NO: 2813 - DNA, 903 bp, Unknown
  Obtained from environmental sample
  misc_feature (1)..(903): n is a, c, g, or t
ttggccgagtgtagggatgatattgttttctcggacggaagcaaaatgacaatggacgacgtgttgttttcttttgaaaggtcgaaagaccccgatggtggaacctactttgctgacttcttcgacgatgtggataatttttccgttaacggctggcagttcactgttaagcttaaacagccctcggcggtgttcaagtttgttccggcgattggcgcgggacggataatcagcaaggcttattaccagaaacacgaaaatgactttggaaccgcaaaaggaggcattgtcgcgacaggtccctttgtttacgagaaatggatcagcgggcaggaaataatattaaagaaaaataaaaattactggaataaggaaaagttggccgccaatattattgacactctggtttttaaaattattcctgaagacacttcacgggtaatcgcgctccagagcggaaacgccgatttctgcgccaatctgccggaagatatgctggataaacttagctcagaccagaatttgacatttaccagcgtaaactcctttaaacttacataccttgcacttaatacgcaacgcgccccaatgaacgatataaatgtacgtaaagcaatttcaagggcaatggacattcccgaattccaaaaacgcattattaaggatgccggaacagcgggaaccattctgcctttcggtcaggcgctttacggcgataacgtcgccaaatggcagcagtatttaaatagtaatcaaggctacacttacgatttagcggtcgcaaaacaacatcttgcaagatcggcgtatccaaacggttttaactgcgacttgattgtaagcgaaaaattcccttgccaatcaaagagcgttgtatatccaggaatccctagaagcgcttaa

SEQ ID NO: 2814 - protein, 300 aa, Unknown
  Obtained from environmental sample
  DOMAIN (1)...(296): Bacterial extracellular solute-binding proteins, family 5 Middle
  misc_feature (1)..(300): Xaa is any amino acid
MAECRDDIVFSDGSKMTMDDVLFSFERSKDPDGGTYFADFFDDVDNFSVNGWQFTVKLKQPSAVFKFVPAIGAGRIISKAYYQKHENDFGTAKGGIVATGPFVYEKWISGQEIILKKNKNYWNKEKLAANIIDTLVFKIIPEDTSRVIALQSGNADFCANLPEDMLDKLSSDQNLTFTSVNSFKLTYLALNTQRAPMNDINVRKAISRAMDIPEFQKRIIKDAGTAGTILPFGQALYGDNVAKWQQYLNSNQGYTYDLAVAKQHLARSAYPNGFNCDLIVSEKFPCQSKSVVYPGIPRSA

SEQ ID NO: 2815 - DNA, 777 bp, Unknown
  Obtained from environmental sample
  misc_feature (1)..(777): n is a, c, g, or t
atggacgccgtttgggaaatagccgaaaggcacggcctctgggtgatagaagacgcagcacaggcaatgggggccagctacaaggggacaaagataggcgcgaacccaaggtcggccatgagcgtctatagcttccaccccaacaagaacatgaccacgggcgagggcggctgcatagcgctccacgatgagggacacgtcgcccgcatcaagcgcctcaggttccacggcatagagaaggacgcatggcggcggtttgcgaaggacggcacgccccacacggagattgtggagcctgggcgcaaggccaacttcatggacatccaggccgccattggcctgcaccagatcaaaaagctggattcgttcaaccaaaggcgcgaggccctgttcaggcggtacctggatggcctaaagggcattgacggtctcctgctgccgtgggagggcgaccggacgcaccggcactgcttccatctgtttgtgctgaggatacagccggaaatagtgggcagggatcgcgacgcctttgtgcaggcgctgaaggaggagaacatcggcgccggcatccactatcggccggcgcacatccatccctactaccgcgaatactacgcccggcgcccggacgcgctgcccaagggcggtctccccgaatgtgagtggagcggcgagcgcctgatgagcctgccgctgtggcccggcctgacggaggacgaccaggaccaggtgattgaggccatcagatacnttgcggggaatgggggagggcactga

SEQ ID NO: 2816 - protein, 258 aa, Unknown
  Obtained from environmental sample
  DOMAIN (1)...(249): DegT/DnrJ/EryC1/StrS aminotransferase family
  misc_feature (1)..(258): Xaa is any amino acid
MDAVWEIAERHGLWVIEDAAQAMGASYKGTKIGANPRSAMSVYSFHPNKNMTTGEGGCIALHDEGHVARIKRLRFHGIEKDAWRRFAKDGTPHTEIVEPGRKANFMDIQAAIGLHQIKKLDSFNQRREALFRRYLDGLKGIDGLLLPWEGDRTHRHCFHLFVLRIQPEIVGRDRDAFVQALKEENIGAGIHYRPAHIHPYYREYYARRPDALPKGGLPECEWSGERLMSLPLWPGLTEDDQDQVIEAIRYXAGNGGGH

SEQ ID NO: 2817 - DNA, 501 bp, Unknown
  Obtained from environmental sample
  misc_feature (1)..(501): n is a, c, g, or t
gtgattccgctggaaatccgctgcctggataaaaccgccgcagtcctcgatgccggaaaaaagttcttcgccgcccttgcccctggctgtccctggactgtgaaaaccatacgcggggaaatccgcagcttcggcaggcaacgcggcgggacgctatcagtggaaatcaggggaaagccggcagccctgagcgcagcggtaaacgtctacaacgagcttttctgggaaatttctcccatggacaaagagggtatcgaacactttactcaaagccaggccaggctgctttcgtctttaacagaaagcccaggccaaattttggttgtagagccgggcattccccgctccggggaatttatctcgctgcttcgttcctcgcttataaaagaaaaacgcctaccgctttcaccatgccctcactccggggcttgccctcttccaggcggcagaccagcttccggccattgcagcacaaagcaaagtgggtcctcggccatctga

SEQ ID NO: 2818 - protein, 166 aa, Unknown
  Obtained from environmental sample
  misc_feature (1)..(166): Xaa is any amino acid
MIPLEIRCLDKTAAVLDAGKKFFAALAPGCPWTVKTIRGEIRSFGRQRGGTLSVEIRGKPAALSAAVNVYNELFWEISPMDKEGIEHFTQSQARLLSSLTESPGQILVVEPGIPRSGEFISLLRSSLIKEKRLPLSPCPHSGACPLPGGRPASGHCSTKQSGSSAI

SEQ ID NO: 2819 - DNA, 834 bp, Unknown
  Obtained from environmental sample
  misc_feature (1)..(834): n is a, c, g, or t
atgcgtatcacacacaatgttgccgccatgaacacccatcgccaaatgggtataagcgaggcggacggatcgaaatcgatggagaaactctccagcggcttcagaattaaccgcgcgggggacgacgccgccgggttggcgatctcggagaagatgagagcccagatcaggggtctcaacatggcgtccaagaactcctcggacaccatatccatgattcagaccgcggaaggggcgctcggcgagacgcactcaatcttgcagagaatgcgcgagctggcggtgcagtcggctaacgacacgaatacggactctgacagggtggagcttcagaacgaagtcaagctgttgatcgccgaggttgacaggatcggaaatacgaccgagttcaacacgaagaagttgctggaagggagcgccaagggtgttgcggacgagatcatcgggacttcgcggatcaacaataacagcagtttggcgctggatccggggaagatatcgaagttgagcgataacgtgtcgtctgacaagagctgggcgtttgacggggcgtttatgcttgttcggacggggaggacgtccgataacgcggacggtacgctggtgtataatcccagcgattttaagatggtggggccgaacggggcggagtattcgttcgcggcgttgggtccggctgtcagtcctataactgtaacggctactactatggacttgcttaaagcggggactcatgtggcggagggtgcctactcagttaccgggacgctcgtaaataatgttacgtattcaggcgcagccgaaaacaccgctctgactcaagcgctgtcctaa

SEQ ID NO: 2820 - protein, 277 aa, Unknown
  Obtained from environmental sample
  DOMAIN (27)...(167): Bacterial flagellin N-terminus
  misc_feature (1)..(277): Xaa is any amino acid
MRITHNVAAMNTHRQMGISEADGSKSMEKLSSGFRINRAGDDAAGLAISEKMRAQIRGLNMASKNSSDTISMIQTAEGALGETHSILQRMRELAVQSANDTNTDSDRVELQNEVKLLIAEVDRIGNTTEFNTKKLLEGSAKGVADEIIGTSRINNNSSLALDPGKISKLSDNVSSDKSWAFDGAFMLVRTGRTSDNADGTLVYNPSDFKMVGPNGAEYSFAALGPAVSPITVTATTMDLLKAGTHVAEGAYSVTGTLVNNVTYSGAAENTALTQALS

SEQ ID NO: 2821 - DNA, 714 bp, Unknown
  Obtained from environmental sample
  misc_feature (1)..(714): n is a, c, g, or t
atgcgttcatttaccccaggcgagtttcgcgcgtcaatacgttttttgacggatatgcgcgcggacgcaccagaccgccgcatagaccagcggcgtgtcgcacagggcaagcgccaccttgaccgaccattgcccgaggatcaaggttcctacgggcatgacgccgtanaaggcgatcacgataaacattaccgnagtcatcagttgcgagaggatggtcgcaagttgttgcgcagcacagatgcctgccgcgcatccngtcttgagcagggatacagtcagacatcatggaattggctcagcgcataccccgtcaccaatcccccaatgattcccggcgtcatgcccaaaaccccccaaaagcctccttctgaatccaaaacgaagcggcaggcccccccaaggggaagttgggatccaaaaaaaaccgggccatccccaaaaacctcttccaaccccccgtgttggaaggccccccccccaaattccgaaacccctccccccaccaaggggatgttctttgggaaaccccctttgggaaaaaaaacccccccaaaacaaaaaattttttcccaaaacccccccccccccaggggggggcaaaaaaaactccccccaacccccgggggaaaaaaaaangggggggggggccccccccccctttttttttcggggagcccccccccccccggggggggggttgaaaatttttaa

SEQ ID NO: 2822 - protein, 237 aa, Unknown
  Obtained from environmental sample
  misc_feature (1)..(237): Xaa is any amino acid
MRSFTPGEFRASIRFLTDMRADAPDRRIDQRRVAQGKRHLDRPLPEDQGSYGHDAVXGDHDKHYRSHQLREDGRKLLRSTDACRASXLEQGYSQTSWNWLSAYPVTNPPMIPGVMPKTPQKPPSESKTKRQAPPRGSWDPKKTGPSPKTSSNPPCWKAPPPNSETPPPTKGMFFGKPPLGKKTPPKQKIFSQNPPPPRGGQKKLPPTPGGKKXGGGGPPPLFFSGSPPPPGGGVENF

SEQ ID NO: 2823 - DNA, 594 bp, Unknown
  Obtained from environmental sample
  misc_feature (1)..(594): n is a, c, g, or t
ttgtatgaaggcatagaaacccagaaacagcttgatatctgtatggcgttaaaaggaagatattatcagggattcctaatcgccatgcctcaggcttcaatgtgcaacgctttaattaacgacgctgtttttgctatgtcaatcgaaaacgtatatactgtttttcaggatgaaattaccgcgacagaggcgctgagaaaatctttggatacacagattgaacgttttctggcgcagaacccttttaattttaaagaagaggaacatgacaattaccttgtaaatctctgccgggaattatcaaatgtacggatggtttttttatgtgacaggcgcggtaaccagcttacatcaaatattgaatggcagccgggaacaaccgcgtttatcagcggcggtctgttgtcaaagtataaaaatagaaattgggtatggcgcggatatttttatgagactttaaaagccgtcgccgccggacaaaaaagctgtatgtccaactcctatcatgactttacgaccaaagacaacgtccgcacctactcctacgccataagcgacgatattttcttatttgtggacatagggacaacttaa

SEQ ID NO: 2824 - protein, 197 aa, Unknown
  Obtained from environmental sample
  misc_feature (1)..(197): Xaa is any amino acid
MYEGIETQKQLDICMALKGRYYQGFLIAMPQASMCNALINDAVFAMSIENVYTVFQDEITATEALRKSLDTQIERFLAQNPFNFKEEEHDNYLVNLCRELSNVRMVFLCDRRGNQLTSNIEWQPGTTAFISGGLLSKYKNRNWVWRGYFYETLKAVAAGQKSCMSNSYHDFTTKDNVRTYSYAISDDIFLFVDIGTT

SEQ ID NO: 2825 - DNA, 438 bp, Unknown
  Obtained from environmental sample
  misc_feature (1)..(438): n is a, c, g, or t
atgcaggcgcaccgtgaaccggataccataacaggaagccgaggaacggtttacgatctggatctgcttgaccctaaaaatgaagcccgtcatacaatcacaaattatcggaaaggcggttatgttccggttttctgccgtcattgcgccgtaccggactgtgtgggtgcgtgtatgtcaggggctttaaaaaaagaacccgccacaggccatgtgcagtacgacgagaagcgctgcggtacttgtttcatgtgcgtcatgagctgcccctacggaaacatcaagccggacagtgtaacacggacaaagatcctcaagtgtgatttctgcaaggacgataatgaggaaccaaattgcgtgaagtcttgtcccaaagaagccattcatgtggaagaagttgacgcgggcgtagaagcggaggtaagcattacaatatga

SEQ ID NO: 2826 - protein, 145 aa, Unknown
  Obtained from environmental sample
  DOMAIN (72)...(95): 4Fe-4S binding domain
  misc_feature (1)..(145): Xaa is any amino acid
MQAHREPDTITGSRGTVYDLDLLDPKNEARHTITNYRKGGYVPVFCRHCAVPDCVGACMSGALKKEPATGHVQYDEKRCGTCFMCVMSCPYGNIKPDSVTRTKILKCDFCKDDNEEPNCVKSCPKEAIHVEEVDAGVEAEVSITI

SEQ ID NO: 2827 - DNA, 522 bp, Unknown
  Obtained from environmental sample
  misc_feature (1)..(522): n is a, c, g, or t
atgaaacacataattataggagccggagccgcggccatgagcgcggtaaggacaattctaaaagagaaaagcgacgacactgtactcatagtgtcgcaggatgaaaaagtttactcgcgctgtatgctgcacaaatttatttccggtgaaagggatgctgaaagcatcagctttattaacgatgatcttttaaaatcgccgagagtccagtggataaagggcaagactatcacctgcctggactccgccaataaaacagtttacgccggggaagaaaagatcgcttcaggagacactgtgcttatcgccaccggatcggacagcgtaacccctcccataggtgagcttaaaaccgctaagaacgcttttggccttcgccacctgtccgacgcccgcgccattgtggaacgcgctaagaaagcgaaagaaatcgtcgtcattggcgcggggctggttggccttgacgcgntgtacngcatccttgagtccccngcggcaaggaaaaaagatcaccgtagttga

SEQ ID NO: 2828 - protein, 173 aa, Unknown
  Obtained from environmental sample
  SIGNAL (1)...(14)
  DOMAIN (2)...(170): Pyridine nucleotide-disulphide oxidoreductase
  misc_feature (1)..(173): Xaa is any amino acid
MKHIIIGAGAAAMSAVRTILKEKSDDTVLIVSQDEKVYSRCMLHKFISGERDAESISFINDDLLKSPRVQWIKGKTITCLDSANKTVYAGEEKIASGDTVLIATGSDSVTPPIGELKTAKNAFGLRHLSDARAIVERAKKAKEIVVIGAGLVGLDAXYXILESPAARKKDHRS

SEQ ID NO: 2829 - DNA, 504 bp, Unknown
  Obtained from environmental sample
  misc_feature (1)..(504): n is a, c, g, or t
atgtatcagatggccgagatagaaggacaatttaatatggatataaagaatgaaatagatctggttacctgggaagataaatacgtcacagggattcaattgattgacgaccagcataaagagcttttttctcttaccaatgagcttttcaatgcctgtataggcagaaatgattatgagtcgcttgatggcgtatttaaagaaacaatggagcgaatggttgactatgttcgtttccactttagcgccgaacaggtactgttgcagcgaattaaatatcctgattatcaggaacataagaagcagcacgatacattggtgataaacattcttgaggctgtaaaggaatataatgaaggcaaaaaactcgtacctaaccagtttgtccgcactcttagggactggatattaagccacattgccctttccgaccagctttatgtgtcttatgttaatgctcagaagaaaagaggcttgctcagcgacaaggaacttaacggataa

SEQ ID NO: 2830 - protein, 167 aa, Unknown
  Obtained from environmental sample
  DOMAIN (31)...(91): Hemerythrin HHE cation binding domain
  misc_feature (1)..(167): Xaa is any amino acid
MYQMAEIEGQFNMDIKNEIDLVTWEDKYVTGIQLIDDQHKELFSLTNELFNACIGRNDYESLDGVFKETMERMVDYVRFHFSAEQVLLQRIKYPDYQEHKKQHDTLVINILEAVKEYNEGKKLVPNQFVRTLRDWILSHIALSDQLYVSYVNAQKKRGLLSDKELNG

SEQ ID NO: 2831 - DNA, 456 bp, Unknown
  Obtained from environmental sample
  misc_feature (1)..(456): n is a, c, g, or t
gtgaaagtagacgactaccttgcgactaacgtttcgggcatttacgccgcnggagatgtcgccgggcttcccggtatttggccaaacgcccagaaacagggggagatggccgcctacaacatgaccggtaccaggtgggcctatgatgaccgtttcgccattaaaaacaccgtcaactttttcggcttgttgtctctttcgcttggtgcaatcaatccatcagacggagaccagacttttgtaaaagaagacagaaacaattaccgcaagcttattttaagggacggtattccggttgggattatactccagggtgaaatcggcgaaaaaggtttctggctctaccttattaaaaacagaatacgcatcgacaatatgggcaaaagtccctggaacgtgagttacgcagatttttacggtgtcgaagcaaacggcgaatacaagtgggttgtttag

SEQ ID NO: 2832 - protein, 151 aa, Unknown
  Obtained from environmental sample
  misc_feature (1)..(151): Xaa is any amino acid
MKVDDYLATNVSGIYAAGDVAGLPGIWPNAQKQGEMAAYNMTGTRWAYDDRFAIKNTVNFFGLLSLSLGAINPSDGDQTFVKEDRNNYRKLILRDGIPVGIILQGEIGEKGFWLYLIKNRIRIDNMGKSPWNVSYADFYGVEANGEYKWVV

SEQ ID NO: 2833 - DNA, 858 bp, Unknown
  Obtained from environmental sample
  misc_feature (1)..(858): n is a, c, g, or t
atggccgagatcgccaacagattgggccttttggagctacagaggggctttgaggaacagcgctcggaagaggcgggtaaagaagcgggccaaataaaaaagcgagccaaagagatagattcaaagggctgggactgggacgcagaaatcaagaatctggaaaaagagttgcaggccgcccaagaagccctggatgaccaagacgcgctgctgaggagcgcggaagaatccgtcgcaaaatccgcaaaagaccacaagtccatcgaatcaaagctgaaagagctgcgatccaaacgcgaccaggcagtccaagaggctcttcaaagagaaaaggcgcgccaagagatcaacaaggaaatatcccagatggaagggcgcttggacgcgctaaaccacgaagaggcattgagggggccgcagctagagggcttcaaaaaagattttgaacgcatatccaaagaactagaagtggccgaggccaggtttgcagagatggaagaggccgtgtccattcaaactgaagcccgcgatgcagcaatggaggcactcaaaacgtgcgaaggcaaattcagggaggccgagggggccttgaaagcggaggaattgcggctggcacagctatccgatgcgctaaagtcggctcatagccccgcagcgttcaataaggcgctcaagtggatggcggacaaggggatgaatacgggcctgctgtttgattccctaaaaatagacgaagaatcgcgcccatatatggagcgcctgctgggttcatggacaagcgcggcatcgtgggaatctagttgggaagaactgtcgaaggtgccgggtcagccttggtgtccctggacattngcctaa

SEQ ID NO: 2834 - protein, 285 aa, Unknown
  Obtained from environmental sample
  misc_feature (1)..(285): Xaa is any amino acid
MAEIANRLGLLELQRGFEEQRSEEAGKEAGQIKKRAKEIDSKGWDWDAEIKNLEKELQAAQEALDDQDALLRSAEESVAKSAKDHKSIESKLKELRSKRDQAVQEALQREKARQEINKEISQMEGRLDALNHEEALRGPQLEGFKKDFERISKELEVAEARFAEMEEAVSIQTEARDAAMEALKTCEGKFREAEGALKAEELRLAQLSDALKSAHSPAAFNKALKWMADKGMNTGLLFDSLKIDEESRPYMERLLGSWTSAASWESSWEELSKVPGQPWCPWTXA

SEQ ID NO: 2835 - DNA, 711 bp, Unknown
  Obtained from environmental sample
  misc_feature (1)..(711): n is a, c, g, or t
gtggccgtacgtcctcccaaggtttatcctatcgtcgcgccggagatagagatggtgcttgtaaggggcggcaagtttaaaatgggatgtgtggacgaacaggataattgcgcaagcgacgagaggccgcgccacgaagtgcagctaaaggactattacatagggaagtaccctgtaacgcagaagcagtggtggtcggtgatgggggtgaatccggcatacagggagggggagaatttgcccgtcgagcaggtcagttgggacgaagttcaggagtttataaagaggcttaacgtgttgaccggcaagaagtaccgtttgcccacggaggcggagtgggaatacgccgcgcgcggcggggcgcgtggtttggggaagaagttctccggccatgattatttgtacgacgtggcctggtacgactacaacagcttcggattgacgcagccggtgggcacgaaagaaccgaatgagcttggcatatacgatatgataggcaatgtttgggagtgggtaggcgattggtacgacaggttctactatagggactccccgctgaagaatccggtcggccccaagtacgggaccgagcgggtgagccgcggttgcagtttcaactcgcaggagggccattgccgggagtcgttgcgtaattacaacaagccgggcgctcggacgatatatttagggtttaggttggtgcagcagtga

SEQ ID NO: 2836 - protein, 236 aa, Unknown
  Obtained from environmental sample
  DOMAIN (14)...(235): Domain of unknown function (DUF323)
  misc_feature (1)..(236): Xaa is any amino acid
MAVRPPKVYPIVAPEIEMVLVRGGKFKMGCVDEQDNCASDERPRHEVQLKDYYIGKYPVTQKQWWSVMGVNPAYREGENLPVEQVSWDEVQEFIKRLNVLTGKKYRLPTEAEWEYAARGGARGLGKKFSGHDYLYDVAWYDYNSFGLTQPVGTKEPNELGIYDMIGNVWEWVGDWYDRFYYRDSPLKNPVGPKYGTERVSRGCSFNSQEGHCRESLRNYNKPGARTIYLGFRLVQQ

SEQ ID NO: 2837 - DNA, 552 bp, Unknown
  Obtained from environmental sample
  misc_feature (1)..(552): n is a, c, g, or t
gtgagcgcctccgttttgagcctcgctgaagattcccgacattcccgtctttcgggggagaaaatttccgcaaccctgtccgcttcctatcttgccggcggcgggctttcgggagccccttttacctggcacttaatgcgggagcctgtgggcattgtccccggcggcgcggacggggcatggcgcaactggcgtttcgggccggaactgaacgacgggcgcggctatgtggggcagggggagggaaccctcggccctgacgggcaggcggttatcagccgcgaaacgcggagcgacggcgttgagggggcggtgtaccgctaccggcttgaggcttccgtgcaggatgccgcccggcaggagatcgcggcaagcgccgccgttttggttcatcccgccgcgtattacatcgcggcccgccttgacgcgggaacgcagaanaacgccgcgcaaacggaaggcggcgcgggagcggcggactactcggcgtattttctcagcgcgggcaaatctgctacgttaagctgggcgctggccgcgccggacggctag

SEQ ID NO: 2838 - protein, 183 aa, Unknown
  Obtained from environmental sample
  misc_feature (1)..(183): Xaa is any amino acid
MSASVLSLAEDSRHSRLSGEKISATLSASYLAGGGLSGAPFTWHLMREPVGIVPGGADGAWRNWRFGPELNDGRGYVGQGEGTLGPDGQAVISRETRSDGVEGAVYRYRLEASVQDAARQEIAASAAVLVHPAAYYIAARLDAGTQXNAAQTEGGAGAADYSAYFLSAGKSATLSWALAAPDG

SEQ ID NO: 2839 - DNA, 516 bp, Unknown
  Obtained from environmental sample
  misc_feature (1)..(516): n is a, c, g, or t
gtggcggtaagcttttccgcgtcgcagctggcatcgcttaaagaggcggttcgttacctgctggattatcccttcggctgccttgaacagatcaccgcccgccttttgcccgtcgccgcttttggggattaccttgaagcgttcgggcttccagtcccgcagaacagaaacgccagaggggacaacgccgtatggaatccgaaaaaactggttgaggacggacttgaggaaatcgcaaaatcgcagttgggcgacagttctttcccctactggccgggcgggtcaatcggcgacgcctatgtcagcatgagggttgcccatattgcggccattgccaaagcaaagggaatgaaagttcccgactcgctggatacccggcggcttgtttcctacattacctctgtcagtaacgatcccaaacactacatttcaatagaccccttccttaaaggctactccctgtggatcagggcaatgtaccgtgagcggatcggcacggagataagcgccttttga

SEQ ID NO: 2840 - protein, 171 aa, Unknown
  Obtained from environmental sample
  misc_feature (1)..(171): Xaa is any amino acid
MAVSFSASQLASLKEAVRYLLDYPFGCLEQITARLLPVAAFGDYLEAFGLPVPQNRNARGDNAVWNPKKLVEDGLEEIAKSQLGDSSFPYWPGGSIGDAYVSMRVAHIAAIAKAKGMKVPDSLDTRRLVSYITSVSNDPKHYISIDPFLKGYSLWIRAMYRERIGTEISAF

SEQ ID NO: 2841 - DNA, 717 bp, Unknown
  Obtained from environmental sample
  misc_feature (1)..(717): n is a, c, g, or t
atgaaagaaaaaacaatttccggtttatcaagcaaggcgcgtttgctcgcccttctgcgggaaaagaacggaggtcgcgcaagcggcagtcttctcgcgaaagaaatgggcatttcccgcgtcgcggtctggaaaactgttcaggctctggtacaggcaggttatttaatcgaaacaggcgacaacggctatctactttccccgaaaaacgagaaagactttttatacccttgggaattcggagaaaaggaaaatttattttttcattatttgaacaccggaagcacaatggacagggcgagggaacaggctttgcgcggggctgcggacggaagcgtttttacggctgaaaagcaaacatcgggcaggggcagaaccggcagaacatggatatcaaggcagggcgggcttttctttactatgcttgaacgtccgcgcctcgcgattgcggactattccctgctctcccttgttgcgcaaatcgccgtcgcacgcgttgtttcgtccgtttgcggaaaaaaggcgtatctccgctggcccaacgatatttacattaacaggcagaaaatcgcgggtgttactacggaaatttcgggggaaggcgatttaatttcatggctttcatgcggcgtgggcgtaaacattaacacccctgtcccttccgggcaggcgggtagctgcgcggaaattaccgggcatcctgtttcacgcgggtaa

SEQ ID NO: 2842 - protein, 238 aa, Unknown
  Obtained from environmental sample
  DOMAIN (12)...(65): HTH domain
  misc_feature (1)..(238): Xaa is any amino acid
MKEKTISGLSSKARLLALLREKNGGRASGSLLAKEMGISRVAVWKTVQALVQAGYLIETGDNGYLLSPKNEKDFLYPWEFGEKENLFFHYLNTGSTMDRAREQALRGAADGSVFTAEKQTSGRGRTGRTWISRQGGLFFTMLERPRLAIADYSLLSLVAQIAVARVVSSVCGKKAYLRWPNDIYINRQKIAGVTTEISGEGDLISWLSCGVGVNINTPVPSGQAGSCAEITGHPVSRG

SEQ ID NO: 2843 - DNA, 786 bp, Unknown
  Obtained from environmental sample
  misc_feature (1)..(786): n is a, c, g, or t
atgattactagcgatacaaatggccattcaaatgttaaagaaatgaaatataatatgtttgcggtatttttcaatctctccgcgcgcgattatcacgcgcctgatgagcagaataggcgtcaagttgatattagcgctgtttttataccggaaaaagacatccttgaacacgcaaaagggttgttaccgtttattgaacaaaagcagacgggattcagcgcaatctacaaagatgtgctgattgccgcgcaggatgttcccacacaagagcaatccgaaacgcagaagtctgtcgggcagaaaatcgccgcgatagtcggcggcgttgtgcagtgggaacaaagcaagggtatgttctatacgatacggacaaatggaacgcgtataccgtttgtgtatgaagcaagcggttttaagaaactcggttatctcggattgctggtatcaagcggacagattgagcccggcacagtattgttttgggacgaacctgagaacagcttgaacccggaactcatccctgaactcgttaatattctgcttgaattgtcacgcaacggcgttcaaatttttattgcgacccacagcgaaatcctcgcgagttattttgccgttaatcgtcaaaaaggcgacagcgtgatgttctattcgctgtacaaagacggtgagcaaataaaggcgaacgcaaacgaccgtttcgacatacttaaaccgaacaactctcaatctgagattgtgaatctttacgagaaagaaatagagaggggattgggcggcaatggataa

SEQ ID NO: 2844 - protein, 261 aa, Unknown
  Obtained from environmental sample
  misc_feature (1)..(261): Xaa is any amino acid
MITSDTNGHSNVKEMKYNMFAVFFNLSARDYHAPDEQNRRQVDISAVFIPEKDILEHAKGLLPFIEQKQTGFSAIYKDVLIAAQDVPTQEQSETQKSVGQKIAAIVGGVVQWEQSKGMFYTIRTNGTRIPFVYEASGFKKLGYLGLLVSSGQIEPGTVLFWDEPENSLNPELIPELVNILLELSRNGVQIFIATHSEILASYFAVNRQKGDSVMFYSLYKDGEQIKANANDRFDILKPNNSQSEIVNLYEKEIERGLGGNG

SEQ ID NO: 2845 - DNA, 606 bp, Unknown
  Obtained from environmental sample
  misc_feature (1)..(606): n is a, c, g, or t
ttgtctcgccgtccgagcttcccgtgggagcgattaccgcccttatcggcgcgccgttttttgcgtgggtctactttaggcggcggcgtaaggcacaggtgtaatatgcttgaagtaaaaaatttatccgcaggttatggcggcagtgcaatcaaagattgcgatgtaatacgtaatatcaatttgaaggcggaaaggggagagagtctttgcatacttggtcctaacgggagcggaaaaagcactttgcttaaatcaatagcccgtattattgattaccgagggtgcgtgttgatgaacggcgaagatatttccgctgtttcacgcaaagagttggcgaaaaagctcgccttgcttagccaaagtacgcaggtgttttttccttacacggtttatgaaacggtatcgttgggacgttacgcatattcgcagggctttttgaaaaatctttccgccgaagacagggaagttatagaagacattttgaaaaatactggacatttgggacaacaaagactgcatgatagacgaattgagcggcggagaattgcagagagtttttcttgccagaactttagcgcaaagccccgagttgattttacttga

SEQ ID NO: 2846 - protein, 201 aa, Unknown
  Obtained from environmental sample
  DOMAIN (67)...(190): ABC transporter
  misc_feature (1)..(201): Xaa is any amino acid
MSRRPSFPWERLPPLSARRFLRGSTLGGGVRHRCNMLEVKNLSAGYGGSAIKDCDVIRNINLKAERGESLCILGPNGSGKSTLLKSIARIIDYRGCVLMNGEDISAVSRKELAKKLALLSQSTQVFFPYTVYETVSLGRYAYSQGFLKNLSAEDREVIEDILKNTGHLGQQRLHDRRIERRRIAESFSCQNFSAKPRVDFT

SEQ ID NO: 2847 - DNA, 474 bp, Unknown
  Obtained from environmental sample
  misc_feature (1)..(474): n is a, c, g, or t
gtgaaatttcataaaatatttctcccggccattcgtctactttaccaaggagataaaacaatgaaaaacaacatcaaatttcgttttatgggcatttttaccatgctgataacatgcgctgtgttcgctgtggctgttatgctgctgtggaacgccctcttgccgcagattttcgcgcttccgcagattggctacctgcaagcggcaggcctgctaattttggcgcgtctgtttttcggaggcataggcggcgaattgcgaggcaatgccatgtaccggggagcgagaagagacgggcacccgtttcatcacggtaataaacttcgtgaaaagtggatgagcatgagtgaagaggagcgtaaagaattcatggaaaaagaaaaagacttttttgattttaaccggcgtttttcacattctcgtgatccttttcacaatgatgaaagagaaaagaggggcgaaggcaatgaataa

SEQ ID NO: 2848 - protein, 157 aa, Unknown
  Obtained from environmental sample
  misc_feature (1)..(157): Xaa is any amino acid
MKFHKIFLPAIRLLYQGDKTMKNNIKFRFMGIFTMLITCAVFAVAVMLLWNALLPQIFALPQIGYLQAAGLLILARLFFGGIGGELRGNAMYRGARRDGHPFHHGNKLREKWMSMSEEERKEFMEKEKDFFDFNRRFSHSRDPFHNDEREKRGEGNE

SEQ ID NO: 2849 - DNA, 693 bp, Unknown
  Obtained from environmental sample
  misc_feature (1)..(693): n is a, c, g, or t
atgcccacacgcgaagaatctttatcataccactctaccgggcgtcccggtaaaatagaggtcgtggccacaaagccctgccgcacgcaggccgacctctccttggcctacacgcccggcgtggccgagccgtgccgcgagatcgctaaggacgcctccgccgcgtaccgctacacggctcgcggcaacctcgtcgccgttatcaccgacggcaccgccgtgctcggcctcggcgacatagggccgctcgccggcaagcccgtcatggagggcaagggcgtcctcttcaaaaggttcgccgacatagacgtcttcgacatcgagctgagcgtcaaaagccccgacgagttcatacgcgtcgtcgagtcgatggaaccgacgttcggcggaataaacctcgaagacatcaaagcgccggagtgcttctatattgaggaggagctcaagaagcgcatgggcgtcccggtcttccacgacgaccagcacggcacggcgatcatctccggagcggcgctcctgaacgccgcgaaattgcaagacaagccgctcagcgaaatgagaatagtcttctccggcgccggcgttgcggcggtttcgtgcgcgtatctgtacgtgcgcctcggcgtaaaaatggaaaatatcacgatggtagactcccaaggcgtgatattcaaggtcgcgcggagggaatga

SEQ ID NO: 2850 - protein, 230 aa, Unknown
  Obtained from environmental sample
  DOMAIN (17)...(159): Malic enzyme, N-terminal domain
  misc_feature (1)..(230): Xaa is any amino acid
MPTREESLSYHSTGRPGKIEVVATKPCRTQADLSLAYTPGVAEPCREIAKDASAAYRYTARGNLVAVITDGTAVLGLGDIGPLAGKPVMEGKGVLFKRFADIDVFDIELSVKSPDEFIRVVESMEPTFGGINLEDIKAPECFYIEEELKKRMGVPVFHDDQHGTAIISGAALLNAAKLQDKPLSEMRIVFSGAGVAAVSCAYLYVRLGVKMENITMVDSQGVIFKVARRE

SEQ ID NO: 2851 - DNA, 375 bp, Unknown
  Obtained from environmental sample
  misc_feature (1)..(375): n is a, c, g, or t
atgatgagcgaactgattcatggcagcaccggtatcgacatacatccaggcgcccacatcggcgaatcgtttttcatcgatcacggaaccggcattgtcatcggcgagacggcagttatcggcaagaacgttaaactctatcagggcgttaccctgggggcgctttccgtaaaaaaagaagaaagcagccagaagcgccaccccactattgaggacgatgttaccatctattcccacgcaaccattttgggaggggagacagttatcgggcggggcagcgttatcggcggcaatgtgtggattaccgaatccgttccgcccaataccacggtctacaccagggccggggaacaggtattgcggcagcggacttaa

SEQ ID NO: 2852 - protein, 124 aa, Unknown
  Obtained from environmental sample
  misc_feature (1)..(124): Xaa is any amino acid
MMSELIHGSTGIDIHPGAHIGESFFIDHGTGIVIGETAVIGKNVKLYQGVTLGALSVKKEESSQKRHPTIEDDVTIYSHATILGGETVIGRGSVIGGNVWITESVPPNTTVYTRAGEQVLRQRT

SEQ ID NO: 2853 - DNA, 336 bp, Unknown
  Obtained from environmental sample
  misc_feature (1)..(336): n is a, c, g, or t
ttggacgcgccggtattgcccgccaatcataagcttattacccccgattgtccctggtgcggaaaacaaatagaggatattacatgcgccattgcggataaagagacaggccgccctatccattttgattgtgtgcttaaacgggttacagatatggtatccctggaaacaaatgacgctgtctgttacataggcggcgggcgttttggagtagtccattataacaatccgcctgatgtaaaagactttaccataaaaagaatcatagagtgggaagtgaaggataacagtactgtctggcgtatgccaataagtgagtacttttctattacctaa

SEQ ID NO: 2854 - protein, 111 aa, Unknown
  Obtained from environmental sample
  misc_feature (1)..(111): Xaa is any amino acid
MDAPVLPANHKLITPDCPWCGKQIEDITCAIADKETGRPIHFDCVLKRVTDMVSLETNDAVCYIGGGRFGVVHYNNPPDVKDFTIKRIIEWEVKDNSTVWRMPISEYFSIT

SEQ ID NO: 2855 - DNA, 450 bp, Unknown
  Obtained from environmental sample
  misc_feature (1)..(450): n is a, c, g, or t
atggttttgggcatttcctatgttcttttttttaagggaacatttttttacggcggtcttgccatcttgatcctggtaaacgttattcacttcatggcttccccgtaccttatggcatataactcgttgggaaaattaaacagaaatctcgaagacgtaggccgcacattgggtgtaggccgtttccgcatcattcgtgatgtgataattccgcagactaaacttacactgttggaaatgttttcttacttttttgtcaattcaatgatcacaatttccgcggtatcctttttaaacacggtgcgtaaccgtccgatatcccttatgattacgcagtttgaggcccagctatttcttgagggagcggcgtttgtttcagttcttattcttgtttgtaatttgtttgtcaaatactctgtacacttgattacaaagctaaataaaggataa

SEQ ID NO: 2856 - protein, 149 aa, Unknown
  Obtained from environmental sample
  misc_feature (1)..(149): Xaa is any amino acid
MVLGISYVLFFKGTFFYGGLAILILVNVIHFMASPYLMAYNSLGKLNRNLEDVGRTLGVGRFRIIRDVIIPQTKLTLLEMFSYFFVNSMITISAVSFLNTVRNRPISLMITQFEAQLFLEGAAFVSVLILVCNLFVKYSVHLITKLNKG

SEQ ID NO: 2857 - DNA, 801 bp, Unknown
  Obtained from environmental sample
  misc_feature (1)..(801): n is a, c, g, or t
atggaaaacttaagcgcggcattaacggtattcgcgctgataattgcgggcggatttttctctgtttttgattccgcgttatgcgcctgccgcaagacacggcttgaaaaagaaagcggaaaattatatagaacagttttaaaaataattgaaaatccgaaaaatatattgacagcctgccgtttatggagcggcgcgttaaaaataaccgcggttttaatagcgggaatgactgttatgcgcatttcagaaaccggaaaaaccggcgttccaaatacggctgcggcaatcgccgtatgcgtcattgcactggcggcggttgaaacgttgttttgcgtctggcttcccggccttatttcacgcgccgctcctgaaagaaccgcgtctttgcttttgccgctcgtaagaattctctgccttcccctgttaccggtaattctgcccgttttgaaattcacatcatcattcagttccgctttacttgcaaaaacccatgaagtcagtataaccgaagacgaacttcaaaaagaactgcacaatgtccttctggaaggggaaaaatccggcattgtagaaagtaaagagcggacaatggtggaaggggttttttaccttggcgaccggaatgtcggcgcttttatgacacaccgttctgaaatacaatgtctggacattaattcgccgtatgaagaaataaagcaaaaagccctggattcccgccatcaaagatgctatccggttatagacggaagccctgatgaaataggggagcgtcgatctgaggattatctctcgcgataa

SEQ ID NO: 2858 - protein, 266 aa, Unknown
  Obtained from environmental sample
  SIGNAL (1)...(29)
  DOMAIN (5)...(195): Domain of unknown function DUF21
  misc_feature (1)..(266): Xaa is any amino acid
MENLSAALTVFALIIAGGFFSVFDSALCACRKTRLEKESGKLYRTVLKIIENPKNILTACRLWSGALKITAVLIAGMTVMRISETGKTGVPNTAAAIAVCVIALAAVETLFCVWLPGLISRAAPERTASLLLPLVRILCLPLLPVILPVLKFTSSFSSALLAKTHEVSITEDELQKELHNVLLEGEKSGIVESKERTMVEGVFYLGDRNVGAFMTHRSEIQCLDINSPYEEIKQKALDSRHQRCYPVIDGSPDEIGERRSEDYLSR

SEQ ID NO: 2859 - DNA, 843 bp, Unknown
  Obtained from environmental sample
  misc_feature (1)..(843): n is a, c, g, or t
gtggaaatggtgaacggcattgtcggttacgcctgccatgttttttacggcgtcaaggccgtgcgctttgtcatcgggcgtaactgcaatctgaaatacggggcgcggcttatacattcggtgttaggcgataactcgaccgtgtcctgctgcgagatactcaataacctgatctttccagtgcacgaacagcaccacaacaactcttttttgatcgcaagccttatacaggggcagtccaacatagccgcggcggccaccataggcagcaaccacaacagcagggccaacgacggcgaattgcgcgcgaaacgggggttctggcccggactggcggtgaccttgaaacacccaagcgtcttcgcgtcgtttgtcattatcgccaaaggggaatacccctcggagctgaatatacccctgcctttctccctggtcgccaataacgtccataaaaacaggctggaactgtggccggcgtatttctggctttacaacctctacgctcttgagcgtaattcatggaagtcaaaagcccgcgaccgcagggttgtaaagctccagcatcttgagacggattaccttgcccccgatacggccgaggagataatatccggcctttcgattctggaaggctggctcgccgacgcgggttattcatcgacagacctgaccggcatggaaggcgcccatgaaatacgcatgataccatgccgccatctggagcgcggcaagcgcggccaggtggttaagcatccgctcagggcaatcgtcgcctaccgccttatgctccgctggtacgcggccaaaaccatagccgtttttcttgacgaagggcgtctttag

SEQ ID NO: 2860 - protein, 280 aa, Unknown
  Obtained from environmental sample
  misc_feature (1)..(280): Xaa is any amino acid
MEMVNGIVGYACHVFYGVKAVRFVIGRNCNLKYGARLIHSVLGDNSTVSCCEILNNLIFPVHEQHHNNSFLIASLIQGQSNIAAAATIGSNHNSRANDGELRAKRGFWPGLAVTLKHPSVFASFVIIAKGEYPSELNIPLPFSLVANNVHKNRLELWPAYFWLYNLYALERNSWKSKARDRRVVKLQHLETDYLAPDTAEEIISGLSILEGWLADAGYSSTDLTGMEGAHEIRMIPCRHLERGKRGQVVKHPLRAIVAYRLMLRWYAAKTIAVFLDEGRL

SEQ ID NO: 2861 - DNA, 858 bp, Unknown
  Obtained from environmental sample
  misc_feature (1)..(858): n is a, c, g, or t
ttgatcctccgacaggggtataaaagcgctggaaaaacctccaatcggggaacgagccataaccccgccttatttaccaggtcggtaagcaatgccagtgccgccgtagtaccgtgggttcccgccttttccaggcccatgtgttccaaaatccgggccacagaatcccccacttccggggtcggggccagggaaagatccagaataccaaaaggcacctccagccgtgtggcggcttccattcataagagttctgccataggggtaattttaaaagaggtctttttgatgatttcggcgatctcgtcaaagctggcatccttccgagattccagggcggccttgatcacccctggtccagagactcccacgttaaggcagctttccccttcaccgggaccatggaaagcgccggccataatgggattgtcctcgggggcattgcaaaacaccatcaatttggcgcagcccaagcagtccctgtcagccgtttttgtggcggtttctttgatcacctcgcccatgcggcggacggcatccatgttaataccgctgttggtggtagccgcatttacagaagcgcagacccgttccgtggaagcaagggcggcgggaatggaatggacaagttttttatcccccagggaaaaacccttttgtaccagggcggaaaaacctcctacaaaatcaatacccagttccgaggcgatttggtccagaatgcagcgcataggggacaaaatcatcgtcatcagaaacggcggctaccagagcaatgggggtaacggatacccgtttatgatgataggtattccgtattcaacttcgatttccaggcctgttcctcggccgatctga

SEQ ID NO: 2862 - protein, 285 aa, Unknown
  Obtained from environmental sample
  misc_feature (1)..(285): Xaa is any amino acid
MILRQGYKSAGKTSNRGTSHNPALFTRSVSNASAAVVPWVPAFSRPMCSKIRATESPTSGVGARERSRIPKGTSSRVAASIHKSSAIGVILKEVFLMISAISSKLASFRDSRAALITPGPETPTLRQLSPSPGPWKAPAIMGLSSGALQNTINLAQPKQSLSAVFVAVSLITSPMRRTASMLIPLLVVAAFTEAQTRSVEARAAGMEWTSFLSPREKPFCTRAEKPPTKSIPSSEAIWSRMQRIGDKIIVIRNGGYQSNGGNGYPFMMIGIPYSTSISRPVPRPI

SEQ ID NO: 2863 - DNA, 510 bp, Unknown
  Obtained from environmental sample
  misc_feature (1)..(510): n is a, c, g, or t
atgacgatgattttgtcccctatgcgctgcattctggaccaaatcgcctcggaactgggtattgattttgtaggaggtttttccgccctggtacaaaagggtttttccctgggggataaaaaacttgtccattccattcccgccgcccttgcttccacggaacgggtctgcgcttctgtaaatgcggctaccaccaacagcggtattaacatggatgccgtccgccgcatgggcgaggtgatcaaagaaaccgccacaaaaacggctgacagggactgcttgggctgcgccaaattgatggtgttttgcaatgcccccgaggacaatcccattatggccggcgctttccatggtcccggtgaaggggaaagctgccttaacgtgggagtctctggaccaggggtgatcaaggccgccctggaatctcggaaggatgccagctttgacgagatcgccgaaatcatcaaaaagacctcttttaaaattacccctatggcagaactcttatga

SEQ ID NO: 2864 - protein, 169 aa, Unknown
  Obtained from environmental sample
  DOMAIN (1)...(169): Uncharacterized ACR (DUF711)
  misc_feature (1)..(169): Xaa is any amino acid
MTMILSPMRCILDQIASELGIDFVGGFSALVQKGFSLGDKKLVHSIPAALASTERVCASVNAATTNSGINMDAVRRMGEVIKETATKTADRDCLGCAKLMVFCNAPEDNPIMAGAFHGPGEGESCLNVGVSGPGVIKAALESRKDASFDEIAEIIKKTSFKITPMAELL

SEQ ID NO: 2865 - DNA, 300 bp, Unknown
  Obtained from environmental sample
  misc_feature (1)..(300): n is a, c, g, or t
atggaagccgccacacggctggaggtgccttttggtattctggatctttccctggccccgaccccggaagtgggggattctgtggcccggattttggaacacatgggcctggaaaaggcgggaacccacggtactacggcggcactggcattgcttaccgacctggtaaataaggcggggttatggctcgttccccgattggaggtttttccagcgcttttatacccctgtcggaggatcaacgcatggcctccgcacttccctcctgttcaatcagcctggacaagctggaaggcatga

SEQ ID NO: 2866 - protein, 99 aa, Unknown
  Obtained from environmental sample
  misc_feature (1)..(99): Xaa is any amino acid
MEAATRLEVPFGILDLSLAPTPEVGDSVARILEHMGLEKAGTHGTTAALALLTDLVNKAGLWLVPRLEVFPALLYPCRRINAWPPHFPPVQSAWTSWKA

SEQ ID NO: 2867 - DNA, 882 bp, Unknown
  Obtained from environmental sample
  misc_feature (1)..(882): n is a, c, g, or t
atgttttatcttgcatatanttacnatagcataaaacacttgaataccaccagtagatttagtatgttaaaaataaccatgccgttaaatatcactcctgttacaaatcaccgcgaaagagaaaagggggttatcgtttacccggtgtactcgcggcgttcagcgggattgtctatcgggattaatttattccctgataaaaagagttgccccttcgattgcccgtattgcgaggtgtttcccttctcaagcaatgcggaattttctcttgaacaattagaaaacgatctacgccgcgccatttctggagcgcagaaacaaaatgttattattaaagatgtttgcttttcaggtaatggggagcctaccctctcccccgctttccccgacgcgctaaaattaacggagaatattcgcgcagaaactgctccttcggcgcggcttgttgttataactaatggcgcgggattgttacagccgcagattttttcgctcttaaaagaatacgctcttttacccaccacagacatctggttaaaagtggacgctgggactcaggattggtacaacaaaataaatcgctgtgctattccttatgaaaaacttatcaatgtaataaaagaatttgtttcctgtgccgttgtaacagtacagacaatgctctgtgttattaatggggaaaaaccgtcagagacggaaaagcaagcatgggaattgcttgtatgcgaattagcggcaaatacgttaaaaagcgcgaacaatgtcggcgataagattaatgccgttgttcgtaaagtgcagctttatggcaaagcgcgttccgcgcctgaagacccgttggcttcgcagttagcggaggattatcttgaagaaagagnctga

SEQ ID NO: 2868 - protein, 293 aa, Unknown
  Obtained from environmental sample
  misc_feature (1)..(293): Xaa is any amino acid
MFYLAYXYXSIKHLNTTSRFSMLKITMPLNITPVTNHREREKGVIVYPVYSRRSAGLSIGINLFPDKKSCPFDCPYCEVFPFSSNAEFSLEQLENDLRRAISGAQKQNVIIKDVCFSGNGEPTLSPAFPDALKLTENIRAETAPSARLVVITNGAGLLQPQIFSLLKEYALLPTTDIWLKVDAGTQDWYNKINRCAIPYEKLINVIKEFVSCAVVTVQTMLCVINGEKPSETEKQAWELLVCELAANTLKSANNVGDKINAVVRKVQLYGKARSAPEDPLASQLAEDYLEERX

SEQ ID NO: 2869 - DNA, 855 bp, Unknown
  Obtained from environmental sample
  misc_feature (1)..(855): n is a, c, g, or t
atgcacatgataccgacatgggatcagtggaaaaaactgagggactcagggattgatagctggttagcgcaaaaaaagcaaacagggcagataaaacacataggtttttcctttcatggctcggcgagcgaatacttaaaaatcctcggcgcttatgactgggaactttccctaatacaatacaattattttgatgaaaattatcaggcgggtgttatgggacttaaagccgccgccgcgagaatgcccgttgtaattatggagccgcttcttggcggaaaacttgcgacaggactgccgaaagacgccgttaaaatattcaaaaacgccgatgaaaatttaacgcctgccggctgggcgcttaactggctgtggaatcagaaggaagtaaccgcgattatttccggcatgaacgcaaaagaacaactggaagaaaatatctctcttgccgaaaaatcttccgccggaatgttagacgacgataaattagccgtttacaaatcggcgcttgatgttataaaacgttcctgcaaagtacgctgtacaggctgcaattactgtatgccgtgtcccgcaggcgtaaatattcccggttctttctcggcgtataatgccgtgtattcaatgggctactatgagggaataaaacaatacgctatgagtacgggaatgacgcaggaaaagagcagtagtccgcgtctgtgcgtaaaatgcggcaaatgcgaatcgcactgtccgcagagcattcagattatgaaagagcttgacgatgttaagaagaaaatggaaccgcctgttatcagatttatcggctattgcgcgtgggctgttgtggggaataagaggaagaagtga

SEQ ID NO: 2870 - protein, 284 aa, Unknown
  Obtained from environmental sample
  DOMAIN (228)...(251): 4Fe-4S binding domain
  misc_feature (1)..(284): Xaa is any amino acid
MHMIPTWDQWKKLRDSGIDSWLAQKKQTGQIKHIGFSFHGSASEYLKILGAYDWELSLIQYNYFDENYQAGVMGLKAAAARMPVVIMEPLLGGKLATGLPKDAVKIFKNADENLTPAGWALNWLWNQKEVTAIISGMNAKEQLEENISLAEKSSAGMLDDDKLAVYKSALDVIKRSCKVRCTGCNYCMPCPAGVNIPGSFSAYNAVYSMGYYEGIKQYAMSTGMTQEKSSSPRLCVKCGKCESHCPQSIQIMKELDDVKKKMEPPVIRFIGYCAWAVVGNKRKK

SEQ ID NO: 2871 - DNA, 729 bp, Unknown
  Obtained from environmental sample
  misc_feature (1)..(729): n is a, c, g, or t
atgcgctggttttttaaaggaattatatggttatttctcagcctaatacgaaggaacagtacattgtactcctttgcaaggtatatactatttttaaaaaaacatggaatcagggcggcatcaagaaaactcggcatttatatacaaaggcaattaagaaagaaattttcccggctggaaagagagctgacactaacaaacaggcaaagaacaaatcaggaaaatacggtttttccaaaacaaataaagttcagcattattacgccgttatataacacccacgaagaatatcttattacaatgattgaatctgttattgcgcaaacatacggtaattgggaactatgtttagctgatggaagcgatgaagaccataataaaatcatgtttatttgtaaaaaatacgctattagagacaacagaataaaatataaaaaacttgaaagaaatgggggaatttcggagacttcaaacagagccatagaaatgtccggcggagattatataggaattcttgagcatgatgacgcgcttcacccatccgcgttatacgaaataatgaaagtaatttgtgagaataacagcgattttgtttatacggacgaagcaatattttcttctaacggtaaaattacattaaggcactataaacccgattatgccgtagatactttatattcacacaattatatcagccgtttacggttctccagaactcggccaatctga

SEQ ID NO: 2872 - protein, 242 aa, Unknown
  Obtained from environmental sample
  DOMAIN (85)...(242): Glycosyl transferase family 2
  misc_feature (1)..(242): Xaa is any amino acid
MRWFFKGIIWLFLSLIRRNSTLYSFARYILFLKKHGIRAASRKLGIYIQRQLRKKFSRLERELTLTNRQRTNQENTVFPKQIKFSIITPLYNTHEEYLITMIESVIAQTYGNWELCLADGSDEDHNKIMFICKKYAIRDNRIKYKKLERNGGISETSNRAIEMSGGDYIGILEHDDALHPSALYEIMKVICENNSDFVYTDEAIFSSNGKITLRHYKPDYAVDTLYSHNYISRLRFSRTRPI

SEQ ID NO: 2873 - DNA, 396 bp, Unknown
  Obtained from environmental sample
  misc_feature (1)..(396): n is a, c, g, or t
atggtgtactcgattgacggtatagactggatggatgtcatagacagcaaactgaccagcatgcgcaaagtcatttatggcggtgacaagtttattgcaggggcagccgatggaagcagcaaaatggcgtattcgggaaacggcattgactggacagccgtaagtgacaaccaactagggaccaccacgggtatcgcctttggcaacggtaagtttgtagccggaggaaacataagctcaaacggcaaaattgtgtactcgacagacggtataaactggacagtcgtcgcggacagcaaatttggcacaggcaaccccatctgggcaattgcctattgtaacggcaagtttttcgcaatgggcgatagcggcagaatggcgtggtcggaagattaa

SEQ ID NO: 2874 - protein, 131 aa, Unknown
  Obtained from environmental sample
  misc_feature (1)..(131): Xaa is any amino acid
MVYSIDGIDWMDVIDSKLTSMRKVIYGGDKFIAGAADGSSKMAYSGNGIDWTAVSDNQLGTTTGIAFGNGKFVAGGNISSNGKIVYSTDGINWTVVADSKFGTGNPIWAIAYCNGKFFAMGDSGRMAWSED

SEQ ID NO: 2875 - DNA, 579 bp, Unknown
  Obtained from environmental sample
  misc_feature (1)..(579): n is a, c, g, or t
atgacttcgctcagaaaggggaaattcccgccggaaagatcagatcttcatggctgttttaaaaaatccgaaattgataaatgggtcaacgacagattatcgtcaaacagcttaaatccggtaaccggctcaattcacgctgaatcttttctttctttacaccggatactttttctaaatcactcgagcaagcgcgatgtacttcttactctggcggaaaatctgtccgccgctcctcaaataaagaacgggcaggaattgtctgttgaaatactaaagcgcgaggaacttatgagtacggctatcggctgcgggatagcgattccacatgtgcgcctttcgtctgttaccgaccttgttgtttccgtcggaataagccgcgcggacataatagggtttcacccgctggacgatgagcccgtgcggcttgtctttatgattgccgccgcgcaaagccagcacgcatattatctgcaaactctctcatggttcagcgcgcgccttaaaaacaaagaactgcgcgactcgcttttacaggcgcagacaccgcaggaagtttacaatcttttaacggcgtaa

SEQ ID NO: 2876 - protein, 192 aa, Unknown
  Obtained from environmental sample
  DOMAIN (49)...(192): Phosphoenolpyruvate-dependent sugar phosphotransferase system, EIIA 2
  misc_feature (1)..(192): Xaa is any amino acid
MTSLRKGKFPPERSDLHGCFKKSEIDKWVNDRLSSNSLNPVTGSIHAESFLSLHRILFLNHSSKRDVLLTLAENLSAAPQIKNGQELSVEILKREELMSTAIGCGIAIPHVRLSSVTDLVVSVGISRADIIGFHPLDDEPVRLVFMIAAAQSQHAYYLQTLSWFSARLKNKELRDSLLQAQTPQEVYNLLTA

SEQ ID NO: 2877 - DNA, 405 bp, Unknown
  Obtained from environmental sample
  misc_feature (1)..(405): n is a, c, g, or t
atgcccccggacattgcgacggtggcccaggcttgcgtaagcgccggggcggacgccctttcgctggtgaatacattcaaagccatggctatcaacatcaacacaagaaagccggtttttgataatgtcagcgcgggcctttccgggccctgtattaaaccaattgccttgcgtatggtttgggaattatacgacgtggtaaaagttcccattgttggcataggcggcatagcttgcgccgccgatgccctggagtaccttcttgccggagccgccgccatccaggtaggtagcgcgactttcgcccatccgccggcaatgaacgaaatcaaagccggcatcaaggcttatatgaaaaaaagggagtttgccaaaatcagtagcctgagtatcaggaagacttaa

SEQ ID NO: 2878 - protein, 134 aa, Unknown
  Obtained from environmental sample
  misc_feature (1)..(134): Xaa is any amino acid
MPPDIATVAQACVSAGADALSLVNTFKAMAININTRKPVFDNVSAGLSGPCIKPIALRMVWELYDVVKVPIVGIGGIACAADALEYLLAGAAAIQVGSATFAHPPAMNEIKAGIKAYMKKREFAKISSLSIRKT

SEQ ID NO: 2879 - DNA, 486 bp, Unknown
  Obtained from environmental sample
  misc_feature (1)..(486): n is a, c, g, or t
atgcctggcggccctaacaatagctatgcgctggatggatgctgcccaaatgattgcggtagtgctgctaacaacaatagatgcaatttggtagaggttccaaaaaaccagccttctgcaaaaatgtataaggatatgaattacagttggcctataaattcttgggaaataacggagcctagcaacggctatcagatatcttacataagtttgctttccaagtttgtggaaaagggcaacactacacccataaaaaagcagcctgttgttcaaaacttcaaaataacgcaaagcaaaaattccttgcaagtttttggcgataaggctctgcaagtgtccatatacagcgcgagcggaaaattgctgataaaagaacatagcaacaacggtaatctcaacataaatttgcagaacatcccaaacggagtttatatagtgcaaattctgagcggttcggttagagagacacgtgttatggcgaggtga

SEQ ID NO: 2880 - protein, 161 aa, Unknown
  Obtained from environmental sample
  misc_feature (1)..(161): Xaa is any amino acid
MPGGPNNSYALDGCCPNDCGSAANNNRCNLVEVPKNQPSAKMYKDMNYSWPINSWEITEPSNGYQISYISLLSKFVEKGNTTPIKKQPVVQNFKITQSKNSLQVFGDKALQVSIYSASGKLLIKEHSNNGNLNINLQNIPNGVYIVQILSGSVRETRVMAR

SEQ ID NO: 2881 - DNA, 888 bp, Unknown
  Obtained from environmental sample
  misc_feature (1)..(888): n is a, c, g, or t
gtggacattgattatatagaagtggggccgtacgtctccgagccgtttacgatcagcagatcgctcgtcacgccgaacgcgtcgccgaatgccagcaaagtgtacggttttttgcgggataacttccagaaaaaggtgataagcggcgtcatgaccaacaccgtgatggcgaatgacggccggtacacgccgaacactcccgacaatcaggcggagatggcgcatataaagagcgtttccggcaaactgccggcgctcatgggtctcgatttcatgcacagttccgggaaaagcgcggacgacgaatggttcttgggttatactagaggaacattggcgctcgccgaggagttcttcaataggggcgggattccaatatattgctggcattggcgggatccgctcaagaatactgatgatttctactcagatgagacgacattcgacttgaccaaggcgtttaagaactccaattatacggagaccaacttcaacgaaaacagcgctgagtacaaaggaatagttgcggacatcgaccgtatcgccggttatttgaaggggcttgccgacaaaggcgttccggtactttggcgcccgttgcacgaggcggctggcgggtggttctggtgggggcgcgacaaaaagcccgaaccgtgtcgggcgctgtatcggttcatgtttgacaggatggtgcgccaccacgggctcaacaatctgatatgggtgtggacgacggaggagtccgggcgggagcttgagtggtatccgggcgacgacgttgtggacatagtaggtcgcgactactatccgaacccggatcagcgcgcgaaggagcacggctcccgcgtggcctcttttgagaatataaagacgatctttcggcgctag

SEQ ID NO: 2882 - protein, 295 aa, Unknown
  Obtained from environmental sample
  DOMAIN (23)...(294): Glycosyl hydrolase family 26
  misc_feature (1)..(295): Xaa is any amino acid
MDIDYIEVGPYVSEPFTISRSLVTPNASPNASKVYGFLRDNFQKKVISGVMTNTVMANDGRYTPNTPDNQAEMAHIKSVSGKLPALMGLDFMHSSGKSADDEWFLGYTRGTLALAEEFFNRGGIPIYCWHWRDPLKNTDDFYSDETTFDLTKAFKNSNYTETNFNENSAEYKGIVADIDRIAGYLKGLADKGVPVLWRPLHEAAGGWFWWGRDKKPEPCRALYRFMFDRMVRHHGLNNLIWVWTTEESGRELEWYPGDDVVDIVGRDYYPNPDQRAKEHGSRVASFENIKTIFRR

SEQ ID NO: 2883 - DNA, 885 bp, Unknown
  Obtained from environmental sample
  misc_feature (1)..(885): n is a, c, g, or t
atgaatagtaataattgcataaattgttacgcatgtattatggggtgtcctgtgaaatactgcatggacggatcgggtgataagctgggtataaaccctgacctctgtgttgggtgcggaaactgtattatagtatgtacacacaatgccagaaaattagttgatgatacttctcattttattagcgatcttaagcagggacaaaagatggttgccgtagtggccccggccgtcgcgtcggtttttcctgaagaataccttaaattaaacggctggttaaaatccattggcgtggaggatttttttgacgtaagtttcggcgccgaattaacagttgtttcataccttgattacattaaaacaaaaaaaccggaaacggtaattgcccagccatgtcccgcgattgtcagctatattcagatttatcatcctgaattgcttccctaccttgcgccggcggatagtcccatgttgcatactataaaaatggtccgcgaatattatcctaaatacaaaaatcataaaattgccgtaatttccccatgtatcgccaaacggcgtgaatttgatgagactaagcatggggattacaacgtaacaatgttagctttaaaaaattatatcgagaaaaattatatcaatattacttcttttcctgaaatcaactatacaggcccacaagcggaacgcgcatcaggtttttccattccgggcggtttgctggataccgcggaacgctttgtccccggtatcaggcggaaaactttaaaaacggaaggagttcacacaatttatccgtatctaaaagaaatttcagaaatgatgcatgaaaatattgaattaccgttactgatagactgcctgaattgcgaaaataggttgtaa

SEQ ID NO: 2884 - protein, 294 aa, Unknown
  Obtained from environmental sample
  DOMAIN (61)...(282): Iron only hydrogenase large subunit, C-terminal domain
  misc_feature (1)..(294): Xaa is any amino acid
MNSNNCINCYACIMGCPVKYCMDGSGDKLGINPDLCVGCGNCIIVCTHNARKLVDDTSHFISDLKQGQKMVAVVAPAVASVFPEEYLKLNGWLKSIGVEDFFDVSFGAELTVVSYLDYIKTKKPETVIAQPCPAIVSYIQIYHPELLPYLAPADSPMLHTIKMVREYYPKYKNHKIAVISPCIAKRREFDETKHGDYNVTMLALKNYIEKNYINITSFPEINYTGPQAERASGFSIPGGLLDTAERFVPGIRRKTLKTEGVHTIYPYLKEISEMMHENIELPLLIDCLNCENRL

SEQ ID NO: 2885 - DNA, 546 bp, Unknown
  Obtained from environmental sample
  misc_feature (1)..(546): n is a, c, g, or t
atggtgaacataacagtggaggcatttttaagtttcaggcaacggctgatgaatttcttattctcaagggtcagccggattgaagacgcagaagatattgttcatgacgtgttctatcaatttaaccgtgcgaatgatttgattaacccgatagaaaatatttcagctcggctgttacgcgccgtccacatcagatttatcgatcactatattaagaagacaggtgagccactgcccgcgtcttatgatgatgacgatgacgatgccattgtcgagataacagacatcatctacggcgtagagtcaacgccggtattagagatgctgcgctcattggtttttgaagagatacaaacagcccttgccgatttgccaaaggaacagcgcgaagtttttgagctaaccgaattgctggactattccgtaatagaggtcgcggaaaaatcccatacgccggttatttcagtcctttcgtgcaagcattacgcggtaaaatttttgcgggagagattacaggaattgtatgccgatgttatttgcaaataa

SEQ ID NO: 2886 - protein, 181 aa, Unknown
  Obtained from environmental sample
  DOMAIN (114)...(167): Sigma-70, region 4
  misc_feature (1)..(181): Xaa is any amino acid
MVNITVEAFLSFRQRLMNFLFSRVSRIEDAEDIVHDVFYQFNRANDLINPIENISARLLRAVHIRFIDHYIKKTGEPLPASYDDDDDDAIVEITDIIYGVESTPVLEMLRSLVFEEIQTALADLPKEQREVFELTELLDYSVIEVAEKSHTPVISVLSCKHYAVKFLRERLQELYADVICK

SEQ ID NO: 2887 - DNA, 675 bp, Unknown
  Obtained from environmental sample
  misc_feature (1)..(675): n is a, c, g, or t
atgcattacgatcttgtgcttataaacggggtagcggtaactcctgaaaaatgctttaacgcggatattgccgtaaaagacgggaagattgcctttattggcagtttgaattcagacgacagcgcggatgaaatttatgatgcggacggcaagcatattcttcccggtataatagacgcccatgtgcatttccgcgatcccgggcttaccgaaaaagaagattttgaatcgggcagtatcgcggccgctttcggaggcgtaacctttgttgcggacatgcccaacgtattgccgcctacttccactacggagcgctttaatgaaaaggtgagtatcgcgaaagaaaagtcatatatcgatttcgggctttttgcgcttcttgtaagcggcaatacgtcagaaatggaagggatggaaagagcgggcgcgctcggatacaaggtatttctcggaacctcaacaggtgatatcgcgtccccggatttgggtactttaaccgaacagatgaaattaagcgccgccttcagattaacaataggatttcacgccgaanacagcgaaataaactcgttctatacggccaaatataaaaaaagaaacgataaaaaagagggcattttgctttcaaagcaaggccccttgttttcgaaacgctggcaattcaaaatgttataa

SEQ ID NO: 2888 - protein, 224 aa, Unknown
  Obtained from environmental sample
  misc_feature (1)..(224): Xaa is any amino acid
MHYDLVLINGVAVTPEKCFNADIAVKDGKIAFIGSLNSDDSADEIYDADGKHILPGIIDAHVHFRDPGLTEKEDFESGSIAAAFGGVTFVADMPNVLPPTSTTERFNEKVSIAKEKSYIDFGLFALLVSGNTSEMEGMERAGALGYKVFLGTSTGDIASPDLGTLTEQMKLSAAFRLTIGFHAEXSEINSFYTAKYKKRNDKKEGILLSKQGPLFSKRWQFKML

SEQ ID NO: 2889 - DNA, 306 bp, Unknown
  Obtained from environmental sample
  misc_feature (1)..(306): n is a, c, g, or t
ttgtatccgagcgcgcccgctctttccatcccttccatttctgacgtattgccgcttacaagaagcgcaaaaagcccgaaatcgatatatgacttttctttcgcgatactcaccttttcattaaagcgctccgtagtggaagtaggcggcaatacgttgggcatgtccgcaacaaaggttacgcctccgaaagcggccgcgatactgcccgattcaaaatcttctttttcggtaagcccgggatcgcggaaatgcacatgggcgtctattataccgggaagaatatgcttgccgtccgcatcataa

SEQ ID NO: 2890 - protein, 101 aa, Unknown
  Obtained from environmental sample
  misc_feature (1)..(101): Xaa is any amino acid
MYPSAPALSIPSISDVLPLTRSAKSPKSIYDFSFAILTFSLKRSVVEVGGNTLGMSATKVTPPKAAAILPDSKSSFSVSPGSRKCTWASIIPGRICLPSAS

SEQ ID NO: 2891 - DNA, 651 bp, Unknown
  Obtained from environmental sample
  misc_feature (1)..(651): n is a, c, g, or t
atgattattgtattgaaaccgcaggcgccagaggcgcaagtaaatgaaatccggcaaatagtgcggcaaaactggggtctgaacactgaggaactccagggcgaaaacacgagtatgctcgggctggtgggcgacaccacgcaggtttccgaagaactacttatgaggcacgagtgcgtggcgcgcgtggtgaaagtgtccgaaccctacaagctgccagggcggcggttccaccccgaggatacggtgctggacgtgggcgggcgcaaaatcggtagcggtttttttgcggtaatggcagggccttgctctgtcgagagcgaggagcagattctgtctatcgcgcaggacgtggcgttttcgggggcgcagtttttgcgcggcggggcgtttaaaccacgcagttcgccatattcgtttcaagggcttggattggatggactggaattgcttaaaatcgcgcgcgaaaaaaccggtctgccaatcgttacggaaattatgtcgtcggaatatgtagacgtattcgcgagggacgtggacataatccaagtgggcgcgcggaacatgcaaaactttacgctgttgcgagagctgggtcggactggcaagccaattctgataagcngggggccgtcctctcggccgatctga

SEQ ID NO: 2892 - protein, 216 aa, Unknown
  Obtained from environmental sample
  DOMAIN (81)...(216): DAHP synthetase I family
  misc_feature (1)..(216): Xaa is any amino acid
MIIVLKPQAPEAQVNEIRQIVRQNWGLNTEELQGENTSMLGLVGDTTQVSEELLMRHECVARVVKVSEPYKLPGRRFHPEDTVLDVGGRKIGSGFFAVMAGPCSVESEEQILSIAQDVAFSGAQFLRGGAFKPRSSPYSFQGLGLDGLELLKIAREKTGLPIVTEIMSSEYVDVFARDVDIIQVGARNMQNFTLLRELGRTGKPILISXGPSSRPI

SEQ ID NO: 2893 - DNA, 321 bp, Unknown
  Obtained from environmental sample
  misc_feature (1)..(321): n is a, c, g, or t
ttggtttattcttatatgtctatttttgagaatagtaataatccaaataaaaaacaccttaaaattatttttaacttttttaaaaatgcgactcaatttgtgaatgatgcagaaatgcagcgagttgaagaaattgccaaaagtgtggcgaaacagaatattaaaaataaagatgctttgcatattgcaagtgcgattttgtctaaatgtaaatattttataacaactgatgacataatcttgaaaagatataaaggcaacgaaatagtagtatgttcgcctatagaatttctaaatttttgggagagagaaaatgcgtag

SEQ ID NO: 2894 - protein, 106 aa, Unknown
  Obtained from environmental sample
  misc_feature (1)..(106): Xaa is any amino acid
MVYSYMSIFENSNNPNKKHLKIIFNFFKNATQFVNDAEMQRVEEIAKSVAKQNIKNKDALHIASAILSKCKYFITTDDIILKRYKGNEIVVCSPIEFLNFWERENA

SEQ ID NO: 2895 - DNA, 828 bp, Unknown
  Obtained from environmental sample
  misc_feature (1)..(828): n is a, c, g, or t
gtgccggcgttctggagcaaaatcgcttctgatattatagctcaaaaatatttccgcaaggcgggagtccccacggataaaatctacgaatggaagaggtggcttcccgcggccgaaaatcccgaagacccgggcaataatctgcccacggacggctgtgagcatgacgcaagacaggtctttcaccggcttgcctacacttggatggattggggcaggcggaacaattactttgacggcgaggaggacgagaaggcgttttatgacgagacctgttacatgctggctcatcagttcgccgcgcctaacagcccgcagtggtttaacaccggtttgtacgctgtttatgggatcgacgggccggcgcaggggcatttttattttgatcctgaaaagaacgaagttgtaaaatcagagagcgcttacaggcggccccagccgcacgcgtgttttattctttccatagatgacgatcttgtgaacgagggcggcatcatggatctgatgacccgtgaggcgaggcttttcaagtacggttccgggacgggttccaatttttcgcgcattcgggggttgaatgaaaaactttcaggcggcggttattcgtcggggcttttgtcgtttttgaaagtgggagaccgttcggcttctgcgattaaatcgggtgggactacccgccgcgccgccaagatggttaccctcgatatcgatcatcccgatgttgagaattacatcaactggaaatcaggggaggaacacaaagtcgcctctatggtaacaggttctcttattttgaagaaacatatcgacgggataaaaaagccctga

SEQ ID NO: 2896 - protein, 275 aa, Unknown
  Obtained from environmental sample
  DOMAIN (1)...(98): Class II vitamin B12-dependent ribonucleotide reductase
  misc_feature (1)..(275): Xaa is any amino acid
MPAFWSKIASDIIAQKYFRKAGVPTDKIYEWKRWLPAAENPEDPGNNLPTDGCEHDARQVFHRLAYTWMDWGRRNNYFDGEEDEKAFYDETCYMLAHQFAAPNSPQWFNTGLYAVYGIDGPAQGHFYFDPEKNEVVKSESAYRRPQPHACFILSIDDDLVNEGGIMDLMTREARLFKYGSGTGSNFSRIRGLNEKLSGGGYSSGLLSFLKVGDRSASAIKSGGTTRRAAKMVTLDIDHPDVENYINWKSGEEHKVASMVTGSLILKKHIDGIKKP

SEQ ID NO: 2897 - DNA, 678 bp, Unknown
  Obtained from environmental sample
  misc_feature (1)..(678): n is a, c, g, or t
ttgatggactgcgacactacgggaattgagcctgatttcgcccttgtcaaatttaaaaatctcgccggcggcggccagtttaaaataattaatcaatctgttcctatcgctcttgaaacgctcggctattcgcctgccactatcgaggaaattgtcgcctacgccatgggcagaaaaacgcttaacggcgctcccgccatcaatgttgaaagccttaaagcaaaaggttttactcccgaggcgatacaggcggcggaagacgcggtaaagacggcgaccaatctggaaggcgtttttactccgtgggtgcttggcaaatcgtttgtggagaaggtactgaaggttcccgaatcgacatgggcgcttgcgggtttttctcttcttaaacatcttgagtttgtaaaggaagatattgaggaagcggagttgttcgcctgcggcactatggctcttgaaggcgctcccggccttaaaaaagaacattatgtgatctttgacacggcaaatccttcgggtaaaaagagcaagagatcgattccgtggacggcgcatatcggcatgatggctgcggttcagccttttatttccggcgcgatttccaaaacgatcaatatgccgaacggcgcgaattacgacgatgtaaagggcgcttatatgctctcgggaagaacgggctaa

SEQ ID NO: 2898 - protein, 225 aa, Unknown
  Obtained from environmental sample
  misc_feature (1)..(225): Xaa is any amino acid
MMDCDTTGIEPDFALVKFKNLAGGGQFKIINQSVPIALETLGYSPATIEEIVAYAMGRKTLNGAPAINVESLKAKGFTPEAIQAAEDAVKTATNLEGVFTPWVLGKSFVEKVLKVPESTWALAGFSLLKHLEFVKEDIEEAELFACGTMALEGAPGLKKEHYVIFDTANPSGKKSKRSIPWTAHIGMMAAVQPFISGAISKTINMPNGANYDDVKGAYMLSGRTG

SEQ ID NO: 2899 - DNA, 552 bp, Unknown
  Obtained from environmental sample
  misc_feature (1)..(552): n is a, c, g, or t
atgatcgagaaggtcatcaagaaggtcatcccggcgaagcttttggacgccaagaccacctaccacatcaatccgaccggcaagttcgtggtcggcggcccccacggggacacgggtgtgacggggcgtaagatcatcgtggacacctacggcggctacggcgcccacggcggcggggccttctccggcaaggacccctccaaggtggacaggagcgccgcctacgcggcccgctgggtggccaagaacttggtggcggcgggcgtggcgacgcgctgcttgatccaactctcctacgccataggcgtggctaagccgatctcgatacacgtggacacctacggcacgggcaaaatagccgacagcgagatagtgcgcatcataaacaagctgttcgacctgaccccctccggtataatcaagcgcctgaacctaaaacgcccgatttacagggagacggcgagaaacggccactttggccgcgaactgccggagttcacttgggaggcgttggatatggcggacaagattaggaaagaggcgaagctgtag

SEQ ID NO: 2900 - protein, 183 aa, Unknown
  Obtained from environmental sample
  DOMAIN (31)...(170): S-adenosylmethionine synthetase, C-terminal domain
  misc_feature (1)..(183): Xaa is any amino acid
MIEKVIKKVIPAKLLDAKTTYHINPTGKFVVGGPHGDTGVTGRKIIVDTYGGYGAHGGGAFSGKDPSKVDRSAAYAARWVAKNLVAAGVATRCLIQLSYAIGVAKPISIHVDTYGTGKIADSEIVRIINKLFDLTPSGIIKRLNLKRPIYRETARNGHFGRELPEFTWEALDMADKIRKEAKL

SEQ ID NO: 2901 - DNA, 591 bp, Unknown
  Obtained from environmental sample
  misc_feature (1)..(591): n is a, c, g, or t
ttggcgcaggagttgtcaggcgcaagttccgctaacgcgccgaaaaatgtccgctatgccgccgccatgtttgaagctctgcgtttgtacggtataagctatgtggtagttcccgcgacatcctacaaaaatctttcggctaacgaggcggctttggataacgtaagctatccgtatcaagcgttatactaccgaggcggcgactgcacatatctttcgatactttattgttcgctgcttgaagcggtagatgtagaaaccgcttttatcacagttcccggacacctttacctagcctttgaagtaggcgataacaactggcagaagggtaacaaggacataatcgaaattgacggcaaacgctggctgcctgtggaaattaccattcccggcgaaggatttaaccgcgcgtggaaaacaggcgcgggagaatggcggcgttacggaaaagaagccgctctttacccaatccgcgaagcgtgggaattgtacccatctgtcaccatccccgcttccggcgatcacccgcccgaaatgccggacgcgtcaagcatagtgcgcgcaatggaaacagaactgaaaaaacaataa

SEQ ID NO: 2902 - protein, 196 aa, Unknown
  Obtained from environmental sample
  misc_feature (1)..(196): Xaa is any amino acid
MAQELSGASSANAPKNVRYAAAMFEALRLYGISYVVVPATSYKNLSANEAALDNVSYPYQALYYRGGDCTYLSILYCSLLEAVDVETAFITVPGHLYLAFEVGDNNWQKGNKDIIEIDGKRWLPVEITIPGEGFNRAWKTGAGEWRRYGKEAALYPIREAWELYPSVTIPASGDHPPEMPDASSIVRAMETELKKQ

SEQ ID NO: 2903 - DNA, 789 bp, Unknown
  Obtained from environmental sample
  misc_feature (1)..(789): n is a, c, g, or t
atggcagcagttgtaaaggatctggttcagttaaacaccgacattcaggaacaaaaggaaaggatagataccgttgattttaaaatggtcaccttttctcttgggggcaaggaatatggcgtagatattatgaatgtcaaggaaatcgccaaggcggacaagtttacctatgtccccaatgcggcttcctttgttcagggggtttataatcttcgcggcgatattatcccgatcatagatcttcgtttgttctttcatttgccggctgaaaagaaaaaggacggtcttgagaacatgttgattctccgtataggagatcgggtttatggtacgattgtagacaagatcgacaaggtagtggggatagattcagaaaatatccagccgcctcatcctatttttggggatattaacatcaagtttataagcggcgtagtggagaaaaacgaaaccctttacattattctggatgtgattaggatattttccattagcgaggatgacaagcaaaaacccaggggagccgttgaatccaccggtcccggaaattattttcctcctcctgatggcgcggctcgtgaggctaatgttgaggaaaaggtgacgctttccgacaatactttgagctttataaaggaaagcctgccgcatcttaagcagttctatcccagcgatctgaacgaagaatggatgcaccgtcgttttgcggaatggagtactagccgtacaggagacgcgttgcagcttaagagcatgaagaagcggaagaatccttcactctcgcgataa

SEQ ID NO: 2904 - protein, 262 aa, Unknown
  Obtained from environmental sample
  DOMAIN (28)...(166): CheW-like domain
  misc_feature (1)..(262): Xaa is any amino acid
MAAVVKDLVQLNTDIQEQKERIDTVDFKMVTFSLGGKEYGVDIMNVKEIAKADKFTYVPNAASFVQGVYNLRGDIIPIIDLRLFFHLPAEKKKDGLENMLILRIGDRVYGTIVDKIDKVVGIDSENIQPPHPIFGDINIKFISGVVEKNETLYIILDVIRIFSISEDDKQKPRGAVESTGPGNYFPPPDGAAREANVEEKVTLSDNTLSFIKESLPHLKQFYPSDLNEEWMHRRFAEWSTSRTGDALQLKSMKKRKNPSLSR

SEQ ID NO: 2905 - DNA, 603 bp, Unknown
  Obtained from environmental sample
  misc_feature (1)..(603): n is a, c, g, or t
gtggtcttaagagtagtttcaaagctgtcaaaaagggagaaaatatccccgtacttttcgttgatatctttgcgcacatcctttacggatttcccttcctggatgtttcccagatattcaggaagagtatcaaacaaacttttgattttttccctgtataccccttctatagtgtgcaactgcgcctgtagttccccaaactgcatgcttatctggttaaaagtagcttttgtaataacggtttcggaaaccaggttaagaagatcgtcgatacgctttgaatccacccggagtatggaaccggcttcttttccggcttttttggcgtcttccgaggctgaagcggcagcggcgggttttggcgcagcagcggcaggcgcggcagcagcaacagcaggttttggcgcagcagcggcaggcgcggcagcagtagcggcaggttttggcgcagcagcggcaggcgcggcagcagcggcagcagaggttatgagcggttttggcgcacccggcttacttagatcgataatatccgcgctaagtgaaacatccggaattaaaacatatttcttgatttcttccggttcttttgtggaagcaacgtaa

SEQ ID NO: 2906 - protein, 200 aa, Unknown
  Obtained from environmental sample
  misc_feature (1)..(200): Xaa is any amino acid
MVLRVVSKLSKREKISPYFSLISLRTSFTDFPSWMFPRYSGRVSNKLLIFSLYTPSIVCNCACSSPNCMLIWLKVAFVITVSETRLRRSSIRFESTRSMEPASFPAFLASSEAEAAAAGFGAAAAGAAAATAGFGAAAAGAAAVAAGFGAAAAGAAAAAAEVMSGFGAPGLLRSIISALSETSGIKTYFLISSGSFVEAT

SEQ ID NO: 2907 - DNA, 345 bp, Unknown
  Obtained from environmental sample
  misc_feature (1)..(345): n is a, c, g, or t
ttgatcagatcggccgagcttgatatgatagaatcggtattgaaggatgaatatgaaatatcgactgccttgtcaggcaaggcggcgatgggcttgttctatcagggccttattccgcaattaattttgttggatttaattatgccggatatggacggatgggacacatacaaaaggataaaagctattagcaacttgcatgatattccaatcgcgtttattacgtcgtcagacgatccaaaggatattaaacacgcgcaggaaattggggcggttgattatattaaaaagccttataataaagatgagcttagaaaaagaacagcaagaattttaaaaaaataa

SEQ ID NO: 2908 - protein, 114 aa, Unknown
  Obtained from environmental sample
  DOMAIN (7)...(109): Response regulator receiver domain
  misc_feature (1)..(114): Xaa is any amino acid
MIRSAELDMIESVLKDEYEISTALSGKAAMGLFYQGLIPQLILLDLIMPDMDGWDTYKRIKAISNLHDIPIAFITSSDDPKDIKHAQEIGAVDYIKKPYNKDELRKRTARILKK

SEQ ID NO: 2909 - DNA, 471 bp, Unknown
  Obtained from environmental sample
  misc_feature (1)..(471): n is a, c, g, or t
ttgttgatcgaacaggaagaattacaaactctgattccgcacaagggaagaatgatgctcctcaacagggtaatagaatacgatattgaacatagtatccgggcggaatatactgtcacaaaggattgtcttttttacgatcctgttttggacggcgtgccctcgtgggttggttttgaatttatggctcaggcaatttcagctcttacaggaatcaggaaaagggcaaagggagaaaaacctaatatcgggtttatattaagcatcccgtccatacggatggaaattccgttatttaagaacggcagtttggtagaggttcgcgtggaagaaattgattgtaccgatatgatttctacctatgtaggaggggcctttttggaaaacaaaaaggttatggaaggaaaattgatggttatggaagtgaacgatgatagatttaaaaatctaataggggagcggattaattga

SEQ ID NO: 2910 - protein, 156 aa, Unknown
  Obtained from environmental sample
  DOMAIN (12)...(136): FabA-like domain
  misc_feature (1)..(156): Xaa is any amino acid
MLIEQEELQTLIPHKGRMMLLNRVIEYDIEHSIRAEYTVTKDCLFYDPVLDGVPSWVGFEFMAQAISALTGIRKRAKGEKPNIGFILSIPSIRMEIPLFKNGSLVEVRVEEIDCTDMISTYVGGAFLENKKVMEGKLMVMEVNDDRFKNLIGERIN

SEQ ID NO: 2911 - DNA, 849 bp, Unknown
  Obtained from environmental sample
  misc_feature (1)..(849): n is a, c, g, or t
atggataactcgctaaaaaattattatacgaccaagtatttacnagaaacggttaacgcaatcgaaaaaatttattccgcttcggcggccctggaacgccaggcggcatactactattatttcgttgtagacgccgaacttaaacgcggaataaccgcaagaacggcggaattggaaaaaggtagaaattatcttaacggtcaaaaacggacaagagccgacggttccacggtaacagatcttttcccctcggaagcgctggaaacgcttaccgcaatgctcgcttcgctgtcagccgatttggaacgcgggaattccgcgattgcctattacagaaatgaaacaagactggttttaaccgacgaacaaatcactgaaataaagaatagctgtgaaaaaagcatagccgaactgaacacgctccgcactcagggcgtaacgcttcgtaccaccgcgaactcaaggacaacccaggccgaagccttcaggcaggaaggggagaggcttttaagggaggcgcaaaccgcctaccgttcccagaactttgacacagcaagggacaggcttcaaagggcgtcggaacgttttaacagttcgcttgaggtgcagcagtccgcgtccctgcgccagtcatgggatacccagcttttcaatttagggcaggcgatcaacgcttcagaaaacgaggctataatcgcggaagtgcgtaatcttgtaaaccgcgcccgcgcctcttactttgagggaaattttcaacaggcggaagacggccttatcagggcaagaagcagatggcgcgtaacaaacccggatgaaaacgaggaaattctttactggctgggcatgtaa

SEQ ID NO: 2912 - protein, 282 aa, Unknown
  Obtained from environmental sample
  misc_feature (1)..(282): Xaa is any amino acid
MDNSLKNYYTTKYLXETVNAIEKIYSASAALERQAAYYYYFVVDAELKRGITARTAELEKGRNYLNGQKRTRADGSTVTDLFPSEALETLTAMLASLSADLERGNSAIAYYRNETRLVLTDEQITEIKNSCEKSIAELNTLRTQGVTLRTTANSRTTQAEAFRQEGERLLREAQTAYRSQNFDTARDRLQRASERFNSSLEVQQSASLRQSWDTQLFNLGQAINASENEAIIAEVRNLVNRARASYFEGNFQQAEDGLIRARSRWRVTNPDENEEILYWLGM

SEQ ID NO: 2913 - DNA, 669 bp, Unknown
  Obtained from environmental sample
  misc_feature (1)..(669): n is a, c, g, or t
gtgctgcgcagccacgtggtggtgggcacactgacggacatcggcgaagacaacgtcatattcccccacgcctgcgtgggtctcgaatgccaggacatcagctacaagggcgaacctacgcgcctgattgtggggaaccgcaacgtgatacgcgaatcctgcacactgcaccgggccaccacaaagggcgacggcactacaagggtgggcgacgacaacctgctgatgacgggagtccacatcgcgcacgactgcatcgtggggaacaacatcattatggccaacagtgcctcgcttgccggccacgtagtggtgggcgacttcgtcaacatggccgggttctgcgcagtccagcagttcggcagggtgggcaaccacgcctttgtgggcggcttcaccacggccagcatggacgtgctgccctacatgaagacggttggcacgcgggaggccaaaagctatggggtcaacgtcattggtcttcggcgcaggggcttttcggaagagaccattaacgccctgcagcacgcgcacaggattctcttcggcatgggcctactccgcgaggaagcaatggaaaaggcggcggctgaactgggcagcgtcccagaggtgacctacctgctggacttcatccgcagcagcaagcgcggcgtcatccggggctga

SEQ ID NO: 2914 - protein, 222 aa, Unknown
  Obtained from environmental sample
  misc_feature (1)..(222): Xaa is any amino acid
MLRSHVVVGTLTDIGEDNVIFPHACVGLECQDISYKGEPTRLIVGNRNVIRESCTLHRATTKGDGTTRVGDDNLLMTGVHIAHDCIVGNNIIMANSASLAGHVVVGDFVNMAGFCAVQQFGRVGNHAFVGGFTTASMDVLPYMKTVGTREAKSYGVNVIGLRRRGFSEETINALQHAHRILFGMGLLREEAMEKAAAELGSVPEVTYLLDFIRSSKRGVIRG

SEQ ID NO: 2915 - DNA, 708 bp, Unknown
  Obtained from environmental sample
  misc_feature (1)..(708): n is a, c, g, or t
atggactatgtaagcaggattcgcgagaatgttatgcaaagcaggcaggatttgcgcgaaattgacggtgttaaatattatgtcgcttttacaaaattaaaagcggacgcgtccattgtaattacaagaattgaatacgaaaaaatattcgaggaaatttacgcggtaacgcgccgtaatatatatttatccgtcgttatcattttagtatcgatactttttatccgctatttttccagagccatttccggtgatttgttaattctctgcgccgccgcgcaaaaacttgaaagcggcgattttaacctcgatttagagccaagatcccgcgatgaaatcggttttcttacatacaattttcagcgtatgagcgccgcgttaggcgcttttgggcagtttgcaaaccgcgaaattgcgcttaaagccatgcgcggcgaaataaaacccggcggcgcgcttaaaaacgcctcaatttcattctgcggcattcgcggcttttcccaaagatataaaaatttcgcgaatgaattcggcagggacgcctgcgataaacttgttttatggcttaacgaatattttacaaaagcggcggattgcgtggaaaaaacacacggcgttgtggacaaatttatcggcgatactgttatggctcattggggaacggcggacacttccggcactccggcaaaagacgctttaactgcgtaa

SEQ ID NO: 2916 - protein, 235 aa, Unknown
  Obtained from environmental sample
  DOMAIN (60)...(129): HAMP domain
  misc_feature (1)..(235): Xaa is any amino acid
MDYVSRIRENVMQSRQDLREIDGVKYYVAFTKLKADASIVITRIEYEKIFEEIYAVTRRNIYLSVVIILVSILFIRYFSRAISGDLLILCAAAQKLESGDFNLDLEPRSRDEIGFLTYNFQRMSAALGAFGQFANREIALKAMRGEIKPGGALKNASISFCGIRGFSQRYKNFANEFGRDACDKLVLWLNEYFTKAADCVEKTHGVVDKFIGDTVMAHWGTADTSGTPAKDALTA

SEQ ID NO: 2917 - DNA, 804 bp, Unknown
  Obtained from environmental sample
  misc_feature (1)..(804): n is a, c, g, or t
gtgcaggtatgttcacaacatcttcttgaatcgcttggcatgaaagacaaaattgaaggaaggcgcgagcttatcgcgggaatcaaccatatggcatggcttttggatattcgcgacaaaaacaatgccgacctctaccctgaaatccgcgcaaaagccaaagcgaaaaacgctgcggaaaaacacggtgacatggttcgttttgattacattgaaaaactggggtattactgcaccgaatccagcgaacacaacgcggaatataacccgttttacataaagggaaaatatcctgaactaatagaacgctataatattccgctggacgaatacccgcgccggtgcatcaatcaggtaaacggctggaaggcggaatacgaaagcctcgcaaccaaagacacgctggatcacaaacgctcccacgaatatgcctcgcacattatggaagccattgttaccggaaaacattactccattggcgggaacgtgatcaacacaggcgggctcatcgaaaacctggaccgcgaagcctgcgtagaagtcccgtgccttgttgacggttccggcattaaaccatgccgcgtaggaaagctgcccgttcaacttgcggcgatgaacatgacaaacgtgaatgttcagcttgttaccattgaagcggcgcacaccaaaaaacgcgagcacatttaccatgccgccatgctggacccgcacacgcaatcagagctttcgcttgatcaaatacgttttatggtagatgaattaatcgaagcgcacgggaattggctgcctaaatataccggctag

SEQ ID NO: 2918 - protein, 267 aa, Unknown
  Obtained from environmental sample
  DOMAIN (1)...(238): Family 4 glycosyl hydrolase
  misc_feature (1)..(267): Xaa is any amino acid
MQVCSQHLLESLGMKDKIEGRRELIAGINHMAWLLDIRDKNNADLYPEIRAKAKAKNAAEKHGDMVRFDYIEKLGYYCTESSEHNAEYNPFYIKGKYPELIERYNIPLDEYPRRCINQVNGWKAEYESLATKDTLDHKRSHEYASHIMEAIVTGKHYSIGGNVINTGGLIENLDREACVEVPCLVDGSGIKPCRVGKLPVQLAAMNMTNVNVQLVTIEAAHTKKREHIYHAAMLDPHTQSELSLDQIRFMVDELIEAHGNWLPKYTG

SEQ ID NO: 2919 - DNA, 789 bp, Unknown
  Obtained from environmental sample
  misc_feature (1)..(789): n is a, c, g, or t
atggacgaagatcgctatatgcttgtagttaacgcttcgaaccgcgagaaagacgcagcgtggattcggagccgcatcaatagcgttgccaataatgccacatttgaggatctctccgattcctatggtcagatagcccttcagggaccggcgtccgtagccattctggcttctctttccgaaaccattcctcagaaatattacaccttcatcgaaaagggaaaagccgccggcattgactgcgtcgtttcccggacaggctacacaggcgaaaccggttttgagctgtattgcagaagcgaagataccgaaagcctctggaaggcgattatggaagcgggcaaagcgcaaggccttattccctgcgggcttggcgccagggacaccctgcgccttgaggccgcaatgccgctttacggccacgaaatggatgaaaacgtcaatcctttcgaggcaggtctttcttttgccgtaaaaatggacaaggccgatttcataggaaaagccgccctggagcccttatcgctcagggaaaacctgaaaaggctccgcataggccttagggtaacaggcaagggaataataagggaacaatgcccaatttatttccaggacagcagtattggcataaccacttccggaacctttggtccccatcttaagcaggcaatagccatggccatgttaaaaactgaatttactgctcccggaacaaaggtcgaggcggatgtcaggggaaggatgatagaagcggaaacctgcgctcttccgttctataagaaaccgtga

SEQ ID NO: 2920 - protein, 262 aa, Unknown
  Obtained from environmental sample
  DOMAIN (1)...(261): Glycine cleavage T-protein (aminomethyl transferase)
  misc_feature (1)..(262): Xaa is any amino acid
MDEDRYMLVVNASNREKDAAWIRSRINSVANNATFEDLSDSYGQIALQGPASVAILASLSETIPQKYYTFIEKGKAAGIDCVVSRTGYTGETGFELYCRSEDTESLWKAIMEAGKAQGLIPCGLGARDTLRLEAAMPLYGHEMDENVNPFEAGLSFAVKMDKADFIGKAALEPLSLRENLKRLRIGLRVTGKGIIREQCPIYFQDSSIGITTSGTFGPHLKQAIAMAMLKTEFTAPGTKVEADVRGRMIEAETCALPFYKKP

SEQ ID NO: 2921 - DNA, 540 bp, Unknown
  Obtained from environmental sample
  misc_feature (1)..(540): n is a, c, g, or t
atgaaagcaggttcccgtggacgcgattacgaggcagcttttaattggctcacaaataccaatcttatttataaagtataccgcgtaagtttgccgaatgtgccattgatagggtataaagagccggctattttcaagctttatatgaacgacatagggcttctttccgcgcgggccgggctggatattaagctttatattgatgacaatgacagaactttttcgcactacaagggagggcttgcggaacagtttgttttgcaggaacttattgcaaccggcgatagactgcctgtttattactgggcgaccgataaaaatactgctgaaatagagtttgttatacaatataatgataaaattattcctattgaggtaaagtccggcaagaatgtaaaatctgaaagtttaaatatgtacagaattatgtattctcctgctcacgcagtccgcacttcgctaaaaaaatacggtgttatggatggattatactccgtgcctctatatctgataggcaatttgtcggctatttttcaataa

SEQ ID NO: 2922 - protein, 179 aa, Unknown
  Obtained from environmental sample
  misc_feature (1)..(179): Xaa is any amino acid
MKAGSRGRDYEAAFNWLTNTNLIYKVYRVSLPNVPLIGYKEPAIFKLYMNDIGLLSARAGLDIKLYIDDNDRTFSHYKGGLAEQFVLQELIATGDRLPVYYWATDKNTAEIEFVIQYNDKIIPIEVKSGKNVKSESLNMYRIMYSPAHAVRTSLKKYGVMDGLYSVPLYLIGNLSAIFQ

SEQ ID NO: 2923 - DNA, 393 bp, Unknown
  Obtained from environmental sample
  misc_feature (1)..(393): n is a, c, g, or t
gtggttctggacagaatgaaaataaccaaacaggaacgggacgaactccttgcaagaatagagcgtggtctggtgttgaatgaagtccagcttgagtcgacatcggttcgctatgaaaaactggaagcccgcgggcttgattacacaggcaaaacaacgatagccaaacaggccattgagaccggttcgcttttggagataacctggccgggccgtgacggagaaccaaattcgacagtcggaataccgcagacgatcgagaaaaaagaaggggagaatatcctggttctcagaaccagcggaaattcagaaagcgccgcaagagttttaaaaattcccatcggaaagatcagccttttacggcgcatcaaacaatcaatctttggagagtaa

SEQ ID NO: 2924 - protein, 130 aa, Unknown
  Obtained from environmental sample
  misc_feature (1)..(130): Xaa is any amino acid
MVLDRMKITKQERDELLARIERGLVLNEVQLESTSVRYEKLEARGLDYTGKTTIAKQAIETGSLLEITWPGRDGEPNSTVGIPQTIEKKEGENILVLRTSGNSESAARVLKIPIGKISLLRRIKQSIFGE

SEQ ID NO: 2925 - DNA, 618 bp, Unknown
  Obtained from environmental sample
  misc_feature (1)..(618): n is a, c, g, or t
gtgggctttccggaggacgtggggcggttttacaagctggaggagtacgaggggtactgtttcacggcgcacggacgctaccctaccaacacgccgggctggtggggcggcgcccacccgtttgcgctgctcgactactccgtggtgcacaacggggaaatatcctcctacgacacaaaccgccgcgccatagagatgtacgggtacaaatgctccctccagaccgacaccgaagttatcgcctatataatagattatctgcaccggagaaagcggctcacgctggaggagatcgcgttggtggtcgccgcgccgttttggcagactatagagcgcatggaaccgcgtgaccgagaagagcacgagtacctgcgcacgatcttctcgtcgcagctcatcaccggccccttttcgatcctcgtggggttcaacggcgggctgatggccctcaacgaccgccttaaactgcgcagcatggtcgtgggcgaaaggggcgatatggtgtacatcgctagcgaggaggcggctatccgggtaatcgaaccgaatcttgacgcgctgtgggctcccgtgggcggccagccggttatcattcgcgcaaacggaggcgaagtgtaa

SEQ ID NO: 2926 - protein, 205 aa, Unknown
  Obtained from environmental sample
  DOMAIN (1)...(174): Glutamine amidotransferases class-II
  misc_feature (1)..(205): Xaa is any amino acid
MGFPEDVGRFYKLEEYEGYCFTAHGRYPTNTPGWWGGAHPFALLDYSVVHNGEISSYDTNRRAIEMYGYKCSLQTDTEVIAYIIDYLHRRKRLTLEEIALVVAAPFWQTIERMEPRDREEHEYLRTIFSSQLITGPFSILVGFNGGLMALNDRLKLRSMVVGERGDMVYIASEEAAIRVIEPNLDALWAPVGGQPVIIRANGGEV

SEQ ID NO: 2927 - DNA, 417 bp, Unknown
  Obtained from environmental sample
  misc_feature (1)..(417): n is a, c, g, or t
atgtccgcgccgttgcgacaggcaagcagcagacggacggcaatggattacttgaaagaaatagcccttaacagtccttttacaagccgttccgggctttccgcacggctgtcgaatcgttcacttgggaaaatagtaagccatgccgctgttgtctcttcattttgccctgaagctcattacctcgctacggcaaatatcgacaagctgtatgccaatgccattgagccgtgggaatttgaattaaaccccaataaagataacgccggattgaaagccaggcggtatttatacgcgccgatggaatacgaagggaaaatcacgattgttaaaataacggttaaagagtatgaggatgccgatttgcaaaacaagctgtactcaatagcagcggttgacgtggaattgagggcataa

SEQ ID NO: 2928 - protein, 138 aa, Unknown
  Obtained from environmental sample
  misc_feature (1)..(138): Xaa is any amino acid
MSAPLRQASSRRTAMDYLKEIALNSPFTSRSGLSARLSNRSLGKIVSHAAVVSSFCPEAHYLATANIDKLYANAIEPWEFELNPNKDNAGLKARRYLYAPMEYEGKITIVKITVKEYEDADLQNKLYSIAAVDVELRA

SEQ ID NO: 2929 - DNA, 552 bp, Unknown
  Obtained from environmental sample
  misc_feature (1)..(552): n is a, c, g, or t
gtgatcatctcaaggctcaaggagctaaactgggttccccgttacatcctgcttacgcatggccacttcgatcatctaatggccctccccggccttatcgaagcttttgaaaagggcgtcttcggcgcgagtgaagcgccaaaggtgggcgttcaccgcatggacgcccactacctgggaaaaaacgccctctcaatccaccgggacagtttcgccgccgcttcaggcggaagcgcgtcttacatagactccatctggaaacccatcaaagaggcggacatcctttttgaagaaggcgacacgcttcccccgttcaaggtgcttcatgtccccggccacaccccaggaagcgccgccttttacgacgaaaactcaggcgtcctttttaccggagacacgcttttccaggacagctggggccgcacggatctcccaggcggaaacgaggcgctcattcagcaaagccttaagcgcctgcgttcaatgaacgaggaaatagttgtctaccctggccacgggccggttacaacgataggggaagagcggaattag

SEQ ID NO: 2930 - protein, 183 aa, Unknown
  Obtained from environmental sample
  DOMAIN (1)...(172): Metallo-beta-lactamase superfamily
  misc_feature (1)..(183): Xaa is any amino acid
MIISRLKELNWVPRYILLTHGHFDHLMALPGLIEAFEKGVFGASEAPKVGVHRMDAHYLGKNALSIHRDSFAAASGGSASYIDSIWKPIKEADILFEEGDTLPPFKVLHVPGHTPGSAAFYDENSGVLFTGDTLFQDSWGRTDLPGGNEALIQQSLKRLRSMNEEIVVYPGHGPVTTIGEERN

SEQ ID NO: 2931 - DNA, 762 bp, Unknown
  Obtained from environmental sample
  misc_feature (1)..(762): n is a, c, g, or t
atgatcagatcggccgaggagcagatacatgagaaaatcgcctattctgcgtccgctactgatgacattgaacttgtaagcctaacataccatcttcgcaaaggagataaagccgcttacgaagtgcctggcttcctgcagggactttatattgaaggcgtaatacctccgttcttaaggcaactttccgtttcaaacggttttgacgaatgggtgcctacgatgccattcgccggaggcgcgacatacactgatttcggccttgggttgagcttctttgacgacaacgtaaaaattcaaggacaatacggcttcctgactcaggaactatacgaagctcttggcggtgaaggggcggttcgttatggcggagacgttattggcctgaagatacttgcaaatatatacacattgcctcttggctcggtatggggacctgactttgactggctttacgcatcattctctgtaggcgcaaatttctcgcagtttaacttcttaaacaaagaaaataaaaagttctcaacgccggaaaaacccgtatattatacccagagcggtgcggccacatggctgagcgcgttgttattgcaaatagaattccccaaagtgaccattccaaagaaaaaggctttaagaacgttcagcttatttacggaaggacagctatggtttgtacctacggacgtagatgccgagcaaatgggcataccggtaatgattccgcatgtgatgatggggttaagaatttacatattctaa

SEQ ID NO: 2932 - protein, 253 aa, Unknown
  Obtained from environmental sample
  misc_feature (1)..(253): Xaa is any amino acid
MIRSAEEQIHEKIAYSASATDDIELVSLTYHLRKGDKAAYEVPGFLQGLYIEGVIPPFLRQLSVSNGFDEWVPTMPFAGGATYTDFGLGLSFFDDNVKIQGQYGFLTQELYEALGGEGAVRYGGDVIGLKILANIYTLPLGSVWGPDFDWLYASFSVGANFSQFNFLNKENKKFSTPEKPVYYTQSGAATWLSALLLQIEFPKVTIPKKKALRTFSLFTEGQLWFVPTDVDAEQMGIPVMIPHVMMGLRIYIF

SEQ ID NO: 2933 - DNA, 438 bp, Unknown
  Obtained from environmental sample
  misc_feature (1)..(438): n is a, c, g, or t
ttggcaggaatagcccatgatatatgcaagggtctggaagaaagcgagcttgtgcgcctggcccgccaggatagcggcggcatctcaaagcttgaacaaaaaaagcccggtctgctgcacgctcgtgcggcggcagtgtatgtcaacaaaaaatacggcgtaaaggataaggacatccttgaggcaatcaggtaccataccaccgggattcgtgaaatggggcccattgccaaggtcgtttatatagcggacaagattgaaatgtccagagccgcagtagatcctattttgaggaaaatgagccaggaaagcgatctggatactctttttacggaggtcttaagcgatgccgtgaattacctgaaatcccgccacctggatatttcttatggtacaagaagactgctggtggcaatgcgtaaaaagaacaagccatga

SEQ ID NO: 2934 - protein, 145 aa, Unknown
  Obtained from environmental sample
  DOMAIN (1)...(89): HD domain
  misc_feature (1)..(145): Xaa is any amino acid
MAGIAHDICKGLEESELVRLARQDSGGISKLEQKKPGLLHARAAAVYVNKKYGVKDKDILEAIRYHTTGIREMGPIAKVVYIADKIEMSRAAVDPILRKMSQESDLDTLFTEVLSDAVNYLKSRHLDISYGTRRLLVAMRKKNKP

SEQ ID NO: 2935 - DNA, 309 bp, Unknown
  Obtained from environmental sample
  misc_feature (1)..(309): n is a, c, g, or t
atgcagctgcaggtttaccgcgttgtacaagaagcgctttccaatattgaaaaacattccggggcaaaagaagtaacgctgaccgcgcgaaataaagatgataaggccctgctaatctgcgttaccgacgacggaaaaggtttacaccggaacatggcaaatacgcaaagcccaaaaaacggagacggtcttggaatacggggcatgcgccaaagggcggcaatgctgggagcgtccctttcctttgtagaaggcgctggatcggggctgacagtgaggctggaagtaccattatcaggtaacaggtaa

SEQ ID NO: 2936 - protein, 102 aa, Unknown
  Obtained from environmental sample
  DOMAIN (2)...(99): Histidine kinase-, DNA gyrase B-, and HSP90-like ATPase
  misc_feature (1)..(102): Xaa is any amino acid
MQLQVYRVVQEALSNIEKHSGAKEVTLTARNKDDKALLICVTDDGKGLHRNMANTQSPKNGDGLGIRGMRQRAAMLGASLSFVEGAGSGLTVRLEVPLSGNR

SEQ ID NO: 2937 - DNA, 570 bp, Unknown
  Obtained from environmental sample
  misc_feature (1)..(570): n is a, c, g, or t
atggctgattacagcaagcccgatcactggtcaattaaagctcaaaaagaaggcttccccgcccggtctgtttacaaactcagggagatggatgaaaagttcagcctcatcccgccccgccaggcgggccgccttcgcttcagggcgctggatctgggagccgcgccggggagctggagcctctacatactccggaaactttcggggcgaccggggggccgtgacggaggcgggccttcgcgtgttccggaatcgcctgtctcactggtttcaattgacctcgcccccctttcccgttcctgcgatcagggcctcttcgacaggccggatttccttttcattcagggggattttacccttcccgcgatacgggaagatattctttcccgcggcccctacggcctcgtagcgagtgacgcggccccggccaccaccgggaaccgttcggtggatacctcgcgttccctggaactcgcggaggtcgccctggactacgcggcggctgccctggaaccggggggcaatctggtgatcaaggtttttcaggggggggacacgggaaacctctga

SEQ ID NO: 2938 - protein, 189 aa, Unknown
  Obtained from environmental sample
  DOMAIN (19)...(187): FtsJ-like methyltransferase
  misc_feature (1)..(189): Xaa is any amino acid
MADYSKPDHWSIKAQKEGFPARSVYKLREMDEKFSLIPPRQAGRLRFRALDLGAAPGSWSLYILRKLSGRPGGRDGGGPSRVPESPVSLVSIDLAPLSRSCDQGLFDRPDFLFIQGDFTLPAIREDILSRGPYGLVASDAAPATTGNRSVDTSRSLELAEVALDYAAAALEPGGNLVIKVFQGGDTGNL

SEQ ID NO: 2939 - DNA, 426 bp, Unknown
  Obtained from environmental sample
  misc_feature (1)..(426): n is a, c, g, or t
ttgcgccggctttcncgtgtggatcaactgcggcaggagataggcgcgggcgcgtaccatgactgggacgagattcaccgggtctacgatctttggcatgaggcataccccctggataaggcccgccatgcctgggcggtgcttggcctgctgcgcggcagcgccgcgggcagcttcgctgacagcgccgcttctctcaaacaggaaattaccgcttccattgaaacccgccgctggataagcggccaaatctaccgaagcagggcaaaggattatcacgattccttcaggaaggcgacgttccgcaatacggctgaaatggagcaggtgttgggtaaacctgaagaaaacgcttttgtacgcctttccgctgaagaaggacgatattatgaagaattggcggcaagggtcatgctgcggctataa

SEQ ID NO: 2940 - protein, 141 aa, Unknown
  Obtained from environmental sample
  misc_feature (1)..(141): Xaa is any amino acid
MRRLSRVDQLRQEIGAGAYHDWDEIHRVYDLWHEAYPLDKARHAWAVLGLLRGSAAGSFADSAASLKQEITASIETRRWISGQIYRSRAKDYHDSFRKATFRNTAEMEQVLGKPEENAFVRLSAEEGRYYEELAARVMLRL

SEQ ID NO: 2941 - DNA, 771 bp, Unknown
  Obtained from environmental sample
  misc_feature (1)..(771): n is a, c, g, or t
atggtaaacggaagcatgtacaaccccaaacatcctacggcagacgccaaaggtttccggcgcgattacatggacgcgttaaaagaatcaggcgttccagccatacgtcttcccggcggaaattttgtctccggctggacttggaaagattcaatcggcttaatggaaaagagaaaaacccagcttgatactgcctggtttcagtattatacaaacgagatcggacttgacgaatatctgcaatggacgaatatggtcggtgcggagccgatgtatacggttaatctcggcactgacagccttatcgacgcacttcatgttgtcgagtacacaaatcataagggcggcagttactggtcggatctgcgcagggaatatggtcatgatgccccatacaacataaagacatggtatctcggaaacgaaatggacggtccgtggcagataggctcatggcagaaaaatcctcgcggttacggcgtcctggcccacgaggtttcaaaggggatgaaatggattgatccttcgattgaaacaacagcctgtgtttcgtcttcgccattcctcgcgcattatccgcagtgggatttggaagcacttcaggaatgttacgaaactgttgattatatatccctgcaccactaccatatcgcagcacccggggattatgcggcacttttaggcggctcctgtttttttgaggattacatncatacagagataggactttgcgattttatccaaccaagcttcgttcgccgaaaaagatga

SEQ ID NO: 2942 - protein, 256 aa, Unknown
  Obtained from environmental sample
  misc_feature (1)..(256): Xaa is any amino acid
MVNGSMYNPKHPTADAKGFRRDYMDALKESGVPAIRLPGGNFVSGWTWKDSIGLMEKRKTQLDTAWFQYYTNEIGLDEYLQWTNMVGAEPMYTVNLGTDSLIDALHVVEYTNHKGGSYWSDLRREYGHDAPYNIKTWYLGNEMDGPWQIGSWQKNPRGYGVLAHEVSKGMKWIDPSIETTACVSSSPFLAHYPQWDLEALQECYETVDYISLHHYHIAAPGDYAALLGGSCFFEDYXHTEIGLCDFIQPSFVRRKR

SEQ ID NO: 2943 - DNA, 522 bp, Unknown
  Obtained from environmental sample
  misc_feature (1)..(522): n is a, c, g, or t
ttgatcgaagaaatgaaagagcgcggagtttatcttgatgaaatccgcgattgggacgttgataaaatagtttcttccgcgcgtatgcacgacctcgggaaaatctccattaccgatattattgtgaacaagccggataagcttacagcggatgaatacgaactgataaaaacgcacacaatcgaaggcgagatgataattgacgaaataatttcaaaaacgggtgaagatgaatttttaaacagcgcgaggctttttgccggatgtcatcatgaacggtgggacggcaaagggtatccgcgtggtttaaagggggaaaatatcccgctgcaggggcgcatcatggctatagttgacgtgtacgacgcccttgtttccgaacggccgtataaaaaagcgttttccgacgaagaagccgtacagataatattggataacgccggcgttcattatgatccgaaaattgttgaagttttctttaccgtaaaagatcaatttaaggctgttagggaaaaattataa

SEQ ID NO: 2944 - protein, 173 aa, Unknown
  Obtained from environmental sample
  DOMAIN (1)...(124): HD domain
  misc_feature (1)..(173): Xaa is any amino acid
MIEEMKERGVYLDEIRDWDVDKIVSSARMHDLGKISITDIIVNKPDKLTADEYELIKTHTIEGEMIIDEIISKTGEDEFLNSARLFAGCHHERWDGKGYPRGLKGENIPLQGRIMAIVDVYDALVSERPYKKAFSDEEAVQIILDNAGVHYDPKIVEVFFTVKDQFKAVREKL

SEQ ID NO: 2945 - DNA, 339 bp, Unknown
  Obtained from environmental sample
  misc_feature (1)..(339): n is a, c, g, or t
atgcaaaataaaattgctctggacgatttcggcactggatattcctcgcttcaatacctgcaaaagttgcctatagattttttaaaaatagaccaatcttttgttcgcaatttggaaacaagcaaacaatcaaaagaaattgtgaaagccatagtggacttagcacacacaataaacataaaaaccatagccgaaggcatagaaactatggcagactacgattacctgaacagcgttgattgtgatatagggcaagggttctatatgtctaaaccgctaacatcaaatgcttttgtttcttggtattcggaaaataatggaatttttaagaagagttga

SEQ ID NO: 2946 - protein, 112 aa, Unknown
  Obtained from environmental sample
  DOMAIN (1)...(92): EAL domain
  misc_feature (1)..(112): Xaa is any amino acid
MQNKIALDDFGTGYSSLQYLQKLPIDFLKIDQSFVRNLETSKQSKEIVKAIVDLAHTINIKTIAEGIETMADYDYLNSVDCDIGQGFYMSKPLTSNAFVSWYSENNGIFKKS

SEQ ID NO: 2947 - DNA, 555 bp, Unknown
  Obtained from environmental sample
  misc_feature (1)..(555): n is a, c, g, or t
atgcgaaatcccgcaatttctgacgcggttacggaactgttacaaaagagggacggtcttatttgcggaatatgcaatggctttcaggcccttataaaactgggacttgcgccttacggtgaaatccgcgatatgaccataaactcccctaccctcacatttaatgcaataggaaggcatcagtctacattggtaaatacaaaaattgtctccaataaatcgccgtggctttcacatcttgaaccgggagatcagtacattgtgccaatttcgcacggcgaaggacgtttcatcgcgcaggaaagccttatccgctctcttgcggctaacggccaaatagcgacccaatattcagattttaacggcaacgcctcgcaggacatacgttttaatcccaataattccgatttcgccattgagggaataacatcccccgacggcagagtctttggccgcatggctcataacgaacgctttgagaacggtctttacaggaatatccccggtattaggaaaatggatattttcgcgggagctgtgaagtattttagataa

SEQ ID NO: 2948 - protein, 184 aa, Unknown
  Obtained from environmental sample
  misc_feature (1)..(184): Xaa is any amino acid
MRNPAISDAVTELLQKRDGLICGICNGFQALIKLGLAPYGEIRDMTINSPTLTFNAIGRHQSTLVNTKIVSNKSPWLSHLEPGDQYIVPISHGEGRFIAQESLIRSLAANGQIATQYSDFNGNASQDIRFNPNNSDFAIEGITSPDGRVFGRMAHNERFENGLYRNIPGIRKMDIFAGAVKYFR

SEQ ID NO: 2949 - DNA, 849 bp, Unknown
  Obtained from environmental sample
  misc_feature (1)..(849): n is a, c, g, or t
atgggagctgtggatacaataatggtaagttcggtgggtgaacacgccgtatctgcggtaaatataattgacaacatcaacaaccttttgattatcgcttttattgccatgtgtaccggcggtgcggtagttgtaagccagtatataggcaggcaggacttaaaagaatccagtatcgcttcaaagcagttggtgtacatcgttgccttgatttcagtgattatgacggttataagcgttaaattccgtcgtccgattatcagtttgatttacggcaagatagaagacgatgttatgagagccgcttctgtctacttcctaatcaccgcgatttcttatccgtttttggctgttaataacgcgaatgcagcgctgtttcgggctattggaaactcaaaggttcccatgctaattgccctccttgtgaacattatgaacattgcgggcaacgcgtttttgatttatgggctgaagatcggagtggcgggggcagccatatctacgctggtttgcagaatcaccgcgtcgacgatcactactactatgctttaccgcaataagaccagccccatatcgctttttgggcttagaaacgtccgcttcattaaatccatgattcgaaatattctgaatgtcggcctcccgtcgggaattgaaagttccatgttccagattggcaggcttcttacccagcgtattttcccggttttcggcaccagcgctatggcggctaatgccgtcaccggcgttatcaattcattttcgtttatgcccggaactgcttacggcattgccttgctcaccattgttgggcagtgtggggcgcgaaagatatngagctcgcgataa

SEQ ID NO: 2950 - protein, 282 aa, Unknown
  Obtained from environmental sample
  DOMAIN (1)...(152): MatE
  misc_feature (1)..(282): Xaa is any amino acid
MGAVDTIMVSSVGEHAVSAVNIIDNINNLLIIAFIAMCTGGAVVVSQYIGRQDLKESSIASKQLVYIVALISVIMTVISVKFRRPIISLIYGKIEDDVMRAASVYFLITAISYPFLAVNNANAALFRAIGNSKVPMLIALLVNIMNIAGNAFLIYGLKIGVAGAAISTLVCRITASTITTTMLYRNKTSPISLFGLRNVRFIKSMIRNILNVGLPSGIESSMFQIGRLLTQRIFPVFGTSAMAANAVTGVINSFSFMPGTAYGIALLTIVGQCGARKIXSSR

SEQ ID NO: 2951 - DNA, 855 bp, Unknown
  Obtained from environmental sample
  misc_feature (1)..(855): n is a, c, g, or t
atgctgccagaggtaaagccgtcgagcgttgtgtatgcctccgttaatatccagggcaggaaggtgcccattgcgggcaacgcgggagatcagcaagctgcccttttcgggcaatgctgttttgaaaaaggcgaagccaaatgtacatatggtaccggctgctttctcttaatgaatacaggctatgaggctgttgaaagcggaaacggccttataacaaccatcgctgcgggcatctccgacagggttcagtatgtccttgaaggctcggtctttgtgggcggcgcggtaattcaatggctgcgggacgaaatgcgctttttaacggaaagcgaggacagcgaatattacgcgggcaaaattgaagacactggcggagtctacctggtcccggcctttgccggcctgggcgctccttactgggatatgtacgcccgaggctgcatcgtgggaatcaccaggggaacaaaacgaaaccacatcatcagagccgctcaggaatccatcgcgtaccaggtgatggatttgctgcatgccatggaaaaagacgcaggcagcaggatgggcgagctcaaggtagacggcggcgcaagcgttaacaaatttataatgcagttccagtccgacatttgcgtcgcaaatattgtgcgccctgtagtaagcgaaaccaccgcccttggcgccgcctgcctcgctggaatcgctgtaggcttctggaaagatctggcggaagtaaagaataactggaaacgagacgccctgtttaaaccctgcatggactcaggcaagcgggaaaaacttatcgctgcctggcacaaggctgtggacagaagcaggggctgggcggaagaatag

SEQ ID NO: 2952 - protein, 284 aa, Unknown
  Obtained from environmental sample
  DOMAIN (40)...(265): FGGY family of carbohydrate kinases, C-terminal domain
  misc_feature (1)..(284): Xaa is any amino acid
MLPEVKPSSVVYASVNIQGRKVPIAGNAGDQQAALFGQCCFEKGEAKCTYGTGCFLLMNTGYEAVESGNGLITTIAAGISDRVQYVLEGSVFVGGAVIQWLRDEMRFLTESEDSEYYAGKIEDTGGVYLVPAFAGLGAPYWDMYARGCIVGITRGTKRNHIIRAAQESIAYQVMDLLHAMEKDAGSRMGELKVDGGASVNKFIMQFQSDICVANIVRPVVSETTALGAACLAGIAVGFWKDLAEVKNNWKRDALFKPCMDSGKREKLIAAWHKAVDRSRGWAEE

SEQ ID NO: 2953 - DNA, 324 bp, Unknown
  Obtained from environmental sample
  misc_feature (1)..(324): n is a, c, g, or t
ttgtgccaggcagcgataagtttttcccgcttgcctgagtccatgcagggtttaaacagggcgtctcgtttccagttattctttacttccgccagatctttccagaagcctacagcgattccagcgaggcaggcggcgccaagggcggtggtttcgcttactacagggcgcacaatatttgcgacgcaaatgtcggactggaactgcattataaatttgttaacgcttgcgccgccgtctaccttgagctcgcccatcctgctgcctgcgtctttttccatggcatgcagcaaatccatcacctggtacgcgatggattcctga

SEQ ID NO: 2954 - protein, 107 aa, Unknown
  Obtained from environmental sample
  misc_feature (1)..(107): Xaa is any amino acid
MCQAAISFSRLPESMQGLNRASRFQLFFTSARSFQKPTAIPARQAAPRAVVSLTTGRTIFATQMSDWNCIINLLTLAPPSTLSSPILLPASFSMACSKSITWYAMDS

SEQ ID NO: 2955 - DNA, 810 bp, Unknown
  Obtained from environmental sample
  misc_feature (1)..(810): n is a, c, g, or t
ttggacagttactcctcaattaactcaaacaacagaacgtatctttttctgcgcgcaagggtacaagccgaaggaaaccgcaaccgcgattcggcgttaaactaccttcgctcgattttacgtaattctccggatgatacggaagctcttgtttatgcttcgactttgctcatggagtcccagcgcccggcggatcaaagcgagggcagggaaatgcttgagcgcctcaggcggacaaacggctcttccgtagaagtattaagcctaagccttagggacgcaattcagcgcgaacagtggcaggaggcgcaggggtatttaaaccgcattcttgccgtccgccgcacggttcaggatcttacggacgcgtataatgtggaacgggggctgggcaataacgcaagggctctaacctatgcccgcgaattgtacgatcgcgataattccaatcatgagtatgccgcgatttatatttccgccctgattaattccggcagaagggacgaggcggcgcgtttgctggagagccgcattaattccgcaagcacaagtcaaattaagagccgctatttttttctgcgaagccgtttacagtcaaatcaggacgacgctttaagcgatttgcgctccagtctttttgaagatcccagaaatctggacgccattatcgccatgttccagatttaccacgaccgccgcgaagaacgccgcgccgtctactacctgaaacaagggcttgccatatctcccgatcatcctgttttaaaacgctacgagaaagagtatgcttcgctgttaggcaggaattaa

SEQ ID NO: 2956 - protein, 269 aa, Unknown
  Obtained from environmental sample
  misc_feature (1)..(269): Xaa is any amino acid
MDSYSSINSNNRTYLFLRARVQAEGNRNRDSALNYLRSILRNSPDDTEALVYASTLLMESQRPADQSEGREMLERLRRTNGSSVEVLSLSLRDAIQREQWQEAQGYLNRILAVRRTVQDLTDAYNVERGLGNNARALTYARELYDRDNSNHEYAAIYISALINSGRRDEAARLLESRINSASTSQIKSRYFFLRSRLQSNQDDALSDLRSSLFEDPRNLDAIIAMFQIYHDRREERRAVYYLKQGLAISPDHPVLKRYEKEYASLLGRN

SEQ ID NO: 2957 - DNA, 318 bp, Unknown
  Obtained from environmental sample
  misc_feature (1)..(318): n is a, c, g, or t
atgggagagtttagaacagagaggattgccagactgattcaggaaaaaatcggcgccctcattgtcgaaggaaaaatcaaagaccacagggtaaatccttttttatcgatctcaagagtcaaagtttcaaaagatctgtcctgggctgacgtttatgtttccacattcaaacctgaatcaaagctcgcgcgcggcgttgaaggcctgcaaagcgcggcaggctttatccaggcccaactggcaatgggaatgagaatacggttaacgccccgcctgcgttttcatgaggacttaagcatccagcagggattgaaatag

SEQ ID NO: 2958 - protein, 105 aa, Unknown
  Obtained from environmental sample
  DOMAIN (5)...(104): Ribosome-binding factor A
  misc_feature (1)..(105): Xaa is any amino acid
MGEFRTERIARLIQEKIGALIVEGKIKDHRVNPFLSISRVKVSKDLSWADVYVSTFKPESKLARGVEGLQSAAGFIQAQLAMGMRIRLTPRLRFHEDLSIQQGLK

SEQ ID NO: 2959 - DNA, 486 bp, Unknown
  Obtained from environmental sample
  misc_feature (1)..(486): n is a, c, g, or t
gtggatctttccattgcgtctaacgccatcataatcggctttaacgtgcggcctgtgcccaaagccaaagccctggcggagcaggaaaaagtcgaaatccgccgctacaacgtaatttacaaggcggtagaagaaattcagcaggctatggaagggatgctcaagcctgaaaccaaagaagaaataatcgccactgtggaagtcagggatacgttcaaaactccgaaattcggcgttgtcgccggctgctatgtgctgacaggaaccgtcaaacgaagcgccggcattcatatcatccgcgatgacatagaaatttataccggcaaaatcgggtcgctgcgccgctttaaggacgatgtcagggaagtagccgcaggttttgaatgcggtattggccttgaaggctacgacgatgtcaaagtaggggatcagtttgaagtctttgagatggttgaaatagcgagaaaactgagcgcttcgacttaa

SEQ ID NO: 2960 - protein, 161 aa, Unknown
  Obtained from environmental sample
  DOMAIN (78)...(146): Elongation factor Tu domain 2
  misc_feature (1)..(161): Xaa is any amino acid
MDLSIASNAIIIGFNVRPVPKAKALAEQEKVEIRRYNVIYKAVEEIQQAMEGMLKPETKEEIIATVEVRDTFKTPKFGVVAGCYVLTGTVKRSAGIHIIRDDIEIYTGKIGSLRRFKDDVREVAAGFECGIGLEGYDDVKVGDQFEVFEMVEIARKLSAST

SEQ ID NO: 2961 - DNA, 738 bp, Unknown
  Obtained from environmental sample
  misc_feature (1)..(738): n is a, c, g, or t
atgtccgactacatggagaagcacaatgcctcaaggctggtgggagcgccgcccggctatgtgggttatgacgaaggcggctttcttaccgagcgcatcaggcgcaacccctatagggtcgtcctctttgacgaaatggaaaaggcccaccaggatgtattcaaccttcttctgcaagtattggaagaaggcgagctgaaggatagcctggggcataccgtaagcttcaggaataccgtcattataatgaccagcaatgccggcgtgcgtgaaatttccagggattcgcgccttggtttcggaagcggatccgggatgatgagttttgaagagattgaatcctccgccatgtcggaactaaagaggctttttaaccccgaattcctgaacagggttgatgacgttgtggtattccatcccttggatattaaacaggttgaggccattctggatctgcaaatagaagaactatccgcgcgcctgtacgagcagggctattcgctcctggtaactccggcagctaaaaagatcctcatcgaaaaaggctgggacccgaaatatggcggaaggcccctgcgtcgtgccatccaaaaggagctggaagatcccctgtcgttaaggatattggagggagactatccttccggcaccgttttcacagctgcgggcaagggcggtaaaatttcgctcaaagcagaagccgccgtcactgccgatccaaaagcggtactcaaatag

SEQ ID NO: 2962 - protein, 245 aa, Unknown
  Obtained from environmental sample
  DOMAIN (1)...(135): ATPase family associated with various cellular activities (AAA)
  misc_feature (1)..(245): Xaa is any amino acid
MSDYMEKHNASRLVGAPPGYVGYDEGGFLTERIRRNPYRVVLFDEMEKAHQDVFNLLLQVLEEGELKDSLGHTVSFRNTVIIMTSNAGVREISRDSRLGFGSGSGMMSFEEIESSAMSELKRLFNPEFLNRVDDVVVFHPLDIKQVEAILDLQIEELSARLYEQGYSLLVTPAAKKILIEKGWDPKYGGRPLRRAIQKELEDPLSLRILEGDYPSGTVFTAAGKGGKISLKAEAAVTADPKAVLK

SEQ ID NO: 2963 - DNA, 750 bp, Unknown
  Obtained from environmental sample
  misc_feature (1)..(750): n is a, c, g, or t
atgctaaaagattggggcggaacagcttgcaaggtgctgatgtacctccgggtagatttgagcgaattccggcgcagccttgagaattgccttccccgcatttcgtcccttctgttaaaaggggacgcgcccatgtccgaacgggcgaaaagaatgatagaaaacgccatggaagaagcgagaaccatgggaaacgagtaccttggtacggagcatctgttgtcggcggcgtacagggaagagaattccgctgtccaggtttatctcaatcaacttgaagtaaaccttgatatgttccgtgctttggttagaagttcatttaaccgcaggggtcagaccgaagccgggtttttaaccgggcttaagttcgcgcaaaatcagggcttggggatgaaccttgggcaaagaatcaagcctgcttcgtacccggtgttgacgcccgctctggatgaattttccagggacctgaccgcgcaggcaagggcgggaaagctggaccctgtagtaggaagaaaaaaagaaattgagcgcgcgctgcgtatacttgcccggcgcactaaaaataacccggttctggttggcgagccgggggtgggaaaaaccgcgattgttgagggtctcgcgcagctttttgcgggcgaagatgttcctacggccctgtccggaaagcgcatactctcccttgacatgggctccatcgtagccgggactaaataccgaggggagtttgaggaacgcctganaaaataa

SEQ ID NO: 2964 - protein, 249 aa, Unknown
  Obtained from environmental sample
  DOMAIN (56)...(108): Clp amino terminal domain
  misc_feature (1)..(249): Xaa is any amino acid
MLKDWGGTACKVLMYLRVDLSEFRRSLENCLPRISSLLLKGDAPMSERAKRMIENAMEEARTMGNEYLGTEHLLSAAYREENSAVQVYLNQLEVNLDMFRALVRSSFNRRGQTEAGFLTGLKFAQNQGLGMNLGQRIKPASYPVLTPALDEFSRDLTAQARAGKLDPVVGRKKEIERALRILARRTKNNPVLVGEPGVGKTAIVEGLAQLFAGEDVPTALSGKRILSLDMGSIVAGTKYRGEFEERLXK

SEQ ID NO: 2965 - DNA, 426 bp, Unknown
  Obtained from environmental sample
  misc_feature (1)..(426): n is a, c, g, or t
gtgaatttcatcgataaacaggattatattcctggactgggttatctccttcattattttntcaggcgttcctcaaactcccctcggtatttagtcccggctacgatggagcccatgtcaagggagagtatgcgctttccggacagggccgtaggaacatcttcgcccgcaaaaagctgcgcgagaccctcaacaatcgcggtttttcccacccccggctcgccaaccagaaccgggttatttttagtgcgccgggcaagtatacgcagcgcgcgctcaatttctttttttcttcctactacagggtccagctttcccgcccttgcctgcgcggtcaggtccctggaaaattcatccagagcgggcgtcaacaccgggtacgaagcaggcttgattctttgcccaaggttcatccccaagccctga

SEQ ID NO: 2966 - protein, 141 aa, Unknown
  Obtained from environmental sample
  misc_feature (1)..(141): Xaa is any amino acid
MNFIDKQDYIPGLGYLLHYFXRRSSNSPRYLVPATMEPMSRESMRFPDRAVGTSSPAKSCARPSTIAVFPTPGSPTRTGLFLVRRASIRSARSISFFLPTTGSSFPALACAVRSLENSSRAGVNTGYEAGLILCPRFIPKP

SEQ ID NO: 2967 - DNA, 456 bp, Unknown
  Obtained from environmental sample
  misc_feature (1)..(456): n is a, c, g, or t
ttgattgataccaggcgcggcgagaaccggaattggcttttggcaacagccgacagttttgtccgcttcgtcacggcccagagaaaggaaatcctgaacgcggatgaacatctgtatgtaaagcggatcattgccattcccggcgacgagatcagcatgaacaattttgtcttcagggtgaagccggcgggcaacatgtatatttttaccgaatttgaactttccgaccgcccctattacccgaacataccccaggtaccggctctttgggatgagtcgcttcccttttcagggtacatggacagcataacgctcggccccggtgagtatttcgttgtttccgatgatcgcggcaactcgggcgactcacgcacatgggggccggttaacgcgaaaaaattactgggaaagcccatattccgtttctggcccatccagcgagtcggccgcccctag

SEQ ID NO: 2968 - protein, 151 aa, Unknown
  Obtained from environmental sample
  misc_feature (1)..(151): Xaa is any amino acid
MIDTRRGENRNWLLATADSFVRFVTAQRKEILNADEHLYVKRIIAIPGDEISMNNFVFRVKPAGNMYIFTEFELSDRPYYPNIPQVPALWDESLPFSGYMDSITLGPGEYFVVSDDRGNSGDSRTWGPVNAKKLLGKPIFRFWPIQRVGRP

SEQ ID NO: 2969 - DNA, 864 bp, Unknown
  Obtained from environmental sample
  misc_feature (1)..(864): n is a, c, g, or t
ttgtgcgaaggcaatgaagcggatatgttcgttaccgcgtttatgggcatatacaatatccccagcggaagatttgtgttccttaacgcggggcataatccgccgttgataaaaaaacacggaagcgcttatgaatttttggaaacggaaccaggttatgtcctggcatggatgaagagcgcgaaatacaaagaaacggaaatcagccttgatcccggcgatgttctgtatttatatacggacggcgtaacggaagcaatgaaccagcggaaggaacttttcggcgagcagcggctgctttccgtgttgaacgccaacaaagactgcccgcccaaagaattgttatccaccgtcaagcgggaaattgataattttgaggatgggacagagcaggccgacgatattaccatgcttgtcctgaaagtgaacggtgagcattccgaagaagcacttgaaaacgcgatgaaaaagctggaaattaaagcgagccttgaaaatctgaataaggtgttggattttattatcacggagcttgaacagcgcggatgccctcaggagattcaggaaaaaattgaagttgccgtggaagagatttttgtaaacatttcggattacgcctacgctgccgacggcaacagcccagacagcggagacggcaacgccgatggcgctgttgtcatatttatttctgttacagataaaatcgttatacgctttgaagatacgggcaaagcctataaccctcttgagaaacaagagccggatttgaacaaaccactactggaacgcgatataggcggattgggtgtttttcttgtaaagaagctgatggacaatgtggaatatagccggggttgggaatag

SEQ ID NO: 2970 - protein, 287 aa, Unknown
  Obtained from environmental sample
  DOMAIN (1)...(143): Stage II sporulation protein E (SpoIIE)
  misc_feature (1)..(287): Xaa is any amino acid
MCEGNEADMFVTAFMGIYNIPSGRFVFLNAGHNPPLIKKHGSAYEFLETEPGYVLAWMKSAKYKETEISLDPGDVLYLYTDGVTEAMNQRKELFGEQRLLSVLNANKDCPPKELLSTVKREIDNFEDGTEQADDITMLVLKVNGEHSEEALENAMKKLEIKASLENLNKVLDFIITELEQRGCPQEIQEKIEVAVEEIFVNISDYAYAADGNSPDSGDGNADGAVVIFISVTDKIVIRFEDTGKAYNPLEKQEPDLNKPLLERDIGGLGVFLVKKLMDNVEYSRGWE

SEQ ID NO: 2971 - DNA, 465 bp, Unknown
  Obtained from environmental sample
  misc_feature (1)..(465): n is a, c, g, or t
atggcgagcaaccacaagcctgtcatcaaggggacagaccacggcatctggaggcggataaagctgataccgttcactacaacgatagccgaagagaagatggacaggcaccttgagcagaagctgctgggggaaaaatccggcatactgaactggctgatagaaggggcgctgcgctggcaaaaggaaggcttgaacaccccttcgatcgtgctgaacgccactgacgagtaccgtggggagatggacgctatagggaactttatcaaggaacggtgcgtccagaagccgggggaggcgatcaaggcgcgggagctgttccgtgtctatcaagaatggtgcgaggagaacaacgagatggcaaccagcgagcggatgttcgggctgcggatgaaggagctgggcatggcgcagaagcgggccgccgacgggcggtactggcaggatattgcgcttcaggggtga

SEQ ID NO: 2972 - protein, 154 aa, Unknown
  Obtained from environmental sample
  misc_feature (1)..(154): Xaa is any amino acid
MASNHKPVIKGTDHGIWRRIKLIPFTTTIAEEKMDRHLEQKLLGEKSGILNWLIEGALRWQKEGLNTPSIVLNATDEYRGEMDAIGNFIKERCVQKPGEAIKARELFRVYQEWCEENNEMATSERMFGLRMKELGMAQKRAADGRYWQDIALQG

SEQ ID NO: 2973 - DNA, 627 bp, Unknown
  Obtained from environmental sample
  misc_feature (1)..(627): n is a, c, g, or t
atggggggcgtgtccgaaaacaaaaaagtgttcatccgctccatgggcgcgcgctgccatctgggcggcctttcaaaagcgaccgccaacaccctggtcgtcctttccgcttatggctgtacttacatttttgtagagaccgtcggtgtgggccaatcggagatcgacattgcgcgatgtgccgacactactatgattgtgctggcacccggccttggcgacgatattcaagcaataaaagcgggagtgatggaaataggcgagatttttgcggtaaacaaagcggatcgtgaaggcgcggagaggactatgctggaaaccaaggccatgttggattttaaaagcgactgggactttaagcctcccgtctgcctgaccgtagctgaaaccggcgaaggggtggataccctcttagaaagtattttcaaccataagaattatatgctaaattccggaaaactcgccgaaaagcgcgagcgcagaaaggccaaccaagtcagggacatcgtaagggacactctggatcggcgcatagaagagctgataacatcatatccggacgttacggacgataaaaatgatccgtattcgttggcagagaatattatcaatcaaatggatctttaa

SEQ ID NO: 2974 - protein, 208 aa, Unknown
  Obtained from environmental sample
  DOMAIN (1)...(183): ArgK protein
  misc_feature (1)..(208): Xaa is any amino acid
MGGVSENKKVFIRSMGARCHLGGLSKATANTLVVLSAYGCTYIFVETVGVGQSEIDIARCADTTMIVLAPGLGDDIQAIKAGVMEIGEIFAVNKADREGAERTMLETKAMLDFKSDWDFKPPVCLTVAETGEGVDTLLESIFNHKNYMLNSGKLAEKRERRKANQVRDIVRDTLDRRIEELITSYPDVTDDKNDPYSLAENIINQMDL

SEQ ID NO: 2975 - DNA, 564 bp, Unknown
  Obtained from environmental sample
  misc_feature (1)..(564): n is a, c, g, or t
atgacacataaccctgttttaagccttgtgggaacaaacgaccccaaagaactggttataaggcacatactcgattcgcttgcgccgcttgggatcatctcccgcaaatgcaatctcagccgtattgccgatgtcgggtcaggcgccgggctgcccggtattccccttgcgattgtgctgcctgacagtgaattcaccctgattgaacggaaaggccgaaggtcgggattcctgagaaatactctggcagccttagtaaataaaaaccataaactttcctatgtttcagtggaagaacaggaaatggaaaaagttaaacctcaccgttttacaatggtgacattccgggcgttcaagcctctggaacctaaaagcctgaaaaaactcttcaggctttgtgcggaaggaggagtacttgccgcatacaaagggcggaggagcaagatcgaagcggaaatggcggaacttgaaacgtcaagtcaaaccatacaatgggaacttataccctgccctgtccccatgttagacgaagaaaggcatatccaaataataagtaaaaaataa

SEQ ID NO: 2976 - protein, 187 aa, Unknown
  Obtained from environmental sample
  DOMAIN (1)...(182): Glucose inhibited division protein
  misc_feature (1)..(187): Xaa is any amino acid
MTHNPVLSLVGTNDPKELVIRHILDSLAPLGIISRKCNLSRIADVGSGAGLPGIPLAIVLPDSEFTLIERKGRRSGFLRNTLAALVNKNHKLSYVSVEEQEMEKVKPHRFTMVTFRAFKPLEPKSLKKLFRLCAEGGVLAAYKGRRSKIEAEMAELETSSQTIQWELIPCPVPMLDEERHIQIISKK

SEQ ID NO: 2977 - DNA, 825 bp, Unknown
  Obtained from environmental sample
  misc_feature (1)..(825): n is a, c, g, or t
gtgagcgaagcccaggctttggcagttatcgaactgttcgccgaggattgtacggttcccttcatcgcgcgttaccgcaaggaaaaaaccggcgggcttgacgaaattcaggtcagggacattgagcataaatacaacagcggcaaaaatctggaaagtcgccgtattgacattatccggcttatttttgaacagggtaaattaaccgaggccctgtactccaaccttaaaaccgctgcgactctaggggaacttgaggatatttacgcgccctacaagcgcaagaaaaaaaccaggggaatgattgccgtagagaagggtttgctgccgcttgccgacgcgatgcgggaactggaaaccgcgcccttgttggcaaaagccgccgaattcgtaacgcccacaggcgctgatattgcccccgagatggttgtcgccactgtcgaagacgccttgcagggggcaatggacattattgcagaagcggtttcacaggatacggaaaaccgagcgcggatcaaatctttctttattaaagacggcaagatcattgtgaaaggatcgggcaaagagggcaagggtgatgaagaagcaaaaaagaccagcgtctaccagatgtactgggattacacggaatcactttccggaatcaaagcccaccgcgttcttgccattaaccggggcgagcgggaggatgtgttagacgtaactattgatattgacaatgacaccgccgtgcgcatgctccagcaaaaatacattctgcgcaacgattaccataaaaccggcatagaagacgggctaaaacggcttttatccccgcgctga

SEQ ID NO: 2978 - protein, 274 aa, Unknown
  Obtained from environmental sample
  misc_feature (1)..(274): Xaa is any amino acid
MSEAQALAVIELFAEDCTVPFIARYRKEKTGGLDEIQVRDIEHKYNSGKNLESRRIDIIRLIFEQGKLTEALYSNLKTAATLGELEDIYAPYKRKKKTRGMIAVEKGLLPLADAMRELETAPLLAKAAEFVTPTGADIAPEMVVATVEDALQGAMDIIAEAVSQDTENRARIKSFFIKDGKIIVKGSGKEGKGDEEAKKTSVYQMYWDYTESLSGIKAHRVLAINRGEREDVLDVTIDIDNDTAVRMLQQKYILRNDYHKTGIEDGLKRLLSPR

SEQ ID NO: 2979 - DNA, 687 bp, Unknown
  Obtained from environmental sample
  misc_feature (1)..(687): n is a, c, g, or t
atgcccaatacacgaaatataggcatgggaggcgtgactttggcttattgcatcaataaaatggataaatcagaaaaacagcaattagataagatggtttccgatttgataggaacccgcatcggtattcaaacaattgagcttggcaataaagttgaattgtcagtgatttttgaaaccgctgacaatacgatgtctgttgattctttacatatcagcgatggacttttacgaattattgcatttgcggttatttcaatggaaaaagagataaatcttcttaccacagaagatggtattttcttaacaactgagtccggtgaaacattaggaattaggagtaaagagagccttagaaacggtatggttcttttagatgaaatagaagatggaataaatccatacatgactgaacagatagtatctttgctacgtgagattaatgaaaaacaaaaaaggcagataattgttaccacccacagcccggtaatactaaatgactttaaccaggaagaaattatctttttatggaaagataaaaaaggttctgtccattcaaaaaaactttttgatacagaagaaatgaaatcgcttctggaagctcttaaccctggtgaagtttggataaacttggaaaaggaagatattttagaaagactttcctctaatgaagaggggaaagaatga

SEQ ID NO: 2980 - protein, 228 aa, Unknown
  Obtained from environmental sample
  misc_feature (1)..(228): Xaa is any amino acid
MPNTRNIGMGGVTLAYCINKMDKSEKQQLDKMVSDLIGTRIGIQTIELGNKVELSVIFETADNTMSVDSLHISDGLLRIIAFAVISMEKEINLLTTEDGIFLTTESGETLGIRSKESLRNGMVLLDEIEDGINPYMTEQIVSLLREINEKQKRQIIVTTHSPVILNDFNQEEIIFLWKDKKGSVHSKKLFDTEEMKSLLEALNPGEVWINLEKEDILERLSSNEEGKE

SEQ ID NO: 2981 - DNA, 567 bp, Unknown
  Obtained from environmental sample
  misc_feature (1)..(567): n is a, c, g, or t
gtggattccttttttgcattaccaatagcctacctgctaggctcaatcccaagtgcggtatgggtcgctagaatttacaaaagcatagatattcgggagcacggcagcaaaaacgccggactcacaaacgtgttcagggttctgggatggaagcccgctctgcccgtaattgcggttgatttatccaaaggtttttttgcggtgtttatagcaaaacaattgaatttggcagaagatggttcacaaatttatgaatggttgccaatcactgcgggtttgttcgcaatttttgggcatagctttacctgcatggctggctttagaggcgggaaaggagttttaaccgcgcttggcattttcctcgccttgcaacctgtgctagctcttacctgctttgccttttgggggcttttgttcgccgctacaaagtatgtatcggtagctagcataggtgcctgcgctttgctggcagcactcgcaacatttggctatgtttctgacatttttccggtttataaagttgatatttacgttctagctttatcttggttggtggcaattttttaa

SEQ ID NO: 2982 - protein, 188 aa, Unknown
  Obtained from environmental sample
  DOMAIN (7)...(187): Domain of unknown function DUF
  misc_feature (1)..(188): Xaa is any amino acid
MDSFFALPIAYLLGSIPSAVWVARIYKSIDIREHGSKNAGLTNVFRVLGWKPALPVIAVDLSKGFFAVFIAKQLNLAEDGSQIYEWLPITAGLFAIFGHSFTCMAGFRGGKGVLTALGIFLALQPVLALTCFAFWGLLFAATKYVSVASIGACALLAALATFGYVSDIFPVYKVDIYVLALSWLVAIF

SEQ ID NO: 2983 - DNA, 681 bp, Unknown
  Obtained from environmental sample
  misc_feature (1)..(681): n is a, c, g, or t
atgtatgttggcaaaggcataatagatgcaggcataactggagtggacttttgcgaggaagcgcaaagccctgcggtaaaaatacttgatttgccttttggagctagcaaacactgcgctgctgttccagaacagagtagctatcaaaagttgagcgatattgaaaatttgaggatagcaaccagctttccggtaattgtccgaaattatttcaaaaatcctaaaatggaactcgttgctttggaaggtgcggttgaaatttctgttgggctagctgttgcagatgctgttgttgatgttgtggatacgggaacaactctaaaacaagccggacttcgtattttgggagaacccttgtttttgagcaacgcagctctttttgtccatccaaatagagatgaatgcccggaggtttgcacccttatacgccgcatagaaggcaaactggtcgctatgagctataaaatggtggaatacgatgtgccgtcagagcttttggaaaaagcctgtgccataacgccgggcatagaatcccctaccgtagcacctttgcaaaacaaaaactggtattccgtaaaggcaatggtgaaaagcgaagaatcaaattccataatggataaacttcaagatcttggctgcaaaggaattttgctattcaacattgaaagcgcacgagtttaa

SEQ ID NO: 2984 - protein, 226 aa, Unknown
  Obtained from environmental sample
  DOMAIN (150)...(224): HisG, C-terminal domain
  misc_feature (1)..(226): Xaa is any amino acid
MYVGKGIIDAGITGVDFCEEAQSPAVKILDLPFGASKHCAAVPEQSSYQKLSDIENLRIATSFPVIVRNYFKNPKMELVALEGAVEISVGLAVADAVVDVVDTGTTLKQAGLRILGEPLFLSNAALFVHPNRDECPEVCTLIRRIEGKLVAMSYKMVEYDVPSELLEKACAITPGIESPTVAPLQNKNWYSVKAMVKSEESNSIMDKLQDLGCKGILLFNIESARV

SEQ ID NO: 2985 - DNA, 390 bp, Unknown
  Obtained from environmental sample
  misc_feature (1)..(390): n is a, c, g, or t
ttgatggcaggaggttttgttcctagacagtatatgatgtctgttctgagcacagaacttattgacgcggcgagaattgacggcgcgggcgagtacaggatattcaatgttattattcttcctattatgactcccgctcttgccgctcagtcgatctttacctttgtaggttcgtggaataactttattacgccgtttatattgattaacagcgaaaagaaatataccttaccaatgcttgtacaaagcttgcgcggtaatatttatcgcgcggaatacggcgcaatctatcttggaatagccgtttctcttataccgattttaatattctattcatttatgtcgcgcttcataatttccggtattactatgggcggtatcaaagagtaa

SEQ ID NO: 2986 - protein, 129 aa, Unknown
  Obtained from environmental sample
  misc_feature (1)..(129): Xaa is any amino acid
MMAGGFVPRQYMMSVLSTELIDAARIDGAGEYRIFNVIILPIMTPALAAQSIFTFVGSWNNFITPFILINSEKKYTLPMLVQSLRGNIYRAEYGAIYLGIAVSLIPILIFYSFMSRFIISGITMGGIKE

SEQ ID NO: 2987 - DNA, 459 bp, Unknown
  Obtained from environmental sample
  misc_feature (1)..(459): n is a, c, g, or t
ttgcaggaatcaggcagagccggacgagacggagaacaatctaaggcgattcttttgtggggaccggaagacgagatagcgtttgcaagagcaaaaactccggcggatcgtaaaagacttttagcgttattcagttacgcaaaggatactgaacactgccgcagacactcactgctcgccatgctaaactacgattccggcggagaagtgccggaaaagttatgctgtgatgtttgcgagaaagaagcggacggtggtttgcgggaagaattatcaattttgaattttttccgcaaaaacaaaaggcgttttacacagagcgaagccgccggagttttggcgcagagcgaaacaatacgctgggcaaaagaagaagcctcccaagttatcggctatttacttaaagccggaaacttaaggaggctacgcttcccatggaaaaataaacttactctttga

SEQ ID NO: 2988 - protein, 152 aa, Unknown
  Obtained from environmental sample
  misc_feature (1)..(152): Xaa is any amino acid
MQESGRAGRDGEQSKAILLWGPEDEIAFARAKTPADRKRLLALFSYAKDTEHCRRHSLLAMLNYDSGGEVPEKLCCDVCEKEADGGLREELSILNFFRKNKRRFTQSEAAGVLAQSETIRWAKEEASQVIGYLLKAGNLRRLRFPWKNKLTL

SEQ ID NO: 2989 - DNA, 723 bp, Unknown
  Obtained from environmental sample
  misc_feature (1)..(723): n is a, c, g, or t
ttgtatttcgccgaaatttcaggcggcgcttttgatccgacagtcgggccgttagtctctctctggggaatcgggagtgaaaatccgcgcgtcccctcacaggcggaaattgacgccgctctgtctttgattaattggcaggatattgaactggacaaggaacaacgcagcgtgtttttgaaacgtcccggcatggcgcttgatcttggagcgattgccaaaggttatgccgcagacgaagctgcggagattatcaggaaggcgggacttaaacaggcgatagtcgatcttggcggaaacattttggtttacggagaaaagaaggacaagagtccgtggagagtgagcgttcaggaccctcttgaagatcgaggcagatctttaggtgttataacaggcgctgaagctactatggtaacatccggtgtctacgaaagattttttgaggctgacggacagcggtatcatcatatcttttcccccttcaacggataccctgccgataccggtttactgtcggtaacaatcattgctaaaaattcaatagatgccgacgctctttcaactgcggtttttgtccttggttatgagaaaggacgcgcccttatcgaatcccttgaaggaacggaagcgatctttgtctttaatgataaaagcgttcgaaagactgaaggagcggaattaaaaataaacaataatagttacacattattatccgattga

SEQ ID NO: 2990 - protein, 240 aa, Unknown
  Obtained from environmental sample
  DOMAIN (1)...(235): ApbE family
  misc_feature (1)..(240): Xaa is any amino acid
MYFAEISGGAFDPTVGPLVSLWGIGSENPRVPSQAEIDAALSLINWQDIELDKEQRSVFLKRPGMALDLGAIAKGYAADEAAEIIRKAGLKQAIVDLGGNILVYGEKKDKSPWRVSVQDPLEDRGRSLGVITGAEATMVTSGVYERFFEADGQRYHHIFSPFNGYPADTGLLSVTIIAKNSIDADALSTAVFVLGYEKGRALIESLEGTEAIFVFNDKSVRKTEGAELKINNNSYTLLSD

SEQ ID NO: 2991 - DNA, 822 bp, Unknown
  Obtained from environmental sample
  misc_feature (1)..(822): n is a, c, g, or t
ttgagacggcttaaaattgagtctgttcttctaaaagacggaaaatcgcgctttaccgcctgcctttcgacccaagccggctgcccggcggggtgcgtattctgcaaaacaggcagtctgggcttttcccgcagcctgacagcagccgaaatagcggaacaatttttatttttgcgcatggaggcttgcacagaggcggaggaaatgagcgggcatggcattgataacatcgttatcatgggcatgggagagcctttgttaaaccttgaagaactgcgaaaagcaattgccttttttacggaccctgccggaataaatttctccaaacgcaggataacaatttccacttgcggcatctgcgccggcctgtctgatatggcagacaacggcccctatgtgcggcttgccctctcgcttgtaaccgcggacgaggaactgcgcaaacaacttatgcccattgccgccgccaacccactggaaaaaatgaaacaagccctatccgcgtttcaaggcaaaagcggcggccgagtaactttagaagtgccccttctaggcggcatcaacacccgcgcaaaagacgcactatccatagcgcatttcgcaaaaggaatggataccgtaataaacataatcccatggaatcccgccgccggtcttgaatttcaaagcaagcccctgctcgaaccggataaaaaagagacggaagactttgtaaaattgcttgaaaaacaaggtttaaaagtgacaatgcgccatcgcanaggaagaggtattatgggcgcatgcggacagttaggatcattaacaatgagncatgagtaa

SEQ ID NO: 2992 - protein, 273 aa, Unknown
  Obtained from environmental sample
  DOMAIN (22)...(198): Radical SAM superfamily
  misc_feature (1)..(273): Xaa is any amino acid
MRRLKIESVLLKDGKSRFTACLSTQAGCPAGCVFCKTGSLGFSRSLTAAEIAEQFLFLRMEACTEAEEMSGHGIDNIVIMGMGEPLLNLEELRKAIAFFTDPAGINFSKRRITISTCGICAGLSDMADNGPYVRLALSLVTADEELRKQLMPIAAANPLEKMKQALSAFQGKSGGRVTLEVPLLGGINTRAKDALSIAHFAKGMDTVINIIPWNPAAGLEFQSKPLLEPDKKETEDFVKLLEKQGLKVTMRHRXGRGIMGACGQLGSLTMXHE

SEQ ID NO: 2993 - DNA, 438 bp, Unknown
  Obtained from environmental sample
  misc_feature (1)..(438): n is a, c, g, or t
atgatacagttgtattttttatcgatcctttgtaatggcttgtgcggatatatcctgtttgcaggaaaagaaggcgaagaatcggaagattcctcggcggactctataaatagaaacttacgtttttcccttaatacccctactttccaccttgttttaggtattttatgcgcggttaccggcgtgttaaaactcctttcgccgactttggacgggattcttattttaggcgatcttttaccgtcggctgcgggaattattgccggtattttattgatctttggaatttaccgccaggacatttcagcggcgcctgaaaatcccggctcgttggaccgttttggcataagtcttttaagattcagaagagctataggacttggcttaataatcgtcgccgttttacattttctttttccgaaggcgctttttctgtaa

SEQ ID NO: 2994 - protein, 145 aa, Unknown
  Obtained from environmental sample
  misc_feature (1)..(145): Xaa is any amino acid
MIQLYFLSILCNGLCGYILFAGKEGEESEDSSADSINRNLRFSLNTPTFHLVLGILCAVTGVLKLLSPTLDGILILGDLLPSAAGIIAGILLIFGIYRQDISAAPENPGSLDRFGISLLRFRRAIGLGLIIVAVLHFLFPKALFL

SEQ ID NO: 2995 - DNA, 831 bp, Unknown
  Obtained from environmental sample
  misc_feature (1)..(831): n is a, c, g, or t
gtgattttgctcttcacgccgctttacgtttccaacatntgcgacaaccgatgcctttactgctctttcgcccatcagaacaagatcaagcggcgtcatctgaacatagacgaggtgcgccgcgaggcggagcgcatagcatccacggggctgaggcacattctaatgctgacgggcgagtcgcgccgcgccgcgccggtagagtaccttcgcgactgcgtctcggttttgcgggagtatttttcttcgatatccatagaggtctacccgcttgacgagttggagtattccgaattggtcggggcgggggcggacgggttgacgatttatcaggagacttacgacagggaagtttacgcggcgcttcacgagggcgggcctaaggcggacttcgagtaccgcctcttagctccagagcgcgggtgcgcggcgggtatgcgctccgccacggtcggggcgcttttggggctggcgcggcctttgaaggacgccttcttctccgggctgcacgcccgctatatcgcggagaggttcccgtccgtagaagtttcggcctccttcccgcgcatcaggccgcaggcgggggagttcgagcctggcttcgcggcggacgacagggccttcgtccggtacatgacggccttccgcctcttcatgccgagcgccgggataacggtgtccacgagggaatcggccgcctttcgggacgcggtgctgccgctgggcccgacgaagatgtccgccggggttagcaccgccgtgggcgggtcgggcggccgcgcctccgacgcgcagttcgagatcgcggacgggaggtcggtgaagagatga

SEQ ID NO: 2996 - protein, 276 aa, Unknown
  Obtained from environmental sample
  DOMAIN (8)...(170): Radical SAM superfamily
  misc_feature (1)..(276): Xaa is any amino acid
MILLFTPLYVSNXCDNRCLYCSFAHQNKIKRRHLNIDEVRREAERIASTGLRHILMLTGESRRAAPVEYLRDCVSVLREYFSSISIEVYPLDELEYSELVGAGADGLTIYQETYDREVYAALHEGGPKADFEYRLLAPERGCAAGMRSATVGALLGLARPLKDAFFSGLHARYIAERFPSVEVSASFPRIRPQAGEFEPGFAADDRAFVRYMTAFRLFMPSAGITVSTRESAAFRDAVLPLGPTKMSAGVSTAVGGSGGRASDAQFEIADGRSVKR

SEQ ID NO: 2997 - DNA, 396 bp, Unknown
  Obtained from environmental sample
  misc_feature (1)..(396): n is a, c, g, or t
gtgcaggacaaccagtcccggtccgtcaggggcgtgctgcggggcctgcattttcagaaaacccacgcgcagagcaaactggtccgcgccattgaaggcgaagtttttgatgtcgcggtggatataaggccgggttcccccacccgcggcaaatggcacgccgttgttttaagcggcgaaaagcagaacctgttttacatccccgccggttttgcccacggatttctggtgttaagcgacacggcggttttcgcgtacaaatgcacggatttttattaccccgaagacgagggcggcattatctggaatgatcctgtaattggcataaaatggccggatttggggatggattatcttctttccgaaaaagacaaaaaactgccaggttatgtgtaa

SEQ ID NO: 2998 - protein, 131 aa, Unknown
  Obtained from environmental sample
  DOMAIN (1)...(131): dTDP-4-dehydrorhamnose 3,5-epimerase
  misc_feature (1)..(131): Xaa is any amino acid
MQDNQSRSVRGVLRGLHFQKTHAQSKLVRAIEGEVFDVAVDIRPGSPTRGKWHAVVLSGEKQNLFYIPAGFAHGFLVLSDTAVFAYKCTDFYYPEDEGGIIWNDPVIGIKWPDLGMDYLLSEKDKKLPGYV

SEQ ID NO: 2999 - DNA, 759 bp, Unknown
  Obtained from environmental sample
  misc_feature (1)..(759): n is a, c, g, or t
ttgatggaatcgacagtggggcttcaatctgtgcagtttgtggacagtaacgggataaggcttcattattcaacttccgcccgcgatatattaaaccagaatcaaaactcgacggcttatcgtaattataatgaaaacccgacatccctgccttatgaaattgtaagcgttgaagacgttaataccgccaaacttacaatggacgatcaaaacgacagaattatcttttcatttccttttagggattcaatggacgttttccatgggaccgcgcttttttcggtatcaatcaggacatttgccgaaagacttatagaagcgggacggtttaaaataagtgataacatttccctgataaacgaaccgtcgggaattcttttgggaagtcccgaaacgtcaaagagcgttattttcaacagagttgcggagatttggaagaaaggtattcaaggatatataactcttgacgctgaagattccggagcggcattttcacttatttcgacaaaaacagatcagaatttattttttggacgtttggttgacagttctttattttcaatttccgcacccatgaaatttatattgcaagtttccatctttttaacgttcttccttacgttttttctcctgttaaatctaaagcccagccatgtggcaattgtaagaaatcgcataacgcgcttaagagacagtctttttgagcaattatacgcgaataaatccgcccaggaaagggcaaactggatacggaactaa

SEQ ID NO: 3000 - protein, 252 aa, Unknown
  Obtained from environmental sample
  misc_feature (1)..(252): Xaa is any amino acid
MMESTVGLQSVQFVDSNGIRLHYSTSARDILNQNQNSTAYRNYNENPTSLPYEIVSVEDVNTAKLTMDDQNDRIIFSFPFRDSMDVFHGTALFSVSIRTFAERLIEAGRFKISDNISLINEPSGILLGSPETSKSVIFNRVAEIWKKGIQGYITLDAEDSGAAFSLISTKTDQNLFFGRLVDSSLFSISAPMKFILQVSIFLTFFLTFFLLLNLKPSHVAIVRNRITRLRDSLFEQLYANKSAQERANWIRN

SEQ ID NO: 3001 - DNA, 321 bp, Unknown
  Obtained from environmental sample
  misc_feature (1)..(321): n is a, c, g, or t
atggtggaagcggtattacagagcgagtatgaaatatctaccgccaaatccggcaaagaagcgttaggattattctatcaaggacttgttcccaaattagtattattagacttaataatgccggacatggacggttggaatatttataaaagaataaaagcaataagcggcttacacgataccccgatagcgtttttcacatcttcaaccgatcaaaaagacataaaacacgcgcacgaaatgggcgcggttgattatatcaaaaagccctatgacaaagacgacttgttacgcagggtggggagaattattagaaagtga

SEQ ID NO: 3002 - protein, 106 aa, Unknown
  Obtained from environmental sample
  DOMAIN (2)...(101): Response regulator receiver domain
  misc_feature (1)..(106): Xaa is any amino acid
MVEAVLQSEYEISTAKSGKEALGLFYQGLVPKLVLLDLIMPDMDGWNIYKRIKAISGLHDTPIAFFTSSTDQKDIKHAHEMGAVDYIKKPYDKDDLLRRVGRIIRK

SEQ ID NO: 3003 - DNA, 588 bp, Unknown
  Obtained from environmental sample
  misc_feature (1)..(588): n is a, c, g, or t
atgctgaacggtgtttaccatctgcttctctcggaaacaggccgtactaaggcggactgggattttctcaattcgccgggcgttcttgacccttcaaaacggcggcctttcgcgggtatgcaggtgtatcttgaggatatccgttccccgtttaacgtgggttccatgttcagggccgccgaatcttttggggttgaaaaaatctggctgtctccgttctgcgccgatcccaaacacaagcgggccgagcgtacggctatgggctgcgtcgatgtccttccctgggagcgtttatcacacgatccttttgcagatccgcgtaaaaaatttactgaggagtcaatctttgcccttgaaaccggcggcacgccgcttgaggattttacatttcctaaacagggaatactaatcgccggctccgaagagttaggtgtaagtccgggcgctcttgccgccgcggacgcgtcccgtgggagggtcagcataacctgttacggcgcgaaaggctccctcaacgtgtcggttgctttcgggattgtgatgcaggcctggagcagttcaaagagcagtgagcaaatagcaaagtaa

SEQ ID NO: 3004 - protein, 195 aa, Unknown
  Obtained from environmental sample
  DOMAIN (39)...(182): SpoU rRNA Methylase family
  misc_feature (1)..(195): Xaa is any amino acid
MLNGVYHLLLSETGRTKADWDFLNSPGVLDPSKRRPFAGMQVYLEDIRSPFNVGSMFRAAESFGVEKIWLSPFCADPKHKRAERTAMGCVDVLPWERLSHDPFADPRKKFTEESIFALETGGTPLEDFTFPKQGILIAGSEELGVSPGALAAADASRGRVSITCYGAKGSLNVSVAFGIVMQAWSSSKSSEQIAK

SEQ ID NO: 3005 - DNA, 474 bp, Unknown
  Obtained from environmental sample
  misc_feature (1)..(474): n is a, c, g, or t
ttgcgatactcgtccagggtggtggcgcctatgcagcgcaattcgccgcgagccagcgcgggcttgagtaaattggaagcgtcggtcgccccttccgcggcgcccgccccaaccagtgtatgcatttcgtcgataaatagaattatcttcccttcggcggactgcacctcgtgtatcagcgccttcaaacgttcctcaaattcgccgcggaatttcgctcccgctacaagcagacccaaatccagggcgaggagttttttgtctttcagaccctccggcacgtccccggcaactatgcgccgcgcaaggccctctacaatggcggtcttgccaacgcccggctcgcctatcagtatggggttgtttttcgtgcgccgtgacagcacctgcatacaacggcgtatttcctcgtcgcgcccgataaccggatcgattttctcctgcctcgccagggcggtaagatcgcggcaataa

SEQ ID NO: 3006 - protein, 157 aa, Unknown
  Obtained from environmental sample
  misc_feature (1)..(157): Xaa is any amino acid
MRYSSRVVAPMQRNSPRASAGLSKLEASVAPSAAPAPTSVCISSINRIIFPSADCTSCISAFKRSSNSPRNFAPATSRPKSRARSFLSFRPSGTSPATMRRARPSTMAVLPTPGSPISMGLFFVRRDSTCIQRRISSSRPITGSIFSCLARAVRSRQ

SEQ ID NO: 3007 - DNA, 867 bp, Unknown
  Obtained from environmental sample
  misc_feature (1)..(867): n is a, c, g, or t
atgttttgcgcgcgctatagtgagatttttgactctgatatttcctgtgaggcggtagttctgccgggcatttccacatacgtgggggcggacattgtttccgggctgttcttcaccgagttatacgaaaatcatgagcccactgtgttgattgacattggcacgaacggggagatggccctgtcgtacaaaggaaaaatcctctgtaccgctactgcggcgggccccgcgtttgaggggggcaatatcctgtggggaaccggaagcgtaccgggggcgatttcccgtgtgcaatttcaggatggggcatttaaggtaagcaccatcggggacaagccctcgtcaggcatctgcggcacgggagtaatagacatagtgttccaggggcttaaagccgggcttatacttccatcgggcaggttcggtaaaaaagaacagcctaacgatattttccttgccaaagcgggcgacggccgggacattgtgttttgccagaaagatgtgcgggaactacagttgggaaagagcgccatccgttcggggctggacgctcttttgaaccacgccggccttggctatgacgatattcaaaccctgtacattgccggcggctttggcttcaacatcaacatggaaagcgcggcgggaatcggccttatccccgcgccgcttgtcccaaaggtatcgcttatcggaaacagctccctgggcggcgctgtcaaatacctgcttaatcccgcggcagggggcggccttcccgattatgacgaaacattgaatgggatcatcaagcggaccgaggaattcagcctgcctgaggataaatacttcaacacgaattttatcaccaatgtaaatttggcttaa

SEQ ID NO: 3008 - protein, 288 aa, Unknown
  Obtained from environmental sample
  misc_feature (1)..(288): Xaa is any amino acid
MFCARYSEIFDSDISCEAVVLPGISTYVGADIVSGLFFTELYENHEPTVLIDIGTNGEMALSYKGKILCTATAAGPAFEGGNILWGTGSVPGAISRVQFQDGAFKVSTIGDKPSSGICGTGVIDIVFQGLKAGLILPSGRFGKKEQPNDIFLAKAGDGRDIVFCQKDVRELQLGKSAIRSGLDALLNHAGLGYDDIQTLYIAGGFGFNINMESAAGIGLIPAPLVPKVSLIGNSSLGGAVKYLLNPAAGGGLPDYDETLNGIIKRTEEFSLPEDKYFNTNFITNVNLA

SEQ ID NO: 3009 - DNA, 663 bp, Unknown
  Obtained from environmental sample
  misc_feature (1)..(663): n is a, c, g, or t
ttgatatttgatgaagttgttgaaatttgtgaaattatcgaagaaacgcctgtaaatcttgaagtaactactgaactttctcccactgcacctgatgtaattattgaaaaacccacaatagttcctgatgaagttattgaagaatccgcggaaattcaagtcgcagaggctctcgaagcgactgattcgagagaagattcagatgcttcattgatgtttgatgaagttgttgaaatttgtgaaattatcgaagaaccgactgtaaatcttgaagtaactactgaactttctcccgttacgcaaaatgaaataagtgaagagccggaagaaactccggtcgttgaaacgactgaagctgctaatgcttcccttataattgatgatgtaattgaagagtctgaaaaagctccggttgatgaagctctcgatgcaacccttacttccttggcgtttgatgaagctattgaagagcctgcggaaactccttttgccgggactctcgaaattaccgaagcgacagatacttccctgacaattgatgaagtaattgaagagcctgcggaatctacggttgctgaggttctagaaactacagaagcgactgttacttccttgataattgatgaagttattgaagaacctgtgaaacctcggccgatctga

SEQ ID NO: 3010 - protein, 220 aa, Unknown
  Obtained from environmental sample
  misc_feature (1)..(220): Xaa is any amino acid
MIFDEVVEICEIIEETPVNLEVTTELSPTAPDVIIEKPTIVPDEVIEESAEIQVAEALEATDSREDSDASLMFDEVVEICEIIEEPTVNLEVTTELSPVTQNEISEEPEETPVVETTEAANASLIIDDVIEESEKAPVDEALDATLTSLAFDEAIEEPAETPFAGTLEITEATDTSLTIDEVIEEPAESTVAEVLETTEATVTSLIIDEVIEEPVKPRPI

SEQ ID NO: 3011 - DNA, 417 bp, Unknown
  Obtained from environmental sample
  misc_feature (1)..(417): n is a, c, g, or t
ttgtaccagccctcaaacaccttccagaggatttcgtccttggagaaaaagcccgagaaggggaatatcccgcagatcgccagcgtggccaggcccatcgaggcaaaggttatgggcatgtacttccgcagcccgcccatgttccgcatgtcctgctcgtggtggcaggccactataacggagccggcgccaaggaacagcgtggccttgaagaatgcgtgggtgaagacgtggaacatgccggccgtgaatgcccccgcgcccatgcccatgaacatgaagcccagctgcgaaaccgtcgagtacgccagcaccttctttatgtcgtactgcgccaggcccatcgtggcggcgaagaaggccgtagccgcgcccaccgccaggatgacggccagcgccgtttcggcgttggcatag

SEQ ID NO: 3012 - protein, 138 aa, Unknown
  Obtained from environmental sample
  misc_feature (1)..(138): Xaa is any amino acid
MYQPSNTFQRISSLEKKPEKGNIPQIASVARPIEAKVMGMYFRSPPMFRMSCSWWQATITEPAPRNSVALKNAWVKTWNMPAVNAPAPMPMNMKPSCETVEYASTFFMSYCARPIVAAKKAVAAPTARMTASAVSALA

SEQ ID NO: 3013 - DNA, 459 bp, Unknown
  Obtained from environmental sample
  misc_feature (1)..(459): n is a, c, g, or t
atgattttgaatatgctgaaaggaaagcctctgccggtctacggagacggcaaaaatatccgcgactggctgtttgtggaggatcacaattcggcggtttggacaattatgcgtaatggcgtatccggtgaaacatacaacattggcggcgagaacgagtgggagaacatcaaactgctcaatgtattgattgacattgtctgcactaaagccaagctggaacctgccaaagttcgcggaaccataacctatgttaaagaccgccccggccatgaccgccgttacgcgatagactgctccaaacttaaacgcgaacttggctggaaacaggacgtaaattttgaagaagggctttcccgtaccgttgattggtatctgacaaacccgcaatggatagagagcatacgcagcggtgagtatcagaaatgggtggagaagaattatggagagaggggataa

SEQ ID NO: 3014 - protein, 152 aa, Unknown
  Obtained from environmental sample
  misc_feature (1)..(152): Xaa is any amino acid
MILNMLKGKPLPVYGDGKNIRDWLFVEDHNSAVWTIMRNGVSGETYNIGGENEWENIKLLNVLIDIVCTKAKLEPAKVRGTITYVKDRPGHDRRYAIDCSKLKRELGWKQDVNFEEGLSRTVDWYLTNPQWIESIRSGEYQKWVEKNYGERG

SEQ ID NO: 3015 - DNA, 384 bp, Unknown
  Obtained from environmental sample
  misc_feature (1)..(384): n is a, c, g, or t
gtgagaagcgagaacatcgaggatcatgttatgcaccgggaatatttcagcattgacgagcaggccgcgttaaaaatcgaatccgcgaaggcgcagggacgcaaggtcatagcggtggggactacgagcgtccgcagcctggaaagcgcctgggacaacggaacgattaaaagaggggagaataccacgtcaatttttatttatcccggctataagttcaatgtcgcggacgcgttattcaccaacttccatacgccggaatccactctgctgatgcttgtatcggcctttgccggaagggaattgatcctggaaagttacgccgaggctattgcccagggctatcgttttttcagttacggcgacgcgatgctgatagtataa

SEQ ID NO: 3016 - protein, 127 aa, Unknown
  Obtained from environmental sample
  misc_feature (1)..(127): Xaa is any amino acid
MRSENIEDHVMHREYFSIDEQAALKIESAKAQGRKVIAVGTTSVRSLESAWDNGTIKRGENTTSIFIYPGYKFNVADALFTNFHTPESTLLMLVSAFAGRELILESYAEAIAQGYRFFSYGDAMLIV

SEQ ID NO: 3017 - DNA, 684 bp, Unknown
  Obtained from environmental sample
  misc_feature (1)..(684): n is a, c, g, or t
atgaagcatggaaaaaaataccgcgaaagcctgaagaagtataccgttgccaatacctacgagcttaaagagggcctcggcctcgtcaagtccatggcattcgccaaatttgacgaaaccgtggatctttcggtcaaactgaatctgaaaaaaagccagtccgtgcgcgacaccgtcgtcctgcccaaccagttcagaggcgaaaaaaaaatcctggtgttctgtaaacctgaaaaagaaaaagaagcccaggaagcgggcgcggcgtttgtgggcgctgacgaccttatcgagaaagtaaagggcggctggacggaatttgatattgccgttgcgaccccggacatgatgaaggacgttggaaagcttggtatggtgctcggtcgcaaagggctgatgcccaacccgaaaaccggcaccgtcaccttcgatctcaaggggacgctggctgaactgaaaaaaggccgcacggagttccgcgccgacaagaccggcgtagtgcatctggccgtggggaaggtctccatgaccccggaacagattgccgataatgtcaatgctgtcattgtagagataaagcggaaacgccctgcggacgcaaaaggcgattttatcaagtccatatcggttgcctcaaccatggggcccggcgtatgggttgccatcgctgaacaacaggaatag

SEQ ID NO: 3018 - protein, 227 aa, Unknown
  Obtained from environmental sample
  DOMAIN (16)...(217): Ribosomal protein L1p/L10e family
  misc_feature (1)..(227): Xaa is any amino acid
MKHGKKYRESLKKYTVANTYELKEGLGLVKSMAFAKFDETVDLSVKLNLKKSQSVRDTVVLPNQFRGEKKILVFCKPEKEKEAQEAGAAFVGADDLIEKVKGGWTEFDIAVATPDMMKDVGKLGMVLGRKGLMPNPKTGTVTFDLKGTLAELKKGRTEFRADKTGVVHLAVGKVSMTPEQIADNVNAVIVEIKRKRPADAKGDFIKSISVASTMGPGVWVAIAEQQE

SEQ ID NO: 3019 - DNA, 726 bp, Unknown
  Obtained from environmental sample
  misc_feature (1)..(726): n is a, c, g, or t
ttgatggccgaaatggtggaggagagtcaaacgaacttttccaatctgcgggtgcgccgtatagacgcggacgcggccagtaaaaaaggaattctggaagataccataagcctgtttaaggccggagcgatagacgtgctgctgggaacccagatggtcgccaaaggcctgaactttcccggcgtacgcctggtgggcgtggtctttgcggacaccggcctgcatttgccggacttccgcgccgccgagcgtaccttctcgctgattgttcaggttgccggcagggcggggcgctacttcccggacggcaaagttatagtccagaccctccgcatcggcgatcccgtaatcgcccgttcctgcgccattgacgtaaaaggcttttttgacgcggaacttgcccagcgggagatcctcaattttccgccctatacgcgccttatccgcttcaacgcccgcagtcgaaattgtgcgcgcgccgacgccgcgatcaagcgccttgccacactggcggcgactcttatccctcctggggctgatatgctggggccggcggaatgtcctatcggcgttatcaatgggaaccaccgccgccagcttatcctgcgcggcaaatcaatgggcgcgctgcacggcgcggcccgcgtccttttggaacgctacgaaaaaggccgcgacagccaggtatatatagaagtggacgtggatccggtaaaccttttatag

SEQ ID NO: 3020 - protein, 241 aa, Unknown
  Obtained from environmental sample
  DOMAIN (10)...(100): Helicase conserved C-terminal domain
  misc_feature (1)..(241): Xaa is any amino acid
MMAEMVEESQTNFSNLRVRRIDADAASKKGILEDTISLFKAGAIDVLLGTQMVAKGLNFPGVRLVGVVFADTGLHLPDFRAAERTFSLIVQVAGRAGRYFPDGKVIVQTLRIGDPVIARSCAIDVKGFFDAELAQREILNFPPYTRLIRFNARSRNCARADAAIKRLATLAATLIPPGADMLGPAECPIGVINGNHRRQLILRGKSMGALHGAARVLLERYEKGRDSQVYIEVDVDPVNLL

SEQ ID NO: 3021 - DNA, 417 bp, Unknown
  Obtained from environmental sample
  misc_feature (1)..(417): n is a, c, g, or t
atggatgtttcaaagatcgatcatatcggtattgcagtaacaaacctggatgcgacgatcaaattctacgaagatgttttgggcattaaatgcaaaggcactgaaaccgtcgccgatcaaaaggttaaggttgctttctttccggtgggaggtaccgagcttgagtttctggaatcaacaagcgaggacggccccatattcaagtttatcgaagcaaataagggtcgcggcggcattcagcatattgcggtacgggttgatgatgtccgcgcggctatcggggaactaaagtcaaaaaacgtcggcatgatcgacgaagagccgcgctacggcgcgggaggcgcttccattgccttttgtcaccccaagtccacaggcggcatactattggaattatgcgaaaggaaaacaaattaa

SEQ ID NO: 3022 - protein, 138 aa, Unknown
  Obtained from environmental sample
  DOMAIN (5)...(132): Glyoxalase/Bleomycin resistance protein/Dioxygenase superfamily
  misc_feature (1)..(138): Xaa is any amino acid
MDVSKIDHIGIAVTNLDATIKFYEDVLGIKCKGTETVADQKVKVAFFPVGGTELEFLESTSEDGPIFKFIEANKGRGGIQHIAVRVDDVRAAIGELKSKNVGMIDEEPRYGAGGASIAFCHPKSTGGILLELCERKTN

SEQ ID NO: 3023 - DNA, 768 bp, Unknown
  Obtained from environmental sample
  misc_feature (1)..(768): n is a, c, g, or t
atgcggcttattacaaatatctttgagtactgttcaaaaaatgttccgcagtggaacacgattagcatatccggctaccatatccgcgaggctggctcaaccgccattcaggaagtcgcctttacactggctaatggcatcgcctatgtgcaggcagcggtggaaacagggcaggacgtagatgattttgggccaaggctttctttcttttttaactcccacaataatttgctggaagaggttgccaagttccgcgcagcaaggcggctttgggctaaaatcatgcgggagaggtttggcgcgaaggatcccaagtcctggcagttgaaattccacacgcagacggcgggatgcacgcttaccgcccagcagccggataacaacatagtccgcgtggcaatacagacgcttgccgccgtgctgggcggcacccagtcgctccacaccaactcgcgggacgaagcgatggccctgcccagcgagcagtcggtgatgatcgcgctgcgtacccagcagattgttgccaacgaaagcggcgtggcggacagcgtggatccgttagccggctcttactacgttgaatcgctgacggacacaatcgaaaaagaagccgcgaagctcattgcccgcatagacgatctgggcggagccccagccgcgattgatactggcttcatccaaaaggaaattatggacgcagcctacaagtaccagaaagcaattgaaagtgnggagaagaccatcgttgggcttacaagtaccangtaa

SEQ ID NO: 3024 - protein, 255 aa, Unknown
  Obtained from environmental sample
  DOMAIN (1)...(255): Methylmalonyl-CoA mutase
  misc_feature (1)..(255): Xaa is any amino acid
MRLITNIFEYCSKNVPQWNTISISGYHIREAGSTAIQEVAFTLANGIAYVQAAVETGQDVDDFGPRLSFFFNSHNNLLEEVAKFRAARRLWAKIMRERFGAKDPKSWQLKFHTQTAGCTLTAQQPDNNIVRVAIQTLAAVLGGTQSLHTNSRDEAMALPSEQSVMIALRTQQIVANESGVADSVDPLAGSYYVESLTDTIEKEAAKLIARIDDLGGAPAAIDTGFIQKEIMDAAYKYQKAIESXEKTIVGLTSTX

SEQ ID NO: 3025 - DNA, 513 bp, Unknown
  Obtained from environmental sample
  misc_feature (1)..(513): n is a, c, g, or t
atggtgcaagctgctaaaaaaaaggtgtatatagaaactactatacctagcgttatcacggctaggcccagtagggatattggaaatttgtaccatcaagaaataagcagagaattttgggaaaatgaaaggcataaatatgacttattcataagcaaatatgtgcttgaagagtgtagcaaaggtgatgccgatgtagcaaaaaagagaatggaactcctaaaggaagttactcttttggatataaataaagaaactgagaaattagccgaagagtattttaaatgcttgaacattcctgagaaagctaaaactgattgttttcacttggcagtatgcgttgttaaaaaaattgattttttgataagttggaatatgacacatttaggatatcccacgtattcaaagatagttctatataacggttctcacggattgtggttacccgaattgctaacgccagatatatttatgaaaattcaaaaagaggaggcagaaaatgaaagagtataa

SEQ ID NO: 3026 - protein, 170 aa, Unknown
  Obtained from environmental sample
  misc_feature (1)..(170): Xaa is any amino acid
MVQAAKKKVYIETTIPSVITARPSRDIGNLYHQEISREFWENERHKYDLFISKYVLEECSKGDADVAKKRMELLKEVTLLDINKETEKLAEEYFKCLNIPEKAKTDCFHLAVCVVKKIDFLISWNMTHLGYPTYSKIVLYNGSHGLWLPELLTPDIFMKIQKEEAENERV

SEQ ID NO: 3027 - DNA, 762 bp, Unknown
  Obtained from environmental sample
  misc_feature (1)..(762): n is a, c, g, or t
ttgcgccagtgccttcagcttattgcgcgtttcccgaccatagtcgcgtattcttatatggcgatgaggcattatttttacaaagaaagccttgtaattcatcaggttgatcctgcctgttccatttcggaaactctgctttcgcttatcaggccggatcaaaaatacacccaatacgaggcgcagcttttagattgggctttggctcttcacgccgaacacggcggcggcaacaattcaacatttaccgttcacgttatttcatcttccgataccgatacttattcggcaatctccgccggaataggctctcttaaaggttttaagcacggcggcgcaaacgcgaaagttataggaatgatggaagacataaagaagcacgttaagaattggaacagtgagaaggaagtcgccgaatatttagaaaaaatattaaggggcgaggcttatgaccgctcaggattaatttacggtcagggacacgccgtatacacgataaatgacccccgcgccacattgttacgcgacaaggccgtagctcttgccgaagaaaaaggctttataaaggaattaaacctttaccgtcttattgaaaagcttacaccgactgtttttaagaaggtaaaaggctctgaaaaggacatctgcaccaacgttgatttttactccggctttgtctacaaaatgcttggaatcccgccggagcttaacactcccatttttgccgtaagcagggcagccggctggtgcgctcaccgttga

SEQ ID NO: 3028 - protein, 253 aa, Unknown
  Obtained from environmental sample
  DOMAIN (1)...(252): Citrate synthase
  misc_feature (1)..(253): Xaa is any amino acid
MRQCLQLIARFPTIVAYSYMAMRHYFYKESLVIHQVDPACSISETLLSLIRPDQKYTQYEAQLLDWALALHAEHGGGNNSTFTVHVISSSDTDTYSAISAGIGSLKGFKHGGANAKVIGMMEDIKKHVKNWNSEKEVAEYLEKILRGEAYDRSGLIYGQGHAVYTINDPRATLLRDKAVALAEEKGFIKELNLYRLIEKLTPTVFKKVKGSEKDICTNVDFYSGFVYKMLGIPPELNTPIFAVSRAAGWCAHR

SEQ ID NO: 3029 - DNA, 654 bp, Unknown
  Obtained from environmental sample
  misc_feature (1)..(654): n is a, c, g, or t
gtgtccgccgccggagcgtcaatgttaagaggaggcgcgtttaagccgcgcacttccccctacgattttcagggactcggcacagaggggatagacctgcttattgaagccagaaaacgcaccggcatgcccatcgtcactgaaattatgaacactaaccatctgccgttatttgaaaatatcgacgttattcaggtaggcgcgcggaatatgcagaattttgaacttttaaaagaattgggcatgacaaaaaaaccaattctgttaaaacgcggactggctaatacaatgaaagaactccttatgagcgcggaatatatcatggctgggggaaaccataacatcatcctttgcgagcgcggaatccgcacctttgaaacttatacaagaaacaccttggatgtttccgcgattccaatgcttcgcgagctgacacatctgccggtaattgtagacccaagccacgcttcgggaatcgcgcgccttgtcgagcctatgtctctggcggcggcggcggccggcgctgacggccttatgatcgaggtgcataatgatcccgccaacgccctttgcgacggagcgcagtcgcaaacgcctgaacaatttgcaataacggcacagaaagtgcgtaaggtaagagaggcggtaaaataa

SEQ ID NO: 3030 - protein, 217 aa, Unknown
  Obtained from environmental sample
  DOMAIN (1)...(215): DAHP synthetase I family
  misc_feature (1)..(217): Xaa is any amino acid
MSAAGASMLRGGAFKPRTSPYDFQGLGTEGIDLLIEARKRTGMPIVTEIMNTNHLPLFENIDVIQVGARNMQNFELLKELGMTKKPILLKRGLANTMKELLMSAEYIMAGGNHNIILCERGIRTFETYTRNTLDVSAIPMLRELTHLPVIVDPSHASGIARLVEPMSLAAAAAGADGLMIEVHNDPANALCDGAQSQTPEQFAITAQKVRKVREAVK

SEQ ID NO: 3031 - DNA, 525 bp, Unknown
  Obtained from environmental sample
  misc_feature (1)..(525): n is a, c, g, or t
atggcaaacaaggtcgccaatgacgcaattcagattcacggcggcacgggctacatgaaggaattcaacgcggaacgccactacagggatgcgaggatcaccaacatctacgagggaactacccagcttcagattgtcgcggctatcgggccggtgacatcgggcgtcgcccagatggttatggacgaatacgacaaggtaaattacaaccacagccctgatctgcttgcgaaactccgcgacgctcgcaaggtttttgaagaggttctggaatacgccaaggcatacgaaggccatgagcagtttctcacctaccattcccgcaggcttgtggaaatggccaccgatcttattctgagttatctgctgatgagagacggcaaccacagcgagcgtaagcagaaagttgcgagaattttcataacgaaaatgccttcaagaataaaatctaatagggattttatcatgggcgaagacggcacgctgctgaaaaattacgaagcggtgatcgggaaaacaaattag

SEQ ID NO: 3032 - protein, 174 aa, Unknown
  Obtained from environmental sample
  misc_feature (1)..(174): Xaa is any amino acid
MANKVANDAIQIHGGTGYMKEFNAERHYRDARITNIYEGTTQLQIVAAIGPVTSGVAQMVMDEYDKVNYNHSPDLLAKLRDARKVFEEVLEYAKAYEGHEQFLTYHSRRLVEMATDLILSYLLMRDGNHSERKQKVARIFITKMPSRIKSNRDFIMGEDGTLLKNYEAVIGKTN

SEQ ID NO: 3033 - DNA, 828 bp, Unknown
  Obtained from environmental sample
  misc_feature (1)..(828): n is a, c, g, or t
atgggcaaagacaaacgcatcgaaggcgtaaccgatgtccacgaacaatcggaccgcgagggcttgcgtatcgtaatcgaacttaaacgcgacgcccaaccncaagtggtattgaaccaactttataaacacacgcaaatgcaggtctccacgggcattattttcctgtcgcttgtcaacggcgagccgaaatttttgaacctaaaagaaatgctgtttcactacttggaacaccaaaaagaaatcatcgtccgccgcacgaaattcgaccttgacgccgccgaagcccgcgcgcacatattggacggattggttattgcgcttgctaacattgacgaagtaatcaaaatcatcaaaacaagcgatgaccgtttcgatgcgcaaaataaattgattaaaaaattcgtcctgtccgaaaagcaagccaccgcaatccttgacatgcgattgcaccgccttgcgaaacttgaagtcgacaaaatcaaaaaggagcttgcggaattgaagcttctaatcgccgattacaaatcaattctggcaagccccaaacgcgtgcttgaaatcatccgaaaagagctcctcgaaatctccgcaaaatacggccaagaacgccgtacggagcttatccatgacttcggcgaaattgaacttgccgatttaatcgaacgcgaagacatcgtcgtttcgatgtcgcactacggctatatcaaacgcttgccgctttccgaataccgagcccaaaaacgcggcggccgcggtcaagccgcccatcacaccaaagaagaagactttgtcgaaaaccctgttcgtaacaaacacgcaccatga

SEQ ID NO: 3034 - protein, 275 aa, Unknown
  Obtained from environmental sample
  DOMAIN (224)...(273): DNA gyrase C-terminal domain, beta-propeller
  misc_feature (1)..(275): Xaa is any amino acid
MGKDKRIEGVTDVHEQSDREGLRIVIELKRDAQPQVVLNQLYKHTQMQVSTGIIFLSLVNGEPKFLNLKEMLFHYLEHQKEIIVRRTKFDLDAAEARAHILDGLVIALANIDEVIKIIKTSDDRFDAQNKLIKKFVLSEKQATAILDMRLHRLAKLEVDKIKKELAELKLLIADYKSILASPKRVLEIIRKELLEISAKYGQERRTELIHDFGEIELADLIEREDIVVSMSHYGYIKRLPLSEYRAQKRGGRGQAAHHTKEEDFVENPVRNKHAP

SEQ ID NO: 3035 - DNA, 651 bp, Unknown
  Obtained from environmental sample
  misc_feature (1)..(651): n is a, c, g, or t
ttgtgcgaaatttatatcgtcgagggcgaatccgcgggcggcaccgccaaacaaggccgcgaccgccgattccaagcaatccttccgttgcgcggtaaaatcttgaacgtcgaaaaagcccgtctttcaaaagttttggaaaacgcggaaatcaaaaacatgataacggcgttcggctgcggcatccaagaggactttgaaatgacaaaacttcgctacggcaaaatcatttgcatgaccgatgcggacgtggacggaagtcacattcgcattttgctgctgacctttttctaccgcttcatgaagccccttgtcgagggcggccatgtctatatcgcccaaccgccgctttacaaagtgaccaaaaacaaaatcgacaactattactattccgacgcggaacttgaaaaggcgctcggcaaatcgcgcgctggcgtaacagtgcaaaggtacaagggcttgggcgaaatgaacgccgagcaactttgggaaacgaccatgagtcccgcaaaccgcaccttgttgcaagtatccttggaggacgcgttcatggcggacgaaattttctcgacgcttatgggcgacaagcccgaactgcgccgcgactttatcgccgaanacgccgcccaatacacggaggtcgaagtatga

SEQ ID NO: 3036 - protein, 216 aa, Unknown
  Obtained from environmental sample
  DOMAIN (32)...(113): Toprim domain
  misc_feature (1)..(216): Xaa is any amino acid
MCEIYIVEGESAGGTAKQGRDRRFQAILPLRGKILNVEKARLSKVLENAEIKNMITAFGCGIQEDFEMTKLRYGKIICMTDADVDGSHIRILLLTFFYRFMKPLVEGGHVYIAQPPLYKVTKNKIDNYYYSDAELEKALGKSRAGVTVQRYKGLGEMNAEQLWETTMSPANRTLLQVSLEDAFMADEIFSTLMGDKPELRRDFIAEXAAQYTEVEV

SEQ ID NO: 3037 - DNA, 531 bp, Unknown
  Obtained from environmental sample
  misc_feature (1)..(531): n is a, c, g, or t
atggactcatacttcgacctccgtgtattgggcggcgtnttcggcgataaagtcgcggcgcagttcgggcttgtcgcccataagcgtcgagaaaatttcgtccgccatgaacgcgtcctccaaggatacttgcaacaaggtgcggtttgcgggactcatggtcgtttcccaaagttgctcggcgttcatttcgcccaagcccttgtacctttgcactgttacgccagcgcgcgatttgccgagcgccttttcaagttccgcgtcggaatagtaatagttgtcgattttgtttttggtcactttgtaaagcggcggttgggcgatatagacatggccgccctcgacaaggggcttcatgaagcggtagaaaaaggtcagcagcaaaatgcgaatgtgacttccgtccacgtccgcatcggtcatgcaaatgattttgccgtagcgaagttttgtcatttcaaagtcctcttggatgccgcagccgaacgccgttatcatgtttttgatttccgcgttttccaaaacttttga

SEQ ID NO: 3038 - protein, 176 aa, Unknown
  Obtained from environmental sample
  misc_feature (1)..(176): Xaa is any amino acid
MDSYFDLRVLGGVFGDKVAAQFGLVAHKRRENFVRHERVLQGYLQQGAVCGTHGRFPKLLGVHFAQALVPLHCYASARFAERLFKFRVGIVIVVDFVFGHFVKRRLGDIDMAALDKGLHEAVEKGQQQNANVTSVHVRIGHANDFAVAKFCHFKVLLDAAAERRYHVFDFRVFQNF

SEQ ID NO: 3039 - DNA, 405 bp, Unknown
  Obtained from environmental sample
  misc_feature (1)..(405): n is a, c, g, or t
gtggcgacattgtggggcagagtcgatgatttgtcttgttatgttaatggatatgttgattatacgaaggtaaaagaaacaaaaaattttcaaataggaatagaacgaattttgaaaggtttatcaagttacagtatagggttattatgcgccgaaaaagatccaataaactgtcatcgggatattttagtatgccgtaacctgaaagcctttaatgtttcaataaatcatatccttgcagacggaaaattggaagataatgatgccacagaaaaacgtttattatcaatattaaagttgactgataatgatttatttattagcgcagaagaacagttggatcttgcctatgacaggcaaggaaaaaatatcgcgtataaattaaaagaagaaaacatagaatga

SEQ ID NO: 3040 - protein, 134 aa, Unknown
  Obtained from environmental sample
  misc_feature (1)..(134): Xaa is any amino acid
MATLWGRVDDLSCYVNGYVDYTKVKETKNFQIGIERILKGLSSYSIGLLCAEKDPINCHRDILVCRNLKAFNVSINHILADGKLEDNDATEKRLLSILKLTDNDLFISAEEQLDLAYDRQGKNIAYKLKEENIE

SEQ ID NO: 3041 - DNA, 438 bp, Unknown
  Obtained from environmental sample
  misc_feature (1)..(438): n is a, c, g, or t
atgatacaattatttacgattggttatacgcataagtcagccgaaaaattcttttcccttcttgctgcgaataatatcaagaatcttatagatatacggctcaataatagttcacagttggcaggttttactaaaaaaaacgatctagaatatttcttgagaagtattacaaaaataaattatttttatctcccgtttctagctcctacaaaggatattttaaacgcctacaagaaaaaagaaattaattggaatgaatatgaactccggtttatttccttaatgaaagaacgtaaaatcgaacataaaattgatatagaaatgtttcaaaatggttgtttgttgtgcagtgaagaaaaagctgataaatgtcatcgaagattggtagctgaatatttgagaaatcaattcaaagatatagtgattacccatatataa

SEQ ID NO: 3042 - protein, 145 aa, Unknown
  Obtained from environmental sample
  DOMAIN (3)...(145): Protein of unknown function (DUF1130)
  misc_feature (1)..(145): Xaa is any amino acid
MIQLFTIGYTHKSAEKFFSLLAANNIKNLIDIRLNNSSQLAGFTKKNDLEYFLRSITKINYFYLPFLAPTKDILNAYKKKEINWNEYELRFISLMKERKIEHKIDIEMFQNGCLLCSEEKADKCHRRLVAEYLRNQFKDIVITHI

SEQ ID NO: 3043 - DNA, 330 bp, Unknown
  Obtained from environmental sample
  misc_feature (1)..(330): n is a, c, g, or t
gtgatagttatggctggtggctttgtggatgttccgcaagaagctccaccaactccgcaaccgaagattgtgcctcttgcgccgccgccagttaagatccaatcaactagttcggcagtgcaacaacacattcataatatgcttaaacctccgcaacccacaccacaaccaactccacaacccactcctcaacctgtgtcacaaacaatgccgctaccagtggcacaagctgtgccagttacaaatccgcctactagggaaattcccaatgtatcggatttttttgaagattttctttcagacggaaataaacctggtttctcactatga

SEQ ID NO: 3044 - protein, 109 aa, Unknown
  Obtained from environmental sample
  misc_feature (1)..(109): Xaa is any amino acid
MIVMAGGFVDVPQEAPPTPQPKIVPLAPPPVKIQSTSSAVQQHIHNMLKPPQPTPQPTPQPTPQPVSQTMPLPVAQAVPVTNPPTREIPNVSDFFEDFLSDGNKPGFSL

SEQ ID NO: 3045 - DNA, 669 bp, Unknown
  Obtained from environmental sample
  misc_feature (1)..(669): n is a, c, g, or t
gtgggagaactcgatccagataacgtgaggaaaggcttagatcttaagccccggcccagcgtacttgattccggccttaagatacccgaactgccgggccgcccgccgcagctttgtcagggctgcccccacggcgatagttacaccgcaattaacaaggcgctggcggaactcggtagcggccagggaagcccggattcggctataacttccgacatcggctgctatgccctcggcgcttccccgccctactccaccattgaaagctgcgtatgcatgggggcctctgtttccatggcgcgcggcgcggcggacgccggtttgaagtatgcggtaggcgtaatcggggactccacctttctccactcgggaattacctgcattgtggacgcgattcaatccgataccccaatgacgctcattatcctggacaattccatcgttgccatgacaggctgtcaggaaaccatagtaccatcggcgaaactaaaagaccttattctgggtctgggcgtaaaaccggaacacctcgttgagcttgaggccaagggacagtttcttgaagaaaacaccgcanaattaaaaaaagaatttgagtacaggggactttcggttgtgatcttccgcagggaatgtcttgaagcttttangaaacgaaacaggaagtaa

SEQ ID NO: 3046 - protein, 222 aa, Unknown
  Obtained from environmental sample
  DOMAIN (72)...(208): Thiamine pyrophosphate enzyme, C-terminal TPP binding domain
  misc_feature (1)..(222): Xaa is any amino acid
MGELDPDNVRKGLDLKPRPSVLDSGLKIPELPGRPPQLCQGCPHGDSYTAINKALAELGSGQGSPDSAITSDIGCYALGASPPYSTIESCVCMGASVSMARGAADAGLKYAVGVIGDSTFLHSGITCIVDAIQSDTPMTLIILDNSIVAMTGCQETIVPSAKLKDLILGLGVKPEHLVELEAKGQFLEENTAXLKKEFEYRGLSVVIFRRECLEAFXKRNRK

SEQ ID NO: 3047 - DNA, 354 bp, Unknown
  Obtained from environmental sample
  misc_feature (1)..(354): n is a, c, g, or t
ttgggcgggtatttccagcctgtttcgcaggttgtcgtagggccgctgacaagaaaatacggggaaattttcttctcggacaaattttttgtgggaacaaacggtattatgccaaattacgggtttacgggaaaggatcatatgcggtcgcagaccgtaatggatttggctgaatacgcgcgttatatctttgttcttacagacgcggaaaaattcaagcaccagggcgtgctggggatgctgcgctttgaaaaggtgacaggggttttcaccgacacccgtattccccccgaatatgaacaactgctgcttgataaaaaagtggcgctgcacaaagtagcggaacacgaatga

SEQ ID NO: 3048 - protein, 117 aa, Unknown
  Obtained from environmental sample
  misc_feature (1)..(117): Xaa is any amino acid
MGGYFQPVSQVVVGPLTRKYGEIFFSDKFFVGTNGIMPNYGFTGKDHMRSQTVMDLAEYARYIFVLTDAEKFKHQGVLGMLRFEKVTGVFTDTRIPPEYEQLLLDKKVALHKVAEHE

SEQ ID NO: 3049 - DNA, 399 bp, Unknown
  Obtained from environmental sample
  misc_feature (1)..(399): n is a, c, g, or t
gtgcgccaaatactggataacccactacgcgccggagaattccgctttaagcttaggtcgcntgctaaagcaggcgcgccgggcgcggcaggcgcgcctgccgcgacgggcgcagaaggcgcgctggacgaacctgccgccgccctttcccccaaggaacaggccgcgataaaactgttacgcgacgacgttatttcccgcatcgaaacctttaccgatgacaaatcctgcgccgaggcgatctacaaggtcgccgaaaaagccggcatcgaaggcaaggagttattccgcgccgcgtaccaggccctaatcggcaaggaccagggcccccgtctcgccagcttcctaagggcgatagagaaacaaaggctgctggacatcttatcaattaacaattaa

SEQ ID NO: 3050 - protein, 132 aa, Unknown
  Obtained from environmental sample
  misc_feature (1)..(132): Xaa is any amino acid
MRQILDNPLRAGEFRFKLRSXAKAGAPGAAGAPAATGAEGALDEPAAALSPKEQAAIKLLRDDVISRIETFTDDKSCAEAIYKVAEKAGIEGKELFRAAYQALIGKDQGPRLASFLRAIEKQRLLDILSINN

SEQ ID NO: 3051 - DNA, 516 bp, Unknown
  Obtained from environmental sample
  misc_feature (1)..(516): n is a, c, g, or t
atgggaatggactccattgagccctggctttcctatgccgacagcgcaggcaagggagtctttgtactgatgcgaaccagcaataaaggtatgcgcgattttgagtaccttgaaatagcgccggacaaaagacgcctgtaccacgcggtcggagacaaacttgccgaacttgccgccgcgcattccggtatgtacggttatggggcgtttggcgcggttgttggctgtaccgagcgggaagaagccgccgaaattcgcgcaaagtattctaatctattctttcttattcccggttatggggcgcagggcggcgcggcggatgacgcggccttgctgttacgcgaaggaaacggcggcgtggtcaatgcctcgcgatctatactcaaggcatggagcgccgagattgccgcttccggcggtgatgaatcgacagcaaccaattcattcgcggcggaagcggcccgcagggcaacgcttgccatgcgtgacgcgataagagcggcggtaaaaaaatga

SEQ ID NO: 3052 - protein, 171 aa, Unknown
  Obtained from environmental sample
  misc_feature (1)..(171): Xaa is any amino acid
MGMDSIEPWLSYADSAGKGVFVLMRTSNKGMRDFEYLEIAPDKRRLYHAVGDKLAELAAAHSGMYGYGAFGAVVGCTEREEAAEIRAKYSNLFFLIPGYGAQGGAADDAALLLREGNGGVVNASRSILKAWSAEIAASGGDESTATNSFAAEAARRATLAMRDAIRAAVKK

SEQ ID NO: 3053 - DNA, 549 bp, Unknown
  Obtained from environmental sample
  misc_feature (1)..(549): n is a, c, g, or t
atgatcgagcttaatatctcctgtcccaatgtcaaggcgggcggcatggcgtttggcctggaccccgaagcggcggcatcggtggtaacgccggtacgccgcgccctaaccggcaagccccttatggtaaaactttcgcctaacgcaccggacttgaccgctgtcgcccacgcctgtatcaacgcgggggccgacgctctttcactggtcaatacattcaaggcaatggcgatagacatacaaaaacgcaagcccgtttttgacaatatcagcgcgggactttccggcccggcgattaaacccattgctctgcgcatggtatgggaactgtgcagggaattaaaatccgctgttcccattgtggcgttggggggcattgccggcgccaatgacgcgctggaattccttatggccggcgcggcggcaatacaggtcggctccgccacctttgcccaccccgctaccatgatcgaaatcattgacggtattgaagattatatgcgccgctgcgatattgccaaactggaagatattgcccttcgcgattaa

SEQ ID NO: 3054 - protein, 182 aa, Unknown
  Obtained from environmental sample
  DOMAIN (1)...(167): Dihydroorotate dehydrogenase
  misc_feature (1)..(182): Xaa is any amino acid
MIELNISCPNVKAGGMAFGLDPEAAASVVTPVRRALTGKPLMVKLSPNAPDLTAVAHACINAGADALSLVNTFKAMAIDIQKRKPVFDNISAGLSGPAIKPIALRMVWELCRELKSAVPIVALGGIAGANDALEFLMAGAAAIQVGSATFAHPATMIEIIDGIEDYMRRCDIAKLEDIALRD

SEQ ID NO: 3055 - DNA, 411 bp, Unknown
  Obtained from environmental sample
  misc_feature (1)..(411): n is a, c, g, or t
ttgtccacttgcgccagggcaaacagttcggcttcggcgttccgctcgtcattgaaggcgctttgcgcggcgcgcagggcaatttcctcttccgcgatgcgctgcgctttgtgcgcgcgttcttccgccgcgcgttcggcaagccgcgtatcgcgcagaagcgcatccagcgaggccggccaatcaggaaaaccatcggggccggacaagggcgcgcgtccaagcttgtccaaaagctgcttcagggggatgagcagggcatcgcgctcactctccagccgggcaaccgcctcctgcaggcggactgtttccgtttccgcgaccaggcagcgttccatacattcaagggcttcgcgcaccgttccgggggacagttccgcgccaagccccaactggcctcggccgatctga

SEQ ID NO: 3056 - protein, 136 aa, Unknown
  Obtained from environmental sample
  misc_feature (1)..(136): Xaa is any amino acid
MSTCARANSSASAFRSSLKALCAARRAISSSAMRCALCARSSAARSASRVSRRSASSEAGQSGKPSGPDKGARPSLSKSCFRGMSRASRSLSSRATASCRRTVSVSATRQRSIHSRASRTVPGDSSAPSPNWPRPI

SEQ ID NO: 3057 - DNA, 732 bp, Unknown
  Obtained from environmental sample
  misc_feature (1)..(732): n is a, c, g, or t
ttgatcggcgagagcctgcccgtcaaggtggtctttcccgttcccaccagtgtttcaaaaggaatgttggtaattcccacggttgaaggtacagtgcttgtcggccccaccgctgacgcggtcgaagataaggatgatttttccaccacctcgcagcaccttgagaggatactcgtttcgggaaagaccatgataccgtccttgagccagaacgatgttataacttcttttgccggccttcgtccgtatctgggggaagatttttatattgaagcttcggcgaaagttcccgcttttgttcaggtggcgggaatccaaagcccgggacttaccgcctcccccgccataggcgaatatgtaaaaaatattttacttgaaatcggacttacgctgacagaaaagccgcattgggacccttatgttgaagaccgcccctgcgcgcgtgagcttaacttcagtcaactggacagccttatcgcgaaagattccaaatggggcaacattgtctgccgctgtgaaaatgtcagcgaggcggaaatagttcaagctgtaaaactcggtcacacaactttagacggagtaaaatactttacgcgcgcacagatgggacgctgtcagggcggcttttgcacttataagatcattaaaatcattatgagggaaaccggtctttcatgggatcagataacaaaacacggcggaaagagccgacttttggaggccgcgctgtga

SEQ ID NO: 3058 - protein, 243 aa, Unknown
  Obtained from environmental sample
  DOMAIN (167)...(222): BFD-like [2Fe-2S] binding domain
  misc_feature (1)..(243): Xaa is any amino acid
MIGESLPVKVVFPVPTSVSKGMLVIPTVEGTVLVGPTADAVEDKDDFSTTSQHLERILVSGKTMIPSLSQNDVITSFAGLRPYLGEDFYIEASAKVPAFVQVAGIQSPGLTASPAIGEYVKNILLEIGLTLTEKPHWDPYVEDRPCARELNFSQLDSLIAKDSKWGNIVCRCENVSEAEIVQAVKLGHTTLDGVKYFTRAQMGRCQGGFCTYKIIKIIMRETGLSWDQITKHGGKSRLLEAAL

SEQ ID NO: 3059 - DNA, 816 bp, Unknown
  Obtained from environmental sample
  misc_feature (1)..(816): n is a, c, g, or t
atgatccttttctttatgggcgaaacagtcagttaccggatcattgattttttcctgggcgcgataatccccggcctcatcctggtagcggttatggtggcctttggaattaccacctcgatcaagataaaaattcctattgagaagttcaatctgaaggaagcgggaaaagccgtaaagggaagcgtctttgagattctgcttccgtttatcctaatcgggggatatttttccggtattctttctttagtagaggtaagcgcggtatcggcggtttatgttttcataatcgaggtttttgttaataaggacattaagttaaaggatgtaacaaaagtcttcgcaaaagcggttcccataatcggaggggttctttcaataattgccatggcaaaagccctttcctacgccattattgattcaggagttccggagaacttcgctagctggatgagggcaacaatagaatcgaagtatgttttcctccttcttttaaacctggccctgttagtggtcggctgtctgatggacattttttcggcgattctggttgttcttccgctgattgtcccgctgggacaggtttacggaatagatcctgtgcatctgggcatcatttttattgtcaatctggaagtaggttttctcaccccgccagtggggatgaatcttttcctggcaagttaccgcttcaaaaagcctttcacggaaatttgccgttttgtgctgcccttcttgacggtgcagttggcggtggtggcgctggtaacttatgtgcccgcactctcaacattgcttacagggctgtttagatag

SEQ ID NO: 3060 - protein, 271 aa, Unknown
  Obtained from environmental sample
  DOMAIN (1)...(263): DctM-like transporters
  misc_feature (1)..(271): Xaa is any amino acid
MILFFMGETVSYRIIDFFLGAIIPGLILVAVMVAFGITTSIKIKIPIEKFNLKEAGKAVKGSVFEILLPFILIGGYFSGILSLVEVSAVSAVYVFIIEVFVNKDIKLKDVTKVFAKAVPIIGGVLSIIAMAKALSYAIIDSGVPENFASWMRATIESKYVFLLLLNLALLVVGCLMDIFSAILVVLPLIVPLGQVYGIDPVHLGIIFIVNLEVGFLTPPVGMNLFLASYRFKKPFTEICRFVLPFLTVQLAVVALVTYVPALSTLLTGLFR

SEQ ID NO: 3061 - DNA, 396 bp, Unknown
  Obtained from environmental sample
  misc_feature (1)..(396): n is a, c, g, or t
ttgatggccgagccggggcttctctttttgcttgatcgtctttcctccgcaaagatacctcttggagtcgcaacctcttcccgaaacgccacggcggttaacatgctcactaaagccggtataatcgaccgttttgcggcgcttacctgcggcgatgaagttacaaacggaaaacccgctcccgatatttttcttcttgccgcgcaaaaactgggacagccgccctccgcctgcgtcggctttgaagactcgcctccggggcttcagggactgcatgccgccggaatacgctcgatttttattaaagaccttcttgagccatcaaaagaaatccttgccacagtttggcataggtgtaaggatttgaaagaagctgcgaagtatttgaagatttga

SEQ ID NO: 3062 - protein, 131 aa, Unknown
  Obtained from environmental sample
  misc_feature (1)..(131): Xaa is any amino acid
MMAEPGLLFLLDRLSSAKIPLGVATSSRNATAVNMLTKAGIIDRFAALTCGDEVTNGKPAPDIFLLAAQKLGQPPSACVGFEDSPPGLQGLHAAGIRSIFIKDLLEPSKEILATVWHRCKDLKEAAKYLKI

SEQ ID NO: 3063 - DNA, 324 bp, Unknown
  Obtained from environmental sample
  misc_feature (1)..(324): n is a, c, g, or t
ttgatggacagcggccgcagccggacagcggcggaatacggctatcatcaaccctgccactgggatgtggacaaggatgtcggctggctgaaaaccctgttgcccggccaggtacaggggaaagaaccttgctgcggcatggggggcattttgcaaatgagcaatgccgtgctttcgcgcgagatggcggatgcctgcctgggcgcgttcccgccccggatacggcatatcctgaccggctgcagcggttgtgtgatgcaactcaacgccgccgcgcccgaaggcgtaaagattagccattggcttgatgtggtgagcgtataa

SEQ ID NO: 3064 - protein, 107 aa, Unknown
  Obtained from environmental sample
  misc_feature (1)..(107): Xaa is any amino acid
MMDSGRSRTAAEYGYHQPCHWDVDKDVGWLKTLLPGQVQGKEPCCGMGGILQMSNAVLSREMADACLGAFPPRIRHILTGCSGCVMQLNAAAPEGVKISHWLDVVSV

SEQ ID NO: 3065 - DNA, 612 bp, Unknown
  Obtained from environmental sample
  misc_feature (1)..(612): n is a, c, g, or t
atgcccgctcttgcctgtaaaattgaacgcgaggacataggccttgcgggcggaaaacaggaccagtacgcggcgacattcggcggctttaattttatggagttttatgaaaatgagcgcgtaattgtcaaccctctccgccttaaacgctggattagaaatgagattgaagcgtcgcttgttttattttacacaggcgtttcaagggaaagcgcaaatattattaacgaacaaattaaacatactcaaaaaggcgacgctaaaaatattgaaagtatgcatgaaatgaaaaggcagtccttaataatgaaagaagcgcttttaaaaggagattttaaggggttctccgaatgtctgttaaacggatggcttgccaaaaaaaacgccgcttcatcaatatccaattcctttttagatgaattgtaccaatacgcgcttgacaacggggctgaatccgcaaaaatttccggcgccggcggcggcggttttatgatgatatactgtaatccctgcaaaaaaattacgcttacccgcgcattaagagaaaaacaaggtatggttcttacaccttcttttaccgagataggcactcaagcgtggcgtttgaattaa

SEQ ID NO: 3066 - protein, 203 aa, Unknown
  Obtained from environmental sample
  DOMAIN (103)...(187): GHMP kinases C terminal
  misc_feature (1)..(203): Xaa is any amino acid
MPALACKIEREDIGLAGGKQDQYAATFGGFNFMEFYENERVIVNPLRLKRWIRNEIEASLVLFYTGVSRESANIINEQIKHTQKGDAKNIESMHEMKRQSLIMKEALLKGDFKGFSECLLNGWLAKKNAASSISNSFLDELYQYALDNGAESAKISGAGGGGFMMIYCNPCKKITLTRALREKQGMVLTPSFTEIGTQAWRLN

SEQ ID NO: 3067 - DNA, 564 bp, Unknown
  Obtained from environmental sample
  misc_feature (1)..(564): n is a, c, g, or t
atgcattttactcttgctgatctgataaccgacattacccaaaacgccgttgaagccggcgcgggtttggtagagcttgaggtaaatgagagcgccgcaaaaggcggcggagaattccgttttcttgtaagagataacggaaagggaatgacggaggaggaagtaaaaagggcgattgatccgtttgttacggacggcgtaaagcaccctcaccgcaaggttggtttggggctgccgtttttgattcagatggcggagcagtcgaacggaggatgggacattaagtccgagaaagggaagggtactacggtaaccgcgtggtttgacagcggcaatgtggatatgcctcccgcgggcgacattccgggaatgttcagaacaatattgatgttcaacacacctgcggaaattgttatccgacgtaaaaagaagacggaagaaaacgaagatgaatatgaggtccgcaagtcggaactcgccgaggctcttggcagccttgaagacgccgggacgctcgtactgatggatcaatacctgcgttctttagaaaacagtgaggagtaa

SEQ ID NO: 3068 - protein, 187 aa, Unknown
  Obtained from environmental sample
  DOMAIN (4)...(111): Histidine kinase-, DNA gyrase B-, and HSP90-like ATPase
  misc_feature (1)..(187): Xaa is any amino acid
MHFTLADLITDITQNAVEAGAGLVELEVNESAAKGGGEFRFLVRDNGKGMTEEEVKRAIDPFVTDGVKHPHRKVGLGLPFLIQMAEQSNGGWDIKSEKGKGTTVTAWFDSGNVDMPPAGDIPGMFRTILMFNTPAEIVIRRKKKTEENEDEYEVRKSELAEALGSLEDAGTLVLMDQYLRSLENSEE

SEQ ID NO: 3069 - DNA, 843 bp, Unknown
  Obtained from environmental sample
  misc_feature (1)..(843): n is a, c, g, or t
ttgcataagaactgttcaaaaggaagccatgcggacgcggttccggcgcgtttcttgttggcctgccgaaacggccatcttgatgattttccctggcactggtatgtgcactcgggcccatcgacatgtaaaggaacattacgtttctatgaagataaagcgtctcttcaaaccgaaaacctttgggttcgttgtgattcatgtggtaccgcaaaatcacttgcctttgcatttggtatagaagcaaaggataatttgcctgcctgtagggggaggcatccgcatcttcatcaatatgaaggatgtgatgaagagccgcatactattcttttaggggcaaccaatggctggtttccggttactgtttcaatcttggcaataccactgggacaaaatgtattagaacaattacttcttgatggctggaattattttgaagatgcggaatccgctgatgaaactaaatcaataataaaaacattacaaaaaaccaacagtttgcccggaatagaaagatttgatcctcgcgatgtttggcaggcaattgaagaaaaaaggaaaggaacaaagaaatcaacggcaatttctgatagtgatattaaggaacctgaatggaatgttctggtttctgacaagccatctaccggatggcctcatttctcatgttctgccggcgttgtgcctgaaaattttcaacattatttctcaaaaatagtgttacttgaccggcttcgggaagtaaatgccctgattggatatacccgtgtagactctcctgaaaatacaagcgattccggtgaaggtccggaaagggccaattatacgcgatctcggccgatctga

SEQ ID NO: 3070 - protein, 280 aa, Unknown
  Obtained from environmental sample
  misc_feature (1)..(280): Xaa is any amino acid
MHKNCSKGSHADAVPARFLLACRNGHLDDFPWHWYVHSGPSTCKGTLRFYEDKASLQTENLWVRCDSCGTAKSLAFAFGIEAKDNLPACRGRHPHLHQYEGCDEEPHTILLGATNGWFPVTVSILAIPLGQNVLEQLLLDGWNYFEDAESADETKSIIKTLQKTNSLPGIERFDPRDVWQAIEEKRKGTKKSTAISDSDIKEPEWNVLVSDKPSTGWPHFSCSAGVVPENFQHYFSKIVLLDRLREVNALIGYTRVDSPENTSDSGEGPERANYTRSRPI

SEQ ID NO: 3071 - DNA, 396 bp, Unknown
  Obtained from environmental sample
  misc_feature (1)..(396): n is a, c, g, or t
ttgcagggcggcgcgtttggcgcggggtggacgccctgcgtcggccctgtgctgacgggcattctgcttttagcgaccaattcaggcagtattccacgcgccgttctctatcttattttttattcagcgggattggggcttccatttttattggcttcaattttttttaacgcgtttatcaaattttccgcaaaagtccgtacgtttattccgttaatacggcgtatcagcggagcgttgctcattttaattggaattttgattgtaaaaggcgattataggttcattagcggcttaacggccggctggcaggcaaagagacttgctctggaatctgttatttatgacgctgattcaagcgcgttcgaggaaccggaaaatgaaaaagatgactga

SEQ ID NO: 3072 - protein, 131 aa, Unknown
  Obtained from environmental sample
  misc_feature (1)..(131): Xaa is any amino acid
MQGGAFGAGWTPCVGPVLTGILLLATNSGSIPRAVLYLIFYSAGLGLPFLLASIFFNAFIKFSAKVRTFIPLIRRISGALLILIGILIVKGDYRFISGLTAGWQAKRLALESVIYDADSSAFEEPENEKDD

SEQ ID NO: 3073 - DNA, 576 bp, Unknown
  Obtained from environmental sample
  misc_feature (1)..(576): n is a, c, g, or t
atgacattattttttgtattagtcggcgcaattttaattaacaattatgttctcgttcaatttctcggtatgtgccccttcttcggcgtttccaaaaaaatagaaaccgccgtcggcatgggaatatccgttatatttgtaatgactatagcgtccgccattacatatactttttacaaatttgttttggttccgtacaatattacctatcttcttacagtcgcttttatattgataatcgcttctatcgtgcaatttgtagaagtgtttatgaaaaaaatgtttaaggcgctgtataccatgttgggcgtttatcttccgcttattacgacaaactgcgcaatattcggcgtaacgattatcaatattaaaaatgaatttacgtttgtcggatcaatcgtaaacgctgttggagcgggcatgggttttactctcgccatagtaatacttgccagtatccgcgaaaaatatgaggcggacgcgaatattcccgaaatattcagagggtttccgctggcgttattttccgccgggcttatgagcattgcgttcatgggctttataggtttaatataa

SEQ ID NO: 3074 - protein, 191 aa, Unknown
  Obtained from environmental sample
  DOMAIN (1)...(191): Rnf-Nqr subunit, membrane protein
  misc_feature (1)..(191): Xaa is any amino acid
MTLFFVLVGAILINNYVLVQFLGMCPFFGVSKKIETAVGMGISVIFVMTIASAITYTFYKFVLVPYNITYLLTVAFILIIASIVQFVEVFMKKMFKALYTMLGVYLPLITTNCAIFGVTIINIKNEFTFVGSIVNAVGAGMGFTLAIVILASIREKYEADANIPEIFRGFPLALFSAGLMSIAFMGFIGLI

SEQ ID NO: 3075 - DNA, 375 bp, Unknown
  Obtained from environmental sample
  misc_feature (1)..(375): n is a, c, g, or t
atggcctgccgccatttttattcggcaaaatatatccgcctgccggatctgctggatgaattggctgttgccaggggggaaggtatttttcaaaaggtcatgcaaggctataaaaaattagacttgcttatccttgacgaatggctcttaattcccattaccgactccgaacgccgggatcttctggaagtagttgaagcccgtagcgggcgttgttcaacaattttctcttcccaatttgaccctgccggctggcagataaaaattggggaaggcccccttgctgaagcgatccttgaccgtatagtccatgattcttacacaatttttattgacggtgaagaatccatgcggaaacataaaggcattaattaa

SEQ ID NO: 3076 - protein, 124 aa, Unknown
  Obtained from environmental sample
  DOMAIN (1)...(109): IstB-like ATP binding protein
  misc_feature (1)..(124): Xaa is any amino acid
MACRHFYSAKYIRLPDLLDELAVARGEGIFQKVMQGYKKLDLLILDEWLLIPITDSERRDLLEVVEARSGRCSTIFSSQFDPAGWQIKIGEGPLAEAILDRIVHDSYTIFIDGEESMRKHKGIN

SEQ ID NO: 3077 - DNA, 798 bp, Unknown
  Obtained from environmental sample
  misc_feature (1)..(798): n is a, c, g, or t
atggtgaacgctttttgtgaacattggggcggcggaataaaaaatatcaggaacgaaacggatactttatccgatattggcaatgacctttcttctaacatgaatgacaccgccgcggcggtgaaccaaattaccgccaatgtacagagtatcaaaagccgtatattaaatcagagcgcaagtgtaagcgaaactcacgccacaatggaacagcttgtagtcaacatcaataaactcaataaccacgtcgagaaccaaagcggcgacatatctcaggtttcgtcttctattgaagaaatgattgccaatataaactctgttaccggaactcttgtcaataacgctgataatgtaaggacattacaggacgcttcggaagtaggccgcgccggattgcaggaagtagcctctgacattcaggaaattgcgcgcgagtccgaagggattttggaaattaactctgtcatggcaaacatcgccggccagactaatctgctgtcaatgaacgccgcaatagaggcggctcatgccggagaaacaggcaagggcttcgccgtggttgccgatgaaattcgcaaactggctgaaagttcaagtgaacaatcaaatacgattggcacagtactcaaaaagataaaaggctccatcgacaaaataaaacattctacgggaaacgtgctcaacaagtttgaggccattgactcaagcgtcaagactgtcgcgcagcaggaagaagacatacgaaacgctatggaagaacagggaacggggagcaagcagatntctcggccgatctga

SEQ ID NO: 3078 - protein, 265 aa, Unknown
  Obtained from environmental sample
  DOMAIN (84)...(265): Methyl-accepting chemotaxis protein (MCP) signaling domain
  misc_feature (1)..(265): Xaa is any amino acid
MVNAFCEHWGGGIKNIRNETDTLSDIGNDLSSNMNDTAAAVNQITANVQSIKSRILNQSASVSETHATMEQLVVNINKLNNHVENQSGDISQVSSSIEEMIANINSVTGTLVNNADNVRTLQDASEVGRAGLQEVASDIQEIARESEGILEINSVMANIAGQTNLLSMNAAIEAAHAGETGKGFAVVADEIRKLAESSSEQSNTIGTVLKKIKGSIDKIKHSTGNVLNKFEAIDSSVKTVAQQEEDIRNAMEEQGTGSKQXSRPI

SEQ ID NO: 3079 - DNA, 537 bp, Unknown
  Obtained from environmental sample
  misc_feature (1)..(537): n is a, c, g, or t
atgccggttgtcagcgaaataatgaacgcaaaccatcttcccatgttcgagcaggtagatgtcattcaggtaggcgcgcgcaatatgcagaattttgaactgttaaaagaactggggacacaggaaaagcccatcctgctgaagcggggccttgccaatacgcttgaggaattgctgatgagcgcggagtacatcatgtccggcggaaacggaaacatcattctctgtgagcgcggcattcgtacttttgaaacctccacccgcaatactcttgatatttccgccataccgatgcttaagcgattgacgcatctgccggtcattattgatcccagccatgccgcgggcgacgcggctctggtgtacccgctttcaatggcggcggcggcggcgggcgcggacggcctgatcatcgaagtacacaacgaccctgcccatgccctgtgcgatgggccgcagtcaattacaccggacgctttcgcttcattggcaagcgatgttaaaaagattttagaagttgtaaacaagaaaaaataa

SEQ ID NO: 3080 - protein, 178 aa, Unknown
  Obtained from environmental sample
  DOMAIN (1)...(176): DAHP synthetase I family
  misc_feature (1)..(178): Xaa is any amino acid
MPVVSEIMNANHLPMFEQVDVIQVGARNMQNFELLKELGTQEKPILLKRGLANTLEELLMSAEYIMSGGNGNIILCERGIRTFETSTRNTLDISAIPMLKRLTHLPVIIDPSHAAGDAALVYPLSMAAAAAGADGLIIEVHNDPAHALCDGPQSITPDAFASLASDVKKILEVVNKKK

SEQ ID NO: 3081 - DNA, 462 bp, Unknown
  Obtained from environmental sample
  misc_feature (1)..(462): n is a, c, g, or t
ttgtttacaacttctaaaatctttttaacatcgcttgccaatgaagcgaaagcgtccggtgtaattgactgcggcccatcgcacagggcatgggcagggtcgttgtgtacttcgatgatcaggccgtccgcgcccgccgccgccgccgccattgaaagcgggtacaccagagccgcgtcgcccgcggcatggctgggatcaataatgaccggcagatgcgtcaatcgcttaagcatcggtatggcggaaatatcaagagtattgcgggtggaggtttcaaaagtacgaatgccgcgctcacagagaatgatgtttccgtttccgccggacatgatgtactccgcgctcatcagcaattcctcaagcgtattggcaaggccccgcttcagcaggatgggcttttcctgtgtccccagttcttttaacagttcaaaattctgcatattgcgcgcgcctacctga

SEQ ID NO: 3082 - protein, 153 aa, Unknown
  Obtained from environmental sample
  misc_feature (1)..(153): Xaa is any amino acid
MFTTSKIFLTSLANEAKASGVIDCGPSHRAWAGSLCTSMIRPSAPAAAAAIESGYTRAASPAAWLGSIMTGRCVNRLSIGMAEISRVLRVEVSKVRMPRSQRMMFPFPPDMMYSALISNSSSVLARPRFSRMGFSCVPSSFNSSKFCILRAPT

SEQ ID NO: 3083 - DNA, 369 bp, Unknown
  Obtained from environmental sample
  misc_feature (1)..(369): n is a, c, g, or t
atggcatatagtatagattttataagaagagcagtggcatacaggcaagaagggcatacctttgcgcaattacgcgaggcgtttgacatcccgtccgcgacgtattacgactgggaagttaaactgaacaacgggtattttgatgtaataataaaacgcgagcgcagccggaaaatagacaaggaggcgcttaaacaggctgtagcagaaaaacctgacgcttttcttaaggaatatgcggaacaattcaattgcacgccgacagccgtctgttacgcccttaaaaagctgaatataacacgaaaaaaaagacttttacatattctgagaaatccgaagagaagcgggcggagtttgccgcaaggctaa

SEQ ID NO: 3084 - protein, 122 aa, Unknown
  Obtained from environmental sample
  DOMAIN (1)...(122): Transposase
  misc_feature (1)..(122): Xaa is any amino acid
MAYSIDFIRRAVAYRQEGHTFAQLREAFDIPSATYYDWEVKLNNGYFDVIIKRERSRKIDKEALKQAVAEKPDAFLKEYAEQFNCTPTAVCYALKKLNITRKKRLLHILRNPKRSGRSLPQG

SEQ ID NO: 3085 - DNA, 798 bp, Unknown
  Obtained from environmental sample
  misc_feature (1)..(798): n is a, c, g, or t
atgaaaagaattccaatgccggggacaacagcgggaacagccggaacgggcacacggaaaagatcgtgctgcttgaaaaccaaagagcgacgattgacgttccccgcgacattcgagccgatcatagttcccaagcatgagaagcgggtgccgttattcaacgaccaaataatatcgatgtactcctttgggatgagcgacagggacatcaaggcgcatctggagcaaatctataacgtggaagtgtcgcctgatctgataagccgtgtgacgaacgcggtgatggacgaggtaagggaatggcgggaccgcccgctggaaaaatcatacgcgatagtataccttgacgcgctgagggtgaaagggcgcgaggaggggaaaagctgcatgaagagcgtgtatgcggctcttggggtcaattttgaagggaaaaaggaggttttagggctttggacagcggagaacgaaggggcgaagttttggatgggagtgtcagccgaactgaaaaaccggggcgtccaggacatcctcaccgcctgcatggacgggcttaccggctttcccgaagcggtgcggtccgtgtatcctgacacccgtgtccagttgtgcattgtccgcatggtccgcaattcgaccaagtttgtttcgtataagggcttgaaaaaagtgtgcgccgatctgaaagcggtctattcggctgccgcggagtccgccgccagggaagctcttgaagagttcggcaaaatctgggataaaaaatatccaatgattacagatcctggttctcggccgatctga

SEQ ID NO: 3086 - protein, 265 aa, Unknown
  Obtained from environmental sample
  DOMAIN (1)...(265): Transposase, Mutator family
  misc_feature (1)..(265): Xaa is any amino acid
MKRIPMPGTTAGTAGTGTRKRSCCLKTKERRLTFPATFEPIIVPKHEKRVPLFNDQIISMYSFGMSDRDIKAHLEQIYNVEVSPDLISRVTNAVMDEVREWRDRPLEKSYAIVYLDALRVKGREEGKSCMKSVYAALGVNFEGKKEVLGLWTAENEGAKFWMGVSAELKNRGVQDILTACMDGLTGFPEAVRSVYPDTRVQLCIVRMVRNSTKFVSYKGLKKVCADLKAVYSAAAESAAREALEEFGKIWDKKYPMITDPGSRPI

SEQ ID NO: 3087 - DNA, 711 bp, Unknown
  Obtained from environmental sample
  misc_feature (1)..(711): n is a, c, g, or t
ttgagaccaggcattgaaatttttgatgaaatcgcaggaaccggcactgagcttcgcacaggaatggaactcacatttcactacacagggtggctggtgaacgggcacaaatttggtagctccaaagattttggaaaacctgtcaaagcggttttgggaatgggaaaaatggtaagaggcttggagctaggtttggaatcgctcaagcaaggcggcgttaggtggcttagggtttctccaggcatggcttatgggcctgtggcaatgaacaacattccgccaaattcaacgctcattttccgtgtgcaagcggagtctgtggaacatgacgatgaggttgcggcttctatggattttttcccgaatacggatgttgttaaatgggtttctgatgcagagggcttaaagtattttgtggaaaaagagggcaaaggcaagcctgtgaaaagtggggatgcggttagggtgcattacaccggctggctcatagatggaacaaaatttgacagttcaagagatagaaacgaccccatatctttgaaattaggtgtggggcgcgtgataaggggctgggatttggggcttgttggaatgaagcgtggcgaanaacgcttgttgctaattcctcccaacctcggctatggctcaagcggagcaggtcccattccgccagatgccactcttgtatttgccgtggaaattgtggaataa

SEQ ID NO: 3088 - protein, 236 aa, Unknown
  Obtained from environmental sample
  DOMAIN (13)...(105): FKBP-type peptidyl-prolyl cis-trans isomerase
  misc_feature (1)..(236): Xaa is any amino acid
MRPGIEIFDEIAGTGTELRTGMELTFHYTGWLVNGHKFGSSKDFGKPVKAVLGMGKMVRGLELGLESLKQGGVRWLRVSPGMAYGPVAMNNIPPNSTLIFRVQAESVEHDDEVAASMDFFPNTDVVKWVSDAEGLKYFVEKEGKGKPVKSGDAVRVHYTGWLIDGTKFDSSRDRNDPISLKLGVGRVIRGWDLGLVGMKRGEXRLLLIPPNLGYGSSGAGPIPPDATLVFAVEIVE

SEQ ID NO: 3089 - DNA, 537 bp, Unknown
  Obtained from environmental sample
  misc_feature (1)..(537): n is a, c, g, or t
ttggaaaaagcctgcgtccagggtttgttccggcaggatttgtacttcaggttgaatgtcatacctattcatatacccccgctgcgggaacgaaaagaggatattacacttttgctcatgtattttctgaaagagcaggggattgaaaacctgcggctggaagacggcgcgatggaacttctgctttcgcatgattggccgggaaacgtcagggaattgaaaaacctcgcggaacgcatagcggtaatgcatgcgggcggcagtataaccggacaggacatgaccgggcttctgcgcatggggaacggaggcgaaaacacaaaatctgaaaaccccgcgcttgtaaaatcgtttatggaacggaatttcaacgacgcgaaagaagcgtttgaaaaaagctatttggagttccaattctcgaagaacaatggtataatatcaaagactgcggaggctataggcatatacccaagcaatctgcacgccaagttgaagaaacacggtattgcgtcacacgttacaaaggaagatcaatga

SEQ ID NO: 3090 - protein, 178 aa, Unknown
  Obtained from environmental sample
  DOMAIN (1)...(74): Sigma-54 interaction domain
  misc_feature (1)..(178): Xaa is any amino acid
MEKACVQGLFRQDLYFRLNVIPIHIPPLRERKEDITLLLMYFLKEQGIENLRLEDGAMELLLSHDWPGNVRELKNLAERIAVMHAGGSITGQDMTGLLRMGNGGENTKSENPALVKSFMERNFNDAKEAFEKSYLEFQFSKNNGIISKTAEAIGIYPSNLHAKLKKHGIASHVTKEDQ

SEQ ID NO: 3091 - DNA, 816 bp, Unknown
  Obtained from environmental sample
  misc_feature (1)..(816): n is a, c, g, or t
atgattaacttcacaattccggcgaccggttccagcgggcatataggaggcggcatactccttgccgccatgataggcagtttgccggcgttgctatccatttcggctgtgattatcatacaatgtctattcttcgccgacggcggtctgtttgccctggggtgtaacatctttaatataggcgttgttccttgtttgatagcttatccgcttatatttaagccgcttatcaaaaaaggcatggcgataaaaagaataacggcggcttctattttcgcggttgcggtaggtttgcaactaggcgcgttttgtgtagtgctcgaaacgcagctctccggtattacagcgcttccattttcaactttcctactgttaatgcaaccgattcacttagcaattggagtcgtagagggtattatcaccgccgccgttttgtgcttcgtttacaagacacgtccagaaataatggatagtacgcaaagcaaaacagtgatccaaagcggcgttccgatgaaaaggatacttattgtttttgcgattacaaccgctatagtaggcggcgcaatctcgttatttgcttcctcgtatccagatggtcttgagtgggcgatagaaaaaacaatcggaacagcggaacttaaaacaacaaatcctataattgaaaaggcggcgcaagtccaaggcgcggttaccgtcatgcctgattacggtttcaaaaacaccggaaaaagaagattccgaaatcgggacggcggtggcgggtatcgccggcggggcgctcacctttttactcgccggcgccggccgcgtttataa

SEQ ID NO: 3092 - protein, 271 aa, Unknown
  Obtained from environmental sample
  DOMAIN (1)...(154): CbiM
  misc_feature (1)..(271): Xaa is any amino acid
MINFTIPATGSSGHIGGGILLAAMIGSLPALLSISAVIIIQCLFFADGGLFALGCNIFNIGVVPCLIAYPLIFKPLIKKGMAIKRITAASIFAVAVGLQLGAFCVVLETQLSGITALPFSTFLLLMQPIHLAIGVVEGIITAAVLCFVYKTRPEIMDSTQSKTVIQSGVPMKRILIVFAITTAIVGGAISLFASSYPDGLEWAIEKTIGTAELKTTNPIIEKAAQVQGAVTVMPDYGFKNTGKRRFRNRDGGGGYRRRGAHLFTRRRRPRL

SEQ ID NO: 3093 - DNA, 444 bp, Unknown
  Obtained from environmental sample
  misc_feature (1)..(444): n is a, c, g, or t
atgaagacgaactcctgccggactgagtactcgtcatcgccgcaggatactgaatctcttgggaggcggctggcctgttgcctggggcccggttcggttgtcgccctgacaggcggtttaggtgccggcaagacctgcctggtaaaggggattgccggcgctctgggcatcagcgaaaatataaccagccccacctacacgattatcaacgaataccgcttaagcggccgtccggacgcccgctccctgtaccatattgacgcgtaccgcctgagcggggatgaagattttgattccaccggcgcgggcgaatgtttttccgcaggaggaattacaatcattgaatggagcgaccgcattccgggttccataccgagtgacgcgataagcatagagattgaaatatccggcccgcaaagccgtatcttccgtttgcggggataa

SEQ ID NO: 3094 - protein, 147 aa, Unknown
  Obtained from environmental sample
  DOMAIN (17)...(143): Uncharacterised P-loop hydrolase UPF0079
  misc_feature (1)..(147): Xaa is any amino acid
MKTNSCRTEYSSSPQDTESLGRRLACCLGPGSVVALTGGLGAGKTCLVKGIAGALGISENITSPTYTIINEYRLSGRPDARSLYHIDAYRLSGDEDFDSTGAGECFSAGGITIIEWSDRIPGSIPSDAISIEIEISGPQSRIFRLRG

SEQ ID NO: 3095 - DNA, 921 bp, Unknown
  Obtained from environmental sample
  misc_feature (1)..(921): n is a, c, g, or t
gtggatataagagaccatgagattgtatttgcaaagcgaatgatatcaattcttacggtgactcaaattgtttctgtggtacttgtgtttgcaagtggcttattaggtcttatagaggcgaataaagccaataaagccaaaaccaaatttttggcaaagatgagccatgagataagaacgccgatgaatgcaataataggaatggcagaacttaccctgcgcgaaaatattacttctaccgtaaaggagtatattctcaccgttaaacatgcgggtacaaaccttttatccataatcaacgatattttagatctttcaaaaattgaaaacaaaaaattggaaatagttcctagcaattatttattttcatctatgataaatgatgtagtaaacattatcaaaataaggattgcggactcggaactgagatttgatataaatatagacagcaatatacctgattatctttttggagacgaaaaaagaataaagcaagtgttgctcaacatattggacaacgctgtgaaatacacggaaaaaggctttatctccttttccgcaaacggagagataaaagaagatacggttcttttaactatggaggttaccgatagcggcataggcataaagccaaaggatttgaagaatctgtttgacgagtttgtccgagtggatgagtccaaaaattacattgaaggcacagggcttgggcttcccatagcgaaaaatctcattaaaacgatgaacggggatataagcgttaaatcggaatacggcaaaggcagcaaattcacagttaaattgccacagaaaataagctccgatgaacttttcgactctataaaaaatgataatataacaattaaattcatgctccaaacgcaaaagttcttggtgtggacgacattgatgcgaatttaa

SEQ ID NO: 3096 - protein, 306 aa, Unknown
  Obtained from environmental sample
  DOMAIN (46)...(111): His Kinase A (phosphoacceptor) domain
  misc_feature (1)..(306): Xaa is any amino acid
MDIRDHEIVFAKRMISILTVTQIVSVVLVFASGLLGLIEANKANKAKTKFLAKMSHEIRTPMNAIIGMAELTLRENITSTVKEYILTVKHAGTNLLSIINDILDLSKIENKKLEIVPSNYLFSSMINDVVNIIKIRIADSELRFDINIDSNIPDYLFGDEKRIKQVLLNILDNAVKYTEKGFISFSANGEIKEDTVLLTMEVTDSGIGIKPKDLKNLFDEFVRVDESKNYIEGTGLGLPIAKNLIKTMNGDISVKSEYGKGSKFTVKLPQKISSDELFDSIKNDNITIKFMLQTQKFLVWTTLMRI

SEQ ID NO: 3097 - DNA, 669 bp, Unknown
  Obtained from environmental sample
  misc_feature (1)..(669): n is a, c, g, or t
gtggtcgatccgccgtcgataattgcgacccatttgacagaaattattaaacaccatgcggcggaaattttgggcaggcaggaaatgcaagccatactggacgcccttaaaaaggactaccctgcggtagtggatgaagcccttaaaacgcttaatctggggctgatacaaagagtggttcaaaatctgttaaaagaacaggtttcgatccggaatatggtagccatactcgaagctttggcggattacggcccggcaaccagggacattccgttcctgaccgaaaaagcccggcaggccctgtcacggcagctttgccttcagtatgctgatgcggaaaaagtgctgagggtactgaccattgagccctctttggaacagaagatcattgacagcaaagtagaaaccgtttcgggggttatttccgccctggatccgccggtacaaaagaattggatcaatgccttgtcccgtgctgtttcagccgtgcaggaacagggctggcttccggtgatccttacttccgaagcggcccgatttttggtaaaatcttccacctttagggaattgcccgaactggcggtgctttccgtgccggaaattggcgatgaaataaccataaaggtggaagtggttggagaaatcagaatggaaagtgaggttaaataa

SEQ ID NO: 3098 - protein, 222 aa, Unknown
  Obtained from environmental sample
  DOMAIN (1)...(207): FHIPEP family
  misc_feature (1)..(222): Xaa is any amino acid
MVDPPSIIATHLTEIIKHHAAEILGRQEMQAILDALKKDYPAVVDEALKTLNLGLIQRVVQNLLKEQVSIRNMVAILEALADYGPATRDIPFLTEKARQALSRQLCLQYADAEKVLRVLTIEPSLEQKIIDSKVETVSGVISALDPPVQKNWINALSRAVSAVQEQGWLPVILTSEAARFLVKSSTFRELPELAVLSVPEIGDEITIKVEVVGEIRMESEVK

SEQ ID NO: 3099 - DNA, 666 bp, Unknown
  Obtained from environmental sample
  misc_feature (1)..(666): n is a, c, g, or t
gtgaatgtgatgctcaatatgatccccaagtataacctgtaccatgtaattcgcaagcaaaaaacgatgaaagaggttatggtggaaaccgaatacggtatttccatcgtggcgggagcttcgggattttccaaaattgccaaccttagtgaagaagaacggcagtattttattgatgagcttactaccctttcttctgcggatattgtaattattgacacatctgccggggtttccagcaatgtactggactttgtggccgttgcggacgattcggtgatcattaccactcctgaaccgacggcaattaccgacgcttacgggatcatcaagatcattgccaccgaaatcaatagccttaacatggggcttaagctggtggtaaaccgtgttaaaaacgccgcagaagcaaccaagattgctgaccggatgatcaccattaccagccagtttcttaactttaaactggaatatctggggtttatctacgatgattcttccgtgtcacatgcggtacttaagcagcggccttttatggtagtggatccaaaatgcaaagcatctttgtgtgttcagcatattatgggccggatggaaaagtccgaagttcgggacaacggaggatttgggaatatgctcaaacggatgttcaagggggattcttaa

SEQ ID NO: 3100 - protein, 221 aa, Unknown
  Obtained from environmental sample
  DOMAIN (34)...(170): CobQ/CobB/MinD/ParA nucleotide binding domain
  misc_feature (1)..(221): Xaa is any amino acid
MNVMLNMIPKYNLYHVIRKQKTMKEVMVETEYGISIVAGASGFSKIANLSEEERQYFIDELTTLSSADIVIIDTSAGVSSNVLDFVAVADDSVIITTPEPTAITDAYGIIKIIATEINSLNMGLKLVVNRVKNAAEATKIADRMITITSQFLNFKLEYLGFIYDDSSVSHAVLKQRPFMVVDPKCKASLCVQHIMGRMEKSEVRDNGGFGNMLKRMFKGDS

SEQ ID NO: 3101 - DNA, 840 bp, Unknown
  Obtained from environmental sample
  misc_feature (1)..(840): n is a, c, g, or t
atgaaggacatgatgaacgcccccatcgaatacgactatacgcacaagggctattattacaccgaaaaaaccttcaggcttcccgccgcctttgcctccgccgaagacatgctggccctggggatggcgaagaccctccttaccctttaccaaaacaccccgatatacgacgcggcaaaagggctaatggaaagcgttaccgcgcctctcggagacggcgaaaacccccgctggtacgaagagcgcgtcatcgtgccgcctgtaccggctgtgcagttttccccggaagtatggaacgttgcctgcgaagcgctgcggaaaaaccgcgtcctaaagtttgaataccgcagtacatggaaaagcggctacacaccccgccgcgtccgcccctatcagcttctttttgacaacggcgcatggtatctctacgcctattccacggaaggcaggggcatgagaatgtactcccttccccgcatacgaaatatcagccttgaaaatgaaacctttgctttccccaccgacgccgattaccgcgcccgcgtggacggcagttacttcggcgcatattcaaccgaaaagacgcgccgcttccgcatcgccttttacaacgacggggccatgcgcattaaagaacgcctttgggcggcggatcagcgcattaaggaaacccccgacggcgtaatcctcagtttttccagctcccaatacggcaaggttctggaactgatccttgccaacggccgcgatgcccaaccccttgagccaaaggaactggtccgcgactggcaggataacattcaggatatgcggaaactggcagaaccctctaaaaagtga

SEQ ID NO: 3102 - protein, 279 aa, Unknown
  Obtained from environmental sample
  misc_feature (1)..(279): Xaa is any amino acid
MKDMMNAPIEYDYTHKGYYYTEKTFRLPAAFASAEDMLALGMAKTLLTLYQNTPIYDAAKGLMESVTAPLGDGENPRWYEERVIVPPVPAVQFSPEVWNVACEALRKNRVLKFEYRSTWKSGYTPRRVRPYQLLFDNGAWYLYAYSTEGRGMRMYSLPRIRNISLENETFAFPTDADYRARVDGSYFGAYSTEKTRRFRIAFYNDGAMRIKERLWAADQRIKETPDGVILSFSSSQYGKVLELILANGRDAQPLEPKELVRDWQDNIQDMRKLAEPSKK

SEQ ID NO: 3103 - DNA, 732 bp, Unknown
  Obtained from environmental sample
  misc_feature (1)..(732): n is a, c, g, or t
atggctcttgcttttgcccggctcggcaagaaagtcgtggtcatggacgcggacctggggcttgccaacgtcaatgttatgcttaacatgatccctaaatacaacctgtaccatgtcattaaaaagcagaaaaccatccatgaaattctcgtggaaaccgaatacggcatttcaatagtggcgggggcttcgggcttttcccagatagccaatatgagcgaacaggagcggcaggattttatcagcgaacttgacaccctttcctttgccgacatcattatcatagacaccggcgccggggtgagcagcaatgtcctggactttatcgccgccgccgatgacgcgattattgttaccacgccggaacctacggcaataaccgacgcctatggtataatcaagataatcgccatggaatacgatccggtcaacatcgggcttaaactcgtggttaaccgggcaaagggggcggcggaggcaaagagcgttgccgacagaatgaccaatattgccgggcagtttttgaacctcaagctggactacctcggctttatctacgatgatcaggccgtgcccgcttcggtgcgccagcaaaagccgtttatggtcattgatcccaaatgtaaggcaagcctgtgtatccagcatctggtagaacggatggacaaaaacaggatgcttgagtccgcgggtatcagcgcgatgtttaagaagatatttaaccgcacatag

SEQ ID NO: 3104 - protein, 243 aa, Unknown
  Obtained from environmental sample
  DOMAIN (1)...(193): CobQ/CobB/MinD/ParA nucleotide binding domain
  misc_feature (1)..(243): Xaa is any amino acid
MALAFARLGKKVVVMDADLGLANVNVMLNMIPKYNLYHVIKKQKTIHEILVETEYGISIVAGASGFSQIANMSEQERQDFISELDTLSFADIIIIDTGAGVSSNVLDFIAAADDAIIVTTPEPTAITDAYGIIKIIAMEYDPVNIGLKLVVNRAKGAAEAKSVADRMTNIAGQFLNLKLDYLGFIYDDQAVPASVRQQKPFMVIDPKCKASLCIQHLVERMDKNRMLESAGISAMFKKIFNRT

SEQ ID NO: 3105 - DNA, 792 bp, Unknown
  Obtained from environmental sample
  misc_feature (1)..(792): n is a, c, g, or t
atgagtgcgaatcaaacaacagaagcgctgattgcccgcacgaaccaacaaaccgcccggataacaaccaggcaaaggaggagtgaagtggaaaaaacatccatcattaaaattccgattggaaaaattgtatccaccacagatcggaagtacggggggcaaggaaatcttgataccttggcaaagagcattgaagccattggcattattcacccgccagcggtaaaggaattggccgataaaaaaggctactaccgaatcattgccggtcgccgccgctacgacgcggcaaagtccctcggctggaaaactctggaggttattgtctatcctgaaaaggctgatgaagaagcgattgccctggccgagaatgtgaaccgggatgatatgcaccctcttgatgaagccgaaaagtttaagcgcgaaattgacaacggtaaatccgttgaggaaatcgccaagtattatgcacggagcatatcgggcatataccaaagaacccggctgaccaatctgattgatggaataaagatgatgttccgcgatgggaaaataaacctctccggagctgcttttattgccagcctcccaagcgaggaccaggaaaagtttttgaagaaatatggggaaaaaagccccaaccaatgggacatcaaaaactttctccgctcggtacagcgcttaacgcttattataacgaatacgaaatgcaagaactgtaaaaacaggacgtacaattccacgccagggcttttgaagatgaatacaacgatgtggaagatgtctgcttga

SEQ ID NO: 3106 - protein, 263 aa, Unknown
  Obtained from environmental sample
  DOMAIN (36)...(125): ParB-like nuclease domain
  misc_feature (1)..(263): Xaa is any amino acid
MSANQTTEALIARTNQQTARITTRQRRSEVEKTSIIKIPIGKIVSTTDRKYGGQGNLDTLAKSIEAIGIIHPPAVKELADKKGYYRIIAGRRRYDAAKSLGWKTLEVIVYPEKADEEAIALAENVNRDDMHPLDEAEKFKREIDNGKSVEEIAKYYARSISGIYQRTRLTNLIDGIKMMFRDGKINLSGAAFIASLPSEDQEKFLKKYGEKSPNQWDIKNFLRSVQRLTLIITNTKCKNCKNRTYNSTPGLLKMNTTMWKMSA

SEQ ID NO: 3107 - DNA, 324 bp, Unknown
  Obtained from environmental sample
  misc_feature (1)..(324): n is a, c, g, or t
atggaattaacaaccggagtccgggctattaagagttttgtcttaagatctggccgaatgagtcctgctcaaaaacgctcctatgaaaccctttttccgcttttcgccgtaacgggggatgagaaagagattgttgattgccatcatgttttcggaaatagcgctcctttgattattgagataggctttggaatgggaagagctacggccagtatcgcgcatataaatcctgagaataattaccttgggattgaggttcacaaacctggtataggccggctcctttgggaattgaaaaccttgaattanagaatatacgaataa

SEQ ID NO: 3108 - protein, 107 aa, Unknown
  Obtained from environmental sample
  misc_feature (1)..(107): Xaa is any amino acid
MELTTGVRAIKSFVLRSGRMSPAQKRSYETLFPLFAVTGDEKEIVDCHHVFGNSAPLIIEIGFGMGRATASIAHINPENNYLGIEVHKPGIGRLLWELKTLNXRIYE

SEQ ID NO: 3109 - DNA, 732 bp, Unknown
  Obtained from environmental sample
  misc_feature (1)..(732): n is a, c, g, or t
atgggccatgtggagcggaacgggacgaaaatcaactttttcgataccccggggtcgtcggattttaccgggaacgtgattttaagcttccgggcttcggaatttgccttgctgatggtggacggccgttcgggggcgcagattgaaaccgtcaagctgtggcggagcctggacgcgcaaaaaaaaccgagaggcgtttttatatccaagctggacaacgatcagtcagattataaaaacgcgcttgccgatataaaagaaaaattcaagatggaaccggttccggttaccattcccatgggatcgggaggcgctttcaaaggcgttatcgacgtgctgcacgacaaggcgtatatggccagcggcgacggggtagaaaaagaggggcccatccccgacgaattcaaagacgcggtggcggcggcgcgggaaaaattagtagaggccgccgccgagggcgatgacgccctcatggagcattacatcgacaaaggttccctttcgccggaagaaatgaaaaaggggcttatagaagccctggcggcgaataagtatatccccgcttttgcgggcgcggccctgaagaattccggccttgcgccctttatggattttatcgccgacgtggggccaaacccgcactccgcaaaagacgcatgttttggcggcgacgggaaggcgcaggaaatttccattgatccgaacaagccccctttccgcgctggttattaa

SEQ ID NO: 3110 - protein, 243 aa, Unknown
  Obtained from environmental sample
  DOMAIN (1)...(214): Elongation factor Tu GTP binding domain
  misc_feature (1)..(243): Xaa is any amino acid
MGHVERNGTKINFFDTPGSSDFTGNVILSFRASEFALLMVDGRSGAQIETVKLWRSLDAQKKPRGVFISKLDNDQSDYKNALADIKEKFKMEPVPVTIPMGSGGAFKGVIDVLHDKAYMASGDGVEKEGPIPDEFKDAVAAAREKLVEAAAEGDDALMEHYIDKGSLSPEEMKKGLIEALAANKYIPAFAGAALKNSGLAPFMDFIADVGPNPHSAKDACFGGDGKAQEISIDPNKPPFRAGY

SEQ ID NO: 3111 - DNA, 405 bp, Unknown
  Obtained from environmental sample
  misc_feature (1)..(405): n is a, c, g, or t
gtgatcagatggccgaggcttctgggtaccgaaaaggccctggacatacgccggaaggaagtcggcgtcagaattcccgatcattccattccccttgcccttattaatacgcttcaacagcccctgtactcaataacagccaaaaaatccatgcataatgactctgatgactctggagacaatgaccctgaagacaatgactctgaagataatgattttgacgaactgccgcccattcccgaagacgccctttttgaaggcggctgggagcttgacggaatcgacggcctggatctgattttggacggcggcgaggagagggagcgcattttctccactattctggatctatccggcgacgatgttaagctgctccgccagggcgccggcccatggcccgtgtga

SEQ ID NO: 3112 - protein, 134 aa, Unknown
  Obtained from environmental sample
  misc_feature (1)..(134): Xaa is any amino acid
MIRWPRLLGTEKALDIRRKEVGVRIPDHSIPLALINTLQQPLYSITAKKSMHNDSDDSGDNDPEDNDSEDNDFDELPPIPEDALFEGGWELDGIDGLDLILDGGEERERIFSTILDLSGDDVKLLRQGAGPWPV

SEQ ID NO: 3113 - DNA, 459 bp, Unknown
  Obtained from environmental sample
  misc_feature (1)..(459): n is a, c, g, or t
atggcccacggcaccgtagcccagtatccggctgtggatgtggaagtggctatagtggacggaaagtaccatccggtggattcatcggagctttccttcaaactcgccgcccgcaacgccttccgcgaatcaatgcgccaggcgaatcncacgctgctggaacctgtaatgaaccttactgtttttattgaggaaaagtatttgggcgacgttatgagcgacctttccggcaagcggggaaaaatcctcgggcaggattcggcgagcggcatcgcggaagtacgcgccgaggttccccaggccgagttattgcgttattcgatagacctgcgctctatcacatccggcacaggctccttctccgtatcgttcagccactacgcgcctatttccggacgcatcgccgacgaggtaatcaaggcgaggggagactttaaggtacaggaagccgacgagtaa

SEQ ID NO: 3114 - protein, 152 aa, Unknown
  Obtained from environmental sample
  DOMAIN (51)...(138): Elongation factor G C-terminus
  misc_feature (1)..(152): Xaa is any amino acid
MAHGTVAQYPAVDVEVAIVDGKYHPVDSSELSFKLAARNAFRESMRQANXTLLEPVMNLTVFIEEKYLGDVMSDLSGKRGKILGQDSASGIAEVRAEVPQAELLRYSIDLRSITSGTGSFSVSFSHYAPISGRIADEVIKARGDFKVQEADE

SEQ ID NO: 3115 - DNA, 630 bp, Unknown
  Obtained from environmental sample
  misc_feature (1)..(630): n is a, c, g, or t
atggcccggcatttgtggagcgacaggcgtgggaaaactacgttaagcaaacttatttcaaggttctatgatccaacaggcggaaggatatgccttgatggacttgatttacgggacattactttggaaagtctacgtgacaatatctctttggttttgcaggatacgtttttatttaacggaactatcgaagaaaatatcgcattcgcaagacccgacgcttcgtttgaagaggttaaaacggcggcgcagaccgcaagaatacatgatgacataatgcaaatgccggaagcttatcagacgcagataggggaacgaggcgttaagttgtcaggcggtcaaaaacaacgcatagcaatagcaagggcgatactatgtcgagcccccgtacttattcttgatgaagcaactgcgtccgttgacgtacacaccgaagagcagatacagcaggcaatcaacgaaatagccggaagccgcacaatcgtgaccattgctcatcgactttccaccattcgtaatgcggatgttatttacgtttttgaaaaagggcgtattatacaatcggggagtcatgccgagttgattgaacaggaagggctttacagaaatttatcccgtacaagtaaataa

SEQ ID NO: 3116 - protein, 209 aa, Unknown
  Obtained from environmental sample
  DOMAIN (11)...(183): ABC transporter
  misc_feature (1)..(209): Xaa is any amino acid
MARHLWSDRRGKTTLSKLISRFYDPTGGRICLDGLDLRDITLESLRDNISLVLQDTFLFNGTIEENIAFARPDASFEEVKTAAQTARIHDDIMQMPEAYQTQIGERGVKLSGGQKQRIAIARAILCRAPVLILDEATASVDVHTEEQIQQAINEIAGSRTIVTIAHRLSTIRNADVIYVFEKGRIIQSGSHAELIEQEGLYRNLSRTSK

SEQ ID NO: 3117 - DNA, 729 bp, Unknown
  Obtained from environmental sample
  misc_feature (1)..(729): n is a, c, g, or t
ttggccgagaggcaagtgggcagaccgcgtattaagccgccgcaccttgcggaagttggacttttccttctgccgactttggtaaataacgttgaaagttttacaaacattcccgcaatcgtaaacatgggcggcgacgcttatctgaaagccggtcaccccgattccggcggaagcaaacttgtttgtctttcgggtcattgcaagaacaggggggtttttgaaataccgcttggcggggtgacattgcgcgatattatttttgacgcggaaatgggcggcggtatggtcggtccgaaaaaactgaaattttttcaccttggcggacagagcggttttatcggcggcattgatcagcttgagactgtttacagttacacggatttaaaaaatgcgcggttgtccgtaggatcgggagccgttgttgtaatggacgaaagcgtctctatcattgaatatcttaaaggggttactgaattctttattcacgaatcatgcggcaagtgcgtaccctgccgcgagggcaaccgccaaatactgaaaatactgcaaaaactttcagtccccgacggagcggaaaaaggagaccttgaaattctgcggcgtttaatccgcacaatgacagacgccgcgttctgcggattgggacaaaccgccgccgccgcactgaacagcgcatggaaattgtttcccgctgaatttgaagcgaatgtgagggggaaagaatga

SEQ ID NO: 3118 - protein, 242 aa, Unknown
  Obtained from environmental sample
  DOMAIN (1)...(110): Respiratory-chain NADH dehydrogenase 51 Kd subunit
  misc_feature (1)..(242): Xaa is any amino acid
MAERQVGRPRIKPPHLAEVGLFLLPTLVNNVESFTNIPAIVNMGGDAYLKAGHPDSGGSKLVCLSGHCKNRGVFEIPLGGVTLRDIIFDAEMGGGMVGPKKLKFFHLGGQSGFIGGIDQLETVYSYTDLKNARLSVGSGAVVVMDESVSIIEYLKGVTEFFIHESCGKCVPCREGNRQILKILQKLSVPDGAEKGDLEILRRLIRTMTDAAFCGLGQTAAAALNSAWKLFPAEFEANVRGKE

SEQ ID NO: 3119 - DNA, 462 bp, Unknown
  Obtained from environmental sample
  misc_feature (1)..(462): n is a, c, g, or t
gtgcttggaacggaacgcactattcagaacatacgcgccttaaatcttgaaaccggcaactgtgaaattgtaggcgttgccgcgccggaactggtggaatttgtggaaaagagtatcgacagcgcggacgaaaaagaaaaaacagaaactgtaaaaaaatatgtaaatatttttcgcgggcagggaatagatgcgcttgtgctcggctgcacccattttctgtacctgcttgatgaattcaggcgcgaggcggaaccacaaattaaagtttttgactctctggaaggaataaccaaccgcattgaattcctgcttaatgaaaatgacggcgtacttcgtgcgcaaaaagattgcgctcatgaacgaaaatttattcttaccggcacacagccgcctgattcttcatggataaaccgcgcgaaagcgtacgggtttgatctttgcctgataaacgaattatga

SEQ ID NO: 3120 - protein, 153 aa, Unknown
  Obtained from environmental sample
  misc_feature (1)..(153): Xaa is any amino acid
MLGTERTIQNIRALNLETGNCEIVGVAAPELVEFVEKSIDSADEKEKTETVKKYVNIFRGQGIDALVLGCTHFLYLLDEFRREAEPQIKVFDSLEGITNRIEFLLNENDGVLRAQKDCAHERKFILTGTQPPDSSWINRAKAYGFDLCLINEL

SEQ ID NO: 3121 - DNA, 498 bp, Unknown
  Obtained from environmental sample
  misc_feature (1)..(498): n is a, c, g, or t
ttgcctgataaacgaattatgaaaaacgaaactgaaatcttaaaggggcttgttatccgcggttcgcgtaacattatgaccgtgcgaattgaagacagcgaacattttgaacttgaatgccgcataaaaggaaaagttttaaagggcagtgaaaaattttacaacccgcttgcgccgggagatattgtcgtaacagagcggcaaaaaaatacaaacacggcacgtgataacgcccttattctttccgtagaaaaaagacgaaacctcttcagccgctttaaccaaaaaggcaacgcaagccagcttctggcggcgaatgtcgatcttgtgctttgtatatgcactcctgactctccgcctttcaggccgcgttttatagacagggttcttttacaggcggatttcgccggaattgaaccgcttattatctgccataaaatcgatcttgacccggacgatcttgacgtgaacgaacgtctcgaagattttaacatatag

SEQ ID NO: 3122 - protein, 165 aa, Unknown
  Obtained from environmental sample
  DOMAIN (15)...(165): Protein of unknown function, DUF258
  misc_feature (1)..(165): Xaa is any amino acid
MPDKRIMKNETEILKGLVIRGSRNIMTVRIEDSEHFELECRIKGKVLKGSEKFYNPLAPGDIVVTERQKNTNTARDNALILSVEKRRNLFSRFNQKGNASQLLAANVDLVLCICTPDSPPFRPRFIDRVLLQADFAGIEPLIICHKIDLDPDDLDVNERLEDFNI

SEQ ID NO: 3123 - DNA, 597 bp, Unknown
  Obtained from environmental sample
  misc_feature (1)..(597): n is a, c, g, or t
ttggccgatttcggcaaagggattatcccgccggcgattattaacatgaaggtaacggcctacattttcgacggttattgggaagatattgggacgatacggaatttctacgacaccaaccttgacctgacaacggtaaaaccgcgctttgatttttacgatgagaaccgcccgatttttacccaccggcgcaacctgcccccgtcaaagatgaatttcagcaacatgaaccagtccattgccgcagaaggctgcattattaccaacgcgaacatttccaattctattgtcgggatacgttccattatcgaaaccggttccagcctgaacggcgtggtcgcaatgggcgccgacttttacgaaaccgagattcaaaaacagcagaacgccgaggcgcggatacccaatgtgggaataagccgaggggtaataattaaaggcgcgattattgacaagaatgtccgcatcggcgagggctgccgcatcggggttgatgatatacgccgcgatgacggcaattacggtcactattatgttgtagacggaataatcgttattcccaaaaatacggtactgtaccccggaacggtgatataa

SEQ ID NO: 3124 - protein, 198 aa, Unknown
  Obtained from environmental sample
  misc_feature (1)..(198): Xaa is any amino acid
MADFGKGIIPPAIINMKVTAYIFDGYWEDIGTIRNFYDTNLDLTTVKPRFDFYDENRPIFTHRRNLPPSKMNFSNMNQSIAAEGCIITNANISNSIVGIRSIIETGSSLNGVVAMGADFYETEIQKQQNAEARIPNVGISRGVIIKGAIIDKNVRIGEGCRIGVDDIRRDDGNYGHYYVVDGIIVIPKNTVLYPGTVI

SEQ ID NO: 3125 - DNA, 879 bp, Unknown
  Obtained from environmental sample
  misc_feature (1)..(879): n is a, c, g, or t
atggcgattgagctgttcaagcccttcatcatgaaaaaactcgttgataaagaagtggtttacaacatcaagaaagccaagatgctgcttgaggccgagagcgtggagattttcgcgattcttgacgaagtggttaaggaacatccggtgctgctgaaccgcgcgcctaccttgcaccgattgggcatccaggcctttgaaccggtgctggtggaaggcaaggcgatcaaactgcatccgctggtctgccacgcttttaacgccgactttgacggcgaccaaatggcggttcatgtgcctctgacccaggcggcccagatggagtgctggaccctgatgctctccgccagaaacctccttaacccggcaaacggcagaaccatagtattcccctctcaggacatggtgctgggaattaacttccttacccgcgtcagaccgaacggcagacggcccgaatccataaatccggaaagcaaaagcaggcttccttattattcttccccggaagaagccctgatggcggtggagaataaatttcttgattggggctcccttatccgccttaagccggtaaaattccctatatgggacaagattgaccatgagatggaaatcccgaaagacggaatcatagaaaccaccgtcggaaggctggtgttcaatgaggaacagcccagggagattcccttcatcaattatgaaatgaaagacaaggaactccgcgcccttattgaacatgtcttcaagaaaaacggctcctggattacggtaaagatgctggacgcgattaagtcgaccggctaccgttatgcgacagttttcggcgccacgataggcattgacgacattgtgggccccaagaaaagcccgaaatga

SEQ ID NO: 3126 - protein, 292 aa, Unknown
  Obtained from environmental sample
  DOMAIN (118)...(284): RNA polymerase Rpb1, domain 3
  misc_feature (1)..(292): Xaa is any amino acid
MAIELFKPFIMKKLVDKEVVYNIKKAKMLLEAESVEIFAILDEVVKEHPVLLNRAPTLHRLGIQAFEPVLVEGKAIKLHPLVCHAFNADFDGDQMAVHVPLTQAAQMECWTLMLSARNLLNPANGRTIVFPSQDMVLGINFLTRVRPNGRRPESINPESKSRLPYYSSPEEALMAVENKFLDWGSLIRLKPVKFPIWDKIDHEMEIPKDGIIETTVGRLVFNEEQPREIPFINYEMKDKELRALIEHVFKKNGSWITVKMLDAIKSTGYRYATVFGATIGIDDIVGPKKSPK

SEQ ID NO: 3127 - DNA, 759 bp, Unknown
  Obtained from environmental sample
  misc_feature (1)..(759): n is a, c, g, or t
gtgctgaagctcgctctcggctacggcggcggggtgggcgcgttctccactttcgcggacgcgtatcacatcgacttatcggaactggcggccgacatgtcgcagtatgcaatggccgaccggcacaacgctcacgatctttgggagtcggccgtcgagcgcggcgagacttatgagctggagatgaaaacttacatcgcgtgcgactgcataaaaaggatgtggcgccgcgccaacccggcaatcgtggagttttggtcgcgcatggaggagttgtcgatggaggtgatgagtaaaggagacaaaagcaaagaccgctacttaatgtggtgtaagcatgagatttatcccacgttggaattttcccgcgcggagaagaattggttgcgcatcctcctgccctccgggcgttatctgtgttacgccggagcgaaaacggacggcgggaaaatccgctatctcggtagcgacacctacacacgccgctggggttatcaatccacgtacggcgggaaactggcggaaaatatcgtgcaagcggtaagccgcgacatcttggcacacgggatggtcagggcggaggcggagggctttgaggtcgtgctgtcgatacatgacgaactgataacagaagtatcggacgatgagaaatattcatcggataaactgtcggctataatgtcagccgcgccggcatgggccgacgggctgccgcttgcggcggcgggatttgaagcgtatcgctacagaaaggattga

SEQ ID NO: 3128 - protein, 252 aa, Unknown
  Obtained from environmental sample
  SIGNAL (1)...(19)
  misc_feature (1)..(252): Xaa is any amino acid
MLKLALGYGGGVGAFSTFADAYHIDLSELAADMSQYAMADRHNAHDLWESAVERGETYELEMKTYIACDCIKRMWRRANPAIVEFWSRMEELSMEVMSKGDKSKDRYLMWCKHEIYPTLEFSRAEKNWLRILLPSGRYLCYAGAKTDGGKIRYLGSDTYTRRWGYQSTYGGKLAENIVQAVSRDILAHGMVRAEAEGFEVVLSIHDELITEVSDDEKYSSDKLSAIMSAAPAWADGLPLAAAGFEAYRYRKD

SEQ ID NO: 3129 - DNA, 471 bp, Unknown
  Obtained from environmental sample
  misc_feature (1)..(471): n is a, c, g, or t
atgaagaaaataaaatcattaatctacaaatgttcctcctgcggtcatgaagaaccaaaatggcttggacgctgtcctgaatgcggagaatggaatacattaatagaagctgccgctaaaaacgaaaacaggcatgtatcaaaaagcggactgccgcaaacgctgcctctctcgacagtaaacccaatggaaggcagccgtattagcagcggtatagtcgaacttgaccgtgtacttggcggcggtattatgaaacgctccgccgtacttgtcggcggagaaccgggtattggtaaatctactcttttactgcagcttgccgccgccgccgaaaccaaaggacgcatactttatatttccggtgaagaatccgcaggtcagttaagactgagagcagacaggcttggtttaaacagtaagtcatgccttgaacgtatagaaattttctgttcgggaaatctgaggaaatga

SEQ ID NO: 3130 - protein, 156 aa, Unknown
  Obtained from environmental sample
  misc_feature (1)..(156): Xaa is any amino acid
MKKIKSLIYKCSSCGHEEPKWLGRCPECGEWNTLIEAAAKNENRHVSKSGLPQTLPLSTVNPMEGSRISSGIVELDRVLGGGIMKRSAVLVGGEPGIGKSTLLLQLAAAAETKGRILYISGEESAGQLRLRADRLGLNSKSCLERIEIFCSGNLRK

SEQ ID NO: 3131 - DNA, 387 bp, Unknown
  Obtained from environmental sample
  misc_feature (1)..(387): n is a, c, g, or t
gtgggagttataggttttgacattcccatgacggacattcagaaattttcacaaactcaaaaaccttttcccaattcaatgactgcggtattcagcagcaagggctcgattaccgcccactttgaggagagccgtatcggaaaaaatataaaaaattcggaagcggacagggcgggccggcatcttaatgatttagtgaatgccgttacaacgggcaaacagtattcttttaccaattatatcgaagctctgaatgagaacatgagtatatttattgtttccattcctgtcggcgatacaacaaccccctggagttacgcgatagctgttatgcgcgatactataatggcgcctgtttatgaaatgattaccatcatcatgttatag

SEQ ID NO: 3132 - protein, 128 aa, Unknown
  Obtained from environmental sample
  misc_feature (1)..(128): Xaa is any amino acid
MGVIGFDIPMTDIQKFSQTQKPFPNSMTAVFSSKGSITAHFEESRIGKNIKNSEADRAGRHLNDLVNAVTTGKQYSFTNYIEALNENMSIFIVSIPVGDTTTPWSYAIAVMRDTIMAPVYEMITIIML

SEQ ID NO: 3133 - DNA, 426 bp, Unknown
  Obtained from environmental sample
  misc_feature (1)..(426): n is a, c, g, or t
ttgatatttccgcattgggatggcaatttaataaaggaaattgtccgtcaaacccttgcaagcctggttcagccttcaagtgagacaataggcgacaggatctttactgtggagattcttaacgggacaaccgttaatggcctcgcagggcgtacagcagaactttttggcggttttggctacgatgtcatttctatcggaaatgcggatcgcgatgactatgaaaacacggtaataatcaacagaacgggcctacaggacatggtactggcttttggcgaagtaatacgctgtacaaatgtccgtaccgatgctccggctccggacgatgaaggggttgaatttaacattcaaaatttaaattatcaggcggatcttacgcttataatcggaaaggacttcaatggacgatacgttacaaattaa

SEQ ID NO: 3134 - protein, 141 aa, Unknown
  Obtained from environmental sample
  misc_feature (1)..(141): Xaa is any amino acid
MIFPHWDGNLIKEIVRQTLASLVQPSSETIGDRIFTVEILNGTTVNGLAGRTAELFGGFGYDVISIGNADRDDYENTVIINRTGLQDMVLAFGEVIRCTNVRTDAPAPDDEGVEFNIQNLNYQADLTLIIGKDFNGRYVTN

SEQ ID NO: 3135 - DNA, 678 bp, Unknown
  Obtained from environmental sample
  misc_feature (1)..(678): n is a, c, g, or t
ttgacgcccattttattacaggcaagaatcgattcttcaagactgcggggaaaatccctgctcttgctggacggaaaaccgcttgtattccgcgtaatggaagctttaaacagtattccatcagatctaagaatacttgtctgtccgcaggactcgctttcttcttttacgcctttggcgcgggaagcgggttttcaaatacttgcgggacctaaagatgatgttcttgaacgttactgtctggcaatccgcaaatattcaattaacagggtaataagggcgacaggcgacaacccgttcgtattcgcggacgcggccgtttctattaacgatgaagcatcatccaataatacggattacgcgggtttcacaaaccttccttacggcgcaggtgttgaatcagtttcagccttggccctccttcgcgcctcagatgaagcccgtctttcttccgagcgcgagcatgtttgcccgtatttatacaatcacccagaattattctccgtttaccatcctgtcgctccctcctgttggcattaccccgatatccgcgtcacagtagatactcaggaagattataaccgcgcggttgaattataccgcgcgttagaaaacgctccaaacagataccatggaaacacaattataaaaaaatacatggagatattcggtaaatga

SEQ ID NO: 3136 - protein, 225 aa, Unknown
  Obtained from environmental sample
  DOMAIN (3)...(215): Cytidylyltransferase
  misc_feature (1)..(225): Xaa is any amino acid
MTPILLQARIDSSRLRGKSLLLLDGKPLVFRVMEALNSIPSDLRILVCPQDSLSSFTPLAREAGFQILAGPKDDVLERYCLAIRKYSINRVIRATGDNPFVFADAAVSINDEASSNNTDYAGFTNLPYGAGVESVSALALLRASDEARLSSEREHVCPYLYNHPELFSVYHPVAPSCWHYPDIRVTVDTQEDYNRAVELYRALENAPNRYHGNTIIKKYMEIFGK

SEQ ID NO: 3137 - DNA, 558 bp, Unknown
  Obtained from environmental sample
  misc_feature (1)..(558): n is a, c, g, or t
atggggaacagccgcagaagatcgaaagataatgcctttttcgatcagggctttgcgtttgtattgccggggcttttgggcttctgcgttttctttatcgttcctttttgcctgtcattggtctacgcttttatggacaaaccgataggcggttcctttatcggcttcgcgaatttcgcctcgctgtttaagaaccgggcctaccttttaggccttatgaacacgctccggtttattggcatatcgacgccccttaacattggcatctctctggggatcgccatgctggtaatccggatcgtcaaaggccgggaatggttttcccttgtcttcctcattcccctggtaattccttccggttcaatggttttcttctggaagacgctcttttcctacgacggcgctttgaacggaacgttacgcgccattggagttgccaaaataaactggctggattcttttcttgccctgcctgtgatgatcctcatcttcctctggaagaacgtgtggttacaaccatggtgcttttcctttcgggcctggcctctgccgatctga

SEQ ID NO: 3138 - protein, 185 aa, Unknown
  Obtained from environmental sample
  misc_feature (1)..(185): Xaa is any amino acid
MGNSRRRSKDNAFFDQGFAFVLPGLLGFCVFFIVPFCLSLVYAFMDKPIGGSFIGFANFASLFKNRAYLLGLMNTLRFIGISTPLNIGISLGIAMLVIRIVKGREWFSLVFLIPLVIPSGSMVFFWKTLFSYDGALNGTLRAIGVAKINWLDSFLALPVMILIFLWKNVWLQPWCFSFRAWPLPI

SEQ ID NO: 3139 - DNA, 756 bp, Unknown
  Obtained from environmental sample
  misc_feature (1)..(756): n is a, c, g, or t
ttggtaatacccatagtggtttatattgtattcaattttatttttaatctgttggttaaaaagataagtaaaataccatacttttcacacaacaaagcaattctgatatttatgggggttggcaaattccttgtttttattgtgattatgcttttgaccttggacaatttgggcgtgaaagttgtttcgctcttggctggtcttggcattggcggtattgcagtggctcttgcagcacaaaaaatacttggagatttattcgcctctgtttcaattatactagacaaaccctttgaagtagatgacttgataagccttgacacaattaccggcaaagtggaatccataggcgtaaaaacaactagaatccgttccgtaacaggcgagcaaattattgtttcaaacagcgatttgctagaaagcagggttaccaatttcaaaaggatggatgagagacgcataacttttggcattagtgttagcaatgaaacctcaaaagaagatttacaggaaatagtagccatagtaaaaggcattatagaaaaacaaagcaatgcccgttttgaccgagggcatttgaaaggtttttcggcaagctcggtggaatatgaatttgtgttttgggtaaccaagccagaatatatagcttatatggatgttcaagaaaaaataaatttagctatacttgatgaatttgctagaagaaatataagcatggctcatccagcgcagaaagtgctgttggagaaaacttag

SEQ ID NO: 3140 - protein, 251 aa, Unknown
  Obtained from environmental sample
  DOMAIN (39)...(240): Mechanosensitive ion channel
  misc_feature (1)..(251): Xaa is any amino acid
MVIPIVVYIVFNFIFNLLVKKISKIPYFSHNKAILIFMGVGKFLVFIVIMLLTLDNLGVKVVSLLAGLGIGGIAVALAAQKILGDLFASVSIILDKPFEVDDLISLDTITGKVESIGVKTTRIRSVTGEQIIVSNSDLLESRVTNFKRMDERRITFGISVSNETSKEDLQEIVAIVKGIIEKQSNARFDRGHLKGFSASSVEYEFVFWVTKPEYIAYMDVQEKINLAILDEFARRNISMAHPAQKVLLEKT

SEQ ID NO: 3141 - DNA, 612 bp, Unknown
  Obtained from environmental sample
  misc_feature (1)..(612): n is a, c, g, or t
ttgccctggaggcacatttacaaagacttaaattttgacttggttatttctggcgtaaataacgccgacaacgcaggcgttgcttctttttacagcggaacggttggagcggcaagggaggctgccttgtggaaagtaccttccattgcggttagcctgcaaaggcaaagcgatatggctcttgaatatgctttaaaatgggtacaaaaaactttgagagaaggtttgttcaaagatatgcccaaacaaactctctggaatttcaatgtccctccgtgtagcaaagaaaacccttgcaaaggcgttaaagtctccaccacaagcacaagtatgtttaacgattattatgtagaagcagaaagctcaaaaaattatttgggaaaagaaaccgcgtatttggtgaatgaagattcttcggctagtggtaagtggggagtggctagtggggaactcaaagcttataatttaatgggtaataaggcaccggatttgagggaaggtacggatgactggtggttaagtcaagggtatgcttcgcttagtccgcagagtatagatttgacggatagggttgagtatgagaggctaacttttctatattcaaaagaatga

SEQ ID NO: 3142 - protein, 203 aa, Unknown
  Obtained from environmental sample
  DOMAIN (3)...(116): Survival protein SurE
  misc_feature (1)..(203): Xaa is any amino acid
MPWRHIYKDLNFDLVISGVNNADNAGVASFYSGTVGAAREAALWKVPSIAVSLQRQSDMALEYALKWVQKTLREGLFKDMPKQTLWNFNVPPCSKENPCKGVKVSTTSTSMFNDYYVEAESSKNYLGKETAYLVNEDSSASGKWGVASGELKAYNLMGNKAPDLREGTDDWWLSQGYASLSPQSIDLTDRVEYERLTFLYSKE

SEQ ID NO: 3143 - DNA, 438 bp, Unknown
  Obtained from environmental sample
  misc_feature (1)..(438): n is a, c, g, or t
atgctactaatgaaaaaacacacgcttttttggggctgttgtttggtttcgctcattgcggcgacaaccgtttgcgcccaacaagggtctagaggtcagtttggacccggcgttggatttacgggccctgggtcttcgggccagtttgggtatgggttcaccggcccatcccaaactgtttctatagttaaagcacaatcttatggtcacagaacccccgttattataaagggaaatattgtccgggctttaggcggtgatatgtatacattccgtgattcttccggggagattgtccttcggataggcccgcgggaatggcagtactacggcgccactatcagtccgtctgataccatcgaaatcagcggagaagtatgttatgggagggggtgggagccggtacatgtgcatgcgcgatctatcaggaaaatatag

SEQ ID NO: 3144 - protein, 145 aa, Unknown
  Obtained from environmental sample
  SIGNAL (1)...(26)
  DOMAIN (5)...(144): Domain unknown function (DUF388)
  misc_feature (1)..(145): Xaa is any amino acid
MLLMKKHTLFWGCCLVSLIAATTVCAQQGSRGQFGPGVGFTGPGSSGQFGYGFTGPSQTVSIVKAQSYGHRTPVIIKGNIVRALGGDMYTFRDSSGEIVLRIGPREWQYYGATISPSDTIEISGEVCYGRGWEPVHVHARSIRKI

SEQ ID NO: 3145 - DNA, 891 bp, Unknown
  Obtained from environmental sample
  misc_feature (1)..(891): n is a, c, g, or t
atggccgacgccgctgacaggcaccacctagacataattcacgcgcattacgccattccccacgccagcgctgcgcttttggcgcggatggccctagagggcaaaataaaagtggtcactacgctgcatgggacagacataacagcagttggcagcgatcccagctacctgccaatggtgagactggccatcaaagagagcgatgcagttaccgttgtatcggaatacttaaagacccagaccttgcagacctttggcgtttcgcgccacatagacgttgtctataactttgcatgcccccccaaagtggacgaaaacgcgcagtgcagcagggactgtagggcttggctttccccgggctgcgaacccatcttggcgcatgtatcaaattttcgccccgtcaagcgcgtgatggatgttttgagggttttcgaggccgtgcgccagagccacccctgcaagctggtgatggtgggcgatgggcccgacagactggaggccgaaaattacgccagagaaaagaacattgaagccgatgtgcgcttcacaggcaaactgctggatattgattcggtgctatcctgcacggacatatttttgctgcccagctccaccgagagctttggcttagctgcgctagaggccatgtcccacggagcccccatagtagccagccgagctgggggcatccctgaggtggtcagggagggcgtggacggctacctttccgatgttggcgacattgcgggcatggccgaaaacgtatcaaagctgctcgcaaacccagaactgaggcgaaacatgggccgcagcgccaaagaaagggccctcaacgactttgccgaagggccgatagttgagcagtatgaagagatatacaggaaggtgtga

SEQ ID NO: 3146 - protein, 296 aa, Unknown
  Obtained from environmental sample
  DOMAIN (109)...(275): Glycosyl transferases group 1
  misc_feature (1)..(296): Xaa is any amino acid
MADAADRHHLDIIHAHYAIPHASAALLARMALEGKIKVVTTLHGTDITAVGSDPSYLPMVRLAIKESDAVTVVSEYLKTQTLQTFGVSRHIDVVYNFACPPKVDENAQCSRDCRAWLSPGCEPILAHVSNFRPVKRVMDVLRVFEAVRQSHPCKLVMVGDGPDRLEAENYAREKNIEADVRFTGKLLDIDSVLSCTDIFLLPSSTESFGLAALEAMSHGAPIVASRAGGIPEVVREGVDGYLSDVGDIAGMAENVSKLLANPELRRNMGRSAKERALNDFAEGPIVEQYEEIYRKV

SEQ ID NO: 3147 - DNA, 414 bp, Unknown
  Obtained from environmental sample
  misc_feature (1)..(414): n is a, c, g, or t
atggctcagactaagacgatgcttccaaatgtagaactcttttgcgatggggcctgcctgggtaacccaggccccggcgggtgggcgtacctgctgcgggcgagggcaagcagcggggtgcaggaaaaagaaggcagcggctccgagccttccacaacgaacaacagaatggagctgcgggcggccatagaagggctccacgcgctcacgcgcccctgcgcggctaggctgttctgcgacagccgatacgtggtgcagggcatcaatgaatggctgagggaatggaaaagcagggggtggcgcaaggccgacaagaagcccgtcctcaacgcagagctatggcaggaactcgatgggctgttgagtgttcaccaagtggaagccgtttgggtcaaaggacctcggccgatctga

SEQ ID NO: 3148 - protein, 137 aa, Unknown
  Obtained from environmental sample
  DOMAIN (8)...(137): RNase H
  misc_feature (1)..(137): Xaa is any amino acid
MAQTKTMLPNVELFCDGACLGNPGPGGWAYLLRARASSGVQEKEGSGSEPSTTNNRMELRAAIEGLHALTRPCAARLFCDSRYVVQGINEWLREWKSRGWRKADKKPVLNAELWQELDGLLSVHQVEAVWVKGPRPI

SEQ ID NO: 3149 - DNA, 831 bp, Unknown
  Obtained from environmental sample
  misc_feature (1)..(831): n is a, c, g, or t
atgaccgctaaacccctgatcgatatggttttcgtaaacggcggtaaattttccatgggcaatcaaggcaaccccaggggaagaagggattcttccaccctggacattgagtggccgcgccatgacgtgacgctcaatgacttttccataggaaaatacgaagtaacccagggtgaattctatgaggtgacaggtctgaagccgagcagccacataaaaaatcctgatgacggatcccctaacggctggatgaaactccctgtcgaaagcgtaacctggtacgaggctttggttttctgcaatcaactcagcatcaaggaaaaactaagtccggtttacagcataaacggcagttttgatcctgaagaatggggggagcccccaaccaggagatccaatgaatgggacgctgtgagaatggacacaagagccgaaggttaccgcctgcctacggaggctgaatgggaatacgccgcgcggggcggccaggaatcgaaaggctatgaatatgcgggagcggcaaaagaaaatgcctccaaggtagcgtggtattcaatcattatcaataaaacgcctgtcggcacaatccacggagtagggaggaagcagcccaacgagcttggcctgtacgacatgagcggcaatgtaatggaatggtgctgggactggttaggcgattacagtccggatccccagattaatcccctcgggccacccaggggaatgtaccgggttataaggggcggcggatggtcgattaaggatatttacagccgaatctcataccgtcacaataaccagccccaatacttcggtattaatttgggttaa

SEQ ID NO: 3150 - protein, 276 aa, Unknown
  Obtained from environmental sample
  DOMAIN (5)...(276): Domain of unknown function (DUF323)
  misc_feature (1)..(276): Xaa is any amino acid
MTAKPLIDMVFVNGGKFSMGNQGNPRGRRDSSTLDIEWPRHDVTLNDFSIGKYEVTQGEFYEVTGLKPSSHIKNPDDGSPNGWMKLPVESVTWYEALVFCNQLSIKEKLSPVYSINGSFDPEEWGEPPTRRSNEWDAVRMDTRAEGYRLPTEAEWEYAARGGQESKGYEYAGAAKENASKVAWYSIIINKTPVGTIHGVGRKQPNELGLYDMSGNVMEWCWDWLGDYSPDPQINPLGPPRGMYRVIRGGGWSIKDIYSRISYRHNNQPQYFGINLG

SEQ ID NO: 3151 - DNA, 480 bp, Unknown
  Obtained from environmental sample
  misc_feature (1)..(480): n is a, c, g, or t
ttgttaaccgaaatggcgcgggcctacggcagccagtgcgtcgtgctttcaatagacgcgaagcgggtgaacgccgggaaggatatacggtggaacgctttttcccacgggggaagaaccgacacgggaattgacgctatacagtgggcggtgaaggcagtcgccctgggcgcgggggagatacttctcaattccattgacgccgacggtacaggcgctggctatgatctggaactgacaaggcgagttctggaagcggttccggttccggtaatcgcctcaggcggcgcggggactctggatcagatcaccggggttttgctcagtaccgccacggcgggggtgggcatggtgccgggtacggaggccgcgccgggcgcggacgcggcgctgattgcctcgctgcttcacttcgggaaaaccacaatcagggaaataaaaaaacacgcggaattaaagggagtgtgcgtcagatggtaa

SEQ ID NO: 3152 - protein, 159 aa, Unknown
  Obtained from environmental sample
  DOMAIN (1)...(142): Histidine biosynthesis protein
  misc_feature (1)..(159): Xaa is any amino acid
MLTEMARAYGSQCVVLSIDAKRVNAGKDIRWNAFSHGGRTDTGIDAIQWAVKAVALGAGEILLNSIDADGTGAGYDLELTRRVLEAVPVPVIASGGAGTLDQITGVLLSTATAGVGMVPGTEAAPGADAALIASLLHFGKTTIREIKKHAELKGVCVRW

SEQ ID NO: 3153 - DNA, 444 bp, Unknown
  Obtained from environmental sample
  misc_feature (1)..(444): n is a, c, g, or t
gtgcgtcagatggtaatcgcgtcaatagacatacagggcggcaaagtcgtccagctcaggcaaggttcggaactggtgctacagcgggacaaccccctggaactggcaacggaattcgaccgctacggcgaaatagcggtaatagaccttgacgccgccatgggtaagggatcgaatcttgaaatgataaagccgattttgagaaaggcggaatgtcgcgtgggcggcggcgtanaaacgccccagcagacaaaggagctggtcagccttggggcgcgaaagattatcatcggctctggcgctttccgcgatccggcaaagaaaggggccggtgttgccgcaggcgagttcaaggttcagatcccgtttctggaggcaatggcaaacgcgataggcaaagagcggctgaatgccgcagtggatgcgagaacaacgagatcgtga

SEQ ID NO: 3154 - protein, 147 aa, Unknown
  Obtained from environmental sample
  DOMAIN (4)...(145): Histidine biosynthesis protein
  misc_feature (1)..(147): Xaa is any amino acid
MRQMVIASIDIQGGKVVQLRQGSELVLQRDNPLELATEFDRYGEIAVIDLDAAMGKGSNLEMIKPILRKAECRVGGGVXTPQQTKELVSLGARKIIIGSGAFRDPAKKGAGVAAGEFKVQIPFLEAMANAIGKERLNAAVDARTTRS

SEQ ID NO: 3155 - DNA, 621 bp, Unknown
  Obtained from environmental sample
  misc_feature (1)..(621): n is a, c, g, or t
atgtttcttgcgtttaacgccctcttcatttttttcctggcgggagttcagttcaggtattttttcagcgctctttttatttttctgcccaccgcgacacttttgattttaaaaaaggaacaccggatcaggcgctttttaagctatattcagccggattttgagccgcagggcgcgaatttccaggttaattcctcgatcctttcaattaattcaggaggattttggggtaaaggcatcgggcacgggacgcggaaaatcgcaagcgtccctgatatccatgcagattttattttctcggccttcgctgaggagatggggtttttgggagttatgctcctgttcattttgtttgccgttttcgcggctcgcggttatatcgattccattggcaatgaaaagccttttaaccgccttttgggctgcggccttattacgatgataattacacaggttctgttgaatatagccgtcgctgccggggctttacccgcgacaggaattcccctgccgtttttttccgccggaggatcttcgctggctactaccctgataatggccggccttgtagtgaatgtttccagaacctcaaaaaacaacgtttacgcgggggaaaattaa

SEQ ID NO: 3156 - protein, 206 aa, Unknown
  Obtained from environmental sample
  DOMAIN (1)...(199): Cell cycle protein
  misc_feature (1)..(206): Xaa is any amino acid
MFLAFNALFIFFLAGVQFRYFFSALFIFLPTATLLILKKEHRIRRFLSYIQPDFEPQGANFQVNSSILSINSGGFWGKGIGHGTRKIASVPDIHADFIFSAFAEEMGFLGVMLLFILFAVFAARGYIDSIGNEKPFNRLLGCGLITMIITQVLLNIAVAAGALPATGIPLPFFSAGGSSLATTLIMAGLVVNVSRTSKNNVYAGEN

SEQ ID NO: 3157 - DNA, 642 bp, Unknown
  Obtained from environmental sample
  misc_feature (1)..(642): n is a, c, g, or t
ttgcgcttgaaggttacgatcgcatgcagaaggactcttttgttcatggcggcgaaacaagagacaaaggggggccaaaagtttgggagaagcttaaagattggtttgaaaaagaatttttttagagaaaaaatcggttctaccggttttagtaatctgggaggggttatgaattttgaattactaagtgaaactgtaaaaaaagaaaaacccgtttctattgttgtgatagggacaggcggctgcggctcaaatgccgtggatggaatgattgagtgtggtattaatggcgtaaaatttatcgccgtcaatacagacatgcagtctttacgaaacagtaaagcggaaacaaaaatccagattggctcggagctaaccgaaggcatgggcgcgggcggcgtgccggaaatcggcgaacaggctgcccatgaagacagggatgacatagccagggcccttgccggggcggatatggtttttgttacagccggcatgggcggcggaacagggacaggctcggcgcccgtcatcgcggagatcgccaaaagccagggcgccctaacggtgggcgtggtaacaaagcccttcgattatgaaaaaagataccgcaggaagtcgccgaaagggggctcggccatctga

SEQ ID NO: 3158 - protein, 213 aa, Unknown
  Obtained from environmental sample
  DOMAIN (72)...(209): Tubulin/FtsZ family, GTPase domain
  misc_feature (1)..(213): Xaa is any amino acid
MRLKVTIACRRTLLFMAAKQETKGGQKFGRSLKIGLKKNFFREKIGSTGFSNLGGVMNFELLSETVKKEKPVSIVVIGTGGCGSNAVDGMIECGINGVKFIAVNTDMQSLRNSKAETKIQIGSELTEGMGAGGVPEIGEQAAHEDRDDIARALAGADMVFVTAGMGGGTGTGSAPVIAEIAKSQGALTVGVVTKPFDYEKRYRRKSPKGGSAI

SEQ ID NO: 3159 - DNA, 717 bp, Unknown
  Obtained from environmental sample
  misc_feature (1)..(717): n is a, c, g, or t
ttggcgatctccgcgatgacgggcgccgagcctgtccctgttccgccgcccatgccggctgtaacaaaaaccatatccgccccggcaagggccctggctatgtcatccctgtcttcatgggcagcctgttcgccgatttccggcacgccgcccgcgcccatgccttcggttagctccgagccaatctggatttttgtttccgctttactgtttcgtaaagactgcatgtctgtattgacggcgataaattttacgccattaataccacactcaatcattccatccacggcatttgagccgcagccgcctgtccctatcacaacaatagaaacgggtttttctttttttacagtttcacttagtaattcaaaattcataacccctcccagattactaaaaccggtagaaccgattttttctctaaaaaaattctttttcaaaccaatctttaagcttctcccaaacttttggcccccctttgtctcttgtttcgccgccatgaacaaaagagtccttctgcatgcgatcgtaaccttcaagcgcaagccccacggcggtcgcgaaggtggctctgcgataatcttctacaaggccgccgacaggcagcggtattcctactcgtacaggcaggttaaaaacctgggctgccaggtccgccgctcccagaagatccgagccgccgcctgtaagcacaactccaccgcccaggggccttga

SEQ ID NO: 3160 - protein, 238 aa, Unknown
  Obtained from environmental sample
  misc_feature (1)..(238): Xaa is any amino acid
MAISAMTGAEPVPVPPPMPAVTKTISAPARALAMSSLSSWAACSPISGTPPAPMPSVSSEPIWIFVSALLFRKDCMSVLTAINFTPLIPHSIIPSTAFEPQPPVPITTIETGFSFFTVSLSNSKFITPPRLLKPVEPIFSLKKFFFKPIFKLLPNFWPPFVSCFAAMNKRVLLHAIVTFKRKPHGGREGGSAIIFYKAADRQRYSYSYRQVKNLGCQVRRSQKIRAAACKHNSTAQGP

SEQ ID NO: 3161 - DNA, 348 bp, Unknown
  Obtained from environmental sample
  misc_feature (1)..(348): n is a, c, g, or t
atggaagagacttttaagctggttaaggaaaaaatcgacaagctttctttttcaaggcccctgggcggtggagttgtgcttacaggcggcggctcggatcttctgggagcggcggacctggcagcccaggtttttaacctgcctgtacgagtaggaataccgctgcctgtcggcggccttgtagaagattatcgcagagccaccttcgcgaccgccgtggggcttgcgcttgaaggttacgatcgcatgcagaaggactcttttgttcatggcggcgaaacaagagacaaaggggggccaaaagtttgggagaagcttaaagattggtttgaaaaagaatttttttag

SEQ ID NO: 3162 - protein, 115 aa, Unknown
  Obtained from environmental sample
  misc_feature (1)..(115): Xaa is any amino acid
MEETFKLVKEKIDKLSFSRPLGGGVVLTGGGSDLLGAADLAAQVFNLPVRVGIPLPVGGLVEDYRRATFATAVGLALEGYDRMQKDSFVHGGETRDKGGPKVWEKLKDWFEKEFF

SEQ ID NO: 3163 - DNA, 693 bp, Unknown
  Obtained from environmental sample
  misc_feature (1)..(693): n is a, c, g, or t
gtggaaccccgaactcgacggcttcctccccgcccgntacggcgtggacaatatagaagagaagtccaaaacaaggacgccctgcgcgaccgcttttggctctacaagagcaacaagccgatcatctcctacatcggccgcttagacgaacagaagggtctgggcctaatctgccacgccgcccactacgccctgtctcgcggcgctcagttcattctgctcggctcgccctccaacaacgccatagccggccagttcgcccacctaaggaaccagctgggtcagagcgtggattgccacatagagttgggcttcaacgaggagctctcgcacctgatatacgccggctccgacatggtggtggtccccagcgcctttgaaccctgcggcctgacgcagctgatcgcgctgcgctacggcacagtccccatagtccgctcggtcggcggcctggccgacacggtcttcgacaaagactacgcccaggtcgacatgagtatgcgcaacggctacaccttcaacgaccttaacaccgccggcttagagtcggctatgaacagggccatcggcctgtactacgattaccccgaggatttcagggcgctgatgaagaacgggatgaaggcggattactcgtggaataatccggggacgcattatatgaatatttatgatcttattaggcataaataa

SEQ ID NO: 3164 - protein, 230 aa, Unknown
  Obtained from environmental sample
  DOMAIN (26)...(209): Glycosyl transferases group 1
  misc_feature (1)..(230): Xaa is any amino acid
MEPRTRRLPPRPXRRGQYRREVQNKDALRDRFWLYKSNKPIISYIGRLDEQKGLGLICHAAHYALSRGAQFILLGSPSNNAIAGQFAHLRNQLGQSVDCHIELGFNEELSHLIYAGSDMVVVPSAFEPCGLTQLIALRYGTVPIVRSVGGLADTVFDKDYAQVDMSMRNGYTFNDLNTAGLESAMNRAIGLYYDYPEDFRALMKNGMKADYSWNNPGTHYMNIYDLIRHK

SEQ ID NO: 3165 - DNA, 837 bp, Unknown
  Obtained from environmental sample
  misc_feature (1)..(837): n is a, c, g, or t
gtgcagattctccagaacgccgaggcggctatgcgccgcgccaaggagaccggcctcaacagcttcgagcactacaaacccagcatgaacgcccgcgctcttgaacgcctatcgctggaaagcgacctgcgcaacgccgtcgggaacgcgcagctttgcgctttctaccagccgcaggtggagataaaatcaggccgcatcaccggcgccgaggccctgctgcgctggaggcatcccgacctcggcatggtgcagccgggtcagttcatacccatagccgaagacaccgggctcatcctctccataggcgaatgggtgctgcgcaccgcctgcatagaggcgcgcaaaagccaagagggcgggaaaccgtacgtgatctcggtcaacctttccgtcagccagttccgccagcaaaacttggtctccatcgtggaaagcgcccttaaagacgcggatttgccgcccgatctcttggaactcgagataaccgaaacgatgagcatgaaaaatccggaagacactatgacggtgctgcgcaaactgaaagacttgggcgtaagaatagcgatagacgatttcggcacgggctactcttcattgagctatctcaaacgcttcccgatcgacacgctgaagatagacaggtcgtttatcatagacataccggagaattcacgcgacgcggagatagtaaaggcgataataacgatggcccactcgctggacctgtccgtaatagccgagggggtggagatggaaccgcaagcgcagtatctgctggataacgggtgcgagaagatgcaggggtatttgttcagcccgccagngtgccgctga

SEQ ID NO: 3166 - protein, 278 aa, Unknown
  Obtained from environmental sample
  DOMAIN (35)...(275): EAL domain
  misc_feature (1)..(278): Xaa is any amino acid
MQILQNAEAAMRRAKETGLNSFEHYKPSMNARALERLSLESDLRNAVGNAQLCAFYQPQVEIKSGRITGAEALLRWRHPDLGMVQPGQFIPIAEDTGLILSIGEWVLRTACIEARKSQEGGKPYVISVNLSVSQFRQQNLVSIVESALKDADLPPDLLELEITETMSMKNPEDTMTVLRKLKDLGVRIAIDDFGTGYSSLSYLKRFPIDTLKIDRSFIIDIPENSRDAEIVKAIITMAHSLDLSVIAEGVEMEPQAQYLLDNGCEKMQGYLFSPPXCR

SEQ ID NO: 3167 - DNA, 861 bp, Unknown
  Obtained from environmental sample
  misc_feature (1)..(861): n is a, c, g, or t
atgaaacgcttgctattggtcatatttgccgggcttttgtttaacgtacatgtatttgcccagtatgactatggtgattatgactctggtgactatgactctggtgactatggctatgactatgactatgaagatgagaccgggaattccgacacaattaatcttacagctacaaattcaggggatgaaggccattctgtacaaaaactgacattgcccaataaccagcctatatatttatatttctataatactgtacagaatcccactcctcctgaaccccaggctccgagttccccccctgccgcgccgccaccctaccgtgaaccggagcctcttattgaatacaggtacgttccaccgcctgtcacgtccacacctgcgactgaatacatttacattcaaccaccgcctccgccaccaccgcctcctcctcctcagattgaatacatttacattcagccgccgccaccaccaccgccaccgccgccgcctcagattgaatatatttaccttccgccaccccagattgaatatcttcctccgcctcaggttgaataccttccgccgcctcgggttgaacccatatatatacaacagcccatgcaaatccgtgttattccaagtttaccgaatccgaacagtcacaagttataccgtttgcaagtaggctcttatgccgcgcataataccgcggatataatggcgcagcgcataaggtcggcgggtttacaggccggtattgaatattacaattcattaaagagggtgtttgtaccgggtgtccgcgcggcggacgcgtgttcaatagtgcagatgcttgaattattgggttttaaagaagtttggataagggaatga

SEQ ID NO: 3168 - protein, 286 aa, Unknown
  Obtained from environmental sample
  SIGNAL (1)...(20)
  DOMAIN (4)...(263): Extensin-like region
  misc_feature (1)..(286): Xaa is any amino acid
MKRLLLVIFAGLLFNVHVFAQYDYGDYDSGDYDSGDYGYDYDYEDETGNSDTINLTATNSGDEGHSVQKLTLPNNQPIYLYFYNTVQNPTPPEPQAPSSPPAAPPPYREPEPLIEYRYVPPPVTSTPATEYIYIQPPPPPPPPPPPQIEYIYIQPPPPPPPPPPPQIEYIYLPPPQIEYLPPPQVEYLPPPRVEPIYIQQPMQIRVIPSLPNPNSHKLYRLQVGSYAAHNTADIMAQRIRSAGLQAGIEYYNSLKRVFVPGVRAADACSIVQMLELLGFKEVWIRE

SEQ ID NO: 3169 - DNA, 351 bp, Unknown
  Obtained from environmental sample
  misc_feature (1)..(351): n is a, c, g, or t
atggatgtaacttgggatcccgtaaaaaaccagaaaaatataaacaagcggcatttacccttgtcgcttggcggtctggttcttgatgatgaaatgcgtattgagcgtcatgacaaagaacacagtaccccggaacaagaccgatggcaaacaattggtatggcgggcaagattcttttcatggtttatagggaggcgggggaaataccgcatattatttcggtccgtttagcggatacggaagaaaagaggttatacaatggcgaacgagatttacagacgtccgattggtacagggttaaccccggaggaactggcaatgctggaggaagcggagaaataccccattga

SEQ ID NO: 3170 - protein, 116 aa, Unknown
  Obtained from environmental sample
  DOMAIN (1)...(89): Protein of unknown function (DUF497)
  misc_feature (1)..(116): Xaa is any amino acid
MDVTWDPVKNQKNINKRHLPLSLGGLVLDDEMRIERHDKEHSTPEQDRWQTIGMAGKILFMVYREAGEIPHIISVRLADTEEKRLYNGERDLQTSDWYRVNPGGTGNAGGSGEIPH

SEQ ID NO: 3171 - DNA, 762 bp, Unknown
  Obtained from environmental sample
  misc_feature (1)..(762): n is a, c, g, or t
atgaaagctctttcccagatgctgctgctttgcgcggaaaaaatttcctgttccggagccggttatcatgatttaaatgaacatgagcaggggcatgactgcgcaggccagcagtcttttttgaacgacaaggaaagactgctcatagcgtgcctgcgccggggcgacagtaccgaagcccagagtattgctcgggatctattagccgatttcagtaatctggctgacggcgattttgagttcttcaaaatgaaggcgatagaactggtcgtcctggtttcaagaaccgggacaaattccgaaaatgaggcggaacttgttgaaacgaacagccgtaatataaagcagcttgaggactccaataccgcggaggaattggctgataacgtctgcctgattctggaaaggatggccgggaaaattttctcttttcaggggattcgccacgcgtccgcgctcaggaaggccgagcgttttatctgggagaattacaccaggaagatcagccttaaggagattgccgacgcgtcagggctttccgcgccttatttcagtactgtattcaagaatgaaatgggcgaaaacctttcaaattatcttaacaggcttagggtggaaaaagccgtaatgatgcttggtgaaaccgattctccaattaacaagatttcggcggactgcgggtttgaagatcaaagctggttttcaaaagtattcaaaagctataccggtattagtccctatgaataccgtaagaatggctga

SEQ ID NO: 3172 - protein, 253 aa, Unknown
  Obtained from environmental sample
  DOMAIN (207)...(251): Bacterial regulatory helix-turn-helix proteins, AraC family
  misc_feature (1)..(253): Xaa is any amino acid
MKALSQMLLLCAEKISCSGAGYHDLNEHEQGHDCAGQQSFLNDKERLLIACLRRGDSTEAQSIARDLLADFSNLADGDFEFFKMKAIELVVLVSRTGTNSENEAELVETNSRNIKQLEDSNTAEELADNVCLILERMAGKIFSFQGIRHASALRKAERFIWENYTRKISLKEIADASGLSAPYFSTVFKNEMGENLSNYLNRLRVEKAVMMLGETDSPINKISADCGFEDQSWFSKVFKSYTGISPYEYRKNG

SEQ ID NO: 3173 - DNA, 771 bp, Unknown
  Obtained from environmental sample
  misc_feature (1)..(771): n is a, c, g, or t
gtgtttgaggttgtcgataacgccattgacgaggccatgcagggtttttgtaccgatattctcgtggttctggaggggaacgatgtggtgcgggtggaggacaacggccgtggcatccccgtggacatacacccaaccgagcgcgtaagcgccctggaactggtaatgacgcggcttcacgctggcggcaaattcgataaaaaatcctacaaggtttccggcggccttcacggggtcggcgtttccgtagtgaacgccctttccgaatggtgcgaggcctttgtccatgcgggcgacaaaatcttcactcaacgctacaaaaaaggcatacccgaaaaaccggtccacgagaccaacgcctccgccctcccctacaacccaagattgcaaaagggtacggtagtccgctggaaagccgacgcctcggtttttgaaaccaccacccacaattttgacgccctttccaaccgactgcgggaactggccttcctcaacaagggtcttaagatcacaatccgcgacgagaggctttccaatcctaaagttcacgagttcaagtttgaaggcggggtcaaaagctttgtcgaatacctgaacgaaaacaaaaccgtcctgtacagggaaccggtttatcttgagggcaaacgcgacgacggccagggcggagaagtcgaggttgagtgcgccatacaatacaacgacggctttaacgaaataatgttttcgtttgttaatgatattaacacgcgcgagggcggcacccacctatag

SEQ ID NO: 3174 - protein, 256 aa, Unknown
  Obtained from environmental sample
  DOMAIN (1)...(142): Histidine kinase-, DNA gyrase B-, and HSP90-like ATPase
  misc_feature (1)..(256): Xaa is any amino acid
MFEVVDNAIDEAMQGFCTDILVVLEGNDVVRVEDNGRGIPVDIHPTERVSALELVMTRLHAGGKFDKKSYKVSGGLHGVGVSVVNALSEWCEAFVHAGDKIFTQRYKKGIPEKPVHETNASALPYNPRLQKGTVVRWKADASVFETTTHNFDALSNRLRELAFLNKGLKITIRDERLSNPKVHEFKFEGGVKSFVEYLNENKTVLYREPVYLEGKRDDGQGGEVEVECAIQYNDGFNEIMFSFVNDINTREGGTHL

SEQ ID NO: 3175 - DNA, 636 bp, Unknown
  Obtained from environmental sample
  misc_feature (1)..(636): n is a, c, g, or t
ttggggatacacaatatcaagcaggacgccatacgcgccctgggacgcctgtacttccgcaccagctacggccagaacgtgctgaaccattccagggaagtcgccgttatcgcgggtatgcttgccgccgaaattggctgtaaccgggatctgaccaagcgggcggcccttctgcacgacataggcaagggcattgactcggattccgaccttaaccacgccgaaatcggcatggatatggcccggaaaatgggagaggatccgcggataatcaacgccataggcagccaccacaacgatattgagccgacctgcatcgaggcagtactggtgcagattgccgacgccatttccgccgcaaggccgggcgcccgcaaggaaacccttgacaactacatcaaacggctggagaacctggaaaacatcgctaaggagttcggcggcgtcgccaacgcgttcgcgatccaggccgggcgggagctccgcatcatcgtcaacaacgagactgtcagcgacgaccagtccagggatcttgccaaggaaatcgccaaaaagatcgaaaacgatctgcactaccccggcaggatcaagctgaccatcatcagagaaactaggataactgaatacgcaaggtaa

SEQ ID NO: 3176 - protein, 211 aa, Unknown
  Obtained from environmental sample
  DOMAIN (27)...(120): HD domain
  misc_feature (1)..(211): Xaa is any amino acid
MGIHNIKQDAIRALGRLYFRTSYGQNVLNHSREVAVIAGMLAAEIGCNRDLTKRAALLHDIGKGIDSDSDLNHAEIGMDMARKMGEDPRIINAIGSHHNDIEPTCIEAVLVQIADAISAARPGARKETLDNYIKRLENLENIAKEFGGVANAFAIQAGRELRIIVNNETVSDDQSRDLAKEIAKKIENDLHYPGRIKLTIIRETRITEYAR

SEQ ID NO: 3177 - DNA, 891 bp, Unknown
  Obtained from environmental sample
  misc_feature (1)..(891): n is a, c, g, or t
atgataaccctggattgttccgatcatataaaaagcgaaaataatgaaaataatccgttacctgataattataaaaacaagtatattgataaaatttttaatattgaaggtatttcccttgttttttcacaggaagaacttaaaaaatgcgccgctatttacggggacgcgataaaatttataaaagaaatatttaacaggtttttttctaaagataataaacctgcggattttgaaatttcgatagatgaaaccgtatcgcccacgacgccgttacagcatttttttgtcgcaaaggaactttttgacgcgggcgtttcttttgagtcattggcgccgcgtttctgcggggagtttcaaaaaggaatagattacataggcgatacagctcagtttgaaaaagaaataaatattcacgcggcaatagcaaggttttttggttacaaattaagtattcattcaggctcggacaaattcagcgtgtttccggcaataagaaaagcaacaaatggccggtttcacgttaaaaccgccggaacaaactggctggaagctatgcgcgtaattgcggaaaaggacccttccctttaccgtgaaattcacagttttgccttaaccgcgtttaacgaggcaaaaaagttttattatgtaacaactgatatttcaaaaattcccgatgtttcatcagttaatgatatggaactgccaaaactctttaaaaataacgacgttcggcagcttatacatatcacttacggaatgatattaaaccataaaaaagaagacggaacttacgcgtttaangagcgtttatacaagctttggcttcaaaatgaaggcgcgtacaggaaagccctcgcggaacatataggaaaacatttggaattgtaa

SEQ ID NO: 3178 - protein, 296 aa, Unknown
  Obtained from environmental sample
  misc_feature (1)..(296): Xaa is any amino acid
MITLDCSDHIKSENNENNPLPDNYKNKYIDKIFNIEGISLVFSQEELKKCAAIYGDAIKFIKEIFNRFFSKDNKPADFEISIDETVSPTTPLQHFFVAKELFDAGVSFESLAPRFCGEFQKGIDYIGDTAQFEKEINIHAAIARFFGYKLSIHSGSDKFSVFPAIRKATNGRFHVKTAGTNWLEAMRVIAEKDPSLYREIHSFALTAFNEAKKFYYVTTDISKIPDVSSVNDMELPKLFKNNDVRQLIHITYGMILNHKKEDGTYAFXERLYKLWLQNEGAYRKALAEHIGKHLEL

SEQ ID NO: 3179 - DNA, 561 bp, Unknown
  Obtained from environmental sample
  misc_feature (1)..(561): n is a, c, g, or t
atgaacatgaacagggacttgattaaccgcgccctgctggccacgggacagacgcctcttacggcggaagacgttcaagaacaaaattccgcttacgagctttgtaaagcgttttatctttccactttccttgaggcgttatctgaagtcgagtgggtaggaggaagaaaacgggcgaagcttgtgcgcacgggaagacccgttattaaaaacgaccgctatctttacgcgtacgacatgccgtttgactgcgctaaacctattgagctccagaacaacgaatactttattgtcgaggacaggcttattcttacggacgatcctgaattattaaagcagcgtattcctgttgagaaaataccgcttattacggaaaccgcggaagttccggaagcacagctgttatacgtttctaacggaaaaatactaagacaggtttcagtaatatccggccggtatgccctgacgagattccccaaaacggaatatctgacttccggaccttccgggaacgaagggcgacttttaccatttacaacgggattaccctccgaaccttaa

SEQ ID NO: 3180 - protein, 186 aa, Unknown
  Obtained from environmental sample
  SIGNAL (1)...(22)
  misc_feature (1)..(186): Xaa is any amino acid
MNMNRDLINRALLATGQTPLTAEDVQEQNSAYELCKAFYLSTFLEALSEVEWVGGRKRAKLVRTGRPVIKNDRYLYAYDMPFDCAKPIELQNNEYFIVEDRLILTDDPELLKQRIPVEKIPLITETAEVPEAQLLYVSNGKILRQVSVISGRYALTRFPKTEYLTSGPSGNEGRLLPFTTGLPSEP

SEQ ID NO: 3181 - DNA, 894 bp, Unknown
  Obtained from environmental sample
  misc_feature (1)..(894): n is a, c, g, or t
ttgtacgggatgtcgtccgatcgcgtcttattacggggagagggagacgtaagcatggctaaaaggttctcgttgattgggatagggttggttctcgccttgggtttggcggggggcgtttgggcggagaaatccgcgtcgctgtttttcccgctgcccgcgcccgcggacgcgatgccggcgggatcgcccgtggcgacccacggcaaactttcggtgtcaggcagcaaaatcgtcgacaaaagcggtacggcggtgcagctcaaaggtatgagcttcttttggagcaactccggagtaggcggaatcttctacaacgagaaggtaatctcgtggctcgcccacgattggaaggtggatgtcctgcgtgtggccatgggcgcggagacggacggcacgaacaagggttactcggacggggataaagccactcaggagctgttggcgagggccgcgattgaggagtgcataaaaagaggagtctacgtgattattgattttcactcccacaaagagcatcgctccgaagcggttacgttctttaaggatatggcgacctcctacggcaagtacccgcatgtattgtatgaaatttggaatgagcctttggatgccggcggtggaaacggcgtttcgggcggtacgatagcggattacgcgagtaccgtgggatccgccatcaggaacaccaacggagccgaaggcatcattattgtcggttcgccccggtggagttcgcagcctggcagcgtgaatgtttccggggttacaaacgtggcctattctatgcacttctacgcggccgaacacagagacagttatcgcaatgatatgacctccgcggcctcgagcaaagcgatattcgccacgggaatggggcacgaccaacgctaa

SEQ ID NO: 3182 - protein, 297 aa, Unknown
  Obtained from environmental sample
  DOMAIN (76)...(297): Cellulase (glycosyl hydrolase family 5)
  misc_feature (1)..(297): Xaa is any amino acid
MYGMSSDRVLLRGEGDVSMAKRFSLIGIGLVLALGLAGGVWAEKSASLFFPLPAPADAMPAGSPVATHGKLSVSGSKIVDKSGTAVQLKGMSFFWSNSGVGGIFYNEKVISWLAHDWKVDVLRVAMGAETDGTNKGYSDGDKATQELLARAAIEECIKRGVYVIIDFHSHKEHRSEAVTFFKDMATSYGKYPHVLYEIWNEPLDAGGGNGVSGGTIADYASTVGSAIRNTNGAEGIIIVGSPRWSSQPGSVNVSGVTNVAYSMHFYAAEHRDSYRNDMTSAASSKAIFATGMGHDQR

SEQ ID NO: 3183 - DNA, 384 bp, Unknown
  Obtained from environmental sample
  misc_feature (1)..(384): n is a, c, g, or t
gtgttatttgccgctccgcaaattattcagcctgcgcagagagcggtttatggttttgatcagcttctgtctcaaagaaatattaatttcagatggtcgccggtgcggggagctaacgcgtatatttttactctttatgaacagaccgcaagaggaagacggcaaattcttcgttcgacaataaacagaggcacgcgctatacaatggataatctgcgcgcgctggaaagagggacttttgtctggcaggtagaagcggtaagaatgggacgcaggaatgttatcgagcagcacggcagaacaactgataatatttttacggtaaatttccccactccgggaccagttgaaattgaagataccgggatattatatggcaattaa

SEQ ID NO: 3184 - protein, 127 aa, Unknown
  Obtained from environmental sample
  misc_feature (1)..(127): Xaa is any amino acid
MLFAAPQIIQPAQRAVYGFDQLLSQRNINFRWSPVRGANAYIFTLYEQTARGRRQILRSTINRGTRYTMDNLRALERGTFVWQVEAVRMGRRNVIEQHGRTTDNIFTVNFPTPGPVEIEDTGILYGN

SEQ ID NO: 3185 - DNA, 669 bp, Unknown
  Obtained from environmental sample
  misc_feature (1)..(669): n is a, c, g, or t
ttgggaatgccggaacagaaaacggaagaggaactgtggcaagagtaccgtaaaacacgggaccctaaaataagagaattctttattaaacaatacgctccgcttgtaaaatatgtagccggcagagtagccgtaggaatgcccaataatgttgagtttgatgatctggtaggtttcggtgttttcgggcttattgacgcgatagaaaaatacgatacggaaaaaaacgttaaatttaaaacttatgccgttacgcgcatacggggcgctatttttgacgaactgcgccttattgactgggtgccgcgctcggtaagacagaaaacacgagaagtggaaacaactatttcgtctttggaagctcagcttggaaggaccgcgtcggatcaggaaatagcgagcgccatgggtcttgacgaatccgagtacatgaaggttcttcaaaaaatttccggaacttccataatatcgcttaacgatttatggtattccggcgacgagaacgacaaagtttcaatcggagacagcatagaatcgccttcaagcatgaatccggatgtaatggtggtaaatgaggaaatccgccgcgtcatagtggacgctataaatgaactgcccgaaaaagaaaagaaaattcttgttctgtattactacgaagacctgacgtaa

SEQ ID NO: 3186 - protein, 222 aa, Unknown
  Obtained from environmental sample
  DOMAIN (102)...(184): Sigma-70 region 3
  misc_feature (1)..(222): Xaa is any amino acid
MGMPEQKTEEELWQEYRKTRDPKIREFFIKQYAPLVKYVAGRVAVGMPNNVEFDDLVGFGVFGLIDAIEKYDTEKNVKFKTYAVTRIRGAIFDELRLIDWVPRSVRQKTREVETTISSLEAQLGRTASDQEIASAMGLDESEYMKVLQKISGTSIISLNDLWYSGDENDKVSIGDSIESPSSMNPDVMVVNEEIRRVIVDAINELPEKEKKILVLYYYEDLT

SEQ ID NO: 3187 - DNA, 477 bp, Unknown
  Obtained from environmental sample
  misc_feature (1)..(477): n is a, c, g, or t
atgataaacccgcttttttcaaatgttgtcgtggccatcagcggttcagacgcatcggttctggcggcgaaatatcccatagttatggccaagatttaccactgcaagctttcggcagtgtatgtggtagatacggcgactattcgacagctcacgttaagcaagatatttattcaggatgaaagccaggaattccaacagagccttgaagccaacggggagcgctacctttcctttgttgaggagctcgcccaggcgaaaggcgtcaaaatcgagcgcgatattcgccacggcgctgtgtatacggaaattttggccgcggccagcgataaaaaagcggatctgatcatcctggggggatgggaacaggagcgcagttccaaagatatattttcacactcccatcgcgaaataatgatacactcaaaatgttctgtcttgtggcaaaagaaacccggcatctcgtgccgattctga

SEQ ID NO: 3188 - protein, 158 aa, Unknown
  Obtained from environmental sample
  SIGNAL (1)...(22)
  DOMAIN (5)...(142): Universal stress protein family
  misc_feature (1)..(158): Xaa is any amino acid
MINPLFSNVVVAISGSDASVLAAKYPIVMAKIYHCKLSAVYVVDTATIRQLTLSKIFIQDESQEFQQSLEANGERYLSFVEELAQAKGVKIERDIRHGAVYTEILAAASDKKADLIILGGWEQERSSKDIFSHSHREIMIHSKCSVLWQKKPGISCRF

SEQ ID NO: 3189 - DNA, 369 bp, Unknown
  Obtained from environmental sample
  misc_feature (1)..(369): n is a, c, g, or t
gtgggcgaacaacgagacgggcgtggtcttccccgtccgcgagctcgccgaggcggtcaaagcgcgcggcggattcttccacaccgacgcggtgcaggcggcggggaaggtcgtcatcgacgtcaaaaaagcgccggtcgacatgctcgcattctccggccacaaactgcacgcgcccaagggcgtgggggcggcatacttcaggaaagggacgcccgcgcgggctatcctgcacggcggccaccaagagggcgggatccgcgccggaaccgaaaacgtcccctacatcgtgggtctgggccgcgcctgcgaactagccgcgcaacgcatatccgaagagaacacaagggtgcgcgccgtgcgcgataa

SEQ ID NO: 3190 - protein, 122 aa, Unknown
  Obtained from environmental sample
  misc_feature (1)..(122): Xaa is any amino acid
MGEQRDGRGLPRPRARRGGQSARRILPHRRGAGGGEGRHRRQKSAGRHARILRPQTARAQGRGGGILQERDARAGYPARRPPRGRDPRRNRKRPLHRGSGPRLRTSRATHIRREHKGARRAR

SEQ ID NO: 3191 - DNA, 822 bp, Unknown
  Obtained from environmental sample
  misc_feature (1)..(822): n is a, c, g, or t
gtgctcggcggcaagctcaaagactacgactggctccacctccaccacgaagatttcaccggccagtacagcaagtttcacggcagcttcgcccacgcttcttggtaccagaaacagcgcttggagctcgaaacgctcgccaaggagctcggcttcaaaaaggtgagcgattgcaagaaggcggtggcgctcacgatacgcaagtacgtagaggccggcggtttcctcttcgctatgtgcagcgcgaccaacacgctcgaaatcgccctcgcggcgctgggcgtagatatagtagaccaagtctacgacggcgacggcgtcgatcccgactacaagaaaaagctcaacttcgccaactgcatggccttcgagaactttgctgtctacaccgacccctactacccctcgttctgcaacatagacgtgaaccaagtgaacacgcctaaccgcaaaccggcggtggacttcgcccttttcgacttcagcgcgaagctcgacccggtcccgacaatgctcaaccagaaccatacagacgcggttaaaggctatcacggcctcctgaccaccttcaaccgcgacgtcattaaaaagagcgttgtgattttaggcgagacgcccggaacaaagatggttaactacatacacggcatagtggggcaggggcagttcacctacctcggcggacacgatccggaggactacacccacgcggtgggcgacaaaccgacgatgcttgaactccacaagaattcccctggatataggcttatcctgaacaacgtgctcttcccggcggcggaaaagaaagagaagaagacctga

SEQ ID NO: 3192 - protein, 273 aa, Unknown
  Obtained from environmental sample
  misc_feature (1)..(273): Xaa is any amino acid
MLGGKLKDYDWLHLHHEDFTGQYSKFHGSFAHASWYQKQRLELETLAKELGFKKVSDCKKAVALTIRKYVEAGGFLFAMCSATNTLEIALAALGVDIVDQVYDGDGVDPDYKKKLNFANCMAFENFAVYTDPYYPSFCNIDVNQVNTPNRKPAVDFALFDFSAKLDPVPTMLNQNHTDAVKGYHGLLTTFNRDVIKKSVVILGETPGTKMVNYIHGIVGQGQFTYLGGHDPEDYTHAVGDKPTMLELHKNSPGYRLILNNVLFPAAEKKEKKT

SEQ ID NO: 3193 - DNA, 531 bp, Unknown
  Obtained from environmental sample
  misc_feature (1)..(531): n is a, c, g, or t
ttgcaggttattatcacgccagaatcgaataccccaaacagaaagaggaaaagcaggatgaataatgtgaccgtcaatgcgcaagaaatccccctgccttcatggagcggcaacgcgtgcctcttcgccttgaaagtccttgatgaaataaaacgcgataattgggaactgtcagttcttttctgcggtgataaaacaatcaccgatttaaaccgccaataccgcgataaaaacgaacctacggacatactttcatttaaccttggcgaaacaataaaagagtgtggaaaaataacatacttgccgggggatatcgtcatttccatggactcccttaaagaaaacgccgaatatttccaaaccccacaggatgaggagttacgcagattgctaattcatggtattctgcacttagacggaatggatcataaaactttggaaaaggatgagcctatgctggtattacaggagaagatactaaacaagctgggaacggaacaaataattcccaataaggaagtaaaaaattga

SEQ ID NO: 3194 - protein, 176 aa, Unknown
  Obtained from environmental sample
  DOMAIN (62)...(156): Uncharacterized protein family UPF0054
  misc_feature (1)..(176): Xaa is any amino acid
MQVIITPESNTPNRKRKSRMNNVTVNAQEIPLPSWSGNACLFALKVLDEIKRDNWELSVLFCGDKTITDLNRQYRDKNEPTDILSFNLGETIKECGKITYLPGDIVISMDSLKENAEYFQTPQDEELRRLLIHGILHLDGMDHKTLEKDEPMLVLQEKILNKLGTEQIIPNKEVKN

SEQ ID NO: 3195 - DNA, 624 bp, Unknown
  Obtained from environmental sample
  misc_feature (1)..(624): n is a, c, g, or t
atgccgtggcggaaaacgccgttaaagaaaacgatgagatgtagattcgcgccgctctttgcgctgccgttcctccttccgcttattttctcttcctgcaaaactataaattccaaccgggcggaactaaacattcccccttccgtaatttatttcagctttgatgacggacccaacgcccagggggatagtacggcccggctgctggatgtgttaaaaaaatatcaaattaaagccatgttttgcctgttaggtgaaaatgcggagcgttatcccgatttggtcaggcgtatatacgatgaagggcattgtattgtcaatcacgggtattccgacaaatgggcaagcggaatgaaaccggagcaatttcgtgacaaccttgtccggggaggggaggcgatttccgcggcgctggggcatgatatgaatccccggctgtaccggccccacggaggtttttatcattccgcgcaggaaaagatcatacgcgatgaaggttatagggtggttcccgccacggccagagcgtatgacgcggttgttgacggaacacaacggcataaagtaataaaggaaattatcaaaaaagtgaaaagcagggcgggggaattatttgctccatga

SEQ ID NO: 3196 - protein, 207 aa, Unknown
  Obtained from environmental sample
  DOMAIN (43)...(170): Polysaccharide deacetylase
  misc_feature (1)..(207): Xaa is any amino acid
MPWRKTPLKKTMRCRFAPLFALPFLLPLIFSSCKTINSNRAELNIPPSVIYFSFDDGPNAQGDSTARLLDVLKKYQIKAMFCLLGENAERYPDLVRRIYDEGHCIVNHGYSDKWASGMKPEQFRDNLVRGGEAISAALGHDMNPRLYRPHGGFYHSAQEKIIRDEGYRVVPATARAYDAVVDGTQRHKVIKEIIKKVKSRAGELFAP

SEQ ID NO: 3197 - DNA, 414 bp, Unknown
  Obtained from environmental sample
  misc_feature (1)..(414): n is a, c, g, or t
ttggtgaatatatgggtttttttaatcggcgggctgtttatagatcgaggctcttccagaaaagcactgcggacaattcataacggtgtcgagaggattaaaaaaggcaacggtatgattattttcccggaaggtcatcgttcaaagggcaaaggccttcttcctttccacccgggttctctgaaattggcaaccatggcggaagctcaaatcatccccgttgcaatttccggcagttacgatatttttgaaaagaacggaagggtagtgcgttctttagctcaaatcagtttttgtccgcctatcattacggcgactctgccacccgaagaaagaaaacaagttttatccgatcgtatttttatggtaataaaagatgaattagaaaagcatgctacagctacgtgtaactaa

SEQ ID NO: 3198 - protein, 137 aa, Unknown
  Obtained from environmental sample
  DOMAIN (1)...(77): Acyltransferase
  misc_feature (1)..(137): Xaa is any amino acid
MVNIWVFLIGGLFIDRGSSRKALRTIHNGVERIKKGNGMIIFPEGHRSKGKGLLPFHPGSLKLATMAEAQIIPVAISGSYDIFEKNGRVVRSLAQISFCPPIITATLPPEERKQVLSDRIFMVIKDELEKHATATCN

SEQ ID NO: 3199 - DNA, 663 bp, Unknown
  Obtained from environmental sample
  misc_feature (1)..(663): n is a, c, g, or t
atggaaaccgcatcgttttctgtactggaactttttaagttaggcggcatttttatgtggcccctgcttgttttctccatcgccactgtcgcaatttcgctggaacgcgcgttctatcttatttatcacaaccttcgcgttgatgatattgccgctcaagtttcggaatatgtcaattcatcgaattattccgcggcccgcgaatatctttccggtatggccaacaggcgtatgggagctagaattcttctttctctttttacgcgcgcaaaaccgggaaaggatttttccgaacacagcgccgagcgcatcgtagagaccgaagccatgaactgcatcaactcgcttgagaacggttttaactttcttaccgcccttggttccatctccccgttaacgggctttctcggcacggtttccggaatgataggcgcgttccgctcaatagccgaagccaccgaagtaaacgcgcagattgtagcgaacggcatttacgaagcgcttattaccaccgtattcgggcttgtaatagcgattatcgctatggtcttccattcaatttttaccaacagtgtcgacaagttttcaagtaaaatggaaagcatctgttccgatttaattataaagatgacggaacagcaggagcaaaaaagcaaagcttaa

SEQ ID NO: 3200 - protein, 220 aa, Unknown
  Obtained from environmental sample
  DOMAIN (67)...(204): MotA/TolQ/ExbB proton channel family
  misc_feature (1)..(220): Xaa is any amino acid
METASFSVLELFKLGGIFMWPLLVFSIATVAISLERAFYLIYHNLRVDDIAAQVSEYVNSSNYSAAREYLSGMANRRMGARILLSLFTRAKPGKDFSEHSAERIVETEAMNCINSLENGFNFLTALGSISPLTGFLGTVSGMIGAFRSIAEATEVNAQIVANGIYEALITTVFGLVIAIIAMVFHSIFTNSVDKFSSKMESICSDLIIKMTEQQEQKSKA

SEQ ID NO: 3201 - DNA, 375 bp, Unknown
  Obtained from environmental sample
  misc_feature (1)..(375): n is a, c, g, or t
atgtataacattattcgtttatcagagcagctatctgaaaaacatatagtcattcactcgtcaagcacaagtgcagaggatattttgcgtgaaatggtgcaaaaactctcagatgaatttagtccagacatttgcgaagagattttgaacgaagtttttgcccgcgagaaagttagaagcaccggcattggccacggcattgccattccccacgcaagaaccgctttggtgaagcagctttactgtgccgccgcaacttcagaaaacggcatagagtacaacgccttggacggcaaacccgttagtttggttttcttaataataagcccagatttcactgttgggcctcaatttgaacataactttctgcaataa

SEQ ID NO: 3202 - protein, 124 aa, Unknown
  Obtained from environmental sample
  misc_feature (1)..(124): Xaa is any amino acid
MYNIIRLSEQLSEKHIVIHSSSTSAEDILREMVQKLSDEFSPDICEEILNEVFAREKVRSTGIGHGIAIPHARTALVKQLYCAAATSENGIEYNALDGKPVSLVFLIISPDFTVGPQFEHNFLQ

SEQ ID NO: 3203 - DNA, 747 bp, Unknown
  Obtained from environmental sample
  misc_feature (1)..(747): n is a, c, g, or t
atgatagccgggtcccttaccgaggaactgcaccgtctctacgaaccttccgtgaaatacggcgaggtgtatcctctggcgtacaactcggtagtctgccctgaatgctggtttgcctcgacggaagcggactttccccttcttcctgattttaaggttgaggcggtgaacgccgaccaggaacgccgaaaggctgacaccctgctgatcctgccgaacacggatttcaccgagccgaggggacttatggaagccgccgcgtcgcagtaccttaccatgcgctgctatgatttttatacaaagcataattcccctacgattaaacaagggattgccgcgcttcgcactgcgtggtttcttgacgagttgaacaagaaatatccgaaacagcactacgactggctggcgacattgttccgcaagaaggcccagtatttttacaacgaagccctcgagagggagcagaaacaggttgaaacaatgtcatccatgaaatcattcggccctgacatagataaaaattattcctatgaggggatgctgtacatctacgcctacttatgttttaggtacggcccggctgaaggatcggaagacaggaaagctacacttgagtcggcccgcaggacaatcgccaagctgttcggcatggggaaaaaatccaaagacaaacccggagcgtttcttgacatggcccgtaaggtatataacgcgatcaacgaggaactcggcgttggcgacgtgtaa

SEQ ID NO: 3204 - protein, 248 aa, Unknown
  Obtained from environmental sample
  misc_feature (1)..(248): Xaa is any amino acid
MIAGSLTEELHRLYEPSVKYGEVYPLAYNSVVCPECWFASTEADFPLLPDFKVEAVNADQERRKADTLLILPNTDFTEPRGLMEAAASQYLTMRCYDFYTKHNSPTIKQGIAALRTAWFLDELNKKYPKQHYDWLATLFRKKAQYFYNEALEREQKQVETMSSMKSFGPDIDKNYSYEGMLYIYAYLCFRYGPAEGSEDRKATLESARRTIAKLFGMGKKSKDKPGAFLDMARKVYNAINEELGVGDV

SEQ ID NO: 3205 - DNA, 747 bp, Unknown
  Obtained from environmental sample
  misc_feature (1)..(747): n is a, c, g, or t
atgatcgccggaacccttaccgaggaactgcaccggctctatgagccttctgtaaaatacggcgttgtctatcctctggcgtaccacgcggtagtctgcccggaatgttggtttgcctcaacggaaacggactttccccttcttcctgatataaaagttgaagcggtaaacgccgaccagaaccgccgccaggctgataccctgctgatctttccgggcgtggacttcagcgagccaaggggccttatggaagccgcagcgtcgcagtacctgactctccgttgctatgatttctatttaaagaacagctcgcccactataaaacaagggattgcctcgctgcgcacggcgtggttccttgacgagttggataaaaaatacccgaaacagcactacgactggcttgccacgctgttccgcaagaaagcccagtatttttacaacgaagctcttgagcgggaacagaaacaagtcgaaaccatgtcctccatgaaatcattcggcccggacatagacaaaaattattcgtatgaggggatgctgtatatctacgcctatctgtgttttaggtacggaccggatcaaggttcggaagacaggcgagctaccctagagacggcccgcaggacaatagccaagcttttcggcatgggcagaaaatccaaagacaaacccggggcgtttcttgatcttgcccggaaagtatataatgcaatcaacgaggaactcggcgttggtgacgtctga

SEQ ID NO: 3206 - protein, 248 aa, Unknown
  Obtained from environmental sample
  misc_feature (1)..(248): Xaa is any amino acid
MIAGTLTEELHRLYEPSVKYGVVYPLAYHAVVCPECWFASTETDFPLLPDIKVEAVNADQNRRQADTLLIFPGVDFSEPRGLMEAAASQYLTLRCYDFYLKNSSPTIKQGIASLRTAWFLDELDKKYPKQHYDWLATLFRKKAQYFYNEALEREQKQVETMSSMKSFGPDIDKNYSYEGMLYIYAYLCFRYGPDQGSEDRRATLETARRTIAKLFGMGRKSKDKPGAFLDLARKVYNAINEELGVGDV

SEQ ID NO: 3207 - DNA, 801 bp, Unknown
  Obtained from environmental sample
  misc_feature (1)..(801): n is a, c, g, or t
gtgaacggcggactgcccgctgtcgggcggaacgcgggcgccgccgcggcgcggggtgattttttatttttccttgacgcggacgttatcatcccccagggctttatccgcaacgtatatgaagagatgcaggattgttattacgatctggcgacctgcgaaatacgccccctctcgaactacaggcttgaccgggtgctgcacaggatgataaacctcgctgtgatcctcaacttgaaagtcgatccaaaggccttcggtttttgtatctttgtcacaaagcgcctcttcgagagggtcggaggattcgacgaaaccatttatgtagccgaggacaacgactttgttaaacgggcctccgagttcagatctttgcgctacctgagttccgtatatataatggtaagcgtccgccgctttgaaaaagaaggccgcttcgcgtatatgaacaaggggattaaactgaacctgtaccgtaccttcaggggcgagatacggaacgcggaggttgttacatacgaatttgaggattataacaagccggaagatcccgaagacacagattttcttgactggctggaaaaacgtttaataaaaattgaggaaaattcacagcggttcgccaggaaaatccagaaatattcacatgaaaccgattataaacaattgcagccgaggattaacgaattctcccatttgatggaagatctggacgcttaccttagcaaggatgaacggaatgtgcggcggcttgtcaaatggaagagttttttcaagcgcggcaacccgcgtataaagtag

SEQ ID NO: 3208 - protein, 266 aa, Unknown
  Obtained from environmental sample
  misc_feature (1)..(266): Xaa is any amino acid
MNGGLPAVGRNAGAAAARGDFLFFLDADVIIPQGFIRNVYEEMQDCYYDLATCEIRPLSNYRLDRVLHRMINLAVILNLKVDPKAFGFCIFVTKRLFERVGGFDETIYVAEDNDFVKRASEFRSLRYLSSVYIMVSVRRFEKEGRFAYMNKGIKLNLYRTFRGEIRNAEVVTYEFEDYNKPEDPEDTDFLDWLEKRLIKIEENSQRFARKIQKYSHETDYKQLQPRINEFSHLMEDLDAYLSKDERNVRRLVKWKSFFKRGNPRIK

SEQ ID NO: 3209 - DNA, 492 bp, Unknown
  Obtained from environmental sample
  misc_feature (1)..(492): n is a, c, g, or t
gtgcccaataattttactaaatatgtcgccggaaattttcgaaacccaaatggcataggaggaaaaatagccactataataatgaatattataaacaaaaatcagtataataccgttttaaaaaatataaacataaaaccagccgatattgtcttagacataggttttggcaatggatatttaataaaaaaattatttaaaaaaagcattaatttaaaaatatatggcatagaaatatcaaaggatatgttgaacaaagttacagctaaaagcaaacaaaaaataaatgacgggactttaaaattatttttggaaaatataaataaaacttcatttgaggacaatttatttgacaaaatttacacagtaaataccatttatttttggaatgaattggataaatgtttctcagagattaaaagaacattaaaaccaaatggaatatttataaatgcattttatgacagaaggcatgagacaaaaacctgctga

SEQ ID NO: 3210 - protein, 163 aa, Unknown
  Obtained from environmental sample
  DOMAIN (52)...(149): Methyltransferase domain
  misc_feature (1)..(163): Xaa is any amino acid
MPNNFTKYVAGNFRNPNGIGGKIATIIMNIINKNQYNTVLKNINIKPADIVLDIGFGNGYLIKKLFKKSINLKIYGIEISKDMLNKVTAKSKQKINDGTLKLFLENINKTSFEDNLFDKIYTVNTIYFWNELDKCFSEIKRTLKPNGIFINAFYDRRHETKTC

SEQ ID NO: 3211 - DNA, 912 bp, Unknown
  Obtained from environmental sample
  misc_feature (1)..(912): n is a, c, g, or t
gtgacgacagtgtttttagccctggtgnagacttggaggatttccgttatcatgcctttcatttcactggcatcggatcccggattgcttgactccggctggtataaaaaggcttttgatttttttagggccgccagcgcggaatcgtttatcattggtttgggtattggcattatttgtttttatatattccgggcggtctattctttccttgtgacttattccctaaaccgctattcattcggattgtataaacatttttcaaaaaaagttttagcgactgttttatcggttccgtataaattgtatgcggttaaaaattccgctgaactgatgcgtaccattaccaatgaagccagcgaggtcggaagaattactttaaatatattgcagctctgctcggaactttttaccgtaatcatggtttatgcggttataatcctgttaaactggaaaatgacgctgattgtttccgccgtattattaatcattgtattgcttttacttgcaatattaacaaaagaaaacaaagtacagggagaaaagcggcttgcttcaggcagaaaaatgaaccgtgttttaaaagagagtatggggaattttaaatatgtaaaattaaaaggaaatgaggaaaatatcctgtccgcctatgtctcgactgttgaaacatacacacgctccgaagttgtgaataatgttctgggcaatatgcctaaaaacatccttgaaagcttagggttttctttcctggtggcggttgtggtatttatcatctgggtctatcatgacgcttcaaaagttattccggtaatctcaatgtatgccctggccctgtaccgtatcctgccttcaataaaccggatgcttcaaaatgttaataatattgtctattacaaaaatgctcggccataa

SEQ ID NO: 3212 - protein, 303 aa, Unknown
  Obtained from environmental sample
  SIGNAL (1)...(24)
  DOMAIN (12)...(284): ABC transporter transmembrane region
  misc_feature (1)..(303): Xaa is any amino acid
MTTVFLALVXTWRISVIMPFISLASDPGLLDSGWYKKAFDFFRAASAESFIIGLGIGIICFYIFRAVYSFLVTYSLNRYSFGLYKHFSKKVLATVLSVPYKLYAVKNSAELMRTITNEASEVGRITLNILQLCSELFTVIMVYAVIILLNWKMTLIVSAVLLIIVLLLLAILTKENKVQGEKRLASGRKMNRVLKESMGNFKYVKLKGNEENILSAYVSTVETYTRSEVVNNVLGNMPKNILESLGFSFLVAVVVFIIWVYHDASKVIPVISMYALALYRILPSINRMLQNVNNIVYYKNARP

SEQ ID NO: 3213 - DNA, 828 bp, Unknown
  Obtained from environmental sample
  misc_feature (1)..(828): n is a, c, g, or t
atgtgctggctggacaaaaatcccgcgcgtcaaaccggcggccaatacgaactgtatgacccgcgcgaggatttctttaagtacatagaagcgcgtatcgattttgccaaaattcaaaaaagcggtttgaaaattttcattaatcccttgtttggttcgggcagcggttatatttccgggctgctggcgcggcacggcattgacagcgtggagattaataataagcgcgatgtcaattttggcggatttaatcccgagccgctcgcttacaatgtgccggattttatggagacgattaaaaaggccaagaatgattttgccgtcgggttgattctggacggcgacgcggaccgcaacggcgcctgcggcagcgacggacagtttctcaattcgcagaaagttttttcgattttgtttcaccattttgcggaaaatctgcagaagcccggtaagttaatccacgctttcaacggcaccaaactgctggataaactggcggcggagcttaaacgcgaagtgttggttacaaaaatcggttttaagtatgttgccgaggagattttgaaaggcggagttctgctcggcggcgaggagtccggcggatattcggcatccggcaatattcccgaccgcgatggtatcttaaattcgctgtacctgtgcgaattggcggcgcgcgagcagaanactttgggacaaatatacgccgatttggaaaaacgtttcggtgtgcactgttatgaccgtctggatatgcatttggataacgccgtcaaagaaaaagccatgcaaaatttagaaaaagatttaccgcccgcagttttttag

SEQ ID NO: 3214 - protein, 275 aa, Unknown
  Obtained from environmental sample
  DOMAIN (130)...(242): Phosphoglucomutase/phosphomannomutase, alpha/beta/alpha domain III
  misc_feature (1)..(275): Xaa is any amino acid
MCWLDKNPARQTGGQYELYDPREDFFKYIEARIDFAKIQKSGLKIFINPLFGSGSGYISGLLARHGIDSVEINNKRDVNFGGFNPEPLAYNVPDFMETIKKAKNDFAVGLILDGDADRNGACGSDGQFLNSQKVFSILFHHFAENLQKPGKLIHAFNGTKLLDKLAAELKREVLVTKIGFKYVAEEILKGGVLLGGEESGGYSASGNIPDRDGILNSLYLCELAAREQXTLGQIYADLEKRFGVHCYDRLDMHLDNAVKEKAMQNLEKDLPPAVF

SEQ ID NO: 3215 - DNA, 324 bp, Unknown
  Obtained from environmental sample
  misc_feature (1)..(324): n is a, c, g, or t
gtgggtgaaaccggaaaaatagtcggaaccgccgcgcaggtcaacaccttcatcgaggtaaaatccggagcggtcgatttcgcggtagtcgatatccttttggcgaacaggcttgcgggttcaggagattattccgatttaaagattgcggatattacgctgggttacgaagtatatgccgtcggctttaagaagggaagcgaattgagagataaagtcaataaagcccttaaagaaatatacgacgagggaaagatgctggaacttgcgaaaaaatatcatattgaggactcgcttgttctgaatacaaacttcaatggataa

SEQ ID NO: 3216 - protein, 107 aa, Unknown
  Obtained from environmental sample
  misc_feature (1)..(107): Xaa is any amino acid
MGETGKIVGTAAQVNTFIEVKSGAVDFAVVDILLANRLAGSGDYSDLKIADITLGYEVYAVGFKKGSELRDKVNKALKEIYDEGKMLELAKKYHIEDSLVLNTNFNG

SEQ ID NO: 3217 - DNA, 501 bp, Unknown
  Obtained from environmental sample
  misc_feature (1)..(501): n is a, c, g, or t
atgggtttttgggcggtaacactacggctattacagggatttcaaaccacattttttctttttggattgacgctcctgttcgcgttaccgctcggacttttagtttcattcggttccatgtcaaggattctcccgcttaaatatattgttaaaatctttgtatggatgatccggggcgtgccgctcatgctccagatatttatcgtgttttatgttcccggctttgtttttggcgcgccgatatcatcgcggatcaacgcggcgataatcgccttttccattaattatgcctgttatttcagcgagatattccggggcggaatagaaagcatttcccacagccagtacgaagcggggcatgtgctggggatgacaaagtcccaggtgttttttcgcgttgtgctgctccaggtgataaaacggatcaccgcccccatgtcaaacgagatcatcactctggtaaaggataccgcgcttgcccgcgttattatgggttgttga

SEQ ID NO: 3218 - protein, 166 aa, Unknown
  Obtained from environmental sample
  DOMAIN (10)...(165): Binding-protein-dependent transport system inner membrane component
  misc_feature (1)..(166): Xaa is any amino acid
MGFWAVTLRLLQGFQTTFFLFGLTLLFALPLGLLVSFGSMSRILPLKYIVKIFVWMIRGVPLMLQIFIVFYVPGFVFGAPISSRINAAIIAFSINYACYFSEIFRGGIESISHSQYEAGHVLGMTKSQVFFRVVLLQVIKRITAPMSNEIITLVKDTALARVIMGC

SEQ ID NO: 3219 - DNA, 678 bp, Unknown
  Obtained from environmental sample
  misc_feature (1)..(678): n is a, c, g, or t
atggggattaatgggattcgcgcctattccgaaacgttaaaatacataaaaagtaaagatagtatcgcaatcgccgatattaaacgaggcgatatagccgataccgctaaacgttatgcgaaagcgcacttttcaggagactttgaagctgactttgtaacgcttaatccgtatatgggcatggattcaatcgagccgtggttaaaagaggcgcagaatacaggcaagggagcttttgttttaatgcggacaagcaatgtgggaatgaaagattttgagtatcttgaaatcggcggcggaaagcgtgtataccattccgtaggcgataaattaagatctcacggcgataacgtccttggggaaaacggttacaggcttttcggcgttgtagcaggctgtacggaaaattttgaagcggagaaactgcggaaaaattaccccgacctttttttcctgataccgggttacggcgctcagggaggagcagcgaaggacgccgctttgctgttacgcgaaggaaacggaggaattgtaaacgcgtcaaggtcgattataacctcatggaagaatatagacggctgcgggaaagcggataatttgtttgccgcaggagccgcaagacgcgccgtaattaagatgagggatgaaatttcagaggaagcgggaaaaaaatcatga

SEQ ID NO: 3220 - protein, 225 aa, Unknown
  Obtained from environmental sample
  DOMAIN (1)...(197): Orotidine 5'-phosphate decarboxylase / HUMPS family
  misc_feature (1)..(225): Xaa is any amino acid
MGINGIRAYSETLKYIKSKDSIAIADIKRGDIADTAKRYAKAHFSGDFEADFVTLNPYMGMDSIEPWLKEAQNTGKGAFVLMRTSNVGMKDFEYLEIGGGKRVYHSVGDKLRSHGDNVLGENGYRLFGVVAGCTENFEAEKLRKNYPDLFFLIPGYGAQGGAAKDAALLLREGNGGIVNASRSIITSWKNIDGCGKADNLFAAGAARRAVIKMRDEISEEAGKKS

SEQ ID NO: 3221 - DNA, 729 bp, Unknown
  Obtained from environmental sample
  misc_feature (1)..(729): n is a, c, g, or t
gtggtaatgaagaaggcgctgtatactgtcgtttttcaagatgaaaatataattgcggtaaacaaagcttcgggtatctccgtcggcggagacaggtgggatgaaaccgcggaaagactggatagacttattgagcgcgacttggaaatcccgaaaatatttacggttcatagaatagacaaggatacatcggggcttgttgttttcgcaaaagacagcggcgctcataaaaagctgtccgctgcttttgaaaaccgagatgtgaaaaaactttataccgcaattgttcacggaagaccgtcatggaaagagacagcctgcgatttggcgcttgttccgaacggcaataaaaaacacatgactattatagataaatacaaagggaaaaaatcttttacgcggtttgtatgcgtaacaagcgccgccaactacagcgtccttcaggcttttcccgagacaggaagaattcaccagataagggtgcatttagccgcgcttggacaccctgtggtatgcgatgaattgtacggaaaaatgtcgcctgtaaagctgtcgtcttttaaacgcgcttggcgcggcgacccgtatgaggaacgtcccctgctggcgagacttggactgcacgcgctggaattggctctgccgaacggaccggaattacaagctccgctcccaaaagacatggcaagccttataaatcaactggaaaaatacgctttaaaaacttga

SEQ ID NO: 3222 - protein, 242 aa, Unknown
  Obtained from environmental sample
  DOMAIN (16)...(165): RNA pseudouridylate synthase
  misc_feature (1)..(242): Xaa is any amino acid
MVMKKALYTVVFQDENIIAVNKASGISVGGDRWDETAERLDRLIERDLEIPKIFTVHRIDKDTSGLVVFAKDSGAHKKLSAAFENRDVKKLYTAIVHGRPSWKETACDLALVPNGNKKHMTIIDKYKGKKSFTRFVCVTSAANYSVLQAFPETGRIHQIRVHLAALGHPVVCDELYGKMSPVKLSSFKRAWRGDPYEERPLLARLGLHALELALPNGPELQAPLPKDMASLINQLEKYALKT

SEQ ID NO: 3223 - DNA, 906 bp, Unknown
  Obtained from environmental sample
  misc_feature (1)..(906): n is a, c, g, or t
gtgtttttgcctgggtactttaatgtggttcctttggactggctgtatcaggtacgatgggcaagtttggctggcgcggttgtaatgggtttgttattttcctttattatcgttttgcgttatccgtcaaccggaaagccttttcttgccgatctctggctgggcagaattaaaaatccgcagtttaaaaacggatatattgacgcgaagatgtggctgtacttaatcggcgcggtaatgcttcagcttaacgttttatcttttgcggcgcatcactggcttacgcatcagggcggcttaaatatcggctatttgctcggcacaggtatgctgacatggttcatctgggaatatctgacatttgaaagagttcatctgtacacttatgattttatcgccgagcgcgttggtttcaaacttggattcggctgcctctccttttatccctatttttacgccgtgtcgctctgggcgacggttgaccttccctcttcccggcatccgctctggctcaccgtactttttgcggttatttttttcaccggctggatattcgcgcgcggggcgaacatgcaaaaattttattttaagcttgctcccgaaaaaaagtttttatgttttaagccgcaggcaatcagcgacggaaaacacagcctgctcgcgggcggtttctggggcaagagccgccatataaactaccttggtgaaattcttcaggcatgcggcattgctttaagcgccggttatcccggggttctttttgtgtggctgtatcccttgtattacgcggctcttttaaccagccgccagttcgacgacgataaaatatgcaaggcaaaatacggcgcgctctgggatgaatacgttaaaaaggtaaagtaccgtattattccgtacatattttaa

SEQ ID NO: 3224 - protein, 301 aa, Unknown
  Obtained from environmental sample
  DOMAIN (25)...(301): Ergosterol biosynthesis ERG4/ERG24 family
  misc_feature (1)..(301): Xaa is any amino acid
MFLPGYFNVVPLDWLYQVRWASLAGAVVMGLLFSFIIVLRYPSTGKPFLADLWLGRIKNPQFKNGYIDAKMWLYLIGAVMLQLNVLSFAAHHWLTHQGGLNIGYLLGTGMLTWFIWEYLTFERVHLYTYDFIAERVGFKLGFGCLSFYPYFYAVSLWATVDLPSSRHPLWLTVLFAVIFFTGWIFARGANMQKFYFKLAPEKKFLCFKPQAISDGKHSLLAGGFWGKSRHINYLGEILQACGIALSAGYPGVLFVWLYPLYYAALLTSRQFDDDKICKAKYGALWDEYVKKVKYRIIPYIF

SEQ ID NO: 3225 - DNA, 534 bp, Unknown
  Obtained from environmental sample
  misc_feature (1)..(534): n is a, c, g, or t
ttgtttgaatattctgagtttcgattaaatgctgttaattattccaatgatcctactgagggaaaagttttgcttgattacctatttgaagaaaatagaaaaaatgtatctacaaggaaaacatcatatacggaatatggagtttttacaggttgttttacatttgattatgattgtttaaatcagtttcgtctttatggtaaagaagaagaaacagaaggaacaggtctatcgcttgtttttcgtgctagttttttcagcgaatatgtgaaaatgcctactgaacaattggatacagaaaatggtgattcgctaagagaaaaatatgctctctttcgttgcatatatattgatccgataacacaacgagtcgaaacagtggggcacaaagaaacttatcttttttttcgtgaaaatgcagaattgccaaatgaaaaaaagaaatcagatgaaaacattagtaaaagaatagaaatgtatcaaggatatattaatagtatcattgggaatgtagaaaaaaaaatgaaagaataa

SEQ ID NO: 3226 - protein, 177 aa, Unknown
  Obtained from environmental sample
  misc_feature (1)..(177): Xaa is any amino acid
MFEYSEFRLNAVNYSNDPTEGKVLLDYLFEENRKNVSTRKTSYTEYGVFTGCFTFDYDCLNQFRLYGKEEETEGTGLSLVFRASFFSEYVKMPTEQLDTENGDSLREKYALFRCIYIDPITQRVETVGHKETYLFFRENAELPNEKKKSDENISKRIEMYQGYINSIIGNVEKKMKE

SEQ ID NO: 3227 - DNA, 381 bp, Unknown
  Obtained from environmental sample
  misc_feature (1)..(381): n is a, c, g, or t
atggtcgccgcatctgaccgttcggctgtgattttctcgctgtctcggggcagcgaccatgatctcnngcaaggagagcagctgcttgagcgaatgctgcggttgccggagcaaatctatatgcttatggataaggcctacgagggcgatgagatgagggctaaggttgttgagaaaggcttcattcccgtggtgcctccgaaaagcaatcgcaaagagccatgggaatacgacaaggaacgatacaagcagcgcaatgagatagagcgatattttctccggcttaaacgctttcgcagaattttcacgcgatacgacaagctggattctgtgttttcgggatttatattttttgcaatggttatggatactatcttttag

SEQ ID NO: 3228 - protein, 126 aa, Unknown
  Obtained from environmental sample
  misc_feature (1)..(126): Xaa is any amino acid
MVAASDRSAVIFSLSRGSDHDLXQGEQLLERMLRLPEQIYMLMDKAYEGDEMRAKVVEKGFIPVVPPKSNRKEPWEYDKERYKQRNEIERYFLRLKRFRRIFTRYDKLDSVFSGFIFFAMVMDTIF

SEQ ID NO: 3229 - DNA, 384 bp, Unknown
  Obtained from environmental sample
  misc_feature (1)..(384): n is a, c, g, or t
gtggtaaattctttaatagagtttcactcttccgcccaacccctgcttctttccacagccctgtgccaggcagcgataagtttttcacgcttgcctgagtccatgcagggtttaaacagggcatcgcgtttccaattgctttttacttccgccagatctttccagaagcccacggcgattccagcgaggcaggcggcgccaagggcggtaatttcacttacaacaggtcgcacaatatcggctccgcaaatgtcggactggaactgcattataaatttgttaacgcttgcaccgccgtctaccttgagctcgcccatcctgctgcctgaatccttttccatggcacgcaacaaatccatcacctggtacgcgatagattcctga

SEQ ID NO: 3230 - protein, 127 aa, Unknown
  Obtained from environmental sample
  misc_feature (1)..(127): Xaa is any amino acid
MVNSLIEFHSSAQPLLLSTALCQAAISFSRLPESMQGLNRASRFQLLFTSARSFQKPTAIPARQAAPRAVISLTTGRTISAPQMSDWNCIINLLTLAPPSTLSSPILLPESFSMARNKSITWYAIDS

SEQ ID NO: 3231 - DNA, 924 bp, Unknown
  Obtained from environmental sample
  misc_feature (1)..(924): n is a, c, g, or t
atgatctttgacatttataaactcacctgggacgacaggcttctggaagcgctggatattccccgcgccatgctgccggaggtgaggccgtcgagcatggtgtacgcctgcgcgaatattcagggcaggaaggtgcccattgcgggcaacgctggagatcagcaggctgcccttttcgggcaatgctgttttgaaaaaggcgaagccaagtgcacatatggtaccggctgttttcttttgatgaattccggctatgaagctgtcgaaagcggaaacggccttataacaaccatcgccgcaagcgtttccgacaaggttcagtacgcccttgaaggctccgtgtttgttggcggcgcggtgattcaatggctgcgtgacgagatgcgttttttaacggaaagctcagacagtgagtattacgcgggcaaaattgaagacaccggcggagtctacttagtaccggcttttgccggcctgggcgctccttattgggatatgtacgcccgcggctgcatagtgggaatcaccaggggaacaaagcgaaaccacatcataagagccgctcaggaatctatcgcgtaccaggtgatggatttgttgcgtgccatggaaaaggattcaggcagcaggatgggcgagctcaaggtagacggcggtgcaagcgttaacaaatttataatgcagttccagtccgacatttgcggagccgatattgtgcgacctgttgtaagtgaaattaccgcccttggcgccgcctgcctcgctggaatcgccgtgggcttctggaaagatctggcggaagtaaaaagcaattggaaacgcgatgccctgtttaaaccctgcatggactcaggcaagcgtgaaaaacttatcgctgcctggcacagggctgtggaaagaagcaggggttgggcggaagagtga

SEQ ID NO: 3232 - protein, 307 aa, Unknown
  Obtained from environmental sample
  DOMAIN (63)...(288): FGGY family of carbohydrate kinases, C-terminal domain
  misc_feature (1)..(307): Xaa is any amino acid
MIFDIYKLTWDDRLLEALDIPRAMLPEVRPSSMVYACANIQGRKVPIAGNAGDQQAALFGQCCFEKGEAKCTYGTGCFLLMNSGYEAVESGNGLITTIAASVSDKVQYALEGSVFVGGAVIQWLRDEMRFLTESSDSEYYAGKIEDTGGVYLVPAFAGLGAPYWDMYARGCIVGITRGTKRNHIIRAAQESIAYQVMDLLRAMEKDSGSRMGELKVDGGASVNKFIMQFQSDICGADIVRPVVSEITALGAACLAGIAVGFWKDLAEVKSNWKRDALFKPCMDSGKREKLIAAWHRAVERSRGWAEE

SEQ ID NO: 3233 - DNA, 357 bp, Unknown
  Obtained from environmental sample
  misc_feature (1)..(357): n is a, c, g, or t
ttgctcaaggccaacggctacggcaatataggaaaactcgtcccgtcgctgaacgtcttcttcaaccgcctgacctttttgaacaagaccttcgcggaacggatgacgcttgacttgggtctgggctacggttacaacggcatggaactgagactcaacgaaacggctatcgtggagctgaaacgcgagcgcggcccggaacagaccgtatcgcagagatacttccgctccatacacaagtgccccagcggcttttcaaagtacactataggcatatcgcttacacacggggaggcgaaaaagaaccgcttccttcccaaaataagacacttagcgtttgaaaggagcgcggcgtga

SEQ ID NO: 3234 - protein, 118 aa, Unknown
  Obtained from environmental sample
  misc_feature (1)..(118): Xaa is any amino acid
MLKANGYGNIGKLVPSLNVFFNRLTFLNKTFAERMTLDLGLGYGYNGMELRLNETAIVELKRERGPEQTVSQRYFRSIHKCPSGFSKYTIGISLTHGEAKKNRFLPKIRHLAFERSAA

SEQ ID NO: 3235 - DNA, 951 bp, Unknown
  Obtained from environmental sample
  misc_feature (1)..(951): n is a, c, g, or t
atggagagcttgcgccggcataggagccgctacggcggcgtaaagcagatggaaaaattcggcaaaagcggcgaagtactactggattactcggtctatgacgccttgcgcggcggttttgacagggttgtatttatcatcagaaaagacctggaaaaagatttcaaggaaaccgtactggcacgcatggaaggaaaagtaaaatacgatattgcctaccaggagctggacagccttatcccgcctgagatttttgagaacgcaaagaaaatcggcagaagcaaaccatggggaacagcccatgccctgctgtgcgccgctgataaaatcgactctccttttgcggtaatcaacgccgatgatttttacgggagggaagcctttgccgcaatgggcaaattcctggcggagagcggagataaagaaggcgcaattgtaccgtacctgctggaacctactctaagcaagacaggaaccgttgccaggggggtctgcaaaatttcccgtggctacatcgtctctattgatgaactgactgcaattgaaaaaaaagacggcgtaattttcaacaccgggccggacggcgcaaaacaagcgctctattctgacaccccggtctccatgaatttcctggcttaccccgacagcatactcccaaggttcaggcagtactttgacgaatttatcgcagcttccggcggcgaattgaaaagcgaatgttaccttccaaaagcgtcggactggtttatcaaaaacggttaccttaaaatgcgcgttcttaacgctgaatcggaatggttcggcgttacttacaaggaagacaaagacacggcaatcaagcgcctttcggagcttaccaagcgngggtttatcccgactcgctgtggagttaggcaggggaaatatgccgataaaagtgcccatgatggtataaagatatgtcaggcataa

SEQ ID NO: 3236 - protein, 316 aa, Unknown
  Obtained from environmental sample
  misc_feature (1)..(316): Xaa is any amino acid
MESLRRHRSRYGGVKQMEKFGKSGEVLLDYSVYDALRGGFDRVVFIIRKDLEKDFKETVLARMEGKVKYDIAYQELDSLIPPEIFENAKKIGRSKPWGTAHALLCAADKIDSPFAVINADDFYGREAFAAMGKFLAESGDKEGAIVPYLLEPTLSKTGTVARGVCKISRGYIVSIDELTAIEKKDGVIFNTGPDGAKQALYSDTPVSMNFLAYPDSILPRFRQYFDEFIAASGGELKSECYLPKASDWFIKNGYLKMRVLNAESEWFGVTYKEDKDTAIKRLSELTKRGFIPTRCGVRQGKYADKSAHDGIKICQA

SEQ ID NO: 3237 - DNA, 696 bp, Unknown
  Obtained from environmental sample
  misc_feature (1)..(696): n is a, c, g, or t
atgacaaaagaaccagatatatcaatcatatgctatgattcaaattccgcgcagttaaatcatttatccggcatcaatgaagtggcacaataccatgatgtttcaaaaatatcgtggataaacatcacagggatagaagacattaattccattaaggaactgggagagcattttagacttcaccagctaacggtggaagatattctacatacaaaactgcaacccaaaatcgaggtatttgaaaactacaggtatttatcggtaaaaacaatacagcgggaaaaaagattccagcattataatgatagtaaccgtagttcttttttaaagaagaaaaaagaacaggcagaagatatagaagaattcttaattgatcaggttagcattattataatggaaaataccttaataactattcaggaaatgcccggcgattcatttagcgatctcaaaaaaaagattctggaaaacatcggggaaattcgtaaatcaggagcagattatcttgcctatgtaattctggatgctattgttgacgagtatttccttacaataaaccatctggaggaagacattgaagatttcgaggatcgttcggcgaaaacaaacgatgaaacattcatcgatgaaatacaggaaaccaaaaagtaccttttacagataaagcgggccatcatgcctttaaaggattgctga

SEQ ID NO: 3238 - protein, 231 aa, Unknown
  Obtained from environmental sample
  misc_feature (1)..(231): Xaa is any amino acid
MTKEPDISIICYDSNSAQLNHLSGINEVAQYHDVSKISWINITGIEDINSIKELGEHFRLHQLTVEDILHTKLQPKIEVFENYRYLSVKTIQREKRFQHYNDSNRSSFLKKKKEQAEDIEEFLIDQVSIIIMENTLITIQEMPGDSFSDLKKKILENIGEIRKSGADYLAYVILDAIVDEYFLTINHLEEDIEDFEDRSAKTNDETFIDEIQETKKYLLQIKRAIMPLKDC

SEQ ID NO: 3239 - DNA, 579 bp, Unknown
  Obtained from environmental sample
  misc_feature (1)..(579): n is a, c, g, or t
atgcttgccgaaaaggaaggcattaagctgggcattttcaggcccatcaccgtctggcctttcccatttaaggctctgtccggattggccgcgaagaaaaaaacttttcttacagtggagatgagcgagggtcagttggttgaggacgttaagcttgctgtttatgaagctgttacaaatggcctttcactcacccttgaagaagtagagctgcttttcaagacgacaagggagcgcataagacagattgaggcaaaagcgcagcgccacctcaagaaggatccagggcggagcattgacgaggaagtcgccgacgcgtttttcatcctgtccgaacaggaacaggaaaatctgaaaatgcgctttcccgaacaagtggagcagcttttcaaggcgacaagggagcgtaaaaggcagattgaggcaaaagcgcaacgccgcctcgggcatccacagcggagcattctcgggcatccacggcggagcattggcaaggtgcatttcctgggacattccggcgggattattcccacggaagaagaagttttcgctgaggcaaaaaggattttaggtaagtag

SEQ ID NO: 3240 - protein, 192 aa, Unknown
  Obtained from environmental sample
  misc_feature (1)..(192): Xaa is any amino acid
MLAEKEGIKLGIFRPITVWPFPFKALSGLAAKKKTFLTVEMSEGQLVEDVKLAVYEAVTNGLSLTLEEVELLFKTTRERIRQIEAKAQRHLKKDPGRSIDEEVADAFFILSEQEQENLKMRFPEQVEQLFKATRERKRQIEAKAQRRLGHPQRSILGHPRRSIGKVHFLGHSGGIIPTEEEVFAEAKRILGK

SEQ ID NO: 3241 - DNA, 312 bp, Unknown
  Obtained from environmental sample
  misc_feature (1)..(312): n is a, c, g, or t
atgggagttatcactttttattctcagttcaggctaaagccggtaggaaaaaacattgtaagagcctgttttggaacggcgtgccatgtaaacggcgcggaaacgatagcggacgcaatctgcagggaacttggcatagagcttggcgggacgacagacgacaaacagtttacagtagagtctgtcgcatgtctggggtgctgttctcttgcccccgtcatcatgataaacagcgagacccacggaaggctgacggcggataccggccgaagcgttatcagggaattcgctaaacaggaagtaaaggaataa

SEQ ID NO: 3242 - protein, 103 aa, Unknown
  Obtained from environmental sample
  DOMAIN (1)...(97): Respiratory-chain NADH dehydrogenase 24 Kd subunit
  misc_feature (1)..(103): Xaa is any amino acid
MGVITFYSQFRLKPVGKNIVRACFGTACHVNGAETIADAICRELGIELGGTTDDKQFTVESVACLGCCSLAPVIMINSETHGRLTADTGRSVIREFAKQEVKE

SEQ ID NO: 3243 - DNA, 366 bp, Unknown
  Obtained from environmental sample
  misc_feature (1)..(366): n is a, c, g, or t
atgaaaaaaataataatcggacttggttcctgcggtatcgcatccggcggtttaaaggtaaaagaaactttaaaaactcttatcgaagaatcaaaactcgatattgaattaagcgaaaccggttgtatgggaatgtgttacaaagaacccatgatagaaattgccgaagactctgcaagaacaatttacggcgatgttgacgtaaaaacggcaaagaaaatttttgaaagccatatcatcaacaacacgcctgtaactgaaaatattgttttggattccggcggcggcggttctgaaaaggactttatgtcccgtcaggaaagaattgttttggtacgctgcggagaaataaatctgaatcaatag

SEQ ID NO: 3244 - protein, 121 aa, Unknown
  Obtained from environmental sample
  SIGNAL (1)...(20)
  misc_feature (1)..(121): Xaa is any amino acid
MKKIIIGLGSCGIASGGLKVKETLKTLIEESKLDIELSETGCMGMCYKEPMIEIAEDSARTIYGDVDVKTAKKIFESHIINNTPVTENIVLDSGGGGSEKDFMSRQERIVLVRCGEINLNQ

SEQ ID NO: 3245 - DNA, 477 bp, Unknown
  Obtained from environmental sample
  misc_feature (1)..(477): n is a, c, g, or t
atggttgatattgcccggtactttttaaattttacccaggccgagtcttgtggcaaatgcactttttgcaaaatcggcacaaagcgaatgttggaaattctgcaaagaattacaagcggcaaaggacaagacggcgatgttgaaaaactggaaatgcttgcttctcaaataaaaacaaacgctttatgcggattgggccagaccgctccgaaccctgtgcttacaacgatacgctatttcaaggatgagtacatcgctcatataaaagataaaaaatgtccgactcatcaatgtaaagcgcttattacatttcagataacggacgcctgtacgggttgtaccttgtgcgcgaaaaaatgcccggtaaacgctgtcagcggcaagttaaaagaaaagcatactattgatgaaagcaaatgtacaaaatgcggaatatgcaaatcatcttgcaagtttaaggctattttggtggattga

SEQ ID NO: 3246 - protein, 158 aa, Unknown
  Obtained from environmental sample
  DOMAIN (103)...(126): 4Fe-4S binding domain
  misc_feature (1)..(158): Xaa is any amino acid
MVDIARYFLNFTQAESCGKCTFCKIGTKRMLEILQRITSGKGQDGDVEKLEMLASQIKTNALCGLGQTAPNPVLTTIRYFKDEYIAHIKDKKCPTHQCKALITFQITDACTGCTLCAKKCPVNAVSGKLKEKHTIDESKCTKCGICKSSCKFKAILVD

SEQ ID NO: 3247 - DNA, 687 bp, Unknown
  Obtained from environmental sample
  misc_feature (1)..(687): n is a, c, g, or t
atgggcgttcaatatgtgtatgatcttgaaagagaaattacagacgagacagtacgcgaaaatattttcagtcttggcaagggagaattaagcgctgttttcaatcttgacgatatatgggttttcttcagggtagaagacgggttaaaaccggcggattttgacgattccgcggtaatggacagagtgcgctcgtatatgaggaattatgaaagaggccgcatggaagactgggctattgcgcgcgcggatgaatttattgccgacgccaaagatgacgggtttgccaataccgcgcgccggacaagtaaagaaagaataaaaatcggaccgcttccgataaactacggcagtgtggggctttttacatcgctttcggattttgaaaattccgcgtttcagaaacaggaacttacggatttatccaaaaatacaaatttctggaaaacagctttttccacgccattggacactccgtcttctcctcttgttcacggaagtaaagtccttgtgctttttccagacgtgcaaattgatattgacaaggaaagagccgatcaaatttcaacgtttttttcagattactggcttggcagtattaccgagcagtctttacagccgttttttatgaacagccccagaatgaaaaataatttttgggaaacttacagtaaattctttttatag

SEQ ID NO: 3248 - protein, 228 aa, Unknown
  Obtained from environmental sample
  misc_feature (1)..(228): Xaa is any amino acid
MGVQYVYDLEREITDETVRENIFSLGKGELSAVFNLDDIWVFFRVEDGLKPADFDDSAVMDRVRSYMRNYERGRMEDWAIARADEFIADAKDDGFANTARRTSKERIKIGPLPINYGSVGLFTSLSDFENSAFQKQELTDLSKNTNFWKTAFSTPLDTPSSPLVHGSKVLVLFPDVQIDIDKERADQISTFFSDYWLGSITEQSLQPFFMNSPRMKNNFWETYSKFFL

SEQ ID NO: 3249 - DNA, 399 bp, Unknown
  Obtained from environmental sample
  misc_feature (1)..(399): n is a, c, g, or t
atggaaaagtacatggacagggaagactggatggactgttctttcatactcgccgaagaacttgaccggagaggacactgttatgaggcgttccgccttctggaaagtattatacgggaggaacggcggaaaccgtatttcggcatcttcacccctgaacttgaaagatacacaagggagatagtacgccagcgcctgagaccccaggtggatgatgaaacctggattgaatgtatggaaagcctgctggacttgggcttctccgccagagacacggcttactggctgcgttcgctggcgcagacccttcataaaatcggcgatcaggcgggttcacagcaggtattaaaagaagcgaaaaaaatgagcggcaagcaatatacaaggactctgaaatga

SEQ ID NO: 3250 - protein, 132 aa, Unknown
  Obtained from environmental sample
  misc_feature (1)..(132): Xaa is any amino acid
MEKYMDREDWMDCSFILAEELDRRGHCYEAFRLLESIIREERRKPYFGIFTPELERYTREIVRQRLRPQVDDETWIECMESLLDLGFSARDTAYWLRSLAQTLHKIGDQAGSQQVLKEAKKMSGKQYTRTLK

SEQ ID NO: 3251 - DNA, 615 bp, Unknown
  Obtained from environmental sample
  misc_feature (1)..(615): n is a, c, g, or t
ttgattgaagcgattaaaaatacaaaagaagcgggctttcttggaaagaacatccttggcgcgggatttgattttgacattcatgtaatatccggcgccggcgcctatgtctgcggcgagaattctgcgctgcttaattccaccgagggtaaggtaggccgtccccgcatcaagccgcctcatcttgcggaggttgggctgttcctcatgcccacgctggtgaacaatgttgaatcgctcgcgagtatccccgctattattgaaatgggtggggacgaatacctgaaaatcggccatccggattccgggggtacaaaactgatatgcctgtccggccatgtcaaaaaccgcggagtcttcgagattccgcttggcaaactgacactgcgggagattatctacgatcctgaattgggaggcggaattccgcagggtaaaaaattaaaatttttccaccttggagggcagagcggccctatcggcgggcctgatcttctggacaccgtatacagttataccgatttgaggaaagncgggtcttggcgtaggctccggcgctatcgttgtcatggacgagactgtttcgatcctggaatacctgcaatgcgtcagtga

SEQ ID NO: 3252 - protein, 204 aa, Unknown
  Obtained from environmental sample
  DOMAIN (1)...(156): Respiratory-chain NADH dehydrogenase 51 Kd subunit
  misc_feature (1)..(204): Xaa is any amino acid
MIEAIKNTKEAGFLGKNILGAGFDFDIHVISGAGAYVCGENSALLNSTEGKVGRPRIKPPHLAEVGLFLMPTLVNNVESLASIPAIIEMGGDEYLKIGHPDSGGTKLICLSGHVKNRGVFEIPLGKLTLREIIYDPELGGGIPQGKKLKFFHLGGQSGPIGGPDLLDTVYSYTDLRKXGSWRRLRRYRCHGRDCFDPGIPAMRQ

SEQ ID NO: 3253 - DNA, 549 bp, Unknown
  Obtained from environmental sample
  misc_feature (1)..(549): n is a, c, g, or t
gtgatccacaacaacaacgatgtaatccgggcgaatctggaagattgcagcgatgaggttttcgatcggtctttgggaatcaacgttaaaagcgcttttctttttgtgcaggccgcgggggctttcatgaagcaggcaggaaaaggaaactttgtgtttattagctccatccacgatgaaaaaccaaacggagcggcctttacctacagtatcgccaagggcgccctcaagatgctgattaaagagatggttgtggatcttgggcgctataacgtaaggaccaacatagtcaacatgggcccgatggaagggcacgataaacttttttacagcgatctttccccgctatacgaacacaccagagaacgcatcatcaatgcccgctactgtaccctcgaagacgtggctaatgcggcgcttttctttgcctcagacgattgtccctcggctaacggcagcgaactcaaattggacggtggatttctcctgacatactatgcccgcaaaagaatagttccgccgccagagaataattctgggggaagttaa

SEQ ID NO: 3254 - protein, 182 aa, Unknown
  Obtained from environmental sample
  misc_feature (1)..(182): Xaa is any amino acid
MIHNNNDVIRANLEDCSDEVFDRSLGINVKSAFLFVQAAGAFMKQAGKGNFVFISSIHDEKPNGAAFTYSIAKGALKMLIKEMVVDLGRYNVRTNIVNMGPMEGHDKLFYSDLSPLYEHTRERIINARYCTLEDVANAALFFASDDCPSANGSELKLDGGFLLTYYARKRIVPPPENNSGGS

SEQ ID NO: 3255 - DNA, 798 bp, Unknown
  Obtained from environmental sample
  misc_feature (1)..(798): n is a, c, g, or t
gtggttggaagctggttaaaaaacacgtctacaggcgttaattttaaatctcttgattacctgtttggggcaaataaactttcaaggagtatattttacccgcgccttttgtcggtaggaaggatagaccgcagccagtatcttctaccggtctcgtttaatgtgccggcgctgattttttccaaagaaaaggaacttgaaatttccagcccttttaccataggttttgaagaaataaagaaattaagcgtcgcctacaacatattgaacaagggctcttatacgcgcatgggtttttcccctctttggaacgatgattttctgatgattacggcggttctttttgactcatctttcaaagaagcgtcccctctcgcgtgggataacgccgctttgaaccgttccatggattttgtcaacgactggactattttgataaacaccgacaatcaggcggaagaagattttacatttaaatactttattgaacctcaggaaaaactgattcaatcggggcgaatacttttttcttacatggaaagcagcgaactttttattttaggcgaggagagcaaaaatattcttgatttccgctggatcatggaagacgagaaaattcccattgccgaggacgcggtttttttgggcattccgaaaagagggaaagccccgggagcggcaaaggcgtttgttcaatggttttttaagattgaaaaccagcgcctgcttttggaattcagcaaggcaaacaggataagcgaaacagttttcggcatctgcggcggcttttcgccatag

SEQ ID NO: 3256 - protein, 265 aa, Unknown
  Obtained from environmental sample
  misc_feature (1)..(265): Xaa is any amino acid
MVGSWLKNTSTGVNFKSLDYLFGANKLSRSIFYPRLLSVGRIDRSQYLLPVSFNVPALIFSKEKELEISSPFTIGFEEIKKLSVAYNILNKGSYTRMGFSPLWNDDFLMITAVLFDSSFKEASPLAWDNAALNRSMDFVNDWTILINTDNQAEEDFTFKYFIEPQEKLIQSGRILFSYMESSELFILGEESKNILDFRWIMEDEKIPIAEDAVFLGIPKRGKAPGAAKAFVQWFFKIENQRLLLEFSKANRISETVFGICGGFSP

SEQ ID NO: 3257 - DNA, 819 bp, Unknown
  Obtained from environmental sample
  misc_feature (1)..(819): n is a, c, g, or t
gtgcgtatttatcaaggcatgctgaaaaagggtgatgagcttgtgaatacgcgtgcgcgtaaaaaattcaaggttggacggcttgtgcgtatgcacgccgacagcatggaagacattaatgaaggttcttccggcgacattgtcgccctgttcggaattgagtgtgcaagcggcgacacattctgcggcggcggtttaaattacgcaatgacttcgatgtttgtgccgaatccggtaatctctcttgctgtaaacccgaaagacaaaaaaagcgcagaccagatggcaaaagcgctgaaccgttttacaaaagaagaccccacatttcaatcttatgtcgatccggaatcgaaccagacaattatcaggggaatgggagagcttcatctggaagtttatatcgagagaatgcgccgcgaatataaatgcgaagtggaaaccggtatgccgcaggttgcctaccgcgaaacaattacgcagaaagccgagttcaactatactcatagaaagcagacaggcggagccggtcaattcggacgtgtcgcaggttacatggaatcttacccggacggcgattacgagtttgtagacatgataaaaggcggcactattcccacagagtatgtgccgagctgcgacaagggctttaaagaggctgttaaaaaaggcagtcttatcggtttcccgattgtaaatatccgctgtgtaataaacgacggtcagagccatcctgttgactcatcggacattgcgttccagtcggctgcaatcggcgctttccgcgaagcgtacaacaaagctaaacccgtaaatccttga

SEQ ID NO: 3258 - protein, 272 aa, Unknown
  Obtained from environmental sample
  DOMAIN (1)...(62): Elongation factor Tu domain 2
  misc_feature (1)..(272): Xaa is any amino acid
MRIYQGMLKKGDELVNTRARKKFKVGRLVRMHADSMEDINEGSSGDIVALFGIECASGDTFCGGGLNYAMTSMFVPNPVISLAVNPKDKKSADQMAKALNRFTKEDPTFQSYVDPESNQTIIRGMGELHLEVYIERMRREYKCEVETGMPQVAYRETITQKAEFNYTHRKQTGGAGQFGRVAGYMESYPDGDYEFVDMIKGGTIPTEYVPSCDKGFKEAVKKGSLIGFPIVNIRCVINDGQSHPVDSSDIAFQSAAIGAFREAYNKAKPVNP

SEQ ID NO: 3259 - DNA, 534 bp, Unknown
  Obtained from environmental sample
  misc_feature (1)..(534): n is a, c, g, or t
atggctctgaccgtcgtttattacacagcggatatttacaatcgggaaaccgataagactgccttttttaacagcctctttaaagcccttgtcgcagctcggcacatactctgtgggaatagtgccgccttttatcatgtctacaaactcgtaatcgccgtccgggtaagattccatgtaacctgcgacacgtccgaattgaccggctccgcctgtctgctttctatgagtatagttgaactcggctttctgcgtaattgtttcgcggtaggcaacctgcggcataccggtttccacttcgcatttatattcgcggcgcattctctcgatataaacttccagatgaagctctcccattcccctgataattgtctggttcgattccggatcgacataagattgaaatgtggggtcttcttttgtaaaacggttcagcgcttttgccatctggtctgcgctttttttgtctttcgggtttacagcaagagagattaccggattcggcacaaacatcgaagtcattgcgtaatttaa

SEQ ID NO: 3260 - protein, 177 aa, Unknown
  Obtained from environmental sample
  misc_feature (1)..(177): Xaa is any amino acid
MALTVVYYTADIYNRETDKTAFFNSLFKALVAARHILCGNSAAFYHVYKLVIAVRVRFHVTCDTSELTGSACLLSMSIVELGFLRNCFAVGNLRHTGFHFAFIFAAHSLDINFQMKLSHSPDNCLVRFRIDIRLKCGVFFCKTVQRFCHLVCAFFVFRVYSKRDYRIRHKHRSHCVI

SEQ ID NO: 3261 - DNA, 369 bp, Unknown
  Obtained from environmental sample
  misc_feature (1)..(369): n is a, c, g, or t
atggaaagcataaaaagaagcgacataaatgagcagtgggcgcattcaggtattgttgaagccggagatttcgcttttataagttattgtgtcggtaatataggtcagcctatagaaaaccaaataaaaggcgcaattgaccatttaaaaagcagacttgaatcaataggcttaacattggaatcagttgtaaaactggattgcttgtttagggacgtatggaacataccagtaatggaaaaggtatttaaggaaaggtttaatgggaagtatcccgcaaggaagtcaatacaaacggaatttgcccatgtaggcggacaagaagggcttttgtttcaacttgacgcaatagcatataaaggagaataa

SEQ ID NO: 3262 - protein, 122 aa, Unknown
  Obtained from environmental sample
  DOMAIN (11)...(120): Endoribonuclease L-PSP
  misc_feature (1)..(122): Xaa is any amino acid
MESIKRSDINEQWAHSGIVEAGDFAFISYCVGNIGQPIENQIKGAIDHLKSRLESIGLTLESVVKLDCLFRDVWNIPVMEKVFKERFNGKYPARKSIQTEFAHVGGQEGLLFQLDAIAYKGE

SEQ ID NO: 3263 - DNA, 363 bp, Unknown
  Obtained from environmental sample
  misc_feature (1)..(363): n is a, c, g, or t
atggaatatttgcgtcaggaaggttatcttcctacagttgacatggacggcgatattcaatttaaagtggcgggcgatacttattttataattgtagacgataaggaccttcaattttttcaggtttatacgggttttaagctggataccgtttctcaggacaccgtacttaacgccgcaaattcttcaaacagaagttcaaaggtagttaagattgccttttctccagacagaaatgttatctccattaccgctgaattgcttttaaatgatccaaaagattttattcccgttttttcaagggcaatctcccttataagaaacgcggaaaataattttatgacccagttaaagaacttttaa

SEQ ID NO: 3264 - protein, 120 aa, Unknown
  Obtained from environmental sample
  misc_feature (1)..(120): Xaa is any amino acid
MEYLRQEGYLPTVDMDGDIQFKVAGDTYFIIVDDKDLQFFQVYTGFKLDTVSQDTVLNAANSSNRSSKVVKIAFSPDRNVISITAELLLNDPKDFIPVFSRAISLIRNAENNFMTQLKNF

SEQ ID NO: 3265 - DNA, 864 bp, Unknown
  Obtained from environmental sample
  misc_feature (1)..(864): n is a, c, g, or t
atggcttacctgacggtaaagggtggggacggaaaggaagtgaatattcttgcctcaggcgatcttggaaggccgggcaagcctatcatccgcgatccggcaaggccgccagcgccagactatatcatacttgaaagcacttacggcgacaggctgcatgaaaacgcggaagacgccatgaacaaacttgcgagaattacaaaacaaattgtaaaagacaaggggaagctgctcataccgtctttcgcgatcgaaagaactcaggagctggtgtattatttccatctgcttacagataaagggatcattccagagattcctatttttgtggattcacctatggcgactaacgctaccacaattttccaggtacatccggaatgttacggggaggagattaaggaagctttcataaagcaccacaaaaatccttttgggtttaattcccttcattttaccacaagcgtcattgagtccaaatctttaaatgaccgccccgggccgcttattattatttccgcggacggaatgtgcgaagcgggccgcattcagcaccacttgattcacaatatcgcaagccccaacactaccattatgatcgtagggttcatggcggaaaacactctgggacgccgtatccttgaaagagccgacgaggtaaaaattcacggtaattggattaaacgtcgcgccacagtcgagaagatcaacgctttcagcgctcacgcggattacggcgaggcgataaactggcttaaatcactggacaattcccgcctganaaaaatctttatggttcatggagaacccaaaggtcaggctgtttttaaaaacatcttagtgaggcaggtttttcaaatgtag

SEQ ID NO: 3266 - protein, 287 aa, Unknown
  Obtained from environmental sample
  DOMAIN (225)...(271): RNA-metabolising metallo-beta-lactamase
  misc_feature (1)..(287): Xaa is any amino acid
MAYLTVKGGDGKEVNILASGDLGRPGKPIIRDPARPPAPDYIILESTYGDRLHENAEDAMNKLARITKQIVKDKGKLLIPSFAIERTQELVYYFHLLTDKGIIPEIPIFVDSPMATNATTIFQVHPECYGEEIKEAFIKHHKNPFGFNSLHFTTSVIESKSLNDRPGPLIIISADGMCEAGRIQHHLIHNIASPNTTIMIVGFMAENTLGRRILERADEVKIHGNWIKRRATVEKINAFSAHADYGEAINWLKSLDNSRLXKIFMVHGEPKGQAVFKNILVRQVFQM

SEQ ID NO: 3267 - DNA, 576 bp, Unknown
  Obtained from environmental sample
  misc_feature (1)..(576): n is a, c, g, or t
atgatgagggaagtcntgaagggcgtgattgtccacggaacggcaaaaaaagccgccctcgaaggcgtggaggcattcggcaagacgggcaccagccgaaaaatcatagacgggaaatacgatatgaagcgccactttgcctccttcatgggctttttccctgcggacaagccgaagtacgggattctgttcatgctggacgacccaattggcgatgtgacgggcggcgacgtggcggcgcctgcctttaagaagataggcgacgcaatccagcgctacgcttcgtccgcgcccagccctgtcatgacagaggacttgcgcctgacgttgcaggactggccggtcaacgagggcgacgaggcggtggtgcatgtccaggcgggcgtgacgcccgacctgaaggggctggggctgcggagcgccgtccagcgcgtggtgcttgcgggcggcgtggccagcgtcaaaagcgcgggactgtctggcgacaagccgtacagggtcacggcacagtcgcccgagcctggcaaaccgctgcccgaaaacaaagttgtcaccatccatctgaggcaccaatga

SEQ ID NO: 3268 - protein, 191 aa, Unknown
  Obtained from environmental sample
  misc_feature (1)..(191): Xaa is any amino acid
MMREVXKGVIVHGTAKKAALEGVEAFGKTGTSRKIIDGKYDMKRHFASFMGFFPADKPKYGILFMLDDPIGDVTGGDVAAPAFKKIGDAIQRYASSAPSPVMTEDLRLTLQDWPVNEGDEAVVHVQAGVTPDLKGLGLRSAVQRVVLAGGVASVKSAGLSGDKPYRVTAQSPEPGKPLPENKVVTIHLRHQ

SEQ ID NO: 3269 - DNA, 759 bp, Unknown
  Obtained from environmental sample
  misc_feature (1)..(759): n is a, c, g, or t
ttgtttnnnnnnnngggcttatggccgagatggacaaatgttgatatgttccgtgatgactataccctttatttggcgggagcgcatgacaccaatttattcaacaatgaaaataatctgaaatactatgacaagttcgcggaattttatatcaatgataaaaacccggatgaagatatatactctgaagtaatggaattaatgccgcgttttttaagaacagacgaactaattccttttgtagaaaaaatactgcccacgcttgaaaaaagcaaacaatactgtgatgaagacgaagaaaattttaagtatatacgtatagccatcgtaatgaataaacttcgttcggataaaaggatacacgacgtacttgttgatttaaccggatgtcttttggaagagaaaacagataaaaatgatcagttacagatggaagtatatatagtctttcatatttccgatttacgcccgtcggtaagagtgttaaaaaacgagtatcctgaatgttataaattaaaccaggctttttacaatgacgttcttaacgaaagaaaagaggaatttcttgacgataaatataccggaatatataaaaagttaagacacaaaaaaatcgcggctcccggcgaaaaattcgatgatgaagatgacagtaacggtgatgaaacaccatttaggcgtgaatctcctaaagtcggacgaaacgatccatgtccatgcggaagtggaaagaaatacaaaaagtgctgtggagcctaa

SEQ ID NO: 3270 - protein, 252 aa, Unknown
  Obtained from environmental sample
  DOMAIN (234)...(252): SEC-C motif
  misc_feature (1)..(252): Xaa is any amino acid
MFXXXGLWPRWTNVDMFRDDYTLYLAGAHDTNLFNNENNLKYYDKFAEFYINDKNPDEDIYSEVMELMPRFLRTDELIPFVEKILPTLEKSKQYCDEDEENFKYIRIAIVMNKLRSDKRIHDVLVDLTGCLLEEKTDKNDQLQMEVYIVFHISDLRPSVRVLKNEYPECYKLNQAFYNDVLNERKEEFLDDKYTGIYKKLRHKKIAAPGEKFDDEDDSNGDETPFRRESPKVGRNDPCPCGSGKKYKKCCGA

SEQ ID NO: 3271 - DNA, 690 bp, Unknown
  Obtained from environmental sample
  misc_feature (1)..(690): n is a, c, g, or t
atgggagttacgattcctcccaggcaaattgccctgttcactgacgtaaacaatccgcattacatttacgatttgctggggatattaaaaaccgaatttcttcccggtatatttattcagccagatgagcaggagtgtattccagcggaaagggttaccgcctttgcccaatccatcgccgccattccggcctacgcttacctcggcgatgtgggcgagtcccctacaggcgacaagaaggctgaaaaattcgaagatgattatatagaagaactctttgctgaaatttccaggcttggctatagggcggttacatatatgcccccaagaaacacacaggaacagttgcgaaatttaagacggctttcagccgaatggggttttatggaaatctccggggtagatataaacagttcccgccaatcctttaactgtccggaagtattaaaaagtgaattccgccatcttttggataccacatgggctctcatcgcccatgagcggctcgcgtcgcttgatgagcgatacggacttttttccgctgcaaatccggtttcctcgatgagccttgctgaaaggctttcgctttatgccggtttggggaaaaaattagacctccatcgtcccgatgaatccgccgctacgctggtaaaagaaattcacaatannnacatagtgaggtatgtatga

SEQ ID NO: 3272 - protein, 229 aa, Unknown
  Obtained from environmental sample
  misc_feature (1)..(229): Xaa is any amino acid
MGVTIPPRQIALFTDVNNPHYIYDLLGILKTEFLPGIFIQPDEQECIPAERVTAFAQSIAAIPAYAYLGDVGESPTGDKKAEKFEDDYIEELFAEISRLGYRAVTYMPPRNTQEQLRNLRRLSAEWGFMEISGVDINSSRQSFNCPEVLKSEFRHLLDTTWALIAHERLASLDERYGLFSAANPVSSMSLAERLSLYAGLGKKLDLHRPDESAATLVKEIHNXXIVRYV

SEQ ID NO: 3273 - DNA, 660 bp, Unknown
  Obtained from environmental sample
  misc_feature (1)..(660): n is a, c, g, or t
ttgaatatgtctaacgcccgcgggcatgaagtaaagaaggtgcggaaaattcccttcgaagcgggagatgtgcttgcttttgatcgcggattcacggattatgagtattttgcgtcaatttgtgagaaaaaagcgtattttgtgacccggataaagaaaaacgctgtatataagcgaataaaaaagaaccctgtaaaggagggcgggaatatcatatcggattatgaaataataataccgtcaatgccgcaagggatagtactgcgcaagataatagcgcgtgacccggaaacgaagaaacggattgcgcttttaacgaataatctgaagtggtcggcagggaccgtggccggggtatataaggaacgttggcagatagaattattttttaaagcgataaaacaaaacttgaagataaaaagattttacgggaattccaggaacgcggtaatgacgcagatatggatagcgatgatagcgtatttattattttatctgttgaaagtgaaatcaaagaatttaaaactgtcatttaccaattttatatcggtaataaagacaatgctgtttcagaggttttctctttttgattttttaagtggctcaagccctcctccaggatcaaatgcatcatttaaatatcagccggagttcgtatga

SEQ ID NO: 3274 - protein, 219 aa, Unknown
  Obtained from environmental sample
  DOMAIN (1)...(163): Transposase DDE domain
  misc_feature (1)..(219): Xaa is any amino acid
MNMSNARGHEVKKVRKIPFEAGDVLAFDRGFTDYEYFASICEKKAYFVTRIKKNAVYKRIKKNPVKEGGNIISDYEIIIPSMPQGIVLRKIIARDPETKKRIALLTNNLKWSAGTVAGVYKERWQIELFFKAIKQNLKIKRFYGNSRNAVMTQIWIAMIAYLLFYLLKVKSKNLKLSFTNFISVIKTMLFQRFSLFDFLSGSSPPPGSNASFKYQPEFV

SEQ ID NO: 3275 - DNA, 915 bp, Unknown
  Obtained from environmental sample
  misc_feature (1)..(915): n is a, c, g, or t
ttgatggccgagggtggtttctgcccaggcaaaagaaattctaaagaatctaaattaaccgatctgctatactcagtttatgaccttgcaaaaaaaaagcttgacttcgcaggcccatggaaacttataagagaacgctacatagaaataactcaggaactttccctgcaatccaccatacgtgaagaattagacgaattggaaaaaactctgctaaataagccagatgatatttcggttgatttcgtagcgagccgcggcgaatacctatgtgcaaagataatgtcagaatttttgggagcaaaattcgtagatgcctaccctattatacaatttgatagtcaataccgtataacatcgaaaagttacgaagacattgcctttgctctttcagacacaaactctctttacgttgtgcctggtttttacggaagtgacattcaaggaaacctaaaaacattcacgcgcggcggctcagacatcaccggcggaattttagctaatgcttgcagttgcttgctttacgaaaactggacagatgtttctgggctactgatggcagacccgcgcattgttcaaggagcacattccataagttatgttagctaccgtgaaataagagagcttgcatacagcggtgcaaacgtgctgcacgatgaatccatatatccgtgcagagcaaaaaacattcccataaacataaaaaacaccaacagccctggcgaccaaggtacaataattggcccaaccccagaacacaccttaggcataataactggcattgccggacgtaaggatttttcaatgctctacattgaaaaaagcatgatgaacaaagaaaagggctttggacgcaaggttctcacaattttagaagaacgcggagtatcttatgaactctcccctgcggcatag

SEQ ID NO: 3276 - protein, 304 aa, Unknown
  Obtained from environmental sample
  DOMAIN (42)...(236): Amino acid kinase family
  misc_feature (1)..(304): Xaa is any amino acid
MMAEGGFCPGKRNSKESKLTDLLYSVYDLAKKKLDFAGPWKLIRERYIEITQELSLQSTIREELDELEKTLLNKPDDISVDFVASRGEYLCAKIMSEFLGAKFVDAYPIIQFDSQYRITSKSYEDIAFALSDTNSLYVVPGFYGSDIQGNLKTFTRGGSDITGGILANACSCLLYENWTDVSGLLMADPRIVQGAHSISYVSYREIRELAYSGANVLHDESIYPCRAKNIPINIKNTNSPGDQGTIIGPTPEHTLGIITGIAGRKDFSMLYIEKSMMNKEKGFGRKVLTILEERGVSYELSPAA

SEQ ID NO: 3277 - DNA, 552 bp, Unknown
  Obtained from environmental sample
  misc_feature (1)..(552): n is a, c, g, or t
atggaagttgacggaactttcgaaaatctcacaaaaaaagagattgcctctcttgggaaggaacgcattaaactgcaaaaaaaccttggcggcataaaggaaatgaaggaacttccgggaatcctttttatcatcgacacgcgcaaggaagcaatcgccgtagccgaagctcagaggcagggcattccgataatagcggttgttgatacaaactgtaatcccgacggcatcgactaccccattccgggcaacgacgacgcaatcagggcaattaccctatttacccaaattgtcgccaacgcagttgtagaagcggataacgaagttggactgaagatcatcgaaaccctcggcgatgatgacgaagatatggaaagcatgatgaacgatgtttccaggaaagaagaagacagggaaatagtagactatgaaaaatacaccggggaagaagcatacagagccgcaaaggcggatgaagaagtccctgaagaagatgaagacgacagcaagataaaagttgacatcgataaagtctacaacgaaaaaatttaa

SEQ ID NO: 3278 - protein, 183 aa, Unknown
  Obtained from environmental sample
  DOMAIN (2)...(106): Ribosomal protein S2
  misc_feature (1)..(183): Xaa is any amino acid
MEVDGTFENLTKKEIASLGKERIKLQKNLGGIKEMKELPGILFIIDTRKEAIAVAEAQRQGIPIIAVVDTNCNPDGIDYPIPGNDDAIRAITLFTQIVANAVVEADNEVGLKIIETLGDDDEDMESMMNDVSRKEEDREIVDYEKYTGEEAYRAAKADEEVPEEDEDDSKIKVDIDKVYNEKI

SEQ ID NO: 3279 - DNA, 321 bp, Unknown
  Obtained from environmental sample
  misc_feature (1)..(321): n is a, c, g, or t
atggctgatatatcccccgcagatgtaaaaaaactccgggaaaaaaccggagcgggaatgatggattgtaaaaacgcgcttgtctcttcagacggcgattttgccaaagcggaaaaacttttaaaggaaaaaggccttgccgcccttgaaaaaagagccggacgcgccaccaattgcggaaaagtttttattaaaatgaaagacgacaattccgccgcagtgttggctgaacttaacgcggaaaccgactttgtggncagaaaccngaaattatcgcactgngagaaaacattgcagctaacgcgctttgaaaaggnntaa

SEQ ID NO: 3280 - protein, 106 aa, Unknown
  Obtained from environmental sample
  DOMAIN (4)...(44): UBA/TS-N domain
  misc_feature (1)..(106): Xaa is any amino acid
MADISPADVKKLREKTGAGMMDCKNALVSSDGDFAKAEKLLKEKGLAALEKRAGRATNCGKVFIKMKDDNSAAVLAELNAETDFVXRNXKLSHXEKTLQLTRFEKX

SEQ ID NO: 3281 - DNA, 756 bp, Unknown
  Obtained from environmental sample
  misc_feature (1)..(756): n is a, c, g, or t
atgaaagaaaaaaaattcgggaactcgggcgccagcatcgtaattgaggaatttttaacaggaccggaagtttccgttcttgcctttacggacgggaaaaccgtaattcccatgatttcgtccatggatcacaaacgcgcctacgacggcaatgaaggccccaacacgggcggcatgggcgtaatcgcgcctaatccccactacacggaagaaatagccgcaatatgcgaaaaaaccatatttttacccagtattaacgcgatgagggaagaaggatgcccgttcaaaggctgtctgtacttcgggcttatgctcaccgcgaagggccccgttgtaattgagtacaactgccgcttcggagaccctgaagctcaggcggtactgcccctgctggaaacaagcctgttggaagtgatggaagcagtaacggacgaaaggctttctgaaataaagattacctggaaaaaagcgtattgcgcctgcgtgatactggcaagcggaggctatccgcatgggtacaagacgggttttgccattacagggctttgtgaggctgaaaaaagcggagctgaagtttatcatgccggaaccgaatacaggcaggcggaaagttcttttttcactgcgggcggccgtgttttgggtgtaaccgccgttgaaaaaacgcttaaaacagcccttgataaggcctataaagctgttgattttattaattttgagggaattcactaccgaaaagacctcggaaagtactaa

SEQ ID NO: 3282 - protein, 251 aa, Unknown
  Obtained from environmental sample
  DOMAIN (161)...(250): Phosphoribosylglycinamide synthetase, C domain
  misc_feature (1)..(251): Xaa is any amino acid
MKEKKFGNSGASIVIEEFLTGPEVSVLAFTDGKTVIPMISSMDHKRAYDGNEGPNTGGMGVIAPNPHYTEEIAAICEKTIFLPSINAMREEGCPFKGCLYFGLMLTAKGPVVIEYNCRFGDPEAQAVLPLLETSLLEVMEAVTDERLSEIKITWKKAYCACVILASGGYPHGYKTGFAITGLCEAEKSGAEVYHAGTEYRQAESSFFTAGGRVLGVTAVEKTLKTALDKAYKAVDFINFEGIHYRKDLGKY

SEQ ID NO: 3283 - DNA, 717 bp, Unknown
  Obtained from environmental sample
  misc_feature (1)..(717): n is a, c, g, or t
ttgctccacattcccaccagggtagtagccgcaaggggttatttggtcgcaaagtatcagtttttttcccttttacaaataatggccggtgatcagaaggaattcattcctctcctcgcaaaggttattctgacgataatccacaccctcatggccgaagaagtctacttttcctgccttgacgattccggattttcccaggaaataaagcttaatctggcgaacgatcttatcatgctttgggacagcggtacggatccccgtacggtcaggcacttgccggcccttgacgccctttggaccgcccgcgattcttctccccccgctttcggaacaatgaacgctacaagcgagcttctgcggatctccatagatatgggagaagactggcaggatttcctaatcgcgaatgtttcaattaacgaaacccgttgggctcttgaggaatttctttttggtctctcttacgaagaaataaattcggtacgttccaggctgataaaattcggcatcaatgccgtcggccatgacgagattccttcttttcttggaagccgtcccgcctacggaataataaacagctccgattaccgcgcaatgtatgatttctacgttgaccgccgggatgccgcccgtctgcgccaaaagctttccgttccaggcccgggcagatccctggaagaaatatacattaaataccgcatagccgtggaataa

SEQ ID NO: 3284 - protein, 238 aa, Unknown
  Obtained from environmental sample
  misc_feature (1)..(238): Xaa is any amino acid
MLHIPTRVVAARGYLVAKYQFFSLLQIMAGDQKEFIPLLAKVILTIIHTLMAEEVYFSCLDDSGFSQEIKLNLANDLIMLWDSGTDPRTVRHLPALDALWTARDSSPPAFGTMNATSELLRISIDMGEDWQDFLIANVSINETRWALEEFLFGLSYEEINSVRSRLIKFGINAVGHDEIPSFLGSRPAYGIINSSDYRAMYDFYVDRRDAARLRQKLSVPGPGRSLEEIYIKYRIAVE

SEQ ID NO: 3285 - DNA, 624 bp, Unknown
  Obtained from environmental sample
  misc_feature (1)..(624): n is a, c, g, or t
gtgatgataattggtattaggtattacggagtacaatatatggatgtgaaaatttttccagggcggttgaacggcgctgttaacgccattccttccaagtcgcaggcgcacagggcgcttatatgcgcggctctggcagataaaccgacgcgcgtcgaatgtaacggcgaatctgatgacattttggcaacggcggcctgcctttccgcccttggcgcgggaatcgaacgcgagtcagggggttatgttgtgtatcctttgaaacgggaagggagcgacaacattgcaacgctgccctgcggggaaagcggcagcacatttcgcttcatgctgccgatcgtttgcgcactgggacgaaaagtttatttcatcccgaaagggcggctgccggaacgcccgctctcccccttgtacgaagagcttgtcagccacggagctgaattgtcgccgcagggctccgctccgttttgtgcangcgggcggcttacgccaggccgctattcgctggacgcgggcatatcgtcgcaattcatcagcggcttgctgttcgccctgcctttgctcgacggtgacagtgagcttggcctgacggaacagccgaatcattcccatatatcgaactga

SEQ ID NO: 3286 - protein, 207 aa, Unknown
  Obtained from environmental sample
  misc_feature (1)..(207): Xaa is any amino acid
MMIIGIRYYGVQYMDVKIFPGRLNGAVNAIPSKSQAHRALICAALADKPTRVECNGESDDILATAACLSALGAGIERESGGYVVYPLKREGSDNIATLPCGESGSTFRFMLPIVCALGRKVYFIPKGRLPERPLSPLYEELVSHGAELSPQGSAPFCAXGRLTPGRYSLDAGISSQFISGLLFALPLLDGDSELGLTEQPNHSHISN

SEQ ID NO: 3287 - DNA, 732 bp, Unknown
  Obtained from environmental sample
  misc_feature (1)..(732): n is a, c, g, or t
gtggtgcttcgcaactgcggcgttatcgatcctgaaaaaatcgatgagtacatcgcccgcgaaggctataaggggcttgagaaagtcctgtttgaatggactccggaacagatcatcgccgaggtaaagacttccggcctgcgcggacgtggcggcgccggcttccccacctggcttaaatgggatcttgcgcggaaagctcagggtgacgtcaaattcgttatctgtaacgccgacgaaggcgacccgggcgcgtatatggaccggtccaccgtagaaggcgatccccactcggttattgagggcatgatcaccgccggcaaggcaataggcgccaaccagggttttgtgtacatccgcgccgagtatccccttgccattgaacggctgagaattgccctgaaacaggcgcaggactacggcctgctcgggaaaaacatcctcggatcagggtatgatttcgatattgaaatccgccttggcgcgggtgcctttgtctgcggcgaggaaactgcgctgattaagtccgtcgagggcaaccgcggaatgcccgtgccgaaacctccatttccggcgaataagggactgtggcaaaaaccaactatcatcaataacgttgaaacctttgcgaatatcccggtgattaccgccnagggcggagcatggcttgccaggcttggaaccgaaaaatccaaagggaaccaaggttttcgcccttaccgganaggttaa

SEQ ID NO: 3288 - protein, 243 aa, Unknown
  Obtained from environmental sample
  DOMAIN (21)...(239): Respiratory-chain NADH dehydrogenase 51 Kd subunit
  misc_feature (1)..(243): Xaa is any amino acid
MVLRNCGVIDPEKIDEYIAREGYKGLEKVLFEWTPEQIIAEVKTSGLRGRGGAGFPTWLKWDLARKAQGDVKFVICNADEGDPGAYMDRSTVEGDPHSVIEGMITAGKAIGANQGFVYIRAEYPLAIERLRIALKQAQDYGLLGKNILGSGYDFDIEIRLGAGAFVCGEETALIKSVEGNRGMPVPKPPFPANKGLWQKPTIINNVETFANIPVITAXGGAWLARLGTEKSKGNQGFRPYRXG

SEQ ID NO: 3289 - DNA, 852 bp, Unknown
  Obtained from environmental sample
  misc_feature (1)..(852): n is a, c, g, or t
ttgttnnnnnnnngggttgatcgccgagcaatcctccttcctggccccatgagccacgagatgagaacgcccatgaacgccatcatcggcatgaccgtcataggcaaaaacgccgacgacataacgcgcaaggactacgcgctggacaaaatcgagggggcggcgcagcacctgctgagcgtcatcaacaacgtgctcgacatatcgaaaatagaggccgacaagatggaactctcgcccatcgagtttgactttgagaagatgctgcaaaaggtcatcaacataataaacttccgcgtcgaggagaagcaccagcgcctgaccgtgaacatagacggcaatatcccgcgtttcctgataggcgacgattaccgtctgacgcaggtcgcgctgaacctgctggccaacgccgtaaagttctcgccggagggcggcgagataggcctggacgccaccctcgccggcaaggcggacggcgtttgcgaactgcggatagccgtctccgacaacgggatcggcatatcgccggagcagcagtcgaggctcttcaacgccttcgagcaggcggacggcggcacgagccgcgagttcggcggcaccggattggggctggtcatatcaaaacgcatagtggaactgatgggcggaaagatatggatcgagtcggaactgggaaagggctccaagttcatcttcaccgtaaaggcggagcgcggaaagactaccgacggcgaccccgaacgctccgacgcaagcggcgacgccgacaagccgacggtcgaagcgggcgaagcgttcgccggcaggaacctccttgtggccgaggatgtggagattaccgcgaaatcctga

SEQ ID NO: 3290 - protein, 283 aa, Unknown
  Obtained from environmental sample
  DOMAIN (8)...(74): His Kinase A (phosphoacceptor) domain
  misc_feature (1)..(283): Xaa is any amino acid
MXXXXVDRRAILLPGPMSHEMRTPMNAIIGMTVIGKNADDITRKDYALDKIEGAAQHLLSVINNVLDISKIEADKMELSPIEFDFEKMLQKVINIINFRVEEKHQRLTVNIDGNIPRFLIGDDYRLTQVALNLLANAVKFSPEGGEIGLDATLAGKADGVCELRIAVSDNGIGISPEQQSRLFNAFEQADGGTSREFGGTGLGLVISKRIVELMGGKIWIESELGKGSKFIFTVKAERGKTTDGDPERSDASGDADKPTVEAGEAFAGRNLLVAEDVEITAKS

SEQ ID NO: 3291 - DNA, 429 bp, Unknown
  Obtained from environmental sample
  misc_feature (1)..(429): n is a, c, g, or t
atgaacatttacgatataaataccggcgaagagatcaagggaaccgccctgaataacggaaaaacttaccgcgccagagtaagagtgtcctcaaaccgggaccgtacttatcttgcactgcgcgtccccgttccttccggcgcggagattctggatgcgacgtttgttaccaccgcttcatatcaggataaaggcggcgcaagcggaaacgaaaagatacgctcaagttcatggttaagccaccaaattattatggacaacgagattcaatatttctgggatcagtttaacaagggggaatcaacggtcagtttccttttccgttcggcgagaaggggcgtataccccacgccgccggttcaggccgagtgtatgtatgaagcggaaatatttggacgcggcgcgggacttctttatactattgaatag

SEQ ID NO: 3292 - protein, 142 aa, Unknown
  Obtained from environmental sample
  misc_feature (1)..(142): Xaa is any amino acid
MNIYDINTGEEIKGTALNNGKTYRARVRVSSNRDRTYLALRVPVPSGAEILDATFVTTASYQDKGGASGNEKIRSSSWLSHQIIMDNEIQYFWDQFNKGESTVSFLFRSARRGVYPTPPVQAECMYEAEIFGRGAGLLYTIE

SEQ ID NO: 3293 - DNA, 822 bp, Unknown
  Obtained from environmental sample
  misc_feature (1)..(822): n is a, c, g, or t
gtgaatccccgcgcgcgggccttttcggtgaaggtagaaagcgacaaaaaaacctaccgtcccggcgaagaagttaccatgaccttgaccgcaagcaaggacggcaagcccctgcccaatgcggagctgaccctcatggcggtagatcggggcgtattggatcttatcaattaccatgtgccggatccgatacagtatttttataatgaaaactgcttccccctcatggtagcgggcggtgattcccgttcatggcttatggatccggtcacctacagcgtcaaagatctcgcgggcggcgacgcggaaggcggcgataaaattgaggaacgcaaggactttaatcccaccgcggtatttgagccgatgctgataaccgacgattcgggcaaggtaacatgcaaattcaaacttcccgacaatcttactacatatcgcgtaacagtttttgggatacggggggatatttttgcccttaaagaaagcgaaattgccgcccaaaacaaaataaacgtgcgggaagttttaccccggcgcacgcgggaacgggataccgctgaagcgggagtactcatcaccaatcttgattcatcgtcccatactttgtcggtcaggcttgatataggcccgcctctgcccaatgatgattcaagcggaatggtaaaaattcccggacaggcttttgttgacgggctttttgaacgccgcgtaacggtaaaaagcggcgcgaatgccgtggtgtattttgacgtggctgcggtaaaggaaggaaatattacgcttaactttccgttaattcggatattctcaatgaaaagctga

SEQ ID NO: 3294 - protein, 273 aa, Unknown
  Obtained from environmental sample
  misc_feature (1)..(273): Xaa is any amino acid
MNPRARAFSVKVESDKKTYRPGEEVTMTLTASKDGKPLPNAELTLMAVDRGVLDLINYHVPDPIQYFYNENCFPLMVAGGDSRSWLMDPVTYSVKDLAGGDAEGGDKIEERKDFNPTAVFEPMLITDDSGKVTCKFKLPDNLTTYRVTVFGIRGDIFALKESEIAAQNKINVREVLPRRTRERDTAEAGVLITNLDSSSHTLSVRLDIGPPLPNDDSSGMVKIPGQAFVDGLFERRVTVKSGANAVVYFDVAAVKEGNITLNFPLIRIFSMKS

SEQ ID NO: 3295 - DNA, 636 bp, Unknown
  Obtained from environmental sample
  misc_feature (1)..(636): n is a, c, g, or t
ttgttcccggactatgttgagaaccgtccctccgacgcctggggaagcatcagcgcctgggcctggggtatgagccgggccatagattacctggttacagatccggccattaacaataaggaaatagccgttgccggacattcccggggcggtaaaaccagcctctggtgcggcgtccaggattcaagggtgtcccttgtaattagtagctgctcggggtgttccggggcggccattaccaggggaaaaaccggggagcatataaaagacataaccgagaggttccccttttggttctgctcaaactaccggaaatacgcggataaagaagaggcgatgccctttgaccagcatctgctccttggccttatcgctccccggcctctttatctatcggaaaaatcttttgacagttggtgcgatccaagagcggaatttgaatccttaaaacaagggtccagaatttacgaactctatggcaatcgcagccttgtaaaagaaaccatgccgtcgccggaacaagggatcgttttaggtaatctggggtaccacataaaatccggagcccatgatatggacgagtacgattgggagcggtaccttaatttctgcgacaaccattttgtcgatttatga

SEQ ID NO: 3296 - protein, 211 aa, Unknown
  Obtained from environmental sample
  misc_feature (1)..(211): Xaa is any amino acid
MFPDYVENRPSDAWGSISAWAWGMSRAIDYLVTDPAINNKEIAVAGHSRGGKTSLWCGVQDSRVSLVISSCSGCSGAAITRGKTGEHIKDITERFPFWFCSNYRKYADKEEAMPFDQHLLLGLIAPRPLYLSEKSFDSWCDPRAEFESLKQGSRIYELYGNRSLVKETMPSPEQGIVLGNLGYHIKSGAHDMDEYDWERYLNFCDNHFVDL

SEQ ID NO: 3297 - DNA, 465 bp, Unknown
  Obtained from environmental sample
  misc_feature (1)..(465): n is a, c, g, or t
ttgcgttatgttgacatattggtcgggaatgaagaggatttgcaaaagggacttgggctgaaaggtcaggatgtggaggccaaaggctctctcgatccatcggccttttttaagatgatcgaaaacgttaccaaagactttcccaatataaaagcggttgcaaccactttgcgcgaggttcattccaccaaccgccacacatggagcgccgtgttatggattgacggcaagcagtaccaggcccccaccaccgaactggatgtctacgacagggttggcggcggcgatggttttgccgctgggcttttctacggcctcttgtccggtaaaagccacgaggaagccctgcgcctgggctgggcgcacggggcgatgttgaccaccacgcccggcgatacctctatggtcacgctggatcaagtggaggctttcgctaagggcggttcggcgcgcattcagcgctaa

SEQ ID NO: 3298 - protein, 154 aa, Unknown
  Obtained from environmental sample
  misc_feature (1)..(154): Xaa is any amino acid
MRYVDILVGNEEDLQKGLGLKGQDVEAKGSLDPSAFFKMIENVTKDFPNIKAVATTLREVHSTNRHTWSAVLWIDGKQYQAPTTELDVYDRVGGGDGFAAGLFYGLLSGKSHEEALRLGWAHGAMLTTTPGDTSMVTLDQVEAFAKGGSARIQR

SEQ ID NO: 3299 - DNA, 843 bp, Unknown
  Obtained from environmental sample
  misc_feature (1)..(843): n is a, c, g, or t
ttgcaaaaagaagaagaaactgaagctataaaagagttattgagattaataatccagacaggaggtaaaataaagatattatcaattacagtagcggaaataaaaaatgtacttgatcgggctattaatctttataataattctttaccaacaaccaccatcaatgaagcctgttgtcgcttaggaaaaaatagagcatggttaatgtttttcgcttccaatcttgagaataaaatacaaaaggaattaaatatacctatcgaatatttattgccttcatttattgaagaatataaactatgtaaggatgtagaagaattacaatcaactaggttgactacaaggaatgcattacatgatgtgctttcatatatgtatattagacaattaagaggcagttcagcattttcgtttcaaaaagcgaaagcatggtttttaacaactaatagtaaattactaatattcaataagaaacacatgataggagacatccctgagataataacggctgactcgttgactagtttattatggcttaaagaaccggcaaagttagtaaactctataaaaaaagcaggtttgaatatactgttagctacaactttcaatgaggaatttgcgagtagagaattgattaatgaattcaataatgtaatacaaaatatagatggtgtcactgaagatgattatcagttattgttggaatcagttgctcatcaatctgcaaaaaaaataaattcatttattgaaatgtctataacagatgaagaaaagatgaaggcagaaatttacaaaatagttgacaaggagcgttctaggaaaatgcaggctaatatgaaataa

SEQ ID NO: 3300 - protein, 280 aa, Unknown
  Obtained from environmental sample
  misc_feature (1)..(280): Xaa is any amino acid
MQKEEETEAIKELLRLIIQTGGKIKILSITVAEIKNVLDRAINLYNNSLPTTTINEACCRLGKNRAWLMFFASNLENKIQKELNIPIEYLLPSFIEEYKLCKDVEELQSTRLTTRNALHDVLSYMYIRQLRGSSAFSFQKAKAWFLTTNSKLLIFNKKHMIGDIPEIITADSLTSLLWLKEPAKLVNSIKKAGLNILLATTFNEEFASRELINEFNNVIQNIDGVTEDDYQLLLESVAHQSAKKINSFIEMSITDEEKMKAEIYKIVDKERSRKMQANMK

SEQ ID NO: 3301 - DNA, 915 bp, Unknown
  Obtained from environmental sample
  misc_feature (1)..(915): n is a, c, g, or t
atgttacaattctcatgcatgagtcagtcaaataccggggaggtttctaaaccttttcaaagggagggcgtgaagctcaccggcattatcccgtcaagtatcagctcgtttcgaaaaagctcccagtaccgtgacgccccaaaagagaataaccagcctttaaatccgcagctttataaagagcagcctccggcgaaagaaataccgcgccatgttccccttgattttgccgaggcaaaagagaaagtccttgcagcggcaaacaacgccggtaaagacagcgcaatgaaagaagttttggcgttgttgaccgcgcaaaatgccgaagtcaggattatcaaggaaaaacttgaaagctccgatttggtcggctccaaggaagaacaccccacccttaaccgaatcgacgatattcttattctgaacgattttcctgtttcttaccgcaaagccctgctggaaaagatacggaaagaaatttcgcttgacgggctgaataattaccaggcggttcaggacagggttctggaatggataggggaaagtataaaaattcacgaagccggaaaattcaacatccgcccccggattataatcctggtaggccctaccggagtgggcaaaaccacaaccgtagcaaaacttgcggcgaactttggtattgacagcaagacgcgcactcacaaacgcaacgttgtgttgattactatcgacggttataaaattggcgctaaagagcaggtagagaaactcagcgaatatatgcagtttccctgtttttccactgtggattacgatgagctaaaaactatcatcgccactaattccgaagggacagatctaattctgattgatactatcggtagaaatcccagggatatggaaaagcntgggaaaaatgaaaaagctccttga

SEQ ID NO: 3302 - protein, 304 aa, Unknown
  Obtained from environmental sample
  DOMAIN (194)...(304): SRP54-type protein, GTPase domain
  misc_feature (1)..(304): Xaa is any amino acid
MLQFSCMSQSNTGEVSKPFQREGVKLTGIIPSSISSFRKSSQYRDAPKENNQPLNPQLYKEQPPAKEIPRHVPLDFAEAKEKVLAAANNAGKDSAMKEVLALLTAQNAEVRIIKEKLESSDLVGSKEEHPTLNRIDDILILNDFPVSYRKALLEKIRKEISLDGLNNYQAVQDRVLEWIGESIKIHEAGKFNIRPRIIILVGPTGVGKTTTVAKLAANFGIDSKTRTHKRNVVLITIDGYKIGAKEQVEKLSEYMQFPCFSTVDYDELKTIIATNSEGTDLILIDTIGRNPRDMEKXGKNEKAP

SEQ ID NO: 3303 - DNA, 543 bp, Unknown
  Obtained from environmental sample
  misc_feature (1)..(543): n is a, c, g, or t
ttgatgcgggcaatggtcgctatggataacaaagacgtattaaaatactgtccgcgttgttccggcccggcggttttggcggattaccgcaagatcgtctgcgccgggtgcgggtttcagatttacctcaacaccgcggctgccgtcgccgggctgttttttgacggggacgggcggctcatgaccgtccgcaggaacgacgaaccgcaggcggggttgcttgacctccccggcggattcgttgagttcaacgaaacggcggaggaggcgcttgcccgcgaggtgcgcgaggagttgggcgtgggggtttgcgaaatcgaatactaccggtcaattcccaataagtacctatacagaggcgttctgtaccacacgttagacatctttttaaagtgccgttttgaagagtgcgtcgataataaaatccgtcataacgacgaaattaaagatatcgtatataagtttcctgaagagattaaagaagaagagatagcctttgactcgatgaagaggttgattaagtctttgaattcaactcgttga

SEQ ID NO: 3304 - protein, 180 aa, Unknown
  Obtained from environmental sample
  DOMAIN (45)...(175): NUDIX domain
  misc_feature (1)..(180): Xaa is any amino acid
MMRAMVAMDNKDVLKYCPRCSGPAVLADYRKIVCAGCGFQIYLNTAAAVAGLFFDGDGRLMTVRRNDEPQAGLLDLPGGFVEFNETAEEALAREVREELGVGVCEIEYYRSIPNKYLYRGVLYHTLDIFLKCRFEECVDNKIRHNDEIKDIVYKFPEEIKEEEIAFDSMKRLIKSLNSTR

SEQ ID NO: 3305 - DNA, 822 bp, Unknown
  Obtained from environmental sample
  misc_feature (1)..(822): n is a, c, g, or t
ttgggaatgctgaatgttgacgtgacgcaggataggcgcataggcgcattaacaggaatagggtatgtcgaaccttctgtaataacaccagtcaatacaaataccaccccttccggcaatttatccttatggacgtttaccgatgaaataggaaagatgctgaaatccaattattacaaaccgccgtataaaataaatgttacggtatcagaaacctcgcgggatcaatacgatcaattatggcaaaatttagacacggctcttttttccggcaagggggcgcctgatgtttttgctttggaagactcctatgttcgcaaatatgtagaatcgggtttcttgttggacattaccgatatttatgaagccaataagcataaactcatggcatatcctgttgaattaggatcgcataacggaagagtatacggattatcatggcaggcggcccccggcgccatgttctaccgcagaagtctcgcgaaaaaatatctgggaaccgatgatcccaaagcagtacaggcttattttgccaatataaataaatttcttgaaacggcaaaattgcttaaagataaatctaaagatacttgctttgtggttcccagtcagcaagatctttactatccttttttatacaaccgaaaaagtccctgggttgtagaccgcanactggttattgatccggctattgaacaatacatggatttttgtaaaacatgcttgataaccattataccgaaggtgagggatggcaatggggagataactggtttgccggcatgcggggtgaatataaaaagtatgacggaaaccggctga

SEQ ID NO: 3306 - protein, 273 aa, Unknown
  Obtained from environmental sample
  misc_feature (1)..(273): Xaa is any amino acid
MGMLNVDVTQDRRIGALTGIGYVEPSVITPVNTNTTPSGNLSLWTFTDEIGKMLKSNYYKPPYKINVTVSETSRDQYDQLWQNLDTALFSGKGAPDVFALEDSYVRKYVESGFLLDITDIYEANKHKLMAYPVELGSHNGRVYGLSWQAAPGAMFYRRSLAKKYLGTDDPKAVQAYFANINKFLETAKLLKDKSKDTCFVVPSQQDLYYPFLYNRKSPWVVDRXLVIDPAIEQYMDFCKTCLITIIPKVRDGNGEITGLPACGVNIKSMTETG

SEQ ID NO: 3307 - DNA, 849 bp, Unknown
  Obtained from environmental sample
  misc_feature (1)..(849): n is a, c, g, or t
gtgggtttgattaccgatgcaagtggtaaatgggctgtgttatcagatattttgggcgatgaagaccatttgggcgatatggatttcaaagtgtgcggaacacgcgatggaattacggcttgccaaatggacatcaaagtagatggtttgtcgtatgaagtattggcgaaagccctcatgcaagcgaacgccggacgtatgcacatcatgaacgaaattctgaaaaccattgcagaacctcgcgaagactatcgtccgtttgtaccacgcattgtacagatgaccattccgaaagagtttatcggtgcggtgattggaacaggcggcaaagtcatccaagaaatgcaacgcgaaaccggtacggaaattgccatcgaagaaaaaggcgaatttggaattatcgacatcgcagcggccaacaaagattcgattgatgctgcaattgcacgaattaacgccattatcgcagttcccgaagttggaaccgtgtatgaaggtacggtaaagaccattcagccgtttggcgcgtttgttgagattttgcccgacaaagacggtctgctgcatatttcggaaattgattggaaacgcatggaaacgatggaagaatccggtttgaaagaaggcgaccccatcgaagtgaagttgattgatatcgacaaacgaaccggcaaattgaaactgtctcgcaaagtgcttttacccaaaccggaaggttatgtagagcccgagcgcanagagcgtccgcctcgcagagacggcgaccgtgaccgcgatcgcaaccgtgaccgcgaccgtcgtccggaccgcagagggttttcgggtgctccgagaaacaaagaatattaa

SEQ ID NO: 3308 - protein, 282 aa, Unknown
  Obtained from environmental sample
  DOMAIN (1)...(65): 3' exoribonuclease family, domain 2
  misc_feature (1)..(282): Xaa is any amino acid
MGLITDASGKWAVLSDILGDEDHLGDMDFKVCGTRDGITACQMDIKVDGLSYEVLAKALMQANAGRMHIMNEILKTIAEPREDYRPFVPRIVQMTIPKEFIGAVIGTGGKVIQEMQRETGTEIAIEEKGEFGIIDIAAANKDSIDAAIARINAIIAVPEVGTVYEGTVKTIQPFGAFVEILPDKDGLLHISEIDWKRMETMEESGLKEGDPIEVKLIDIDKRTGKLKLSRKVLLPKPEGYVEPERXERPPRRDGDRDRDRNRDRDRRPDRRGFSGAPRNKEY

SEQ ID NO: 3309 - DNA, 525 bp, Unknown
  Obtained from environmental sample
  misc_feature (1)..(525): n is a, c, g, or t
atgcagcagaccgtctttgtcgggcaaaatctcaacaaacgcgccaaacggctgaatggtctttaccgtaccttcatacacggttccaacttcgggaactgcgataatggcgttaattcgtgcaattgcagcatcaatcgaatctttgttggccgctgcgatgtcgataattccaaattcgcctttttcttcgatggcaatttccgtaccggtttcgcgttgcatttcttggatgactttgccgcctgttccaatcaccgcaccgataaactctttcggaatggtcatctgtacaatgcgtggtacaaacggacgatagtcttcgcgaggttctgcaatggttttcagaatttcgttcatgatgtgcatacgtccggcgttcgcttgcatgagggctttcgccaatacttcatacgacaaaccatctactttgatgtccatttggcaagccgtaattccatcgcgtgttccgcacactttgaaatccatatcgcccaaatggtcttcatcgcccaaaatatctga

SEQ ID NO: 3310 - protein, 174 aa, Unknown
  Obtained from environmental sample
  misc_feature (1)..(174): Xaa is any amino acid
MQQTVFVGQNLNKRAKRLNGLYRTFIHGSNFGNCDNGVNSCNCSINRIFVGRCDVDNSKFAFFFDGNFRTGFALHFLDDFAACSNHRTDKLFRNGHLYNAWYKRTIVFARFCNGFQNFVHDVHTSGVRLHEGFRQYFIRQTIYFDVHLASRNSIACSAHFEIHIAQMVFIAQNI

SEQ ID NO: 3311 - DNA, 624 bp, Unknown
  Obtained from environmental sample
  misc_feature (1)..(624): n is a, c, g, or t
ttgccggcgacattgccatatacgcgggcgctgtcctgcactcccaatttcccacggctgacatatatgccgccgccgcttcccttggcgctattgcccgccaccgcggcgtttccggccaacaaacaaactccgccgttcccaatgaacacaccaccgccgtcgccgcttacgctgttacctattatagatgagtgtccctccatacggaacgtgcccccgctgtccacaaccaccacagagccgctgttgttctcgcgccccttcaaaaccacgctccccatgagaccgatcttttggttcgcccccacggtgatcaaactgccgccgttggaggtcgtgatcacacccctgccattcaaaactaccgcaatgtggaccacagagccaaacgtgtatccgtcttcaaccggtacaactatgtccctgtcggtgtctatggtaacgttgtgggccttcttgtcgccgccggttctaacgccgttcaccatatcaatccacgtctgcgcgtctgtcaccgtccaatcaaccggcgtcagaataatctttttaggttcgggcggcggcggaggcggggccgggggggccggggcggcaggatacgacgccgctccgccgccataa

SEQ ID NO: 3312 - protein, 207 aa, Unknown
  Obtained from environmental sample
  misc_feature (1)..(207): Xaa is any amino acid
MPATLPYTRALSCTPNFPRLTYMPPPLPLALLPATAAFPANKQTPPFPMNTPPPSPLTLLPIIDECPSIRNVPPLSTTTTEPLLFSRPFKTTLPMRPIFWFAPTVIKLPPLEVVITPLPFKTTAMWTTEPNVYPSSTGTTMSLSVSMVTLWAFLSPPVLTPFTISIHVCASVTVQSTGVRIIFLGSGGGGGGAGGAGAAGYDAAPPP

SEQ ID NO: 3313 - DNA, 426 bp, Unknown
  Obtained from environmental sample
  misc_feature (1)..(426): n is a, c, g, or t
gtgtatttgtgcgttgtgatttcggttgtgatacttactttgttcgtatttttttacaataaaattttctccgtgatttttgatgagaactatgccaaagcgagcggaacgaacattgaattttacaatatgctgcttgcgcttttaaccgctgttataatagttataggaatgcggattatgggtgcaatgctcatttcaagtttgattatttttcctgcgctcacctctatgcggcttttgaaaacatttaaatcggtggttgtgtgctctgcctttctctctgttatttgcttttttgtaggaatggtaatttcgtttgcctacaatgttccaacaggagctagcattgttgcggtgaatttgatttcgtttttagttttttgtttgatttcgtttttcaaaagaaaaaaggagttgctatga

SEQ ID NO: 3314 - protein, 141 aa, Unknown
  Obtained from environmental sample
  DOMAIN (1)...(135): ABC 3 transport family
  misc_feature (1)..(141): Xaa is any amino acid
MYLCVVISVVILTLFVFFYNKIFSVIFDENYAKASGTNIEFYNMLLALLTAVIIVIGMRIMGAMLISSLIIFPALTSMRLLKTFKSVVVCSAFLSVICFFVGMVISFAYNVPTGASIVAVNLISFLVFCLISFFKRKKELL

SEQ ID NO: 3315 - DNA, 495 bp, Unknown
  Obtained from environmental sample
  misc_feature (1)..(495): n is a, c, g, or t
ttgatggccgagaatcccagggacaggacgatagccgtaccccaggcgacatacgtaatggtcacgcaaagccgcaactggctgcccgacgccatcggcggcatagtatggtttggctacgacaatcccgccaccaccccccacctgcccttctatgcaggcatcacaaggatgcccgccagctttgaagttgacgggagacgcgagtacagcagggactgcgcctggtgggcgttcagaaccccaagcaaattggctcattttaggtaccaagagatgtcccttgacctaataggcgcaatgaacgcaatagaatccaaaatattcagcaaccaagcgtctatagaggccgaggccctgcgcttgcacaaagaaagccctgacaaagcaaagaagttcctaaccgactactgcataaaggaagccgaagccgccgttgacgcatactggaagctggccgacacactatggcagaagtactctggacgattctaa

SEQ ID NO: 3316 - protein, 164 aa, Unknown
  Obtained from environmental sample
  misc_feature (1)..(164): Xaa is any amino acid
MMAENPRDRTIAVPQATYVMVTQSRNWLPDAIGGIVWFGYDNPATTPHLPFYAGITRMPASFEVDGRREYSRDCAWWAFRTPSKLAHFRYQEMSLDLIGAMNAIESKIFSNQASIEAEALRLHKESPDKAKKFLTDYCIKEAEAAVDAYWKLADTLWQKYSGRF

SEQ ID NO: 3317 - DNA, 690 bp, Unknown
  Obtained from environmental sample
  misc_feature (1)..(690): n is a, c, g, or t
ttgccgcgcgttggcacaataggaaacggcttccgcgttaagcccgataccgaatgggcttattgcagttttggttttgttattctcggcgctgttatcgaaaaattgtcaggtatgtccgctcatcaatatattgaagacaatatcgcaaaacctcttggtatgaaagacacaacttttagcataacgtccgaaatggcaaaaagatatattgttacggatgaggagcttgaaaaatacgtaaacgatgcaataaacggaacctccgaacatcattggtttagagaaaaacttaaaataccttcgaccggaggcggtctggagtcgacagtttacgacctcagccgttttgggaatatgatgttattcggcggaacttttgaaggtgctcgtgtgttgggcagaaaagcagttgaaagaatgacaacgatttccagcgcccttcctaacttcacatggaaagcaaatgaaaaagaacggtactacggcataggttttgatatgcgaaacggcccagcctttacattttctcagggcacattcatgcatgaaggctcaggagcgtgttcgctgtatgttgatcccaaagaagaacttgtagttgcgtggattgttccgtttgcaaaagaaggctggttttcacgggcgttatacaacgtacagaatataatttggtccggaattaaatag

SEQ ID NO: 3318 - protein, 229 aa, Unknown
  Obtained from environmental sample
  misc_feature (1)..(229): Xaa is any amino acid
MPRVGTIGNGFRVKPDTEWAYCSFGFVILGAVIEKLSGMSAHQYIEDNIAKPLGMKDTTFSITSEMAKRYIVTDEELEKYVNDAINGTSEHHWFREKLKIPSTGGGLESTVYDLSRFGNMMLFGGTFEGARVLGRKAVERMTTISSALPNFTWKANEKERYYGIGFDMRNGPAFTFSQGTFMHEGSGACSLYVDPKEELVVAWIVPFAKEGWFSRALYNVQNIIWSGIK

SEQ ID NO: 3319 - DNA, 450 bp, Unknown
  Obtained from environmental sample
  misc_feature (1)..(450): n is a, c, g, or t
ttgggaaggcaacttaaaagaaatgcggtcaatgagatgagtataatagttgacaccagcgtctggatagacagctttaatcctaaaattaaaacgcctgaaaaagaagaattaataaaacttattcaaaatgataatcctatatatttgtgtcccgtgatttatcaggaaatattacaaggcataagggaagataaaacttttgaccgaataaaatttattttgcaacaatacaaaatgattgatatagatttaatgtatataacaaatcatgcgattgatttatacagaaatttacgaaaaaaaggaataacaataagaaaatcaattgattgtttaattgcgtcatatgcaattatagctgatatgtatctattacataatgacaacgactttacacaaatagcaaatgaaagtaaattaaaaatatataaagttgaaatgttttga

SEQ ID NO: 3320 - protein, 149 aa, Unknown
  Obtained from environmental sample
  DOMAIN (15)...(146): PIN domain
  misc_feature (1)..(149): Xaa is any amino acid
MGRQLKRNAVNEMSIIVDTSVWIDSFNPKIKTPEKEELIKLIQNDNPIYLCPVIYQEILQGIREDKTFDRIKFILQQYKMIDIDLMYITNHAIDLYRNLRKKGITIRKSIDCLIASYAIIADMYLLHNDNDFTQIANESKLKIYKVEMF

SEQ ID NO: 3321 - DNA, 774 bp, Unknown
  Obtained from environmental sample
  misc_feature (1)..(774): n is a, c, g, or t
ttgtttgccggaacatttacaaatgacccaataccaaaaaaagaagattttaatatcggcaatttgtctcaagcctatgtaagtgttatggctgtaaccataacaccgaaatatggtaaatcaagcggagacattacgatttattatcagggggtaggcagcacaacttacgcaaaaagtacaacactcccaacaaatatgggtacatacgctgtaacctttgacgtagcggcggcaagcggggggtggaaagcggcatatggattgtcagccggaacgcttacgattaggcgcttgtacgtcagcgaattatcagcatatttatccggtaaacccaacaatactaaagacaatccctatattataaagattaatattgttaatgctacagatttttcaactctaaatacaacgcttaacgacatggcgagcaaattcgtcactcttgacttttccgaaagtaccataaccagtattgcgaataacgcttttaacgattgttcaaaccttatcggtgtgacaatgccaaatagtgttaccagtattggagattttgctttttttacttgctccaatcttctcagtgtgacaatgccaaatagtgttaccagtattggagaacgtgcttttatgaattgctacagccttaccagtgtgacaatatcgaacaacactaccagtattgggtgggctactttttcccattgcatcagacttaaaacacgtaacataccgaacagttgtaccagtattggagattnacgctttttctaa

SEQ ID NO: 3322 - protein, 257 aa, Unknown
  Obtained from environmental sample
  misc_feature (1)..(257): Xaa is any amino acid
MFAGTFTNDPIPKKEDFNIGNLSQAYVSVMAVTITPKYGKSSGDITIYYQGVGSTTYAKSTTLPTNMGTYAVTFDVAAASGGWKAAYGLSAGTLTIRRLYVSELSAYLSGKPNNTKDNPYIIKINIVNATDFSTLNTTLNDMASKFVTLDFSESTITSIANNAFNDCSNLIGVTMPNSVTSIGDFAFFTCSNLLSVTMPNSVTSIGERAFMNCYSLTSVTISNNTTSIGWATFSHCIRLKTRNIPNSCTSIGDXRFF

SEQ ID NO: 3323 - DNA, 681 bp, Unknown
  Obtained from environmental sample
  misc_feature (1)..(681): n is a, c, g, or t
gtgagccagagcgtcgccgccttccacaccatccttccctggtgcttcatcaccaaattccacgagggggtcgtcgtccaaaaggacggcatcctccagaggagctttgcctaccgcgccccagacgccgactccctaagcggcttagagataaacgccctttccctccgccttgacggcttcgcgaagcgcctcggggcgggctgggcagtctttgtcgaggcccaaaggtattccttgcaggactacccgaagagcctgaagttttcttccgcgttcgacaacctcgcttcgtatctaatcgagagggagcgcgaggaatcctttaccgccgcagggaagcactacgattccagctactacataacgcttgcatggaagcctcccgtcgagggagccaaaaagctggccgcgatgttcgtgcagggcggcagggaggacggctcaaaaaccatgagggaaaacgtcgagcattttgtcggcgagaccgattccgccatggggctgctggcgaacaacgtgcgcgtcttcccgcttagtaacgccgagactttggcctacctccattcgacggtttccttcggccgccaccccatccgctttccgcacacgcagatactcctggacaggatccttcccgactgcgagctggccaacgaccttatggccaacaagctttaa

SEQ ID NO: 3324 - protein, 226 aa, Unknown
  Obtained from environmental sample
  misc_feature (1)..(226): Xaa is any amino acid
MSQSVAAFHTILPWCFITKFHEGVVVQKDGILQRSFAYRAPDADSLSGLEINALSLRLDGFAKRLGAGWAVFVEAQRYSLQDYPKSLKFSSAFDNLASYLIEREREESFTAAGKHYDSSYYITLAWKPPVEGAKKLAAMFVQGGREDGSKTMRENVEHFVGETDSAMGLLANNVRVFPLSNAETLAYLHSTVSFGRHPIRFPHTQILLDRILPDCELANDLMANKL

SEQ ID NO: 3325 - DNA, 429 bp, Unknown
  Obtained from environmental sample
  misc_feature (1)..(429): n is a, c, g, or t
gtggacgttgaagtagccatcgttgacggcaaataccaccctgtggattcttctgaactttcctttaagcttgcctccagaaacgcgttccgcgaagcaatgcgccaggcgaacccgaccctgcttgagcccattatgagcctcacggtctttgtggaagacaagtacttaggcgatgtgatgagcgatctctcaagcaagcggggcaagatattggggcaggattcatccggcggcatagcggaaattcgcgccgaggtaccgcaggcggaactgttgagctactccattggtttgcgtgcaataacttcgggcaccggttccttcggcgtgtccctcgatcactacgcgccgatcgcaggccgcatcgccgaagacgtaatcaaggcagcggaggccttcaagatccaggaagaagaagacgcctga

SEQ ID NO: 3326 - protein, 142 aa, Unknown
  Obtained from environmental sample
  DOMAIN (40)...(127): Elongation factor G C-terminus
  misc_feature (1)..(142): Xaa is any amino acid
MDVEVAIVDGKYHPVDSSELSFKLASRNAFREAMRQANPTLLEPIMSLTVFVEDKYLGDVMSDLSSKRGKILGQDSSGGIAEIRAEVPQAELLSYSIGLRAITSGTGSFGVSLDHYAPIAGRIAEDVIKAAEAFKIQEEEDA

SEQ ID NO: 3327 - DNA, 885 bp, Unknown
  Obtained from environmental sample
  misc_feature (1)..(885): n is a, c, g, or t
atgacttcttacaaaggcgaagatgctgtcgctttctttaggcagctccccaacggctggtatctgggcgttgatttcccgagactcccctactataaaagcgtaatcaatctggctgtgattctcagtatattgggcatagcgcttgcgtctgttttgagctttgtccttattcgcgttgatgccgccagaaacaaatccgacatggaaagcaggtacaaaagcgcctttctggcaaacatgagccacgagatacgcacgcccatgaacgcaattatcggcatgacagagcttcttgccaatgaacagttgagtgaacgccagatgggtttcattgacgatatttgggtgtccgcccattcacttctatctattataaacaacatactggatctttcaaaaattgaatccggaaaattcacgcttatccctgtaaactacgattttcatgcgcttgttgataatatcgtttccatgttcacttatgtggcgcaaaagaaaggcctggaattcaagtttgaaagcacagtgggcttacctgaatgtctttacggcgatgatttgcggctcagacaggtcctgactaatatctgcggaaacgccgtcaattataccgaaaagggacatgtcaaattaaaaatatccatatcaaacgccaatttagtatttgagatttcggacaccggaatgggaatccgtaaggaagacatatacagattatttgacgcttttgagcgcatggatatagaaaaaaaccgcaacataaccggaaccggcctggggcttcccataagcaaatcttttgtggaaatgatgggcggctacatactggtggaaagcgagtatgggcggggaagcgttttacagttgaactcggccatctga

SEQ ID NO: 3328 - protein, 294 aa, Unknown
  Obtained from environmental sample
  DOMAIN (73)...(138): His Kinase A (phosphoacceptor) domain
  misc_feature (1)..(294): Xaa is any amino acid
MTSYKGEDAVAFFRQLPNGWYLGVDFPRLPYYKSVINLAVILSILGIALASVLSFVLIRVDAARNKSDMESRYKSAFLANMSHEIRTPMNAIIGMTELLANEQLSERQMGFIDDIWVSAHSLLSIINNILDLSKIESGKFTLIPVNYDFHALVDNIVSMFTYVAQKKGLEFKFESTVGLPECLYGDDLRLRQVLTNICGNAVNYTEKGHVKLKISISNANLVFEISDTGMGIRKEDIYRLFDAFERMDIEKNRNITGTGLGLPISKSFVEMMGGYILVESEYGRGSVLQLNSAI

SEQ ID NO: 3329 - DNA, 663 bp, Unknown
  Obtained from environmental sample
  misc_feature (1)..(663): n is a, c, g, or t
gtgccggttacgggccgtcctgcgggctggtgcgactgcattgcccgtcagtggccggttgacggcgttgtcggggaaaacggcgcgtttgccttttgggaagagccgcatgaagccggacagtctaaccatcaaatccttaaagctgcatatcaccccaatgccgtaaaaaacgatcatccggcactcaggaaggtgcgggccatcgccctcgccgaagtgcccggcctgcgcgacgccaaagaccagtttgcccgtgttttcgacatcgccctggattttgccgaggaagagcctgtgcttccgttcagcgcggcggaaaaagtaaaggaaatatccattgcggaaggggcggtggcaaaaatatcatcaatacacgtcaatatctggatgggtgattacgacaagctttccatggccgagcgtttcctgaaggaacgattcggctggcagggcgatttgacggaagttgtttttgccggcgactctcccaatgacgagccgatgttcgcccgtttttccctttcgtgcgccgtcgccaatatccgcgattttctgcatctcataaaagacaagccggcattcgttgcctcaaaggaaggcggggaggggtttgcggaaattgcggaagcgctgctggagcagataacagataacagataa

SEQ ID NO: 3330 - protein, 220 aa, Unknown
  Obtained from environmental sample
  misc_feature (1)..(220): Xaa is any amino acid
MPVTGRPAGWCDCIARQWPVDGVVGENGAFAFWEEPHEAGQSNHQILKAAYHPNAVKNDHPALRKVRAIALAEVPGLRDAKDQFARVFDIALDFAEEEPVLPFSAAEKVKEISIAEGAVAKISSIHVNIWMGDYDKLSMAERFLKERFGWQGDLTEVVFAGDSPNDEPMFARFSLSCAVANIRDFLHLIKDKPAFVASKEGGEGFAEIAEALLEQITDNR

SEQ ID NO: 3331 - DNA, 798 bp, Unknown
  Obtained from environmental sample
  misc_feature (1)..(798): n is a, c, g, or t
atggaacgcctctccgagataacccaaaatgtcgcgaagacggccaatgtcgcggtacccggcaatatgccttacgtgggaagccacgcctttacccacaaggccggaatgcacgcggacggaattttaaaggtgagcaagtccttcgaacatatcgatcccgccctcgtggggaacgaccggcatataataatgagcgaagtcggcggtcgctcggcgatagcgcagagggcgaagaagatcgatccttccataacaagggatcaccccgtgacaatcgccctcgcgcgaaatttaaaaaaccttgaggcggaaggctggcagtttgagggcgcggacggcagtttcgaccttatggtccgcagagagcttggccgctacaagccgctgtttaagattgaggcttaccgcgtggtaagcgaacaccccaccggcgagacaatcgcctgttcccacgcctgggtcaaagtgcttgtcgacggccaggaggaaatagccgccgcggagggagacggtcctgtcaacgcgatggacggcgccctgcgcagggcattgaaacatttttacccggaactgcaggaggtccgccttaccgattacaaagtccgcgtaatcgacggcaacgccgcgaccgcggcaaaggtgcgcgtgcttatcacctcctccgacggcaggcaaacatggacaaccgtgggggtttccgaggacatcatagacgcgagccgcagcgcccttgtggattcaatagaatacaagctgattgacgatatagaacgccgctttaaagcgtacctttag

SEQ ID NO: 3332 - protein, 265 aa, Unknown
  Obtained from environmental sample
  DOMAIN (110)...(253): LeuA allosteric (dimerisation) domain
  misc_feature (1)..(265): Xaa is any amino acid
MERLSEITQNVAKTANVAVPGNMPYVGSHAFTHKAGMHADGILKVSKSFEHIDPALVGNDRHIIMSEVGGRSAIAQRAKKIDPSITRDHPVTIALARNLKNLEAEGWQFEGADGSFDLMVRRELGRYKPLFKIEAYRVVSEHPTGETIACSHAWVKVLVDGQEEIAAAEGDGPVNAMDGALRRALKHFYPELQEVRLTDYKVRVIDGNAATAAKVRVLITSSDGRQTWTTVGVSEDIIDASRSALVDSIEYKLIDDIERRFKAYL

SEQ ID NO: 3333 - DNA, 486 bp, Unknown
  Obtained from environmental sample
  misc_feature (1)..(486): n is a, c, g, or t
atggaacttgccggggagcttgttaccgggcgcttctttagcggcatcgcctcgctgcaattcgcctcgcccagaatagctgcggaactggaagaagcggaagcggagcgcggcatctactggatgaacgcggcggatcccgcaagcccggcgggactggcggttgagggtgttattcgcaacgcggagcaaagcgctccggctatccgcagaatggcgtcttccaggctttgcttccggggcgcggaactactcgccgtttcaaaccgaagctgccgcgagctggaaatttttattccaccggatgatagcgacatagtggaagcgctcgaattcgtaaaagtctcacgaacaagaaaagtacacagggaaaataaaatcattattgaaaaaataaacggtgcttccgcggcctcaagcgcgtattcagaagctcttgcctctaacggttttgtcaaagacaggggaagattggttttatggtga

SEQ ID NO: 3334 - protein, 161 aa, Unknown
  Obtained from environmental sample
  misc_feature (1)..(161): Xaa is any amino acid
MELAGELVTGRFFSGIASLQFASPRIAAELEEAEAERGIYWMNAADPASPAGLAVEGVIRNAEQSAPAIRRMASSRLCFRGAELLAVSNRSCRELEIFIPPDDSDIVEALEFVKVSRTRKVHRENKIIIEKINGASAASSAYSEALASNGFVKDRGRLVLW

SEQ ID NO: 3335 - DNA, 936 bp, Unknown
  Obtained from environmental sample
  misc_feature (1)..(936): n is a, c, g, or t
atgatcgcgagtcggcgtccttctttgcacataggccaaacttacgtctttgatccttttacaaaaggttttgtcgaaattcttgccgcggagcaaacccttgaacattcaggctggtacgaaggaaccgccgacgcaatccgcaagaatcttccccatttcaggacgcaaaacccctcatattacgttattttatcgggcgaccagctttacagaatggatttagaggaagtaatgaaaaaacacatcaattccggagccgccatttccatcgcgtgtacgggcgttaccagggaaagcgcaagcggtcttggcattcttaaagttgacaaatccaaccaaattaccgaattcttggaaaaacccggtcctacaaaggatatttccaatttcagggcgccgcaggaattacttacggaaaaaaacaaggatgactgctatcttgcctctatgggaatttatgtttttaacgccaaaacaatggaagaatgcctggcaaacgatcttaccgatttcggaaaagaaataatcccctcggcaatcagcaggttaaaggtaaacgcctatctttttgacggttactgggaagatataggaacaataagaaatttttatgacaccaatcttgaacttacgacattaaggccgcgcttcgatttttatgacgagcctaaaccgatttatacccacatgagaaaccttccgccctcaaaaatgaacttttctaacatgaaccagtccattgccgccgaaggctgtattattaccaacgccaatattaccaattcaattgtcggcatacgtacaatcatagaaacaggctcaagcctgaacggcgtagtctgcatgggcgccgactattatgaaacggaagcgcaaaaaacgaaaacgccgaaatcagaatcccccacgttggaatcggacgcggcgcgatag

SEQ ID NO: 3336 - protein, 311 aa, Unknown
  Obtained from environmental sample
  DOMAIN (1)...(214): Nucleotidyl transferase
  misc_feature (1)..(311): Xaa is any amino acid
MIASRRPSLHIGQTYVFDPFTKGFVEILAAEQTLEHSGWYEGTADAIRKNLPHFRTQNPSYYVILSGDQLYRMDLEEVMKKHINSGAAISIACTGVTRESASGLGILKVDKSNQITEFLEKPGPTKDISNFRAPQELLTEKNKDDCYLASMGIYVFNAKTMEECLANDLTDFGKEIIPSAISRLKVNAYLFDGYWEDIGTIRNFYDTNLELTTLRPRFDFYDEPKPIYTHMRNLPPSKMNFSNMNQSIAAEGCIITNANITNSIVGIRTIIETGSSLNGVVCMGADYYETEAQKTKTPKSESPTLESDAAR

SEQ ID NO: 3337 - DNA, 834 bp, Unknown
  Obtained from environmental sample
  misc_feature (1)..(834): n is a, c, g, or t
atgacgcttataaactgtattgcgggagctgtttatactcaaagcctttctatccgagataaaatacaagcttacggaatgacggctatttttctaatattgctttataattcgcccgcggcacttgttttatactggacgctcaataatgttttttcgcttgtaaaaaatattttttataaaataaaaaatccgttaaaagttttatatattatcctctgccttgttttttcactgtttattttttatttattatttatgatgaagacacgagtattaaagttaaggattcttgtcgcgtttattatatcgctattttattttatgccgttatttcttaaaggttttgattatctgtacagacgtatttttataagattattccagaacagaaaaaacatggttatccttttgtttctctcctgttttacgctgttcctgctcgcgggtatgtatatcccatcttccgttatcgcgtcctcgcccgatgaattctgctatatcgaaggccatgcttctccttttaactatattattcattcaaatttattctttttcgggttcttcattatttggcccgtaagtatattctttcttttttctgataaaataaaatctttattgattttcattcttgtttttctcgcgttgatatttacaattaatactgtcgctttcagcgggaactacggcacaatgaataacctttttaattttaatacaaccgccgtatttggaattggctttattcaggctgttttttcaataattaccgcgttatttatattaatcattttgttttttattattggcaaatacaagatcagctattaa

SEQ ID NO: 3338 - protein, 277 aa, Unknown
  Obtained from environmental sample
  misc_feature (1)..(277): Xaa is any amino acid
MTLINCIAGAVYTQSLSIRDKIQAYGMTAIFLILLYNSPAALVLYWTLNNVFSLVKNIFYKIKNPLKVLYIILCLVFSLFIFYLLFMMKTRVLKLRILVAFIISLFYFMPLFLKGFDYLYRRIFIRLFQNRKNMVILLFLSCFTLFLLAGMYIPSSVIASSPDEFCYIEGHASPFNYIIHSNLFFFGFFIIWPVSIFFLFSDKIKSLLIFILVFLALIFTINTVAFSGNYGTMNNLFNFNTTAVFGIGFIQAVFSIITALFILIILFFIIGKYKISY

SEQ ID NO: 3339 - DNA, 819 bp, Unknown
  Obtained from environmental sample
  misc_feature (1)..(819): n is a, c, g, or t
atgtcgcttgaggcggttgttaattcaatctgcgcttccgtcgtcaagagggcggaaaacggcaacaactacggaatagtgcttatccccgaaggcctggtggaattcattccggaaattaaaagcctgatcaacgaacttaacgataccattgcgcataacgaagctgaattttcaaaactcgaagcgtacgcggaacagatcgcctggttatataaacatatctccgcggcttcatataatgtccttcattccctgccccatgaaatcggcagggaatttttgatggaccgcgatccgcacgggaacgtgcaggtttcacttatcgaaacggaaaaactcctgatcggcatggtgaagaaaaaactccatgagctgaagaaaacgggagcctataaaggaaaattcaccgcccttgcccatttcttcggctatgagggaaggtgcgctttcccgtccaactttgacgccgattactgttattcgcttggttacagcgcctttgtgttaattgccgccggatttaccggctatctttccagcgtgcgcaacctgaccgccaaagcttccgaatggattgccggcggcgttcccattaccatgatgatgaacatcgaacagcgccacggcgaggaaaaaccggtcatcaagaaagcccttgtcgaacttgacagcaaacccttcaaggcctttaaatcaatgcgggacgaatgggcggtaaaaaccagctttacggttccaggctccatacagtactttggcccgcccgaagtctgcgatgaaccgacaataacactaaaactcgagaaagggatatag

SEQ ID NO: 3340 - protein, 272 aa, Unknown
  Obtained from environmental sample
  misc_feature (1)..(272): Xaa is any amino acid
MSLEAVVNSICASVVKRAENGNNYGIVLIPEGLVEFIPEIKSLINELNDTIAHNEAEFSKLEAYAEQIAWLYKHISAASYNVLHSLPHEIGREFLMDRDPHGNVQVSLIETEKLLIGMVKKKLHELKKTGAYKGKFTALAHFFGYEGRCAFPSNFDADYCYSLGYSAFVLIAAGFTGYLSSVRNLTAKASEWIAGGVPITMMMNIEQRHGEEKPVIKKALVELDSKPFKAFKSMRDEWAVKTSFTVPGSIQYFGPPEVCDEPTITLKLEKGI

SEQ ID NO: 3341 - DNA, 924 bp, Unknown
  Obtained from environmental sample
  misc_feature (1)..(924): n is a, c, g, or t
atggcggaactccggaacactttttctccgagttccctttgttaccacgtaaacggcaattacgaccgttccggggacggagttttcgattccagctacatttacaggataaacggccagaactcccttgaatcgcaggcccaggtcggccttgagggagaaattaccctttcgggcgcggacggccaggtgcgcgttccgtattattccaccgacacggtaatagatattgtaacccggattaataactcaggcgcggaagtagtggcgcggcttgatcgggacggcaggctttccctcaagggaacgccaacggaacctatcgaagggatcaggcaaaatccagatttcgttatccgccatgtggaagattcaggctatttccttaccggatacgcggggatgctcaacgcatccgggcccgagggcgcttttgactggggccgggcaaacgcggtaacaagcctccgaggcggggcggaagactacgcgctcgcgccggtcgcccacccttccggctggatcgaggtgaacccggcgctgcttaaagacccaacctcggttgccgcgggcttcggctataacggcagggaggcaaatcccggcaacggcgacgccgccgcggccatagcctcgatcaggaacagttccgtaatggtaggccgcctttccacatttgacgactatttcgccaattccgtgggccgcatatcggttttgcacgaacagtcgaagatagctttggagacggaaaacagaatgatgaagaatttacacgaaatgcgccagtcaatttccggcgtcaatgttgacgaggaactggcaaacatgatccgttaccagcacggctataacgctgcggctcgttttatcacaaccgttaattccatgcttgataccctttatcaccgcatgggcgtttag

SEQ ID NO: 3342 - protein, 307 aa, Unknown
  Obtained from environmental sample
  DOMAIN (54)...(104): Flagellin hook IN motif
  misc_feature (1)..(307): Xaa is any amino acid
MAELRNTFSPSSLCYHVNGNYDRSGDGVFDSSYIYRINGQNSLESQAQVGLEGEITLSGADGQVRVPYYSTDTVIDIVTRINNSGAEVVARLDRDGRLSLKGTPTEPIEGIRQNPDFVIRHVEDSGYFLTGYAGMLNASGPEGAFDWGRANAVTSLRGGAEDYALAPVAHPSGWIEVNPALLKDPTSVAAGFGYNGREANPGNGDAAAAIASIRNSSVMVGRLSTFDDYFANSVGRISVLHEQSKIALETENRMMKNLHEMRQSISGVNVDEELANMIRYQHGYNAAARFITTVNSMLDTLYHRMGV

SEQ ID NO: 3343 - DNA, 441 bp, Unknown
  Obtained from environmental sample
  misc_feature (1)..(441): n is a, c, g, or t
gtgaaagtggcgaccaaggcctacggcgtgattgatgtggacgaacggcagaaaattgcctttccccaggggcttttcggctttgagagtttcaaagattatgtgcttttggacgcggaacaacagcctttttactggctccagtcggtggatatggagcagattgcctttgtgctggtgaatccttttcttttccggccggattatgagattaatatcgaaaatgaagagcttgcggaaattggcatcggttccccggagaaggcgctgatctttgtgattgttaccattccacccgatggccgccccatgaccgcgaatctgcagggcccgctggtcattaaccgggacaccagggcgggcaagcaggccgtcctgactgatccccgctggaagaccaagcatgatattctggccgagttaggcgaaacgaggaagtaa

SEQ ID NO: 3344 - protein, 146 aa, Unknown
  Obtained from environmental sample
  DOMAIN (17)...(140): Uncharacterized BCR, COG1699
  misc_feature (1)..(146): Xaa is any amino acid
MKVATKAYGVIDVDERQKIAFPQGLFGFESFKDYVLLDAEQQPFYWLQSVDMEQIAFVLVNPFLFRPDYEINIENEELAEIGIGSPEKALIFVIVTIPPDGRPMTANLQGPLVINRDTRAGKQAVLTDPRWKTKHDILAELGETRK

SEQ ID NO: 3345 - DNA, 384 bp, Unknown
  Obtained from environmental sample
  misc_feature (1)..(384): n is a, c, g, or t
atggaaaacaacgctcccaactggagcaattcagccaaggtgcatggcggctccgtatttgacatggtgatccgtntgcgcgacgccatgttccggggagatcaggactttatcggcagccagggcattggcggcattgacctggccctgaacaacgttgttaacagaatggccgaaattggctcacggcaggaacgggccgaaatggcatggtttaagctgaaccgggaaatccccgatgttaccagtatgcttaaccgcgaaaccgggcttgatatggccgatgccgccacagaactcaagatgatggaatttgcccatcaggcaacgctccagacggcggcgcgggttataccgcagacattgcttgattttttaagataa

SEQ ID NO: 3346 - protein, 127 aa, Unknown
  Obtained from environmental sample
  misc_feature (1)..(127): Xaa is any amino acid
MENNAPNWSNSAKVHGGSVFDMVIRXRDAMFRGDQDFIGSQGIGGIDLALNNVVNRMAEIGSRQERAEMAWFKLNREIPDVTSMLNRETGLDMADAATELKMMEFAHQATLQTAARVIPQTLLDFLR

SEQ ID NO: 3347 - DNA, 615 bp, Unknown
  Obtained from environmental sample
  misc_feature (1)..(615): n is a, c, g, or t
atggccgagatatccgctaaccagtattgcggaaatggcacagtaaaaaattatgattttattattgacactcgtgatggcaaaaaatataaaatcaccgtaataggtacccaaacttggatatcagagaatttgaactataatacaagtgatagcaaatgttatgaagatcaagaaagcaattgccgtaaatacggcagactttatacttggacaacggctatgtctgtatgcctcacaggttggcatattcctagtaatgaggattggaatgttttgatgaaattcgttgatccgagttgttctgacaatagcggttgcataggcgcgggaaccaagttgaaagctagcaacggttggaattcatatagtggaattcccgcaggtacggacgatttcggtttttctgccttgcctggcggctaccgctatagaagaaatggtagcattatctatatcttcacaaatgtcggccacgacggctactggtggagtgccagcgagagcgatagcgacggcgcctaccaccggtatatgagctacaccagcgagggcgcctactacagccgcagccttaagaactacttgttctctgtccgttgtctgcaggactga

SEQ ID NO: 3348 - protein, 204 aa, Unknown
  Obtained from environmental sample
  misc_feature (1)..(204): Xaa is any amino acid
MAEISANQYCGNGTVKNYDFIIDTRDGKKYKITVIGTQTWISENLNYNTSDSKCYEDQESNCRKYGRLYTWTTAMSVCLTGWHIPSNEDWNVLMKFVDPSCSDNSGCIGAGTKLKASNGWNSYSGIPAGTDDFGFSALPGGYRYRRNGSIIYIFTNVGHDGYWWSASESDSDGAYHRYMSYTSEGAYYSRSLKNYLFSVRCLQD

SEQ ID NO: 3349 - DNA, 591 bp, Unknown
  Obtained from environmental sample
  misc_feature (1)..(591): n is a, c, g, or t
ttggtatactcaggcggcgcgccttattccattagcacgattcccgccggcggcgcgcaggtaacaagcgacatttcaataataaaaaacatttccaatgaagttgcggagaaaataaaaattgaagcgggatgctgctgggaaccgtttctggaagacgatgatgaaatcatcgttcctggagtcggagggagggcgcctttggccatacccagatcgcagatcctggctatcattcgcccaagaatggaggagacttttaagctggtcaaagagaaactggacaagctttcattttccaggcccctgggcgggggagttgtgcttacaggcggcggctcggaacttttgggagcggcggatttggccgcccatgtttttaatctgcctgtgcgggtaggaattcctctgcctgtaggaggtcttgttgaggattatcgaagccccgcctttgcgaccgccgtggggttagcgcttgaaggatatgatcgcagacaaaaagacggaggcgttaacggcgaatccagagacaagggggggccaagggtttgggagaagctgaaagattggtttgaaaaagaatttttttag

SEQ ID NO: 3350 - protein, 196 aa, Unknown
  Obtained from environmental sample
  DOMAIN (1)...(157): Cell division protein FtsA
  misc_feature (1)..(196): Xaa is any amino acid
MVYSGGAPYSISTIPAGGAQVTSDISIIKNISNEVAEKIKIEAGCCWEPFLEDDDEIIVPGVGGRAPLAIPRSQILAIIRPRMEETFKLVKEKLDKLSFSRPLGGGVVLTGGGSELLGAADLAAHVFNLPVRVGIPLPVGGLVEDYRSPAFATAVGLALEGYDRRQKDGGVNGESRDKGGPRVWEKLKDWFEKEFF

SEQ ID NO: 3351 - DNA, 921 bp, Unknown
  Obtained from environmental sample
  misc_feature (1)..(921): n is a, c, g, or t
atgcagcattgcacaggagttgcaagcgggttagatgcactaacattaatttntggtgcttataaaattcttgggaaattaaaggatggcgacaatgttatagttccagcgaacacatatatagcttccattatggcaatttcaaaaaacaacttaattcccgttttagttgaaccaaacgaagaaaccttcaacattaatttaacccaaaaagcaaaagccattttgagtgtaaatttatacggcaggcaagcagaagttgttaaggaaaaaaatattctattaattgaagactgtgcccaaagcgcaggcataaaaccaattggcgatgccgccgccttcagtttttaccccactaaaaatttgggtgcacttggagatgggggagcagttgtttccaacgatggagaattgaacgatgttattagggcacttggaaactatggctctcaaaaaaaatacatcaacgattatttgggatttaactcccgcctagacgaaattcaagcggcagcactcagtgtgaaattgcgggggctaaatgaagacaataaaaaacgctgtgaaatagcaatgcgctatattgcagagataaaaaatcctgatattattttgccacaaaaagagggaaccaacgtttggcatttattcgttatccgttgcaaaaatagagatgccttgcaaaagcatttatttgaaaacggaatagaaacaatgatccactatcccattcctcctcatttgcaaaaagcatacaaaggtggaaatttactttacgataaactcccaataacggaaaagcttgcaaacgaggttttgagcctgcctattcaccaagctatgacagaagaggaaattgaaatggttattaattgtttatccaagcctctccagagccagaaatcgagcctctctcgataa

SEQ ID NO: 3352 - protein, 306 aa, Unknown
  Obtained from environmental sample
  DOMAIN (1)...(294): DegT/DnrJ/EryC1/StrS aminotransferase family
  misc_feature (1)..(306): Xaa is any amino acid
MQHCTGVASGLDALTLIXGAYKILGKLKDGDNVIVPANTYIASIMAISKNNLIPVLVEPNEETFNINLTQKAKAILSVNLYGRQAEVVKEKNILLIEDCAQSAGIKPIGDAAAFSFYPTKNLGALGDGGAVVSNDGELNDVIRALGNYGSQKKYINDYLGFNSRLDEIQAAALSVKLRGLNEDNKKRCEIAMRYIAEIKNPDIILPQKEGTNVWHLFVIRCKNRDALQKHLFENGIETMIHYPIPPHLQKAYKGGNLLYDKLPITEKLANEVLSLPIHQAMTEEEIEMVINCLSKPLQSQKSSLSR

SEQ ID NO: 3353 - DNA, 807 bp, Unknown
  Obtained from environmental sample
  misc_feature (1)..(807): n is a, c, g, or t
atggatgacgcttattttgacgttataaaaaatcattttaatattatcactcccgaaaacaatcttaagccatcttcgctgacatcaaaccgtggtggcgcgtacaactggtcgtatgcggatcaaatggtaaatcgggcgttggaaaacggaatacctgttcatgggcattgtatggtatggcatgattggactcccgaatggatgaccaaaggaacaagagcggaagtggaggacaacctaaaaatttatattaccgacgtattaatgcattatcacggtaagatttattcatgggatgtggtaaacgaggtaatgaaggattttccttccgccgccgatgtcactggagactggaaaaagtgtctgcgtaacaattccccatggtacaaagcgttaggcgcaagctacatcgaaacagccttccgcgccgtgcgggaaaccgatcccgatattactatatattataatgattatttctgttataatgatctgtataaaattgaagcggtatataaaatgattaacgacataaataatcggtacaaaagagaaacaggacagaatagaaaccttatcgaagggttgggtattcaagctcatcatcaagttaaatattttgatgaaaggaaagtacgcttgcctctggaaaagtttgcgtctctaaatattgaattgtcaataagcgaactggacgtaaccgcctctggttatgacgaaggcgagggaaaggacatcatcatgtccgaaaatgacgctgcgttacaagccggtatatacgctaagngttttcagaatataccgtga

SEQ ID NO: 3354 - protein, 268 aa, Unknown
  Obtained from environmental sample
  DOMAIN (1)...(262): Glycosyl hydrolase family 10
  misc_feature (1)..(268): Xaa is any amino acid
MDDAYFDVIKNHFNIITPENNLKPSSLTSNRGGAYNWSYADQMVNRALENGIPVHGHCMVWHDWTPEWMTKGTRAEVEDNLKIYITDVLMHYHGKIYSWDVVNEVMKDFPSAADVTGDWKKCLRNNSPWYKALGASYIETAFRAVRETDPDITIYYNDYFCYNDLYKIEAVYKMINDINNRYKRETGQNRNLIEGLGIQAHHQVKYFDERKVRLPLEKFASLNIELSISELDVTASGYDEGEGKDIIMSENDAALQAGIYAKXFQNIP

SEQ ID NO: 3355 - DNA, 966 bp, Unknown
  Obtained from environmental sample
  misc_feature (1)..(966): n is a, c, g, or t
atgacaaaaaccatgaaagatcttatcgctaacgagatatatcccaagtatgacaggtcggatttctatgaacgtgtcaagattgtcaacaagtacggaggctatgttctggcaagcccctggtcgcctccggctgaatggaaaagcaataacagcgttattggcggcggcagtttcttaaaaaaggaaaactacgctgacttcgcaaactatctcagaaggtactgcgaaatcatgtatgaaaacggcgcccctatttacgcggtttccctgcaaaatgaattttcctatcaagcaacatgggacggttgtttctatacaccccaagaaaacagggatttctggaaagcgcccggtaccggccgttttacccagggcgtgcccggatacggcggcggcagggcaattccgtctgtaatgatcatgggcggcgagtcgcataacgaaattgacaggcaggatctggctctacaggatcctgtatcaagggagtgcattgatattgtaggccgccatatctacggcaacaacagaaatccaagcccttatcctcttgctacaaaccccaaattctacaccgacccatctgatcctagatatgacgccaaggaggtctggatgaccgaaaatgatcagcacagcgacgcgtcaggttttgaaaatgattcaacatggagttatgtatgggaattcatgaatacggttgatttgacggtaaggttaaataacgaaagcggttttatctggtggctgattaaacgtttttacagcatgatgggcgaaggtgattacggtactacaaacggcgtcattctgccgcggggtcacggtctgtcccattatgccaagtttgccaaagaaaccggaagagtcggagccgaaataaccggtgtgttggctaacaatacagctataaccagcgccactgtaaccagtccagtaacgttttgggcggcacttcgataa

SEQ ID NO: 3356 - protein, 321 aa, Unknown
  Obtained from environmental sample
  misc_feature (1)..(321): Xaa is any amino acid
MTKTMKDLIANEIYPKYDRSDFYERVKIVNKYGGYVLASPWSPPAEWKSNNSVIGGGSFLKKENYADFANYLRRYCEIMYENGAPIYAVSLQNEFSYQATWDGCFYTPQENRDFWKAPGTGRFTQGVPGYGGGRAIPSVMIMGGESHNEIDRQDLALQDPVSRECIDIVGRHIYGNNRNPSPYPLATNPKFYTDPSDPRYDAKEVWMTENDQHSDASGFENDSTWSYVWEFMNTVDLTVRLNNESGFIWWLIKRFYSMMGEGDYGTTNGVILPRGHGLSHYAKFAKETGRVGAEITGVLANNTAITSATVTSPVTFWAALR

SEQ ID NO: 3357 - DNA, 573 bp, Unknown
  Obtained from environmental sample
  misc_feature (1)..(573): n is a, c, g, or t
ttgcaatttacttttaacgaatatcaaacatacatagaaataagcggggaaattcccgctattaaaaatatttctcttcaacttggtctgcaaaccgacagtccctcttttaaacctttaatcatcgccgatgaaaataccgcctacatcgccgccaaaatatcaggcggcgttgactacccttgcgtcattcttaaaagcggcgaagaaaacaaaacgtggcagtccgtagaaacaatactctgcgccgccaacaaagccggacttggcagagacggaatttttatcgccgtcggcggcggagtcatcggagaccttgccggttttgccgcgtcaatttatatgcgcggctgtaagtttgcgcttgtatccactaccctgctcagcatggttgacgcttcagtcggcggtaaaaccggatttgatcttttcggtataaagaacctgataggcagtttttatccggcgcagagcgtatacattccgttaaacgctctttccacactgccgcaggcggaaattaaaagcggtatggcggaacttataaaaaccngccgtcctttgcggcgatga

SEQ ID NO: 3358 - protein, 190 aa, Unknown
  Obtained from environmental sample
  DOMAIN (26)...(190): 3-dehydroquinate synthase
  misc_feature (1)..(190): Xaa is any amino acid
MQFTFNEYQTYIEISGEIPAIKNISLQLGLQTDSPSFKPLIIADENTAYIAAKISGGVDYPCVILKSGEENKTWQSVETILCAANKAGLGRDGIFIAVGGGVIGDLAGFAASIYMRGCKFALVSTTLLSMVDASVGGKTGFDLFGIKNLIGSFYPAQSVYIPLNALSTLPQAEIKSGMAELIKTXRPLRR

SEQ ID NO: 3359 - DNA, 660 bp, Unknown
  Obtained from environmental sample
  misc_feature (1)..(660): n is a, c, g, or t
ttgcgctcactgactgatttttacggttcattgatgaataaaaggactgtattatttgcagaccgtaaagccggcggcgaagagttaaaaaatattgacatgcaatcgaagttgaaacagcttgaggcgaatataatttacaaatggcgcaatgccgtccttgaggacttgaaaaataatccgttgacagaagttgaaatcgggacatgtaatgatgataatattcaacacgatgaccctgtaatgtatggtacaactttactggccgcccttgtttcgaattgtctttggtttgtaatacatattggcgacggtttatgcgttgttttggaaaatgaagatagaatatattgtcccatacaggatgatgaacgtttagcgtttggcagaacgacttcattatgtgataatgactcaattaataattttcgtgaaagttatgggctttcccaaatcattgggctaaccgtagctacggacggaatggctgattcatttgaaccggataaatatctacaatttaataaagaactgtacggcaaattttctcattttcctgtaaaagcagaagaggaattaaaggattttctgccaaaaatatccgagcgcggcagccgtgatgatatttcaattgcgggtatattcagaaaaaggaattaa

SEQ ID NO: 3360 - protein, 219 aa, Unknown
  Obtained from environmental sample
  misc_feature (1)..(219): Xaa is any amino acid
MRSLTDFYGSLMNKRTVLFADRKAGGEELKNIDMQSKLKQLEANIIYKWRNAVLEDLKNNPLTEVEIGTCNDDNIQHDDPVMYGTTLLAALVSNCLWFVIHIGDGLCVVLENEDRIYCPIQDDERLAFGRTTSLCDNDSINNFRESYGLSQIIGLTVATDGMADSFEPDKYLQFNKELYGKFSHFPVKAEEELKDFLPKISERGSRDDISIAGIFRKRN

SEQ ID NO: 3361 - DNA, 363 bp, Unknown
  Obtained from environmental sample
  misc_feature (1)..(363): n is a, c, g, or t
ttgtttnnnnnnnggtttattgccgagaaaagaatttggcagtatatcagcagcgaaaatattcccattgtgccgctttattttgctgctccgcgtccggtggttttccgcagtggcaatatcattatggtggacgatgagcgtatgcgccttttgccaaacgaaaaaccagaaattaaaaaagtacgttttcgtacccttggctgttatcccctaactggcggggtggaatcagaagcagacacgctagacacagtgataaatgaaattttgggagccgccacatccgagcgcaccagccgaataatagacaaagaggctgctggcagcatggaacgccgcaagcgagaggggtatttctaa

SEQ ID NO: 3362 - protein, 120 aa, Unknown
  Obtained from environmental sample
  misc_feature (1)..(120): Xaa is any amino acid
MFXXXFIAEKRIWQYISSENIPIVPLYFAAPRPVVFRSGNIIMVDDERMRLLPNEKPEIKKVRFRTLGCYPLTGGVESEADTLDTVINEILGAATSERTSRIIDKEAAGSMERRKREGYF

SEQ ID NO: 3363 - DNA, 534 bp, Unknown
  Obtained from environmental sample
  misc_feature (1)..(534): n is a, c, g, or t
atggaacttacaatgaacaatgcaaaaaacggacttttgaaattcattgcctgcggcagcgtggacgatggtaaatcaaccttaatcgggcatattttgtacagttccaaactgctatatgccgaccaagaacaagcattgattttggacagccaagttggttcccgtagcggaaaaattgactactcgcttcttttggatggattgatggcagagagggagcaaggcataactatagatgttgcctaccgttactttaccacagaaaaacgcagttttatagtagcagacactccggggcacgaagaatatacccgcaatatggcagtaggtgcttcttttgccgacttggctattattttggtggatgctaaacaaggcgtattgtctcaaacacgccgacacgcacggatttgctccctgatgggcatccgttattttgtgtttgccgtcaataaaatggatttggtggctcacagcaaagagcgttttgaaggtatcgcaaaggaaatagaaaaattggcaaacgagtga

SEQ ID NO: 3364 - protein, 177 aa, Unknown
  Obtained from environmental sample
  DOMAIN (13)...(155): GTPase of unknown function
  misc_feature (1)..(177): Xaa is any amino acid
MELTMNNAKNGLLKFIACGSVDDGKSTLIGHILYSSKLLYADQEQALILDSQVGSRSGKIDYSLLLDGLMAEREQGITIDVAYRYFTTEKRSFIVADTPGHEEYTRNMAVGASFADLAIILVDAKQGVLSQTRRHARICSLMGIRYFVFAVNKMDLVAHSKERFEGIAKEIEKLANE

SEQ ID NO: 3365 - DNA, 915 bp, Unknown
  Obtained from environmental sample
  misc_feature (1)..(915): n is a, c, g, or t
gtgcttgcctttgacgcgcacgaaactattgacaaccttttccgggaacaggatttacccattcccgacggcctcagcgcgtctctccggccctatcagaagcggggctacaactgggtgtgctcacttttgttttccggttttggctgcatactcgccgatgacatgggacttggtaaaaccattcaatccattgccgcggttttacggttaaaagaagacgggcttttaaatgagggctgccttgtggttgcgccggcgtcgcttttgaataactgggaaaaagagctgagccgtttcgcgccttccctcaatgtgtccaggtatcacgggtctggccgcagactcgacaagacgcaggatgtgtttctcaccacgtaccagaccgcggttcgggacgcggaaaaactaaagaaagaagccttttccatgctccttgtagacgaggcgcacttgatgaaaaacgcggaaacccgcctttcccggacagtgaaaacccttcgttcccaataccgcctcgcgctttcgggaacccctgtggagaaccgcctggaagatctccgctcgctttttgacttcatcctcccgggctatctgggaactgccaagaatttcaaggaactctaccgcatccccattgaagtgatgcggaatcgtgaacaggcggaggctttgcgaaaaattaccgcccctttccttttacggcggcttaaaacagacaagactatcatcaaggacctgcctgagaaaatcgtgactaacgagtacgcggtactggaaaaagatcaggccgcgctttacaagagcgtggtagatgcctcaatagaaaaatccgaaaacaccgaggatccgaaagagcgggccgccctcatacttttgctgctcacttcccgaaacagatctcggccgatctga

SEQ ID NO: 3366 - protein, 304 aa, Unknown
  Obtained from environmental sample
  DOMAIN (30)...(187): DEAD/DEAH box helicase
  misc_feature (1)..(304): Xaa is any amino acid
MLAFDAHETIDNLFREQDLPIPDGLSASLRPYQKRGYNWVCSLLFSGFGCILADDMGLGKTIQSIAAVLRLKEDGLLNEGCLVVAPASLLNNWEKELSRFAPSLNVSRYHGSGRRLDKTQDVFLTTYQTAVRDAEKLKKEAFSMLLVDEAHLMKNAETRLSRTVKTLRSQYRLALSGTPVENRLEDLRSLFDFILPGYLGTAKNFKELYRIPIEVMRNREQAEALRKITAPFLLRRLKTDKTIIKDLPEKIVTNEYAVLEKDQAALYKSVVDASIEKSENTEDPKERAALILLLLTSRNRSRPI

SEQ ID NO: 3367 - DNA, 747 bp, Unknown
  Obtained from environmental sample
  misc_feature (1)..(747): n is a, c, g, or t
ttgaagcctaccggaacctcacgaaccccangctttctgaccataaccggtcgtaccctcgttacttcggtcattgcaacgctaattacgattttgatagcccttccctgcggttttttcatggcccgcagcaaaaaccaaaccttgctgcttttaataatcatcatcccgttctggaccaatttccttattcgcgttttcgcctggatgaacatccttgggaataacggctttgtaaatgaatttcttatgcgctttaagctaatatcagagtacattccctttatgtacaaccagaaggcggttaccctggtgctgatctatatgtacctgccttacgcgatacttcccctgttttctaccatcgataaatttgatttctcgcttttggaagccgccagggatctgggagccggcaagctcacctcaataatcctggttctcttgcccaacataaaaagcggcctctttacagcggtgctgtttacctttatccccatctttggagcttatgcggtacctcagctcgtgggcggaaaagattcctatatgctgggaaatatcatcgcggatcaaatacttaaatccagaaactggcctttggcctcggcgatttccatggtgctcacggtagttaccacggtgggcgttctggtaatgatgaacatacagcgccgagaggcggcgcgtgtcgctgattctggggtcggggccgaagatcgcgccgctacgggggcaaagctatga

SEQ ID NO: 3368 - protein, 248 aa, Unknown
  Obtained from environmental sample
  DOMAIN (16)...(233): Binding-protein-dependent transport system inner membrane component
  misc_feature (1)..(248): Xaa is any amino acid
MKPTGTSRTPXFLTITGRTLVTSVIATLITILIALPCGFFMARSKNQTLLLLIIIIPFWTNFLIRVFAWMNILGNNGFVNEFLMRFKLISEYIPFMYNQKAVTLVLIYMYLPYAILPLFSTIDKFDFSLLEAARDLGAGKLTSIILVLLPNIKSGLFTAVLFTFIPIFGAYAVPQLVGGKDSYMLGNIIADQILKSRNWPLASAISMVLTVVTTVGVLVMMNIQRREAARVADSGVGAEDRAATGAKL

SEQ ID NO: 3369 - DNA, 765 bp, Unknown
  Obtained from environmental sample
  misc_feature (1)..(765): n is a, c, g, or t
atgctattcgatctcaatccaccttcacagaatcattgggcatataaaatcttccatgagcgaatatttccggacggaaggcccgtgtccgaaaaagattacaaatggctaaagatgaacccggcggacaatcaatatatttcagagcagtacattgaaacgctgaataatttaacagcagctaaaaaagccaggtttaaggacggaatatggtctactgacaagggaacgctgtggaaacgggcgtggattaaatatgacaacgcggagagggtctaccagcggattgtcataggcgtagacccttccggcaccagcacgggcgacgagatagggatagtgggggcgggaaaattcaacgacgagtacagggtgttagatgattgctccctacacggcactcccgctgaatgggcagatgaggttgtaaggctttactggtcgttgaaagctgatctggtcgttgctgaaagcaattttggcggggatatggttgagcatacgataaagacggcagatccaagggtgaacgtgaggcttacccattcgtcaaggggaaaaattgtaagggctgagccgataagcgcattatatgaaaacggtttggttaaacataaggtgccgtttactgagcttgaggatgagtattgcgatttcgatggcacgggaaaatctccgaacaggctggatgctgccgtgtttgcgttaagtgaattgtttgatcaagactgcgcgagcgtcggaagcgcccgcattgtttattaa

SEQ ID NO: 3370 - protein, 254 aa, Unknown
  Obtained from environmental sample
  misc_feature (1)..(254): Xaa is any amino acid
MLFDLNPPSQNHWAYKIFHERIFPDGRPVSEKDYKWLKMNPADNQYISEQYIETLNNLTAAKKARFKDGIWSTDKGTLWKRAWIKYDNAERVYQRIVIGVDPSGTSTGDEIGIVGAGKFNDEYRVLDDCSLHGTPAEWADEVVRLYWSLKADLVVAESNFGGDMVEHTIKTADPRVNVRLTHSSRGKIVRAEPISALYENGLVKHKVPFTELEDEYCDFDGTGKSPNRLDAAVFALSELFDQDCASVGSARIVY

SEQ ID NO: 3371 - DNA, 717 bp, Unknown
  Obtained from environmental sample
  misc_feature (1)..(717): n is a, c, g, or t
atggccgacgccaaacccggcgccgcccaagcaaagccgtctgacgtatcagtcagccacggcagtcaaagcaccgcagtggcagactctaagtcaaccattcccggcggttcagtgctgggcggcacgggccattctcaaagtcaggcccaaagtcagggccagggccaggcattgcccggtgccccagccctgccaggctccaccgagcaccagcaggcgcacgccacagccagcggcaagccacagttgcccccgcaggcccccatggcccagatggacggcagcgtaaagtggatgctgcgaaacgaccagcagtccgccgaaatacagctttaccccgagcaccttggcaaagtcacaatcaggctaagggtagaaggcaacgaagtgcacgcccgcgtgtgggccagcgaagcatccacgcttcccgcgctccgcgagcacagggcttttttggaatccagcctaaaagagcagggattgcagctcagcagcttcgacctgcagcacggcaagggcggccagcaggaagcgcagagcggcgaagggcaaaatcgtccccagggccaaaacttccactttggcgcgcagatgattgaaagctggaacggcagcgagtttaggcaagagttgcccgcacaggccaccaaccaggccaccagccaagtgtccgtacccacccaaaacaacggcagggtcgagctttacgcctag

SEQ ID NO: 3372 - protein, 238 aa, Unknown
  Obtained from environmental sample
  DOMAIN (41)...(173): Flagellar hook-length control protein
  misc_feature (1)..(238): Xaa is any amino acid
MADAKPGAAQAKPSDVSVSHGSQSTAVADSKSTIPGGSVLGGTGHSQSQAQSQGQGQALPGAPALPGSTEHQQAHATASGKPQLPPQAPMAQMDGSVKWMLRNDQQSAEIQLYPEHLGKVTIRLRVEGNEVHARVWASEASTLPALREHRAFLESSLKEQGLQLSSFDLQHGKGGQQEAQSGEGQNRPQGQNFHFGAQMIESWNGSEFRQELPAQATNQATSQVSVPTQNNGRVELYA

SEQ ID NO: 3373 - DNA, 918 bp, Unknown
  Obtained from environmental sample
  misc_feature (1)..(918): n is a, c, g, or t
atgaataaacaaagaaaacgaaaatcccagtcgatggcgcattggtataactcaatccttaacgcgataccgcttcccataacggttacggacgcggaaacaagatggacattcattaacactgccgtagaaaaattccttggggtatcgtttgaagacgccataggcaagtcgtgcgataactttggagccagcatctgcaacaccgacgactgcggcattatttgcgcgaaaaagggccttaaacaaacttatttttcggaaggggattcgtcttttcaggtagatgtcgcggtactcaaggacaagaacgacaaaacaatggggtacatcgaaatcgtacaggatattacaaaccttaaaatcataacaaaaaaacaggccgacgcggaagcggccaacgccgcaaaatccgcttttctggcgaaggtaagccacgaaatacgcacgccgatgaacgctattctaggcatcacggaaatacaactgcgaaacgaaactctgccttcggaaacaaaggacgctctggacaggatttacaactcaggttatatgcttcttggaatcataaacgacatactggatctgtcaaaaatcgaatcgggcaaacttgagctattcccgattgaatacgacttccctagtttgattaacgataccgtagtcctgaatgttgtccggtacgaaagcaaacctataacattcagccttaatgttgacgaaaacattccgttaatgcttttgggcgacgagcttcgtataaaacaaattctaaacaacctgctttccaacgcgtttaagtacacggcagcaggcgaagtttcaatgtcggtctctctggaaccggcgcagtcagaagacataacgcttgttttcagcataagcgataccggacagggcagactctcggccatctga

SEQ ID NO: 3374 - protein, 305 aa, Unknown
  Obtained from environmental sample
  DOMAIN (20)...(122): PAS fold
  misc_feature (1)..(305): Xaa is any amino acid
MNKQRKRKSQSMAHWYNSILNAIPLPITVTDAETRWTFINTAVEKFLGVSFEDAIGKSCDNFGASICNTDDCGIICAKKGLKQTYFSEGDSSFQVDVAVLKDKNDKTMGYIEIVQDITNLKIITKKQADAEAANAAKSAFLAKVSHEIRTPMNAILGITEIQLRNETLPSETKDALDRIYNSGYMLLGIINDILDLSKIESGKLELFPIEYDFPSLINDTVVLNVVRYESKPITFSLNVDENIPLMLLGDELRIKQILNNLLSNAFKYTAAGEVSMSVSLEPAQSEDITLVFSISDTGQGRLSAI

SEQ ID NO: 3375 - DNA, 609 bp, Unknown
  Obtained from environmental sample
  misc_feature (1)..(609): n is a, c, g, or t
atgataattcgtgaagctctggcgcagggaagcgcggatttaaaatacgccggaataaaaactcacgcgctggattcaggtttgttgctcgcgcacattttaaaaaccgaccgcgccaaacttatagcaagaggaacggatcgtctttcggaaaaggactgcgcgtcattttgcgaacttttagaaagaagggcaaacggcgaatgtaccgcctatatcaccggtaaaaaagaatttatgggattagagttcgacgtaaatccgtctgtacttgttccaagacccgaaaccgaaactcttgtagaaacggcaacaggtattattaaaaataaattacaagataactccgctgtttacatattagacctctgcacgggaagcggggcagttgcaatctccttaaaaaacgaaatgccttcttgcgagattacggcggcggatatttcatcctccgcgctggacacggcgattcataatgcaaaaaaacttcttggcgagaatacaattaaatttttccaaggcgatttatactccgcgcttccctctcccccgtccgtttcctactctttaattgtctcaaacccgccgtatattccctcgaggaaataa

SEQ ID NO: 3376 - protein, 202 aa, Unknown
  Obtained from environmental sample
  DOMAIN (97)...(202): Methyltransferase small domain
  misc_feature (1)..(202): Xaa is any amino acid
MIIREALAQGSADLKYAGIKTHALDSGLLLAHILKTDRAKLIARGTDRLSEKDCASFCELLERRANGECTAYITGKKEFMGLEFDVNPSVLVPRPETETLVETATGIIKNKLQDNSAVYILDLCTGSGAVAISLKNEMPSCEITAADISSSALDTAIHNAKKLLGENTIKFFQGDLYSALPSPPSVSYSLIVSNPPYIPSRK

SEQ ID NO: 3377 - DNA, 348 bp, Unknown
  Obtained from environmental sample
  misc_feature (1)..(348): n is a, c, g, or t
gtgatgtacgacgacctactatccaccctaaatccggaacaattggccgcggttacggcaaagaacagcggctcgctcctagtcctcgccggcgcgggttgcggcaaaacgtccgttctgacgcgccgcatagcctaccttatccgacaaggcgttccgccgtcccgtatctgcgcgttgacattctcccgcaaagccgccgaagagatggcgcaccgccttgcgaagctagaccccgcctgcggcggcaataacgcgccgctggtcaccactttcacgccttcgcgttgcgcgtgctgcaagaacgccgccaaggcccggcgcacttcaacagaattggctttatga

SEQ ID NO: 3378 - protein, 115 aa, Unknown
  Obtained from environmental sample
  misc_feature (1)..(115): Xaa is any amino acid
MMYDDLLSTLNPEQLAAVTAKNSGSLLVLAGAGCGKTSVLTRRIAYLIRQGVPPSRICALTFSRKAAEEMAHRLAKLDPACGGNNAPLVTTFTPSRCACCKNAAKARRTSTELAL

SEQ ID NO: 3379 - DNA, 741 bp, Unknown
  Obtained from environmental sample
  misc_feature (1)..(741): n is a, c, g, or t
atgtatcagatcggccgagcgaggatatgtgcagtatcgcaaaagcccagggaatacaccctcaattcaatttctaccattataaatgtggataccgccgtggaggatgtgttttcttcgccatacgaccagacaaaagaacagctgcatttggcaattgaaagcttgcgcgaaaggcaggagagtcagatcatcaataacgatgattacggcctgttgaaaaatgttccggacagccagcgcgtaacgcccggaaacaaagcgggttcgcccatgcctgacgatctggacgaattgataacaaaagtgtggaaagagccggcgtttttcctggcgcacccgagggctgttgccgcttttcagcgggaatgtacgcgcaggggagttccccccgcaactgcttcgctttttggcggcacgtttatattgtggcgcggtattccaattgtgcctacggataaattgtttgtggacggcttgaaaaatcccaagagcaaaagcgggaagaccaatattcttttggtgcgtaccggcgaagcaaaacgcggggttatcggcttgtaccagacaggcttgcagaacgagcagggcagaggactttccgtgcgtttcaggggagtggataacaaagggcttgcgtcctatctcctgtcgctgtactgctcagccgcaattctctccgatgacgccatagccgtgctcgaagatgtggaagtaggtaactactatgactacgcctaa

SEQ ID NO: 3380 - protein, 246 aa, Unknown
  Obtained from environmental sample
  misc_feature (1)..(246): Xaa is any amino acid
MYQIGRARICAVSQKPREYTLNSISTIINVDTAVEDVFSSPYDQTKEQLHLAIESLRERQESQIINNDDYGLLKNVPDSQRVTPGNKAGSPMPDDLDELITKVWKEPAFFLAHPRAVAAFQRECTRRGVPPATASLFGGTFILWRGIPIVPTDKLFVDGLKNPKSKSGKTNILLVRTGEAKRGVIGLYQTGLQNEQGRGLSVRFRGVDNKGLASYLLSLYCSAAILSDDAIAVLEDVEVGNYYDYA

SEQ ID NO: 3381 - DNA, 573 bp, Unknown
  Obtained from environmental sample
  misc_feature (1)..(573): n is a, c, g, or t
atgaaattagaatccaatattccaggcggtccaattgcggaaaaatggacacgccacaaattcgagcttaaactggtaaatccagctaacaagcgtaaattcaccgtgatagttgttggaactggcctagctggcgcctctgctgctgcctctcttggcgagctaggctacaatgtaaagagtttttgcattcaagacagccctcgccgcgcacattcaattgctgcgcaaggcggcataaatgcagcacacaactatccaaacgatggcgactcaatttaccgccttttttacgatacagttaagggcggcgattttcgtgctcgcgaagcaaacgttcaccgtttggcagagtgctcaaatttaatcataaaccactgtgtggctcaaggtgttccttttggcagagaatacggcggtcttttagataaccgttcctttggtggtgcgcaagttagccgtaccttctatgcccgtggtcaaacgggtcagcaacttttgctcggtgcttatcaatctatgatgcgtcaagttgcaaaaggttctgtaaaatgtttacgcgtcgcgaaatga

SEQ ID NO: 3382 - protein, 190 aa, Unknown
  Obtained from environmental sample
  misc_feature (1)..(190): Xaa is any amino acid
MKLESNIPGGPIAEKWTRHKFELKLVNPANKRKFTVIVVGTGLAGASAAASLGELGYNVKSFCIQDSPRRAHSIAAQGGINAAHNYPNDGDSIYRLFYDTVKGGDFRAREANVHRLAECSNLIINHCVAQGVPFGREYGGLLDNRSFGGAQVSRTFYARGQTGQQLLLGAYQSMMRQVAKGSVKCLRVAK

SEQ ID NO: 3383 - DNA, 813 bp, Unknown
  Obtained from environmental sample
  misc_feature (1)..(813): n is a, c, g, or t
ttggggtactcgcccttttttgacgatgtggctgccgaacattatagcaatctcggtgggttccgttctttttgcaataaagattcgaagataggaataaggattttatcgatgatacttgatcgatatctgacaaagcagtttttgcctgtttttgcggtctcctcggtaatgtttgttttacttcttgaaatggtcgatctttttgccaacctgccgcgttatcttaataatgaggtagccgcaaaagatgttttacgcgtaagtgtgttttatctgcctaaaggtttttcttacgccctgcctatcgcgttactttttgccgccgcttttattttgggcgaactatacgcgagaaatgagttgacttctgtttttgctgcaggtattccattctggcgttttagcatagctcttttgattattggatttacagcttctattttttcgtttttcttcgacgatatgattgtcattccgacattgaaaatgaaaaatgatctttcaagggagcttttgaacgaaaggcgatcgcaattccaggcggatgttgtcgttaaaacaaataatggtcagttgatctatgccgctgattattatgacggaagcgggaaagttatgcacgggctgagcgttattgaacaggatgaaaatggcggtcttgttaatctgatacgggcgcagcgcgcttcatggaacggcgaatattggaattttactaacgctgtaatttacgaatgggacaacggggttttaaggtataaggtttttacaggaagcgacaaataccgcgaagaccccgagactttttag

SEQ ID NO: 3384 - protein, 270 aa, Unknown
  Obtained from environmental sample
  misc_feature (1)..(270): Xaa is any amino acid
MGYSPFFDDVAAEHYSNLGGFRSFCNKDSKIGIRILSMILDRYLTKQFLPVFAVSSVMFVLLLEMVDLFANLPRYLNNEVAAKDVLRVSVFYLPKGFSYALPIALLFAAAFILGELYARNELTSVFAAGIPFWRFSIALLIIGFTASIFSFFFDDMIVIPTLKMKNDLSRELLNERRSQFQADVVVKTNNGQLIYAADYYDGSGKVMHGLSVIEQDENGGLVNLIRAQRASWNGEYWNFTNAVIYEWDNGVLRYKVFTGSDKYREDPETF

SEQ ID NO: 3385 - DNA, 348 bp, Unknown
  Obtained from environmental sample
  misc_feature (1)..(348): n is a, c, g, or t
atgctgaacaagtataaagacaaacagaccaaaaaagaaaccactcaaatggttgaagagatgctgacctacattgcaaataacggcaataccattcatgtattgttaagcgaaaacggcgacttaggcttccaaaaaaaattgctataccattttgtcatgcacaaccagataacaaaatatttttcggaaaatcagaacgatgaaacaatgccctattattcggtttttctggtacacggcgctatcggcttaattcagcactggctgaaaaataatatggctatgcctgtcccgcagttggccaagatgatgatgaaatggacaggacaccagatcaagttttga

SEQ ID NO: 3386 - protein, 115 aa, Unknown
  Obtained from environmental sample
  misc_feature (1)..(115): Xaa is any amino acid
MLNKYKDKQTKKETTQMVEEMLTYIANNGNTIHVLLSENGDLGFQKKLLYHFVMHNQITKYFSENQNDETMPYYSVFLVHGAIGLIQHWLKNNMAMPVPQLAKMMMKWTGHQIKF

SEQ ID NO: 3387 - DNA, 555 bp, Unknown
  Obtained from environmental sample
  misc_feature (1)..(555): n is a, c, g, or t
atgtttacgactttagtattttatgggagcgtaattgataaaaattcttttacgcagcttaagaattatatagatgaaaccaaggcatcaaaagacgcggagcttctttgcggcggttatgacgatagcgtcggttactttgtatatccgacaataatactggcaaaaacaaaagaatacaaaactatgctgcaggaattattcggtccaatactgacgatctatatttacggcgacgaagaactggaagatatgctggaatactgtgacagttcgacgccttatgctttgacaggggcgatttttgcccaggatcgcatggctattgtggtaatggaaaccaaactgcgcaacgcggctggtaatttttacatcaacgataaacctaccggcgcagtggtagggcagcagccttttggaggtgcaagagcgtccggtactaacgacaaagccggaagcgcgctaaacctttaccgttggatgagcctacgctcggtgaaagagtgtttggatcctgttacagttattacctatccatttatggctgctgaataa

SEQ ID NO: 3388 - protein, 184 aa, Unknown
  Obtained from environmental sample
  misc_feature (1)..(184): Xaa is any amino acid
MFTTLVFYGSVIDKNSFTQLKNYIDETKASKDAELLCGGYDDSVGYFVYPTIILAKTKEYKTMLQELFGPILTIYIYGDEELEDMLEYCDSSTPYALTGAIFAQDRMAIVVMETKLRNAAGNFYINDKPTGAVVGQQPFGGARASGTNDKAGSALNLYRWMSLRSVKECLDPVTVITYPFMAAE

SEQ ID NO: 3389 - DNA, 648 bp, Unknown
  Obtained from environmental sample
  misc_feature (1)..(648): n is a, c, g, or t
ttgaccagttatgttaacctgatctgccagaccattgtaattaattccccttaccctgaaatatttaacggttaccatgcgcttattcttgatagccccgaagttaacgcattttccagcccgggagggcatatatttataacaaaaaggctggtagagttaaccgattccgaagatatgcttgccgcagtcattgcccatgagctttcccacataatgctgaaacacagcaccaacttacttagcactatgagattcaatgatgaattatcggcgatagcggatcgggcatcaggcattgcgggcagaagttccgcgtcggctcaaaggttcgtggttttccgcgattcggttacagcgatgatggatacccttttaaaaaatggctattcccagaaacaggaaatggaagctgatcaggaagcgattatactccttacgacatcgggctataatcctcaggctattctggatgttttaaagctgctgcaaagtactgagaattcccagcgctcagggtttaacacaacccatcccagcgccagggaacgcataactaatgtgggaatatggattggaaaccgccaggtacgggataatatctcaattcggtcttccaggttcaataaggcaatggtaaatgagtaa

SEQ ID NO: 3390 - protein, 215 aa, Unknown
  Obtained from environmental sample
  DOMAIN (8)...(193): Peptidase family M48
  misc_feature (1)..(215): Xaa is any amino acid
MTSYVNLICQTIVINSPYPEIFNGYHALILDSPEVNAFSSPGGHIFITKRLVELTDSEDMLAAVIAHELSHIMLKHSTNLLSTMRFNDELSAIADRASGIAGRSSASAQRFVVFRDSVTAMMDTLLKNGYSQKQEMEADQEAIILLTTSGYNPQAILDVLKLLQSTENSQRSGFNTTHPSARERITNVGIWIGNRQVRDNISIRSSRFNKAMVNE

SEQ ID NO: 3391 - DNA, 936 bp, Unknown
  Obtained from environmental sample
  misc_feature (1)..(936): n is a, c, g, or t
gtgcggccacttttccgagggattttgacggcgctgtcggcggcgattcccgatgatttcgacgacgcgccgcgcgagacgatgatcgccgttttgcagaagctgcgcgagtggcccgacgttctcgtgatagacgattttcaccttataagcgacagcgcggcggcggcggcgctgcccgtcgtccgttccagaatgccggagagcgcgtcgtttctggtgctcagccgcaacccgccgccggacgggctgcgcgagcatgtcatcaagggcgcggtgcggctgatagacgatttgcggttcagcggggaggagatttcggcgctgttcggcaagaacgggacggttctctcgaagagtgaagccgagcggcttcgcgccgagacggacggctgggcggcggctcttacggcgattatcatggcgaacgggaaagagggttacacagggataataaagacggagtcgctgaatcaatacataaaaacatacgtgtttgagtattgggagcgtttcgacgatttgaagaagtgctccgtctgcgacgctctgaatccgtcgctgtgcgaggcggtgacgggggcggcggatatttgggaggttataaccgcgctcgcgaataagacgggtctggtgtcgcgatacggcaacgacacgtataaattccacgcgttgctgagggacgcgctggagtccgaactcaacgcggacgagaagatcgacaagccgtcgctgtacaaggcggcggctcgctggtatatggaaaacggggactggctgcacacgctcgacatggcggcgaagagcggcgacaacgacgccattgaggaaattatgcgtaccgcgagtaagaaacgcgacggagcgggcggcgatgtaaacgcatatattcggttggtggagaagtcgtttctctccattccgcgcacatcatag

SEQ ID NO: 3392 - protein, 311 aa, Unknown
  Obtained from environmental sample
  misc_feature (1)..(311): Xaa is any amino acid
MRPLFRGILTALSAAIPDDFDDAPRETMIAVLQKLREWPDVLVIDDFHLISDSAAAAALPVVRSRMPESASFLVLSRNPPPDGLREHVIKGAVRLIDDLRFSGEEISALFGKNGTVLSKSEAERLRAETDGWAAALTAIIMANGKEGYTGIIKTESLNQYIKTYVFEYWERFDDLKKCSVCDALNPSLCEAVTGAADIWEVITALANKTGLVSRYGNDTYKFHALLRDALESELNADEKIDKPSLYKAAARWYMENGDWLHTLDMAAKSGDNDAIEEIMRTASKKRDGAGGDVNAYIRLVEKSFLSIPRTS

SEQ ID NO: 3393 - DNA, 948 bp, Unknown
  Obtained from environmental sample
  misc_feature (1)..(948): n is a, c, g, or t
ttgggcgccatagaagcgcttttagagaacaacgtgcgcgtgccggaggacgtcgcggtaaccggattcgacgacatagaagagagcgcccttaccacgccgccgctcaccacggtgcggcagccgctctacgaaatcgggcgcaccgccgtggaactgctgatcacaaaaatgaaaggcgaggaggtcccgcggcgcacggctttgcaaacgccgctctcaatacggcaatcttgcggttgcttcattaaccccaaccatacgcttgacagacacacattctccatcatccaacgcttgtccagcaataccgaccacctaaaagagcaccttacctcggaattgttctcttttgtggccatggagatgggcgcgtccatagacgatgacgacctgagggagatcgcctcgtcctttttcgacgaggtggagggaacgaggactggcgtcttcctctcggcgctaaaccgcatggtccgcgccgcgacgctcgccgcggccgagagcgacgacatcctgcagtggcagaagattctcgtaaccatacgcaaattcacgcaagggttagacgccgtgaagaaagagaccgccgacaaccttctgcacgacagctacaacttgttcagcgaggcggccgcgaggcagcaagcgcacaagcgcctgcaggcggagcaaaatgccgcgctcatgcgctcggtcggccactccatagccaactccttcgacattccgactctctcgcaagcaatagtcaaaatgttcccgaaattggagataaacgatttttcactctcactctacgacaaatcgaccaaggactttctgaactccnnaaacgatatcgccttgcaccgagggaaaaaagacgtaccggcggcagacatggtttttccccacaaaaaactcctgctcggcgggctcaaaattcgaacgaaacataccccgtga

SEQ ID NO: 3394 - protein, 315 aa, Unknown
  Obtained from environmental sample
  misc_feature (1)..(315): Xaa is any amino acid
MGAIEALLENNVRVPEDVAVTGFDDIEESALTTPPLTTVRQPLYEIGRTAVELLITKMKGEEVPRRTALQTPLSIRQSCGCFINPNHTLDRHTFSIIQRLSSNTDHLKEHLTSELFSFVAMEMGASIDDDDLREIASSFFDEVEGTRTGVFLSALNRMVRAATLAAAESDDILQWQKILVTIRKFTQGLDAVKKETADNLLHDSYNLFSEAAARQQAHKRLQAEQNAALMRSVGHSIANSFDIPTLSQAIVKMFPKLEINDFSLSLYDKSTKDFLNSXNDIALHRGKKDVPAADMVFPHKKLLLGGLKIRTKHTP

SEQ ID NO: 3395 - DNA, 903 bp, Unknown
  Obtained from environmental sample
  misc_feature (1)..(903): n is a, c, g, or t
atgaatgtttttgcagtatgtgagaaaccacaggtacttcaatttaaaccgcaggaggcgtctgtttctctaaaggttgtttcagccaatgaaaacatggagaaaattaaagcacgtaacgatgttccggccgttatcaaggtaatatccttgggcggcggaggtggaaacgcgttaaaccgcatgattgaagctaatataccgggagtggaatttattgcggctaatacggatattcaggatctgtttaaaaaaagcagggccaaagttaaagtacagattggcgcggaattaacaggaggtcgcggcgcgggaggaaatccggaaaaaggtgaaaaagccgcgatagaagatcaggttgcgattgccgaagcgttaaggggcgcggatatggtttttattaccgcgggaatgggcggcggaaccgggacgggatcggccccgattgtcgctaaaatagcaaggcaattaggcgcacttacggtagccgtcgtaacaacgccttttgaatttgaaggccggtacaaaatgaagctcgctgaagaagggattgcgaaacttcgcaatgaagttgacactttaatagttataccaaatcagcatctttttaagattgttgataataaaacgacatataacaaagcctacatgttggctgatgaaatattgtgccggggagtacagggaatttcggaacttattaccgaaacaggatttcaaaatacggattttgccgacgttgaaaccgtcatgaagggcaaaggtgacgcgttaatgggcataggttttggcactggtgaaacagggcgcaagacgcggttaaaaacgccattgacaatcccgcttcttgaagacacgagcatagacggagcgacgggagtccttataatatcgtgggactga

SEQ ID NO: 3396 - protein, 300 aa, Unknown
  Obtained from environmental sample
  DOMAIN (44)...(238): Tubulin/FtsZ family, GTPase domain
  misc_feature (1)..(300): Xaa is any amino acid
MNVFAVCEKPQVLQFKPQEASVSLKVVSANENMEKIKARNDVPAVIKVISLGGGGGNALNRMIEANIPGVEFIAANTDIQDLFKKSRAKVKVQIGAELTGGRGAGGNPEKGEKAAIEDQVAIAEALRGADMVFITAGMGGGTGTGSAPIVAKIARQLGALTVAVVTTPFEFEGRYKMKLAEEGIAKLRNEVDTLIVIPNQHLFKIVDNKTTYNKAYMLADEILCRGVQGISELITETGFQNTDFADVETVMKGKGDALMGIGFGTGETGRKTRLKTPLTIPLLEDTSIDGATGVLIISWD

SEQ ID NO: 3397 - DNA, 369 bp, Unknown
  Obtained from environmental sample
  misc_feature (1)..(369): n is a, c, g, or t
atgaaaagattaaaagaaattttaacgggcattcttgttatcgcggtggtaagtactggattttatttcatatatcaaaacgtaacaaaaaaaacacacagggacttggccaaacgtattgcggaattaagtcctaaaggcggccctcccgaaaccattgacggcttaagaaaggcgatagcgttatatgaagatcagatcgaaagaaacgtaagggaaggcgctcaaacgggagtttactggaaaatactggcgataaggcttgcggataaaaaaatgcataatgacgcgcttaaagcgtttgaaagggcgatttattttaataccgaagacccgaccatatttattaacggggctcggccgatctga

SEQ ID NO: 3398 - protein, 122 aa, Unknown
  Obtained from environmental sample
  misc_feature (1)..(122): Xaa is any amino acid
MKRLKEILTGILVIAVVSTGFYFIYQNVTKKTHRDLAKRIAELSPKGGPPETIDGLRKAIALYEDQIERNVREGAQTGVYWKILAIRLADKKMHNDALKAFERAIYFNTEDPTIFINGARPI

SEQ ID NO: 3399 - DNA, 450 bp, Unknown
  Obtained from environmental sample
  misc_feature (1)..(450): n is a, c, g, or t
gtggggcttaacataaaagatgttgacatcgaaggaggattcgcaaaagtaaggggaaaaggaaataaagagcgtattgttctttttggaaaagaggccgcggaaaaattaaaacaatacttgcaatttgcaagacccgaactggcgggtaaaataaacaagacccatgccctttttatcggaagaaacggcaaccgcctctcacgaaaggggatttggaaaaattacgctaaattcgcatgccttgccggaacatcgtcgcatattcatacattacggcacagtttcgccacctcgttattggctggaggcgcggatttaaggacggtacaggaacttttagggcatgccgatcttggtacaactcagatttatacgcatgtggatacggcaatcttacgggaaaatcaccaccgttatcttcccaaattaaataagacggatatgtga

SEQ ID NO: 3400 - protein, 149 aa, Unknown
  Obtained from environmental sample
  DOMAIN (1)...(135): Phage integrase family
  misc_feature (1)..(149): Xaa is any amino acid
MGLNIKDVDIEGGFAKVRGKGNKERIVLFGKEAAEKLKQYLQFARPELAGKINKTHALFIGRNGNRLSRKGIWKNYAKFACLAGTSSHIHTLRHSFATSLLAGGADLRTVQELLGHADLGTTQIYTHVDTAILRENHHRYLPKLNKTDM

SEQ ID NO: 3401 - DNA, 423 bp, Unknown
  Obtained from environmental sample
  misc_feature (1)..(423): n is a, c, g, or t
ttggaggcataccttgccgaatttcataagaaagatacgcatgatgcctatctattttttacaattcataattccaaaaaaacacagatgaaacctggcgccgctgattattttctgaagaaatatgcaaaacttgcaaatgggattgacgggtcttttcctaaaaatttacacgctcatatgttcaggcacagtattgcgatggcaatgtataaaaagggtattcctatatcttacattcgggatttccttggacacaacagcattgaaacgacgactatttattcgtattcggatgatgaaactataaaaaaagccttggaggcaatcgccgataaagattcaaatgatacgtcaatagtccgcaagaaaaactggaaaggcagcgagcaatccttgcttgaatattgcgggttaggctga

SEQ ID NO: 3402 - protein, 140 aa, Unknown
  Obtained from environmental sample
  misc_feature (1)..(140): Xaa is any amino acid
MEAYLAEFHKKDTHDAYLFFTIHNSKKTQMKPGAADYFLKKYAKLANGIDGSFPKNLHAHMFRHSIAMAMYKKGIPISYIRDFLGHNSIETTTIYSYSDDETIKKALEAIADKDSNDTSIVRKKNWKGSEQSLLEYCGLG

SEQ ID NO: 3403 - DNA, 357 bp, Unknown
  Obtained from environmental sample
  misc_feature (1)..(357): n is a, c, g, or t
gtggaaggcagcattagctggcttgagacctggctggtggaatggctgaaaggcggcgggccttcgccccggcagttttcaagtttcgccgagcttaacgcggcggtaaaaacccgccttgcggaactggtgaagcggccgttccagaaaagggccggcagccgggaaagcgtgttcctggaaattgaccgccccgccttgcgccctctgccgagcgccccctatgaaaaccccagctacgctgaaaggcgggtgccgaacaactaccacgtcgaatatatggggttctactactcggtaccccaccagcactataaacagcagggtaaccgtaaaagcgacatattcggtcattga

SEQ ID NO: 3404 - protein, 118 aa, Unknown
  Obtained from environmental sample
  misc_feature (1)..(118): Xaa is any amino acid
MEGSISWLETWLVEWLKGGGPSPRQFSSFAELNAAVKTRLAELVKRPFQKRAGSRESVFLEIDRPALRPLPSAPYENPSYAERRVPNNYHVEYMGFYYSVPHQHYKQQGNRKSDIFGH

SEQ ID NO: 3405 - DNA, 762 bp, Unknown
  Obtained from environmental sample
  misc_feature (1)..(762): n is a, c, g, or t
ttgttcgcgggaaacgaaaccccttctttccgtatctgggtagacgatatttttatcgtcagcaacgtttttgaggccaaggtggttgaagatgtccaatattgggatgatagggaagaggttctcgaagacatccccgtggcgggcaaacccgccgtcaaggagaccgacaaatttctatcgggtggagatcctattggtttcgcctacgtttacggaggcaagaccgcctacaaggtgcagaagacgaagtccggcgcgccggttttagcgaactatatggacggcaacgaatactccggcgtcacggtttctttgggcgaaggcaagtacgccaacctgacgaacgccagaacggcaaaggcggccggtatcgctttctggggacgcggcggcgagggggtgggcaatgtcggcgtaggcctgttggacaaccagggcaagaacagcgccggcgtggaggtcaaagttcagactaaggtgctgctcggcgatttcggcaagatcgagccggtgtggaagtactatatgataccgatccgctccttcaggcctgagggtctgtattgngacgacagncagaacgccgaggtctccggcaagattgattggactaagatacaggaggtgcgtttctccgtangcaagggcgaaaaacaagttccggcgggagagcccggtcacttctatgtgaangatctctctgtcattgaggagatacggggctatgtgaaccccggaggatttctgggacgcgtttaa

SEQ ID NO: 3406 - protein, 253 aa, Unknown
  Obtained from environmental sample
  misc_feature (1)..(253): Xaa is any amino acid
MFAGNETPSFRIWVDDIFIVSNVFEAKVVEDVQYWDDREEVLEDIPVAGKPAVKETDKFLSGGDPIGFAYVYGGKTAYKVQKTKSGAPVLANYMDGNEYSGVTVSLGEGKYANLTNARTAKAAGIAFWGRGGEGVGNVGVGLLDNQGKNSAGVEVKVQTKVLLGDFGKIEPVWKYYMIPIRSFRPEGLYXDDXQNAEVSGKIDWTKIQEVRFSVXKGEKQVPAGEPGHFYVXDLSVIEEIRGYVNPGGFLGRV

SEQ ID NO: 3407 - DNA, 339 bp, Unknown
  Obtained from environmental sample
  misc_feature (1)..(339): n is a, c, g, or t
atggattacaaatacctgcaaaacacgtacgtccgctaccttcgcaactttcttgtgaaggacgagatgaccgccacggtctatgacaagttcatggcgttggcttacgcggtgcgcagcgagtttgtagaccactggatcaacacgcagcgcgggtacatcggcaaacgcaggatttatatgctttccatggagtacacgctgggcaagagcctctacaacaacatggtcaatttgggtatagaggaggtctttacggaggcggtcggctccttgggcatctccgtaaaggagcttttcgaaagggacgacgagtttgatttgggcaacaagcggtaa

SEQ ID NO: 3408 - protein, 112 aa, Unknown
  Obtained from environmental sample
  misc_feature (1)..(112): Xaa is any amino acid
MDYKYLQNTYVRYLRNFLVKDEMTATVYDKFMALAYAVRSEFVDHWINTQRGYIGKRRIYMLSMEYTLGKSLYNNMVNLGIEEVFTEAVGSLGISVKELFERDDEFDLGNKR

SEQ ID NO: 3409 - DNA, 588 bp, Unknown
  Obtained from environmental sample
  misc_feature (1)..(588): n is a, c, g, or t
atgagaattgatttttccactcttcccgcctggatcaatgacagctttctgccgctctggaccgattccagccgcttcattatctgcaagggcggcgcgggttccggcaagagcgtagacgcgcaccggagggcggtataccggctgatcgcggagccggggcataattacgccgttgtgcggaaagtcgggcgcaccctggggatttcgtgcataccgcttataaggcagtgcatatccgaatgggggatgtggcggctgatttcagagaataaaagcaaccagattatgacctgcaacattaacggcaaccagatcaaattcctggggattgacgacatcgagaaaataaaatccatcacctttgagaacgggccgcttaccgacgttctgattgaggaagcgaccgagatcacggaaaaagactttaaccagttgaatctcaggctaaggggcagcgcgaaagtcccgttccagattacgatgctgctcaatcccatatcggacacgcactggataaagcggcggttttttgacaaccccggagcgcanaaagaaaaaataaccccactccagcacgtaccatga

SEQ ID NO: 3410 - protein, 195 aa, Unknown
  Obtained from environmental sample
  DOMAIN (13)...(60): Protein of unknown function (DUF1545)
  misc_feature (1)..(195): Xaa is any amino acid
MRIDFSTLPAWINDSFLPLWTDSSRFIICKGGAGSGKSVDAHRRAVYRLIAEPGHNYAVVRKVGRTLGISCIPLIRQCISEWGMWRLISENKSNQIMTCNINGNQIKFLGIDDIEKIKSITFENGPLTDVLIEEATEITEKDFNQLNLRLRGSAKVPFQITMLLNPISDTHWIKRRFFDNPGAXKEKITPLQHVP

SEQ ID NO: 3411 - DNA, 468 bp, Unknown
  Obtained from environmental sample
  misc_feature (1)..(468): n is a, c, g, or t
atgggtacagaccagaaaagcgtaccggaagatattttatcattcataaggaccggttcaaagtttataattgcagggcataaagaaccggacggacactgcgtacggagccagcttgccctgcgcagtgcgttaatccgaatgggaaaagaagcccttgtatgctcagcaggtccttttaaacgaactgaacttaaagattattcaaatcaatttaaatttattcccacagaggaagataaatccggttcaaggcttattcttgttgactgttcaaatatggaaagaatcggagacattcacgaaacgctgaaaaaactgccccacgcgataattgatcatcatgcggcggcaaatcatccgcagtccacgccgaaagctccagtttatctggacgccaactcgccttcatgtacgctattgataaaaaaattgacaaacgcttttaatcttgagttgaccaaataa

SEQ ID NO: 3412 - protein, 155 aa, Unknown
  Obtained from environmental sample
  DOMAIN (15)...(154): DHH family
  misc_feature (1)..(155): Xaa is any amino acid
MGTDQKSVPEDILSFIRTGSKFIIAGHKEPDGHCVRSQLALRSALIRMGKEALVCSAGPFKRTELKDYSNQFKFIPTEEDKSGSRLILVDCSNMERIGDIHETLKKLPHAIIDHHAAANHPQSTPKAPVYLDANSPSCTLLIKKLTNAFNLELTK

SEQ ID NO: 3413 - DNA, 921 bp, Unknown
  Obtained from environmental sample
  misc_feature (1)..(921): n is a, c, g, or t
ttgtacccgagttcncacgtccgctgggtaaaagacggggaatccatgaaaaaagaagccgaaaaacttggatatcgcgcggaagtcctttgcggcaactgggatcaggctacccagaatgagcagattcagagcttccttgaacagaaacccaaagcccttatagtcgcctgtgtcggtgaaggcgtaagcccggcaattgccgaagccgcgcgcgataaagttttggttatcgcttataatcgtataatcccgaattcagctgattatgattactacgttaccattaacaatttcaaagtcggcgctcttcaggctgaaagtatagttaatgggttaaaccttgactcggttacaaaaagcgcgcctaaatacatcgccctctttgccggttctccggcagacgaaaacgcctacttattctatgacggcgcaatgagcgtccttaatccctatatcgaaagaggcgcgcttaaagtagtcggcccctatcccaaaacatcatctaacagggaaagattctatcagattgccgctgataactggcagcctcccatcgcgaagaggcgcatggaaaaccttttggaaaacgaagcgcgtaacataactctcgacgcggtacttggtcccaacgacgagattgcccgcgatcttatcgaagctttaaaagccgacgctaaatatcgccgtaaactgcccatagtaacaggacaggacgcggaatttgattccgccgtgttaattaaaaacggcgaacagtacagcaccatttttaaagacacaaccaaagccgcggaatatgcgattcgtttagcggatcagatcctcaaggggaagcctgttaatattctcggtttggtccttgcgacaggcgatcttgcgaagctaggcgatancaggcaggaanctcggccgatctga

SEQ ID NO: 3414 - protein, 306 aa, Unknown
  Obtained from environmental sample
  misc_feature (1)..(306): Xaa is any amino acid
MYPSSHVRWVKDGESMKKEAEKLGYRAEVLCGNWDQATQNEQIQSFLEQKPKALIVACVGEGVSPAIAEAARDKVLVIAYNRIIPNSADYDYYVTINNFKVGALQAESIVNGLNLDSVTKSAPKYIALFAGSPADENAYLFYDGAMSVLNPYIERGALKVVGPYPKTSSNRERFYQIAADNWQPPIAKRRMENLLENEARNITLDAVLGPNDEIARDLIEALKADAKYRRKLPIVTGQDAEFDSAVLIKNGEQYSTIFKDTTKAAEYAIRLADQILKGKPVNILGLVLATGDLAKLGDXRQEXRPI

SEQ ID NO: 3415 - DNA, 489 bp, Unknown
  Obtained from environmental sample
  misc_feature (1)..(489): n is a, c, g, or t
ttggcagaaattgaaatggcggaacctccggggaacctgagaaccgatgaactccgtgatgggcaaacgaagttaaaataccattatgctaacagaaaccagatatttcactatatctggaatggcgaagctgaaagtgatattggcaagggagacatcgaatatataaaaaacttgtttccggttgtccagatcctcgcaaaatgcctttgtcagtttcgggacatttttgcagaaaagagcaaggaggttcttttggaatgcatagcagcatataaggattgcgaattggaaccgataaaaaggaacgcggaaagcatgcaaaaagatattgatccggtcgctaatgccgttattgaagaatacagtaacggttttgttgaaggaaccagcaataaactaaaagcaataaagagagtaggctatggtcgatgtaaattaccactgttaaaatctaaagttgtgctgcctgcgtttttttggctatag

SEQ ID NO: 3416 - protein, 162 aa, Unknown
  Obtained from environmental sample
  misc_feature (1)..(162): Xaa is any amino acid
MAEIEMAEPPGNLRTDELRDGQTKLKYHYANRNQIFHYIWNGEAESDIGKGDIEYIKNLFPVVQILAKCLCQFRDIFAEKSKEVLLECIAAYKDCELEPIKRNAESMQKDIDPVANAVIEEYSNGFVEGTSNKLKAIKRVGYGRCKLPLLKSKVVLPAFFWL

SEQ ID NO: 3417 - DNA, 783 bp, Unknown
  Obtained from environmental sample
  misc_feature (1)..(783): n is a, c, g, or t
ttgccgcgcctatggacatgggcttgccgcaaaaaccgcccgggtattgtaatggtgctgggggacattagtcggctggtcaagcttgagcagatccgcaaagactttgccgccaatgttgcccatgaactgcgtactcccatccatgtgatacagggctttgctgaaaacatccttgattcttcatttgatgatcgaaagcagattcatcactttgcggagattataaagaaaaacgccgtgtccatggacaacataacaagggatttattaactttggtaactctcgaaagcggagacgccgaacgccctccattggaagatgttgtccttgattctgttattggcgaagcattagacttagtttcggttgcggcaaaaaataaaaatatcactattgacgtttcttgtcctccaaattttaatgtgcaactctacagttcgcttttcatacaagctcttttcaatctcctggacaacagcatcaaatattccggcaatggctcttccattaaagtccacgcttttcaggaaaaagatcaaattgttattgaggtaaaagataacggcattggaatcgcgtccgaacacctagaacgcatctttgaacgattctatcgcgtagatcgctcaagaagccgcgaagcaggcggcaccggccttggcttgtctattgtgcggcatattgccctgcttcatgggggaactgtcgaagcggaaagccacgcgggcgaaggttcggttttcaggctgagattgccagaatatcataatagtgtataa

SEQ ID NO: 3418 - protein, 260 aa, Unknown
  Obtained from environmental sample
  DOMAIN (32)...(99): His Kinase A (phosphoacceptor) domain
  misc_feature (1)..(260): Xaa is any amino acid
MPRLWTWACRKNRPGIVMVLGDISRLVKLEQIRKDFAANVAHELRTPIHVIQGFAENILDSSFDDRKQIHHFAEIIKKNAVSMDNITRDLLTLVTLESGDAERPPLEDVVLDSVIGEALDLVSVAAKNKNITIDVSCPPNFNVQLYSSLFIQALFNLLDNSIKYSGNGSSIKVHAFQEKDQIVIEVKDNGIGIASEHLERIFERFYRVDRSRSREAGGTGLGLSIVRHIALLHGGTVEAESHAGEGSVFRLRLPEYHNSV

SEQ ID NO: 3419 - DNA, 462 bp, Unknown
  Obtained from environmental sample
  misc_feature (1)..(462): n is a, c, g, or t
atgaatgattatcaaatccgtgaagcgctatgtcattacatggattataaatattgtgataaattccggattatcgacgaattggtaatcggaaaagcgcgggccgatattgtcattgtgaaagacggtcttacaggttatgaaataaaaagcgacactgactcatataaacgtttacccgggcaaattaaagaatacgatatatactttcaaaaaaattatcttgttacgggcgcagttaatataaagacggcggcaaagcatattcccccatactggggaatcatgtatttttcagaaacagaagacgacgcagaacatacagaaacagttagggaagccgggccaagtccaaaatttaacctgaaaaaacagattagtttactgtggcgaaaagaactgaataatattttaagaacgaatagtttattaaaatgcaacggtaaaaataggcgtatataa

SEQ ID NO: 3420 - protein, 153 aa, Unknown
  Obtained from environmental sample
  misc_feature (1)..(153): Xaa is any amino acid
MNDYQIREALCHYMDYKYCDKFRIIDELVIGKARADIVIVKDGLTGYEIKSDTDSYKRLPGQIKEYDIYFQKNYLVTGAVNIKTAAKHIPPYWGIMYFSETEDDAEHTETVREAGPSPKFNLKKQISLLWRKELNNILRTNSLLKCNGKNRRI

SEQ ID NO: 3421 - DNA, 669 bp, Unknown
  Obtained from environmental sample
  misc_feature (1)..(669): n is a, c, g, or t
atggtggaacctgaaatcgcttttgctgaacttgatgacaatatggctctcgctgaagattttttaaagtatattgttaataccgctcttacggaatgctccggtgaactggaattttttaacgctcatattgaaaaaggaattattgaaagccttaataatacaactaacgctaaattttctcatattacctatacggaagctgttaaggaacttgaaaaagccgccgcttcaaaaaaggtttcttttgaatttgaaccgcattggggaaacgatttgcaaagcgaacatgaaaagttccttactgaaaaaatagcaggcggccctgtaatcgttacagattaccccaaagatataaaagctttttatatgaaacaaaatgacgatgataaaactgtccgcgctatggatgtgcttgttccgcgtctgggtgaaataatcggcggctcacagagggaagatgatctggaaaaacttgttcggcgtatgaaggaaatgaacttgaaaacagaggattattactggtatcttgatctccgccgttacggttctgttccgcattcgggatttggtcttggttttgagaggcttatacaatacatttccggtatgacaaatatccgcgatgtaattccgtatccgcgcgcggtaggtcaggctgaattttga

SEQ ID NO: 3422 - protein, 222 aa, Unknown
  Obtained from environmental sample
  DOMAIN (1)...(218): tRNA synthetases class II (D, K and N)
  misc_feature (1)..(222): Xaa is any amino acid
MVEPEIAFAELDDNMALAEDFLKYIVNTALTECSGELEFFNAHIEKGIIESLNNTTNAKFSHITYTEAVKELEKAAASKKVSFEFEPHWGNDLQSEHEKFLTEKIAGGPVIVTDYPKDIKAFYMKQNDDDKTVRAMDVLVPRLGEIIGGSQREDDLEKLVRRMKEMNLKTEDYYWYLDLRRYGSVPHSGFGLGFERLIQYISGMTNIRDVIPYPRAVGQAEF

SEQ ID NO: 3423 - DNA, 567 bp, Unknown
  Obtained from environmental sample
  misc_feature (1)..(567): n is a, c, g, or t
atgaacagagaccctgaacttgtaagagcgctggattatatactcaatcacactaacgaagcctctatcgaagttcttgccgaagccgtaatcaggcgcaggcgggatttatcaatatatcaggcgacaggaaccacccccgaccttcagcgtatggcaagccagataaccgaacagatcaacgccggtgtcggcggcagcgtcgaaaccatgaaaagctcaatccgcgaaatgatgattaggattatcaaggaaaacgcgcctgaactttccccggatcagatagaagagcttagccgggcgtggcttccggaaaccccctcaaacaaagaaaaagacatgccccgcgatatgcttgtctccatgatagagcagtttatttctttttcacgcggaaccatgaaggcttctgtggacaaaagccttcgcgaggaaatgggcgcgtggccgcagaagtactggaacgcctttcccccgcttatccgttccattattaccgaattcttaaaagataaaataactganaaagattttaattcaaaaattggaatcgcgttagaactgtaa

SEQ ID NO: 3424 - protein, 188 aa, Unknown
  Obtained from environmental sample
  misc_feature (1)..(188): Xaa is any amino acid
MNRDPELVRALDYILNHTNEASIEVLAEAVIRRRRDLSIYQATGTTPDLQRMASQITEQINAGVGGSVETMKSSIREMMIRIIKENAPELSPDQIEELSRAWLPETPSNKEKDMPRDMLVSMIEQFISFSRGTMKASVDKSLREEMGAWPQKYWNAFPPLIRSIITEFLKDKITXKDFNSKIGIALEL

SEQ ID NO: 3425 - DNA, 846 bp, Unknown
  Obtained from environmental sample
  misc_feature (1)..(846): n is a, c, g, or t
ttggaaaataccctgataaaacagcattcgccaaaatataatatcaatcttaaagacggtaaaacatatcccgttataaaaattacaaatgaagatttccaaagagttttcaggacccgccgtataattcatgataacagtcattattttggaccttttccgaatgtgcacaacgtagatataatgttggaacttattgataaactgctgcctcttcgtaaatgtcaaaaaataaaaaaggacggaccgtgtatatattatcacataagccgttgtatggccccttgctgcggaaaaataaattctgaggaatacaatcttcacgtacagcgtgtgcaaaaactgctttgcggagaaacagattcattaatcattgaccttacatcacagatgcatgaagcggccagaacgctgcaatatgaaaaggcggcgcagatcagaaatacaatcaaggctattgaaaacctgacaagcgaagacagctctgtgcaggatttaaacccggaagacagagactatattgcctgggctgaggaaggcgtacttacgacatttacggttttctccatgcgcggcggaaaaatgacaggccgcgatttgttccgtacccgttccgctgccgatgaatgggaatctttggaaacttttattacttcgtattatgacagctcccgccctcccccgctaagaatttttttacagacaattatttcaaataacattacaaggaagcagactgaaacagtgtctaacgaaagtacggaaacccccgatattgtacctttattgagtaactggattaagaccaatcttaattgtgagcctgaatttatatttacaacatga

SEQ ID NO: 3426 - protein, 281 aa, Unknown
  Obtained from environmental sample
  DOMAIN (121)...(156): UvrB/uvrC motif
  misc_feature (1)..(281): Xaa is any amino acid
MENTLIKQHSPKYNINLKDGKTYPVIKITNEDFQRVFRTRRIIHDNSHYFGPFPNVHNVDIMLELIDKLLPLRKCQKIKKDGPCIYYHISRCMAPCCGKINSEEYNLHVQRVQKLLCGETDSLIIDLTSQMHEAARTLQYEKAAQIRNTIKAIENLTSEDSSVQDLNPEDRDYIAWAEEGVLTTFTVFSMRGGKMTGRDLFRTRSAADEWESLETFITSYYDSSRPPPLRIFLQTIISNNITRKQTETVSNESTETPDIVPLLSNWIKTNLNCEPEFIFTT

SEQ ID NO: 3427 - DNA, 825 bp, Unknown
  Obtained from environmental sample
  misc_feature (1)..(825): n is a, c, g, or t
atgggcattattgatgaatttaaaatccacagtatatgcgcaggacgatcttcaatacaaaaatatattctttcaggcggcaggacggaaacaagagcaattgatttgggagaaaacaacagcggtgtaatcagaattgacgctgcaggcggaagagtaagcatgaaaggaaacggcgcttccggcagttttaacagcgaatttcgtgaaaacggaaggtttcgtttttctgacgcatctgaaatgaacttttttatccgcgccagtcaaaatccgtaccttttgaacggcagcccatggattagttttacgcccggcactaatatatccggcattaacggacgttatgtgcaaattgccgttgatttttatccgtctgccaacggtgagagcagcccctaccttagcgagatgcgcataatttataaaccgggagaaccgccccttcctcctggaaatttgacagccacagcagttgacggtggagttcttctccgctggaagcaaagccctgattcaaatacggttggttacttaatatattacagttcagtccgtggagaactttttggcaacgacgctttactgggagcttcgcctattgatgcggggaacaggaacagtctgtttgttgacggtttaaaaaacgggacgctttattatttcagagtagccgcttatgattatgtttcaggaacggttaaccacaatgtcggagaattctcaagggaagtaatggcgaggcctcttgcggggttaactcttgcagaaatgttcccgcagggattggagactgtgccgacaggcggcgtgaatggattctga

SEQ ID NO: 3428 - protein, 274 aa, Unknown
  Obtained from environmental sample
  DOMAIN (148)...(233): Fibronectin type III domain
  misc_feature (1)..(274): Xaa is any amino acid
MGIIDEFKIHSICAGRSSIQKYILSGGRTETRAIDLGENNSGVIRIDAAGGRVSMKGNGASGSFNSEFRENGRFRFSDASEMNFFIRASQNPYLLNGSPWISFTPGTNISGINGRYVQIAVDFYPSANGESSPYLSEMRIIYKPGEPPLPPGNLTATAVDGGVLLRWKQSPDSNTVGYLIYYSSVRGELFGNDALLGASPIDAGNRNSLFVDGLKNGTLYYFRVAAYDYVSGTVNHNVGEFSREVMARPLAGLTLAEMFPQGLETVPTGGVNGF

SEQ ID NO: 3429 - DNA, 384 bp, Unknown
  Obtained from environmental sample
  misc_feature (1)..(384): n is a, c, g, or t
atgggctatccctgtattgatattatggtgactgtcaccggattacaatattccgaactgaacggtactgaattcgcttttgaagcctgcgccagcatggcatttgacgaagcctgccgcgccgcctctcctatacttctggaaccgatcatggctgtcaaccttacatgcccgcatgaatttgtcggcgaagtgatgggccttgtgacccagcgcggcggtcaaattttcagcatggacgcaaaagccgacgttgatgaaataaaagcccaggctcccatggcgcagatgttcggctttatgacctccctgcgcagcgtaagtcagggccgcgcaagtttcagtatggaattttcgcattttgagaagaagacgggaaaataa

SEQ ID NO: 3430 - protein, 127 aa, Unknown
  Obtained from environmental sample
  DOMAIN (45)...(127): Elongation factor G C-terminus
  misc_feature (1)..(127): Xaa is any amino acid
MGYPCIDIMVTVTGLQYSELNGTEFAFEACASMAFDEACRAASPILLEPIMAVNLTCPHEFVGEVMGLVTQRGGQIFSMDAKADVDEIKAQAPMAQMFGFMTSLRSVSQGRASFSMEFSHFEKKTGK

SEQ ID NO: 3431 - DNA, 855 bp, Unknown
  Obtained from environmental sample
  misc_feature (1)..(855): n is a, c, g, or t
gtgaaagtatttcatcacctgacacactggttttccaataacagttatttatttattcaaaataattcaatttattcatttgaattacaccacgggaattccaaaatcaaacccgataatatttcttcatctttggtaaatgacggtgaaaaagcacagtacactatcaatcccggaccggcttccaattatcaattattggtgagcgcagattataaagagttttccggctccattgtcaactttgaggcgggacatatatacaactttgattttaacggcagtatttcactggttaaagatattgagttaaaacttgaaaacgtaaatggattcgcaatacctcaaccacctgccgctcctgtagtaataacttcaaatagagctatatcactgcgatggactgccgttgaaagtgcaacggcttatgaaatttgggtggctacagtaaatgattcgtcttcagcgataaaacacggaagtgatgttacagcttcgctttccactactataagcggcttgaacaacggaaccacatattacatctggctcaaagcaaaaaataacatgggcacaagcggctttagccctgtggtaaccggaacgccttccgccgcgactgttaaaccgcccgatcctcagaccgcgccgtcaataattacgggaaacggacaacttaccgttagttggcaggctgttactgatgcagatgtttatgaagtttggatagggacaatgaacaatgcacaaagtgcaacaaaaagaggtgaagatgtatcagagctttccaccggtaataccagtttgaataatggaacaagctattatgtctggataaaggcgaagaatatatag

SEQ ID NO: 3432 - protein, 284 aa, Unknown
  Obtained from environmental sample
  DOMAIN (115)...(196): Fibronectin type III domain
  misc_feature (1)..(284): Xaa is any amino acid
MKVFHHLTHWFSNNSYLFIQNNSIYSFELHHGNSKIKPDNISSSLVNDGEKAQYTINPGPASNYQLLVSADYKEFSGSIVNFEAGHIYNFDFNGSISLVKDIELKLENVNGFAIPQPPAAPVVITSNRAISLRWTAVESATAYEIWVATVNDSSSAIKHGSDVTASLSTTISGLNNGTTYYIWLKAKNNMGTSGFSPVVTGTPSAATVKPPDPQTAPSIITGNGQLTVSWQAVTDADVYEVWIGTMNNAQSATKRGEDVSELSTGNTSLNNGTSYYVWIKAKNI

SEQ ID NO: 3433 - DNA, 798 bp, Unknown
  Obtained from environmental sample
  misc_feature (1)..(798): n is a, c, g, or t
gtgcccactaccaaatcagcgatgattggcgacatcggctaccttaagcttataacctttacccccaaaacggtggaacgcgccgccgaagccattaacgatttcaaatccaaaaactttaagggtgtgatcctagaccttaggaacaactacggcgggcttttaaactcggcgattgacgtttccagtctgtttctggaaggcggagtcgtggttagcaccaagtcccggattgagacggaaaaccacgtctttaatacacgcagaccctttctggtgccttccagtattccagttatcgtgctgattaacaaaggctccgcttccgcttcggaaattgtcgccggagcgcttaaagacaggggaagagccttccttgtaggggaaaaatcctacggcaaaggttccgtacagcaggtgtacccgctggataccgccggcttcaagatcactaccgcccgctactacacgcccagcgatgtaaacatcgacaaaatcggcataccgccggaccgcctggtcaagtttcccgagttcacagacgctgacgcggaaaaactaaatacgcttataaaagacaacaaaataccggcttatgtaaaagacaacccaaaggcaaacccctcccagatcgaggcctttgccaaaacccttgaaagggattataaacttgatttgtccctgcttaaacgccttatacgcaacgagcagaaccgcaccaccatcgcgccggtttacgatctggaatacgacgttcaacttcaggaagcggtgaacatccttaaaagcggcgaataa

SEQ ID NO: 3434 - protein, 265 aa, Unknown
  Obtained from environmental sample
  DOMAIN (11)...(174): Peptidase family S41
  misc_feature (1)..(265): Xaa is any amino acid
MPTTKSAMIGDIGYLKLITFTPKTVERAAEAINDFKSKNFKGVILDLRNNYGGLLNSAIDVSSLFLEGGVVVSTKSRIETENHVFNTRRPFLVPSSIPVIVLINKGSASASEIVAGALKDRGRAFLVGEKSYGKGSVQQVYPLDTAGFKITTARYYTPSDVNIDKIGIPPDRLVKFPEFTDADAEKLNTLIKDNKIPAYVKDNPKANPSQIEAFAKTLERDYKLDLSLLKRLIRNEQNRTTIAPVYDLEYDVQLQEAVNILKSGE

SEQ ID NO: 3435 - DNA, 615 bp, Unknown
  Obtained from environmental sample
  misc_feature (1)..(615): n is a, c, g, or t
gtgccgtatgaggctggagacgtgctggtatttgaccggggatacaccgattatggctattttgctgcaatatgtgaaaaaaaagccttttntgtgacacggctgaagaaaaacgcggtatataggcgggtcaaaaagaatccggtcagggaaggcggaaatatcatatccgattatgaaataattattccatcattatcaaatgaaataacattgcgtaaaataacagtccgtgatcctgaaacaaaggaacaggtagtattattaacgaataacctgaagtggtctgccgtgacggtggccggagtatataaggaccgagggcagatagaaatattttttaagacgataaaacaaaacttgaagataaaacgattttatggcaactcaaagaacgcggtaatgactcaagtttggatagcgttaatagcatacctattattttatctgttgaaagcaaagtcaaagatttttcatatgtcatttactaattttatctcggtaataaagacaatgttgtttcaacgtgtttctctttttgcttttttaagcggtgaaagcccgccgcctaaacctaagaaattacttgaatgtcagcaggagttcgcatggtag

SEQ ID NO: 3436 - protein, 204 aa, Unknown
  Obtained from environmental sample
  misc_feature (1)..(204): Xaa is any amino acid
MPYEAGDVLVFDRGYTDYGYFAAICEKKAFXVTRLKKNAVYRRVKKNPVREGGNIISDYEIIIPSLSNEITLRKITVRDPETKEQVVLLTNNLKWSAVTVAGVYKDRGQIEIFFKTIKQNLKIKRFYGNSKNAVMTQVWIALIAYLLFYLLKAKSKIFHMSFTNFISVIKTMLFQRVSLFAFLSGESPPPKPKKLLECQQEFAW

SEQ ID NO: 3437 - DNA, 603 bp, Unknown
  Obtained from environmental sample
  misc_feature (1)..(603): n is a, c, g, or t
atgataaaaactgtaaaatccatagacctgaaaggtaaacgggtcattatgcgtgttgactttaacgtgcccatgaaagacggggtagtgcaggacgatacccgcattgtggccgccatacccaccattcagtatatcatagagcagggggcaaagacccttacgcttatgtcccacttgggcgatccttccaaggacgcgaaaaaagcacaggaaaaagccgagaaagacggcaaagcatttgacaaggatgcgtacattaaaggcaagcaccgcatggcgcctgttgccgcgtatcttggccagaagctgggcaaacccgtgatcttcgccggagaggacggctgctacggcaaaaaggcgtttatcgaaagccaaaaagatggctcgatcatcatgctggaaaacacccgcttccataaagaggaaacctcctcggatccggcggagttggacaagctggcaaaagagcttgcgacatacggcgatgtgttcgtgaacgatgcgttcggtaccgctcaccgcgatcacgcttcgacagcttccatcgcccaaattcgtgacggtgtcggtagcgggcttcctcatggaaaaaagagttaa

SEQ ID NO: 3438 - protein, 200 aa, Unknown
  Obtained from environmental sample
  DOMAIN (1)...(200): Phosphoglycerate kinase
  misc_feature (1)..(200): Xaa is any amino acid
MIKTVKSIDLKGKRVIMRVDFNVPMKDGVVQDDTRIVAAIPTIQYIIEQGAKTLTLMSHLGDPSKDAKKAQEKAEKDGKAFDKDAYIKGKHRMAPVAAYLGQKLGKPVIFAGEDGCYGKKAFIESQKDGSIIMLENTRFHKEETSSDPAELDKLAKELATYGDVFVNDAFGTAHRDHASTASIAQIRDGVGSGLPHGKKS

SEQ ID NO: 3439 - DNA, 756 bp, Unknown
  Obtained from environmental sample
  misc_feature (1)..(756): n is a, c, g, or t
atgagtaatagaccatactacattgccggaaactggaagatgcacagaacaagggccgaagcggcgcaacttgccggagcccttgttgcggagctgaaagacgggaagcacaagtacctggttgcgccttcctttaccagccttgaaaccgtagccgccattgtcgaaggcagcaatatccgcctgggggcgcagaactgcgcctgtgaggaacaaggggcgcataccggtgaagtttcggtattgcagcttaaagacattggggtacagacaataattctgggccacagcgaaaggcggcatacctataaagaagacgacgcgctgatcaacaaaaaagtcaagctggccttgaagcacggttttgaagtgatcctgtgcgtcggggaattgctggaagagcgggaggcgggcagggcggaagcggtctgcgaaacccagacggttaaggggttggaaggggtaagcgcctcggacctttccaacattatcatcgcctatgagccggtgtgggcaatcggaacgggaaaaaccgctacgccggaagatgcggacgcaattcacgcctttgtgcgcaaagtaatcgctaggctttacggtgaagacgccgccgccaggatgataatccagtatggcggctcggtaaagccggaaaacgccgcacagcttatgaagaaggagaatattgacggcgcattggtaggaggggcctcgcttaagccggaaacctttgtaccaattgccaagttttcctga

SEQ ID NO: 3440 - protein, 251 aa, Unknown
  Obtained from environmental sample
  DOMAIN (6)...(248): Triosephosphate isomerase
  misc_feature (1)..(251): Xaa is any amino acid
MSNRPYYIAGNWKMHRTRAEAAQLAGALVAELKDGKHKYLVAPSFTSLETVAAIVEGSNIRLGAQNCACEEQGAHTGEVSVLQLKDIGVQTIILGHSERRHTYKEDDALINKKVKLALKHGFEVILCVGELLEEREAGRAEAVCETQTVKGLEGVSASDLSNIIIAYEPVWAIGTGKTATPEDADAIHAFVRKVIARLYGEDAAARMIIQYGGSVKPENAAQLMKKENIDGALVGGASLKPETFVPIAKFS

SEQ ID NO: 3441 - DNA, 555 bp, Unknown
  Obtained from environmental sample
  misc_feature (1)..(555): n is a, c, g, or t
atgaaggagataaacgacaaccagataattgatctggtcgagaaattatgcattgacgcaaattgttatcttaataaggacatagaacaagaactgtccaaacgtttggacagtgaagactcgccccttgggaaaaacgtaatagagacaattatcgagaacgctaaaatcgcaagggaagaccaggttccaatctgccaggacacgggcatggcagttgtttttgtcgagcttggaaatggcgtgcatttttcaggagacctggaagaagcaataaacgaaggcgtccgccggggatataaaaaaggctatttaagaaattccgttgtaaaagaccctattgacagggtgaataccaatgataacaccccggctgtaattcattattcggtaacaaccggagataaaataaaaatagccgttgcgccaaaaggtttcggaagcgaaaatatgagcgccctggcaatgctcaaaccatcagacggcatcgagggagttaagggctttattatcaatacagtgtcaaaggccggggccaatccctgcccccaataa

SEQ ID NO: 3442 - protein, 184 aa, Unknown
  Obtained from environmental sample
  DOMAIN (9)...(184): Fumarate hydratase (Fumerase)
  misc_feature (1)..(184): Xaa is any amino acid
MKEINDNQIIDLVEKLCIDANCYLNKDIEQELSKRLDSEDSPLGKNVIETIIENAKIAREDQVPICQDTGMAVVFVELGNGVHFSGDLEEAINEGVRRGYKKGYLRNSVVKDPIDRVNTNDNTPAVIHYSVTTGDKIKIAVAPKGFGSENMSALAMLKPSDGIEGVKGFIINTVSKAGANPCPQ

SEQ ID NO: 3443 - DNA, 837 bp, Unknown
  Obtained from environmental sample
  misc_feature (1)..(837): n is a, c, g, or t
gtggccgaaagtgctcaaacgggtcctgcaacggtgattatttccggtatgggattgggtatgatttcaacgtttatcccggttgtaaccattggttttgctattattctaagttatctttgcgcaatccaatttaatataggaagcgatctattatctcctcaaaatctgagtttgggtctttacggtattggtatcgctgcagtgggtatgctttcaacattaggcattacgctggctacggatgcttatggtccgattgccgacaatgccggcggtaacgccgaaatgagcggacttggcgcagaagtgcgcaaacgcaccgatgcacttgatgcacttggaaatacgacggctgccacaggaaaaggctttgccatcggttcggcagcgcttacggctttggctttgttagcctcatacgtggaagaattgaaaatcggtttggaacgcatcggtacaacggtattgaacatcgcagaaggtatttcgattgaaacaacgaaggcctctttcggagattttatgacgtattatcaagtgacgctgatgaacccgaaagtgttgattggtattttcatcggctcaatgatggcgtttttgttctgcggtttgacgatgaatgccgttggacgcgcagctcagaaaatggtagaagaagtgcgtcgtcaattccgcgaaatcaaaggtattttagaaggtaaagctacacccgactatgccaaatgtgtggaaatctccaccaaaggcgctcaacgcgaaatgttgttcccatcgttgctgggtatagcagcgccgattataacccgttttgctgtttggtgtggccgggggtaa

SEQ ID NO: 3444 - protein, 278 aa, Unknown
  Obtained from environmental sample
  DOMAIN (1)...(277): Inorganic H+ pyrophosphatase
  misc_feature (1)..(278): Xaa is any amino acid
MAESAQTGPATVIISGMGLGMISTFIPVVTIGFAIILSYLCAIQFNIGSDLLSPQNLSLGLYGIGIAAVGMLSTLGITLATDAYGPIADNAGGNAEMSGLGAEVRKRTDALDALGNTTAATGKGFAIGSAALTALALLASYVEELKIGLERIGTTVLNIAEGISIETTKASFGDFMTYYQVTLMNPKVLIGIFIGSMMAFLFCGLTMNAVGRAAQKMVEEVRRQFREIKGILEGKATPDYAKCVEISTKGAQREMLFPSLLGIAAPIITRFAVWCGRG

SEQ ID NO: 3445 - DNA, 885 bp, Unknown
  Obtained from environmental sample
  misc_feature (1)..(885): n is a, c, g, or t
atgacaaggcccggcgatattcgcgacaaaatcaaagacgctttcctcatctcaatcggcataggcggctcctacttcggcgccaaggcggccatcgagttctgctcgcccaccttcgacgacctgcgcaagccgcgcgtactcttcgccggccaaaacataaacagcgactacctctccgacatgctcgaactcgtcaaaaaccgcgaggtcgccgtaaacgtgatctccaagagcggcacgaccacggaaccggccatcgcattccgcatcgtgcgcgagtggatggagaagcgctacggtcgcaaaggcgccgcggagcgtattgttgccaccaccgaccgggccaaaggggcgctgcgcaagttagccaaggaggagggctacacggccttcgaaatccccgacgacgtaggcggacgcttctccgtcctcacgcccgtcggcctgttcccgttggcggttgcggggcttgatattaacaagctgctcgatggcgcggcgagcgcgtcggccttctgcgccggcgagagcgtcgaaaagaacctcgccggacgctacgccgccatccgcaacatactcttccggaagggctacaccaccgaggtcatggcgaccttccagccgcagctgcactacgtaaacgactggtggaagcagctctccggcgagagcgagggcaagaaccaaacgggcatcatgcccgccgggctcgactacaccaccgacctgcactcgttggggcagtatctgcaggatggattgcgcaacatctttgaaaccttcatgatcctcaagaagacgaataagacgatgaccgtccccaaattcgacgacgacagcgacgacctcaactacttggccggcaggagtttgaggacataa

SEQ ID NO: 3446 - protein, 294 aa, Unknown
  Obtained from environmental sample
  DOMAIN (1)...(294): Phosphoglucose isomerase
  misc_feature (1)..(294): Xaa is any amino acid
MTRPGDIRDKIKDAFLISIGIGGSYFGAKAAIEFCSPTFDDLRKPRVLFAGQNINSDYLSDMLELVKNREVAVNVISKSGTTTEPAIAFRIVREWMEKRYGRKGAAERIVATTDRAKGALRKLAKEEGYTAFEIPDDVGGRFSVLTPVGLFPLAVAGLDINKLLDGAASASAFCAGESVEKNLAGRYAAIRNILFRKGYTTEVMATFQPQLHYVNDWWKQLSGESEGKNQTGIMPAGLDYTTDLHSLGQYLQDGLRNIFETFMILKKTNKTMTVPKFDDDSDDLNYLAGRSLRT

SEQ ID NO: 3447 - DNA, 816 bp, Unknown
  Obtained from environmental sample
  misc_feature (1)..(816): n is a, c, g, or t
atgccggcaaaggctgtagaggtaacggccgtgtttgaggcgacgttgtacgtgttgacggttgtgggcgggaccggcggcggtagttacgcggctaatgagacggttaacataagggcgggagcggcgccgaccggtaaggagttcacaaactggacgtcaacaaacaacgaaggggtgtttaccaacgcgaatagcacgattacgacatttaagatgccggcaaaggccgtaacggtaacggcgaattatgagtttgtcgtcacagattccagagacgggaataaatacaggacgacggtgataggcggcaaggtgtggatggcggagaatatgaactatgaaacagagaattcgtggtgttatggtaatctccccggtaattgtgaaaaatacggcaggctctatgattgggcaacggcattgacggtttgccccgtcgggtggcatttgccgtctcgtggtgagtggggggatttggctaaaacagccggcggcaccggtcctttcggtgatgggggcgtagcaggtaagaaacttaaagctaatagcgattggagcgaagccgcgggtacggatgattttggtttttcggccctgcccggcgggtacggaatcagcagtaccggcttctacgagattggaaaccgcagccattggtggacgtcaacggagtcagagagtgagccggatagagcctactaccggcgagctgacgcctacaatattgaagtcgatgatgtctattccgacaggttgggtgagatggctaattacaagattcgcgaattctctgtacgttgcattggagactag

SEQ ID NO: 3448 - protein, 271 aa, Unknown
  Obtained from environmental sample
  misc_feature (1)..(271): Xaa is any amino acid
MPAKAVEVTAVFEATLYVLTVVGGTGGGSYAANETVNIRAGAAPTGKEFTNWTSTNNEGVFTNANSTITTFKMPAKAVTVTANYEFVVTDSRDGNKYRTTVIGGKVWMAENMNYETENSWCYGNLPGNCEKYGRLYDWATALTVCPVGWHLPSRGEWGDLAKTAGGTGPFGDGGVAGKKLKANSDWSEAAGTDDFGFSALPGGYGISSTGFYEIGNRSHWWTSTESESEPDRAYYRRADAYNIEVDDVYSDRLGEMANYKIREFSVRCIGD

SEQ ID NO: 3449 - DNA, 498 bp, Unknown
  Obtained from environmental sample
  misc_feature (1)..(498): n is a, c, g, or t
atggaggggagcaaaatgaaaccgaccaacagaacgcacaaacaatcggcaaaggccgcatcgatatgctctgccgtcctcgctgcattgttcgtatcctttgccagcgtcacatgcggcggcgggagccgcttggactccaacggcctggatgcggccccatcctccaatgccgtcacgggggtgtccctaaacaaggcttcaaccagcatagccgtgggccgcagtgagaccttgacggcaaacgtggagccgtccaacgccagaaacaagagtgtcacatgggcgagcggcaacaccgctgtcgcgctggtgagcaacgggacagtggtgggcctgaccgccgggacggccgtaattaccgtcacaacccaagacggcaacaaaaaggccacatgcactgtgactgtgtcagcgacaacagtctccgtgacgggcgtcagcctcaccaagacgtcgacaagcatagaggctggcagccagagcgtctctcgataa

SEQ ID NO: 3450 - protein, 165 aa, Unknown
  Obtained from environmental sample
  SIGNAL (1)...(28)
  DOMAIN (58)...(135): Bacterial Ig-like domain (group 2)
  misc_feature (1)..(165): Xaa is any amino acid
MEGSKMKPTNRTHKQSAKAASICSAVLAALFVSFASVTCGGGSRLDSNGLDAAPSSNAVTGVSLNKASTSIAVGRSETLTANVEPSNARNKSVTWASGNTAVALVSNGTVVGLTAGTAVITVTTQDGNKKATCTVTVSATTVSVTGVSLTKTSTSIEAGSQSVSR

SEQ ID NO: 3451 - DNA, 741 bp, Unknown
  Obtained from environmental sample
  misc_feature (1)..(741): n is a, c, g, or t
gtgcttgcaatatctgctattcttgggacggtaatgctggtcttttttgccaggcatcttaccaatcccctgcaacgggtagtggaaaccatgaacggcatcacttccaatggcgaactatcttcgagagttgaagtggagtacaacgacgaaacgggaaaactggcctccacctttaacctgatgatctcggagctggaaaaagcctacacccaaatcaagcgttacgcctttgatgcggtcttggcgggcaaaaaagaacagcggatacgtcaaattttccaaaagtacgttcccaaagaccttatagacaaattctttgcctccccggaatccatgcttgttggcgaaaacaggactctggcgatacttttttccgacatacggagcttcacaaccatttccgaaaacatggctccggacgatcttgttaattcgctcaacaggtatttttcaggccaggttgacgtaatcatgaacaggaacggaattgtagataaatacataggcgacgccatcatggccttctggggcgcgcctgttaaacacgacgatgacgccctgcaggccgtcctttcagggcttgatatgatggaagccgtcaaggccttcaacgagaaccagaacaagctagggaagcctgaattccacataggcattggaattaactacggtaccgtaacggtaggcaacatcggcagtgaaagaagatggattatacagttatcggcgacatggtaa

SEQ ID NO: 3452 - protein, 246 aa, Unknown
  Obtained from environmental sample
  DOMAIN (113)...(244): Adenylate and Guanylate cyclase catalytic domain
  misc_feature (1)..(246): Xaa is any amino acid
MLAISAILGTVMLVFFARHLTNPLQRVVETMNGITSNGELSSRVEVEYNDETGKLASTFNLMISELEKAYTQIKRYAFDAVLAGKKEQRIRQIFQKYVPKDLIDKFFASPESMLVGENRTLAILFSDIRSFTTISENMAPDDLVNSLNRYFSGQVDVIMNRNGIVDKYIGDAIMAFWGAPVKHDDDALQAVLSGLDMMEAVKAFNENQNKLGKPEFHIGIGINYGTVTVGNIGSERRWIIQLSATW

SEQ ID NO: 3453 - DNA, 792 bp, Unknown
  Obtained from environmental sample
  misc_feature (1)..(792): n is a, c, g, or t
atggggnnncccatgtatcagatcggccgagaactccaagcaaaaggaactatcagcaacgacgcgatgaccagttggggctaccccgtaactaaggatttcaccgacgacccatccccggacaatcccggcaaagacgtcaagcgtctgcatagaaaactttgcggttccgacgcttccacaaccatagacaacgtgttgatagaggagtgggacggttatacatggaggcgcgtattcggcaacggcccgctccccgggcgcgaagtcgtaaacgtcgtgatccgcgacacggtgcctcagggcgtgacgttcatcaatttcatagaaccgtacccgttcggcaaagcgcccaagataaacggacgcgtcatcacgtgggagatagacaaattgctgataggcgagaaggggagcatcaaatacaccgttcgtgccgacacgccgaacgacacgaagaacgtcgtcgtcaagtcgaacgcgtgggcggtagccgacagggagtcgccgatgaagagcacggcgacgctcgtgataacgagggattcgttgccgccgccgccgccggaaccgaccacaatgtacaagagggcgaacaagactgcatactcccccggcgacacggtggtctacaccgtcgcctacaagcagacgcacgggtacccggccgtcagcagttcgtcgagtcagtgggagggcgcgaataagtcaatcagcgcggatgggaaaaccatctcttttggaacagcaatgtcgatatggcctttacgccggcggccggtacgaacgtaa

SEQ ID NO: 3454 - protein, 263 aa, Unknown
  Obtained from environmental sample
  misc_feature (1)..(263): Xaa is any amino acid
MGXPMYQIGRELQAKGTISNDAMTSWGYPVTKDFTDDPSPDNPGKDVKRLHRKLCGSDASTTIDNVLIEEWDGYTWRRVFGNGPLPGREVVNVVIRDTVPQGVTFINFIEPYPFGKAPKINGRVITWEIDKLLIGEKGSIKYTVRADTPNDTKNVVVKSNAWAVADRESPMKSTATLVITRDSLPPPPPEPTTMYKRANKTAYSPGDTVVYTVAYKQTHGYPAVSSSSSQWEGANKSISADGKTISFGTAMSIWPLRRRPVRT

SEQ ID NO: 3455 - DNA, 570 bp, Unknown
  Obtained from environmental sample
  misc_feature (1)..(570): n is a, c, g, or t
atgaacgaagaatctcaattatggtataagagtccggcgagagaatgggtcgaggctttgccgataggaaatggcaggctcggggctatggtgttcggcggaattacgcatgagcgcgtacagctaaatgaggattctttgtggtccggcggcttcagagaccgcaataacccggatgcgaaagcaaatctggaaaatatacgttccctgctcaaagcgggaaatgtatccgaggctgaagaacttgcgcgtttttcccttaccggtctgcctgagtttcagcgctcttaccagattttgggcgatctgtttattaattttcatggaatggacggcaagcatgaagaatacatcagattgcttgatttggaaaacgcggtatcgcttgtaagctataaaataggcgggtacagctatgagcgtgaaatctttgcgtctgctcccgctgatgttattgttatgcggctgtctacaacaaaccctgtgggcatttcctttgatgcaaggcttgtacgtaaccgtttatgtgatcattgcggaaaaattgacggggaaacggtttttttttga

SEQ ID NO: 3456 - protein, 189 aa, Unknown
  Obtained from environmental sample
  misc_feature (1)..(189): Xaa is any amino acid
MNEESQLWYKSPAREWVEALPIGNGRLGAMVFGGITHERVQLNEDSLWSGGFRDRNNPDAKANLENIRSLLKAGNVSEAEELARFSLTGLPEFQRSYQILGDLFINFHGMDGKHEEYIRLLDLENAVSLVSYKIGGYSYEREIFASAPADVIVMRLSTTNPVGISFDARLVRNRLCDHCGKIDGETVFF

SEQ ID NO: 3457 - DNA, 774 bp, Unknown
  Obtained from environmental sample
  misc_feature (1)..(774): n is a, c, g, or t
gtgaacttgcacggcaaaaaaatcttgctcggagtaacgggtggcatagcggcttacaaggccccagagttgcttcgtattttgcaaaaaagaggtgcggaggttagggtagtagtgacttccgaatctaccaaatttgttggtcaaacaacttttgcagcactctcaaattttccagtttacacggccgcagccatagattcaaaaccatttcagcatatagattaccctcgctgggcagatatttacataattgcaccctgctccgcaacaagcttagcccgttttgcttgcggcacgggcgaagaacctgtgtccctttgctttttggcaatgcagggcgaaaagtgggttgttccagctatgaattgcgttatgttcaactcaccagctgtgcagagaaatttgcaaacccttcgctcttggggggttaaaattgtagaaccagcagttgggcatttggcttgcggtgaagaaggagcagggaaattcccagagccagaatacattgcagatgagcttgaattttctgtggagaaaaaaaataaaaccctactgataaccatggggcgcacccaagaagcaatagaccctgttcgttatatatcaaacaaatcaagtgggaaaactggtgtggcaatagcaaaagaatttttacggggtggttggcgtgttatagcagtttgcgggccaatggaagcaaaattgcctaagcaatgcgagaaaatagaagtaaagagtgcagaggactcgtgccgaatactgtacatgtga

SEQ ID NO: 3458 - protein, 257 aa, Unknown
  Obtained from environmental sample
  SIGNAL (1)...(20)
  DOMAIN (6)...(121): Flavoprotein
  misc_feature (1)..(257): Xaa is any amino acid
MNLHGKKILLGVTGGIAAYKAPELLRILQKRGAEVRVVVTSESTKFVGQTTFAALSNFPVYTAAAIDSKPFQHIDYPRWADIYIIAPCSATSLARFACGTGEEPVSLCFLAMQGEKWVVPAMNCVMFNSPAVQRNLQTLRSWGVKIVEPAVGHLACGEEGAGKFPEPEYIADELEFSVEKKNKTLLITMGRTQEAIDPVRYISNKSSGKTGVAIAKEFLRGGWRVIAVCGPMEAKLPKQCEKIEVKSAEDSCRILYM

SEQ ID NO: 3459 - DNA, 744 bp, Unknown
  Obtained from environmental sample
  misc_feature (1)..(744): n is a, c, g, or t
atgctgaacaaagaagaaaatgttgaacttgacgaaatggcaatgtcggtaataggcgaagtcgtttcccaaatgattgggcatcaaataaccgctttgtccggcaagaccggtaacaaatccatttcttctgttccgcctgaggcaactaatattcccaaagcggttgttgcgctgccatcaggggattttgcgggaataacctatcaattaaatctgggagagggaaaaaatttcccaatgtgggaagtgctgggaccttcggtcgctatggatattgccaaggctttatccggaggcggccaacagcagaaacaggccggtggcggcggcagcgcaccgagcagcggaggcatgaatatgggcggtatgcaaatgggtatgggggggatgggtatgggcggaggcggtatggcctacggctcatctaacgtacaatccgtacaattccccaacctgatgcctcacggcgggccgcaggaagcgggcaacatcggcctgatcatggacgtgtacatggaaatgaccgtcgagctgggccgcaccagaaaactcataaaagaaattctcgcaatgggcgaaggtacgattattgaattggacaaactcgccggcgagccggttgacattctggtcaaccataaactgatagccaagggcgaagtcgtcgtcattgatgaaaacttcggcgtccgcgttaccgaaatagtgtctcccatggaacgcatgagttacatggactag

SEQ ID NO: 3460 - protein, 247 aa, Unknown
  Obtained from environmental sample
  DOMAIN (164)...(240): Surface presentation of antigens (SPOA) protein
  misc_feature (1)..(247): Xaa is any amino acid
MLNKEENVELDEMAMSVIGEVVSQMIGHQITALSGKTGNKSISSVPPEATNIPKAVVALPSGDFAGITYQLNLGEGKNFPMWEVLGPSVAMDIAKALSGGGQQQKQAGGGGSAPSSGGMNMGGMQMGMGGMGMGGGGMAYGSSNVQSVQFPNLMPHGGPQEAGNIGLIMDVYMEMTVELGRTRKLIKEILAMGEGTIIELDKLAGEPVDILVNHKLIAKGEVVVIDENFGVRVTEIVSPMERMSYMD

SEQ ID NO: 3461 - DNA, 354 bp, Unknown
  Obtained from environmental sample
  misc_feature (1)..(354): n is a, c, g, or t
atgttcattgtagatgaaaaagacaaagaataccggtttggggactcaggccccaaatacctcatgcagggtccgcggatgaattttgctctggtgcaatttatgcccggtcaggatttccgcgcccattaccatgaggtgatggaagaaaatttttacattcttgaggggaccgttaccatcgttgtagacggtacggcgcatacccttaaccccggccaactcatacatattgaacctaaggaggttcattatgtgattaataggtcttccgctccggttcgcatggtttctacccttgcgccttttcagcaggttgataaagtcgaggttgacaatcctgtaattgaatga

SEQ ID NO: 3462 - protein, 117 aa, Unknown
  Obtained from environmental sample
  DOMAIN (30)...(100): Cupin domain
  misc_feature (1)..(117): Xaa is any amino acid
MFIVDEKDKEYRFGDSGPKYLMQGPRMNFALVQFMPGQDFRAHYHEVMEENFYILEGTVTIVVDGTAHTLNPGQLIHIEPKEVHYVINRSSAPVRMVSTLAPFQQVDKVEVDNPVIE

SEQ ID NO: 3463 - DNA, 621 bp, Unknown
  Obtained from environmental sample
  misc_feature (1)..(621): n is a, c, g, or t
ttggatggccgtaagatttcggtaagtaagataagatctatgggccgtaacgcgtacggagtaaagggcacgaggcttcgcgagggcgattcggcggtcggcatgattatagccaacaaccaaaacagcatactaacggtaaccgacaacggccacggcaagcgcacgtcgcttgcggagtaccgccaaacgaatcgcggcggcaagggaataataaacatcaaattcaagggcaaaaacggcagcggggtcgtgtcgctcaaaggagtgcagggcgatgaagacgtattgctgatcacccgaaacggaatcataatccgaatgaacgttgaccgtatgcgggaactcagccgtttctcccaaggcgtaagactgataaatcttgacgacgacgataaggtgatagacatcgccatctgcgaacgtgacagcgaagaggaatcagatattccggtggcggcccctgttgagacgataccggaagaagaggatgttattgacgcggcggaggaagaggaagaagatgtcggggatgagggggaagatgttaacgatgaggatgaaggggaagtcacggatgaaactgacgccgtagaggatgaggcggaaggcgagggttga

SEQ ID NO: 3464 - protein, 206 aa, Unknown
  Obtained from environmental sample
  DOMAIN (41)...(92): DNA gyrase C-terminal domain, beta-propeller
  misc_feature (1)..(206): Xaa is any amino acid
MDGRKISVSKIRSMGRNAYGVKGTRLREGDSAVGMIIANNQNSILTVTDNGHGKRTSLAEYRQTNRGGKGIINIKFKGKNGSGVVSLKGVQGDEDVLLITRNGIIIRMNVDRMRELSRFSQGVRLINLDDDDKVIDIAICERDSEEESDIPVAAPVETIPEEEDVIDAAEEEEEDVGDEGEDVNDEDEGEVTDETDAVEDEAEGEG

SEQ ID NO: 3465 - DNA, 618 bp, Unknown
  Obtained from environmental sample
  misc_feature (1)..(618): n is a, c, g, or t
atgttttcgacgcctcccaaagcggacaccagcgctgaagacgcgaggcttgccgagatagagcggaatcgcgccgagatggaaaaaaagttcaatgaggcgctggcgaatgtaaacagcgaggttgacggtttccgcagggaagaagaacgaaagcgccttgaagaagaagaacgcaggcggctggaagaggagcgcctccgccttgaggaagaacgcagacgcaaagaggaggaagcgcgccgtgaggctgaacgccagcggcagattgagcgccaacggctggaggaagaacggaggagaaaacgttttcagggatattattaccatacgagccataacgggatgttgaccgcggaactcagaattggaagcgagcaggctgaatgccggtatcgctgcactgtctgcggacacgctactgttatttattcagtttcaattgatggagacaacatcacgttgaccggaggaaggaaacgcggtgatcattgtaccttccaggaatacaaactggttgagaattactatggaaatacgaacaattcagggacagtactgaacgggtgctggtataataatggcgcgagcgtgccaattgttttttacaaacgctag

SEQ ID NO: 3466 - protein, 205 aa, Unknown
  Obtained from environmental sample
  misc_feature (1)..(205): Xaa is any amino acid
MFSTPPKADTSAEDARLAEIERNRAEMEKKFNEALANVNSEVDGFRREEERKRLEEEERRRLEEERLRLEEERRRKEEEARREAERQRQIERQRLEEERRRKRFQGYYYHTSHNGMLTAELRIGSEQAECRYRCTVCGHATVIYSVSIDGDNITLTGGRKRGDHCTFQEYKLVENYYGNTNNSGTVLNGCWYNNGASVPIVFYKR

SEQ ID NO: 3467 - DNA, 366 bp, Unknown
  Obtained from environmental sample
  misc_feature (1)..(366): n is a, c, g, or t
ttgttatcngcggcggcagagcggccggtgtccaattctttcggaggagaactgggaaggcacgctgaccatgcacaanngccctcgctgaaaaaaaacagggtatacttcgcggtaaaagtccgcggggattcgatgcaggatgccggaattatggacggtgatatggcggttatagaaaaacaaagcgccgccagaaacggtgaaattgtggtagcggtggttgatgaagcggtgaccttaaaacgcttttttaaggaaagctcccgtatcaggctgcaggcggaaaatccggattacaagcccatttactgccaggatgtgcggatactggggcggcttgcccagataatccgtcagtattaa

SEQ ID NO: 3468 - protein, 121 aa, Unknown
  Obtained from environmental sample
  DOMAIN (40)...(108): Peptidase S24-like
  misc_feature (1)..(121): Xaa is any amino acid
MLSAAAERPVSNSFGGELGRHADHAQXPSLKKNRVYFAVKVRGDSMQDAGIMDGDMAVIEKQSAARNGEIVVAVVDEAVTLKRFFKESSRIRLQAENPDYKPIYCQDVRILGRLAQIIRQY

SEQ ID NO: 3469 - DNA, 564 bp, Unknown
  Obtained from environmental sample
  misc_feature (1)..(564): n is a, c, g, or t
ttgtttattggcataattccaaataaaccatgtttacattctgccctaaatgcgcgtcaaaaaatatcacttaaaaaatgggaatctttccattgccctgattgcgactttgtatactatcacaacaccgccgccgctacaggctgcattatcgaggctgacgggcggctgttgtttctggtacggggcaaggagccttcaataggcaaactggatctgtgcggcggctttgtcgatccgggcgaaggcgcgcttgagggcctgtacagggaaatcaaggaagaactcggctggtcgccgcccattccgcaaggcgcatcgcttaacgaagtatttaccttctttgcctcgttttccaatcgctatccctataaaaatattatttacaacacctgcgatatgtatttttacctttccgcgccgggtttgtgcgagcgcgatcttgttctcgaaaaggcggaaatagaggccgtccgtttcctgaaacccgaagaaattaatatgggggaaatagcttttgattcaaccaggcgggcagtgcaggcgtatttagaaagagactag

SEQ ID NO: 3470 - protein, 187 aa, Unknown
  Obtained from environmental sample
  DOMAIN (42)...(182): NUDIX domain
  misc_feature (1)..(187): Xaa is any amino acid
MFIGIIPNKPCLHSALNARQKISLKKWESFHCPDCDFVYYHNTAAATGCIIEADGRLLFLVRGKEPSIGKLDLCGGFVDPGEGALEGLYREIKEELGWSPPIPQGASLNEVFTFFASFSNRYPYKNIIYNTCDMYFYLSAPGLCERDLVLEKAEIEAVRFLKPEEINMGEIAFDSTRRAVQAYLERD

SEQ ID NO: 3471 - DNA, 450 bp, Unknown
  Obtained from environmental sample
  misc_feature (1)..(450): n is a, c, g, or t
ttggattacatagatattttgcaggaaatgctatgttacattgatgaaaacatcaaagaaaaattgagtgttgaaaaactggcagcccatgcgggtttttctccatatcatttttgcagggtgtttcaatgggggatcggttattccattatggaatatgtaaggaacaggcggctggcttttgcggcgtctgaattcaattccggtcgcaaaataactgatatatcatttatttatggatttgagactcactcaggttttacaagagcattccgccgttactttggctgttctcctgaagtgtatcgtatacacgcctcttatgatgttcctaaactgcccgtactagaaaaaaataaacaatatgtaagaggaggtattgtcatggaaccaaaaatgattaatagggaagctgtcaaaattgctgctcgtgccgctcggccgatctga

SEQ ID NO: 3472 - protein, 149 aa, Unknown
  Obtained from environmental sample
  DOMAIN (12)...(55): Bacterial regulatory helix-turn-helix proteins, AraC family
  misc_feature (1)..(149): Xaa is any amino acid
MDYIDILQEMLCYIDENIKEKLSVEKLAAHAGFSPYHFCRVFQWGIGYSIMEYVRNRRLAFAASEFNSGRKITDISFIYGFETHSGFTRAFRRYFGCSPEVYRIHASYDVPKLPVLEKNKQYVRGGIVMEPKMINREAVKIAARAARPI

SEQ ID NO: 3473 - DNA, 384 bp, Unknown
  Obtained from environmental sample
  misc_feature (1)..(384): n is a, c, g, or t
gtgatgaattttggagacatattaaacaagtgggaaaagaacaacgggatatacgacaaagacaaggaagctggaaacgcccagatcaatccgcaggaaagaagaagccgcctgaaaaacaaaaaacctgacgcggtactggatattcacggcctgagtcgcgatgaggcatggaaggctttggaaattttatttaacgattcaaaagagaaaggcctggaaaagctcctgattatccacggcaaggggaatcactcaacaggcgaagcggtgcttaaacgtattgtaatggaatttattgaacattgcccttttgccggggaaagcggcaggggaaaaaccgcggcaggcggcgaaggggccacatgggtgcttttgaaataa

SEQ ID NO: 3474 - protein, 127 aa, Unknown
  Obtained from environmental sample
  DOMAIN (47)...(127): Smr domain
  misc_feature (1)..(127): Xaa is any amino acid
MMNFGDILNKWEKNNGIYDKDKEAGNAQINPQERRSRLKNKKPDAVLDIHGLSRDEAWKALEILFNDSKEKGLEKLLIIHGKGNHSTGEAVLKRIVMEFIEHCPFAGESGRGKTAAGGEGATWVLLK

SEQ ID NO: 3475 - DNA, 606 bp, Unknown
  Obtained from environmental sample
  misc_feature (1)..(606): n is a, c, g, or t
atgagcagacttgaagtttacgaaaatattttcagcgcaaaggctttgtttgccgcgggtttgttaattatgcccgctctgctttttattcccagcaccgagtacagatgttttcaatttgtgtttttgtgtctccttgctttgctctcgggtaaaaaaatcaattttatgattatgattccgataataatgtttattatcgcatttaacctgattattccctacggacgagttttattttctttcggcgtgtttaaaataacatccggcgcgttaaaagccggagttcacagggcttttaccttgcagtcatttgtaatgctttcaacccttgcgattaggcgcgatttaaaaattcccggcgctttcggcgaattgctttgcgaatctctgcatatattttcctcaatcatgaacaagaaatacacttttccgaaacataatgtttttgtagagatcgataatcttatgctggaattaagcaatataacccttcccgctcctgatgaaaaaataattaaaacaaaacccatcggctttgttattcttgctttaattattatttcttcgtggttaccatattatgttttttcttttcgaggataa

SEQ ID NO: 3476 - protein, 201 aa, Unknown
  Obtained from environmental sample
  misc_feature (1)..(201): Xaa is any amino acid
MSRLEVYENIFSAKALFAAGLLIMPALLFIPSTEYRCFQFVFLCLLALLSGKKINFMIMIPIIMFIIAFNLIIPYGRVLFSFGVFKITSGALKAGVHRAFTLQSFVMLSTLAIRRDLKIPGAFGELLCESLHIFSSIMNKKYTFPKHNVFVEIDNLMLELSNITLPAPDEKIIKTKPIGFVILALIIISSWLPYYVFSFRG

SEQ ID NO: 3477 - DNA, 840 bp, Unknown
  Obtained from environmental sample
  misc_feature (1)..(840): n is a, c, g, or t
atgtgggaagacattatgcgctacgacagcgggcatggggaaaaaagcagtataagggagttagtggaaaaaagaagggaaggccaaggcggtattgagggattttccgcggttgtaaatgtggggcttgataaaaactggacagggcacactttagcgcaggcgaacctttacggttacgggcgcatggcgtggaatccggcggttactgcgaaagagattgcaagggaatggagcgtactttcattcacagagggggaggcggctcaaaaaacagaaaatatccttctaaaatcatatcccgcttatgaaaaatacaacgcccccttcggcgtttgctttatggtgacgcctaacactcattacggtccgaatatcgaaggttacgaattcagccgctgggggacataccaccgcgccgacgctaacgcaatcggtattgaccgtacgccttcgggcacaggctacacaacccagtattcgcagaaaaacgccgcccttttcgccgatctttcaacctgccccgaaaatttaatcttgtttttccaccgcctccgctacgactataaaatgaaaaacggccagaccttattgcagaatatctacgacacccattttgaaggatatgacgaagttgaatctatgctggaagaatggaaaagtttgaagaattcactggaaagcgaagtgtacaattcagtcctttcccgctttgaacgccagcttgcaaacgcccgcgagtggcgagatcaaattaacacgtattttaggcgtaaaaccggaatagatgatgggaagggaccgaagatttacgattatttaaaagggaaaatattatga

SEQ ID NO: 3478 - protein, 279 aa, Unknown
  Obtained from environmental sample
  DOMAIN (48)...(271): Glycosyl hydrolase family 67 C-terminus
  misc_feature (1)..(279): Xaa is any amino acid
MWEDIMRYDSGHGEKSSIRELVEKRREGQGGIEGFSAVVNVGLDKNWTGHTLAQANLYGYGRMAWNPAVTAKEIAREWSVLSFTEGEAAQKTENILLKSYPAYEKYNAPFGVCFMVTPNTHYGPNIEGYEFSRWGTYHRADANAIGIDRTPSGTGYTTQYSQKNAALFADLSTCPENLILFFHRLRYDYKMKNGQTLLQNIYDTHFEGYDEVESMLEEWKSLKNSLESEVYNSVLSRFERQLANAREWRDQINTYFRRKTGIDDGKGPKIYDYLKGKIL

SEQ ID NO: 3479 - DNA, 726 bp, Unknown
  Obtained from environmental sample
  misc_feature (1)..(726): n is a, c, g, or t
gtggagctggtcgggtctatattcatcttttacctgaagatgctgagggcgctgccctcctccctaatgcgcccccaccttctgacggagcagatgatgatcctgggtgtgcagtctatccccatagtgcttctcacctccatcttcgttggcgccgttagcgcctggcaggtgcagtacatcttcggcgacgccgtgcccctcacctacctgggcgccggcgtgggcaaagcggtcttcacggaactgggcccggtgctgaccgccctggtgatcaccggccgcataggggcgaaactggccgccgaattgggcaccatgaaggtaaccgagcaggtggacgccatggtctgcctgtccctgaacccctacacctacctgctgaccccccgcctggccgcctcctgcgtaatggtcccgatgctcaccgtcttcgccgtagccctggccatagtgagcgcccaagtgatagccgaagcctttttgggcctaagtttcgccgccttctacaaaggcgtccgcctattattcaaaacccaagacatagtaatatgtatggccaaatccttcgtcttcggcatggtgatatccctatccggctgctactacggcttccacgccaaaggaggagccgtaggcgtaggttcatacaccaaaaaagccgtagtagcggcgatggtcatggtcttggtcagcaaccttatattagtgaacgtgttactataa

SEQ ID NO: 3480 - protein, 241 aa, Unknown
  Obtained from environmental sample
  DOMAIN (1)...(241): Domain of unknown function DUF140
  misc_feature (1)..(241): Xaa is any amino acid
MELVGSIFIFYLKMLRALPSSLMRPHLLTEQMMILGVQSIPIVLLTSIFVGAVSAWQVQYIFGDAVPLTYLGAGVGKAVFTELGPVLTALVITGRIGAKLAAELGTMKVTEQVDAMVCLSLNPYTYLLTPRLAASCVMVPMLTVFAVALAIVSAQVIAEAFLGLSFAAFYKGVRLLFKTQDIVICMAKSFVFGMVISLSGCYYGFHAKGGAVGVGSYTKKAVVAAMVMVLVSNLILVNVLL

SEQ ID NO: 3481 - DNA, 630 bp, Unknown
  Obtained from environmental sample
  misc_feature (1)..(630): n is a, c, g, or t
ttgggggcggaaaatagcacaaaattttcaataaatataaacaacttgattgaagcttcagtttatttgtctgttagaaaagttgttaagccaatttggttaaatgatcgcgaccagtttctttgccctaatgacggctggaaaaatgatattagttttcaaaatgattgtttagcctttacaatatttaatacaaatatccaatcaaaatacggcgttaatcactggataccttttactgaagaagaagtaagcgcaagaaataattttgaaagccattttattgttgattatataaaagacaaaacaatacatgaagagagcgcggaactgtttggggaattaacgaaaaagcataaagccttaaaattttctgatgaagccaaagctgtctttaaggctggtaagaaattatggcaatactaccattcccaaccaacggctaatgtaaacgcttctttatacgacattcgcgaattctttcagggcagagacgacaatggaaaaatgaacaatacaagcggcgatacacaatacaatgaattgatagcggatttacgctctgccttaaaaacactatccttaaaaatacagcccaaagtgtatgaatacggatttttaattaagtaa

SEQ ID NO: 3482 - protein, 209 aa, Unknown
  Obtained from environmental sample
  misc_feature (1)..(209): Xaa is any amino acid
MGAENSTKFSININNLIEASVYLSVRKVVKPIWLNDRDQFLCPNDGWKNDISFQNDCLAFTIFNTNIQSKYGVNHWIPFTEEEVSARNNFESHFIVDYIKDKTIHEESAELFGELTKKHKALKFSDEAKAVFKAGKKLWQYYHSQPTANVNASLYDIREFFQGRDDNGKMNNTSGDTQYNELIADLRSALKTLSLKIQPKVYEYGFLIK

SEQ ID NO: 3483 - DNA, 576 bp, Unknown
  Obtained from environmental sample
  misc_feature (1)..(576): n is a, c, g, or t
atgttggaaaatctatccccaagagaacgggaaatttttgacttattgcttgaaggcgtctcgcccaaagaaatagcccataggctgaatattactcatcatactgtagcttttcaccgtaccaaattgtataacaaagtgggtgttcagaatatccaggaacttttttctaaatattcaaccaataacaaagcgccgccgcccgaagcaatagagacacagacaacagccgctgtttaccatgccaaaaagaaaaataaactcaggttattgcttcctatcgggataccaattcttgctttttccgtgttgtttagctggatatttattaaaaagtcatcagcttatcacacgcaaaaaggggtaaaaatacctgttaataatctggatttctttcccacgtctgacggggatttagggggaaattcaacatcggaagtctttataacccgggaagaaattgatggtgtgagcgttgacgttctgaatattaaaatagaccttgtaagaagggaagaaggtgaaaataattttgccaacgtgcatactcacaaccctttattaattcacggttag

SEQ ID NO: 3484 - protein, 191 aa, Unknown
  Obtained from environmental sample
  DOMAIN (2)...(59): Bacterial regulatory proteins, luxR family
  misc_feature (1)..(191): Xaa is any amino acid
MLENLSPREREIFDLLLEGVSPKEIAHRLNITHHTVAFHRTKLYNKVGVQNIQELFSKYSTNNKAPPPEAIETQTTAAVYHAKKKNKLRLLLPIGIPILAFSVLFSWIFIKKSSAYHTQKGVKIPVNNLDFFPTSDGDLGGNSTSEVFITREEIDGVSVDVLNIKIDLVRREEGENNFANVHTHNPLLIHG

SEQ ID NO: 3485 - DNA, 801 bp, Unknown
  Obtained from environmental sample
  misc_feature (1)..(801): n is a, c, g, or t
ttggacggagctcggccttgtttccagtttacgcgtcttttgttcaagctgtgtatccgaaagcggattatgtcgccgcttttcccaaaagattccgtatttgccggcaaatataatttttacagcggtactttaagatgttcaacaacacccgaagcgtatatagctttgataaataaaaaagtagatattattttttgtatggaaccgtcaaaagatcaggttaatgaagcggaaaataaaggtttaaaacttaatatgacgccgataggcaaagactcgtttgtatttattgtaaatattgataatcccgtaaataatattacctctgaacaaatacgaaaaatatattccggcgagattacaaattggaaagaaatcggcgggagagatgaagaaattatcgcgtatcagcgcaataaagacagcggcagtcagacgcttcttgaatcaatcatgggagatacgccgataatggaaccgccgcttgctcatgctattggagcgatgagcagggtaataaccaaggtagcctcatataataattatcccaacgcgataggttattcatttttattttatacaacggaaatggtaaaaaacaaaaaaataaaactgctgtcaatagacggagtaatgccctcaagagcaaccattatgtccggcaaatacattttttccaacaccttttacgcgataacaacaggaaaagaaaaagaaaacgcaaaaaagctcattaactggattttatcaagagaagggcagtcattagtagaaaaaacgggttatgttccgatttag

SEQ ID NO: 3486 - protein, 266 aa, Unknown
  Obtained from environmental sample
  misc_feature (1)..(266): Xaa is any amino acid
MDGARPCFQFTRLLFKLCIRKRIMSPLFPKDSVFAGKYNFYSGTLRCSTTPEAYIALINKKVDIIFCMEPSKDQVNEAENKGLKLNMTPIGKDSFVFIVNIDNPVNNITSEQIRKIYSGEITNWKEIGGRDEEIIAYQRNKDSGSQTLLESIMGDTPIMEPPLAHAIGAMSRVITKVASYNNYPNAIGYSFLFYTTEMVKNKKIKLLSIDGVMPSRATIMSGKYIFSNTFYAITTGKEKENAKKLINWILSREGQSLVEKTGYVPI

SEQ ID NO: 3487 - DNA, 840 bp, Unknown
  Obtained from environmental sample
  misc_feature (1)..(840): n is a, c, g, or t
atgatcgcagcttttttgttttacttcatggaagatttcaaaaaacaggtaatcaataatttcattgaaagctatcaaaaaggcgcgacgccaaatccctgtattgactgcaaccgctatatcaaatttgaaaaattacttaacagggcaaaacagcttggaattgattgcattgcgaccgggcattatgccgtaatagaatatgacgccggaaccggaaggtaccttcttagaaaagcagctgacaaaacaaaagaccagagttatgtgttatatgccatgacacaggagcagttgtcgcataccctgtttcctcttggcacccttaataaatccgcagttcgcggcatcgcaagggagcagggttttgtaaacgccgacaagcatgacagccaggatatttgctttgtgcgtgatggcacctatgcggaatttattgagcaatataccggtaaaaaaagcgaatcgggcgattttattgatgtaaacggcactgttattggcaggcataaaggcgtgatccgttatacaatagggcagcgtaaggggcttgggctttccctaaaaagaccgctatatgttcataccaaaaatgtagaagacaatacggtaactctttctgacagggaaggtctatttaccaaatcgcttgatgcttctgattttaactggattgcctgtgaaaaaatcagcaaccccattcgcgtcaagtcaaagatacgttacaaccaatccgagcagtggtcgacagtaacacaaatttcgcatgatacagtacatattgagtttgatgagccacaatgggcaatagcaaaaggccaggcagcctgtactgtatga

SEQ ID NO: 3488 - protein, 279 aa, Unknown
  Obtained from environmental sample
  DOMAIN (3)...(279): tRNA methyl transferase
  misc_feature (1)..(279): Xaa is any amino acid
MIAAFLFYFMEDFKKQVINNFIESYQKGATPNPCIDCNRYIKFEKLLNRAKQLGIDCIATGHYAVIEYDAGTGRYLLRKAADKTKDQSYVLYAMTQEQLSHTLFPLGTLNKSAVRGIAREQGFVNADKHDSQDICFVRDGTYAEFIEQYTGKKSESGDFIDVNGTVIGRHKGVIRYTIGQRKGLGLSLKRPLYVHTKNVEDNTVTLSDREGLFTKSLDASDFNWIACEKISNPIRVKSKIRYNQSEQWSTVTQISHDTVHIEFDEPQWAIAKGQAACTV

SEQ ID NO: 3489 - DNA, 474 bp, Unknown
  Obtained from environmental sample
  misc_feature (1)..(474): n is a, c, g, or t
gtgcaaaaggccgatcccattgtgctttcatccgggcagtttgcttttgccggcttttacgctcttatcgccgcttttctggcggagccttttctttcaagctggcttttatctttatatagtgaaggtaaaatcatatcttccggacttttagcctggaagagtttccctgccctgataagcggcctttcatccggagaaattacattctcgctggtttcaggcgccataattcccatactatacggcggctttgcttcagcgggtattggttacactttgcaggtggtagcccagcagtatgcaccccccgcacacgcaacgatcatcctttgcctggagggctgcttcgccgccattggcggcattatgctgctgcacgaaccggctggaatacggacaattattggctttgctttcatgctttgcggaatgttaatcagccagtgggaactaattcgagcccgccactag

SEQ ID NO: 3490 - protein, 157 aa, Unknown
  Obtained from environmental sample
  misc_feature (1)..(157): Xaa is any amino acid
MQKADPIVLSSGQFAFAGFYALIAAFLAEPFLSSWLLSLYSEGKIISSGLLAWKSFPALISGLSSGEITFSLVSGAIIPILYGGFASAGIGYTLQVVAQQYAPPAHATIILCLEGCFAAIGGIMLLHEPAGIRTIIGFAFMLCGMLISQWELIRARH

SEQ ID NO: 3491 - DNA, 645 bp, Unknown
  Obtained from environmental sample
  misc_feature (1)..(645): n is a, c, g, or t
ttgggcggccccagcgggcttaccgataataaaacaaagattcttaccggggaaattgttgacgcattccgcaataccggcggctttgacataatcggttcggggcggaccaaaattgaaacgccgcagcagtttgccgcgtcgctggaaaccgccaaaaaactgggcctgaacgccattgttattatcggcggcgatgattccaacaccaacgccgccctgctggcggagtattttctcgcgcaaggttcagacatacaggttatcggctgccccaaaaccatagacggcgacctgaaaaatgaatacatcgaaacatcttttggctttgacaccgcctgtaaaacatacagcgagcttatcggcaacctgatgcgcgacgcgaacagcgccaaaaaatactggcacttcatcaaattaatgggccgcgccgccagtcacatcgccctggaatgcgccctgcaaacccagcccaatgtctgcctgatttccgaggaaattgaaacaaagcagacctcgctggatgccgtcgtcaacatgatctgcgactcaattgtcaaacgggcggataggggcgacaatttcgggatagtccttgttcccgaaggcttggttgaatttattcccgaagtanaattctcatag

SEQ ID NO: 3492 - protein, 214 aa, Unknown
  Obtained from environmental sample
  DOMAIN (1)...(214): Phosphofructokinase
  misc_feature (1)..(214): Xaa is any amino acid
MGGPSGLTDNKTKILTGEIVDAFRNTGGFDIIGSGRTKIETPQQFAASLETAKKLGLNAIVIIGGDDSNTNAALLAEYFLAQGSDIQVIGCPKTIDGDLKNEYIETSFGFDTACKTYSELIGNLMRDANSAKKYWHFIKLMGRAASHIALECALQTQPNVCLISEEIETKQTSLDAVVNMICDSIVKRADRGDNFGIVLVPEGLVEFIPEVXFS

SEQ ID NO: 3493 - DNA, 873 bp, Unknown
  Obtained from environmental sample
  misc_feature (1)..(873): n is a, c, g, or t
ttgctgagaggcgaaatagaaaccccgaacaaagacttagacgaccttgttcttttgaaaagagataaatttccgacttaccacctagcaagcgttgttgacgaccacgctatgcaaacgagccacatactcagnggagacgaatggataagcagcaccccaaagcacgttntgctctacaaagcctttggctgggaagctccgctcttttgccacttgcccgttatacttgccccaggtggcggcaaactctccaaacgcaaaggtgctgcctctgttggagactttagggatttgggttatttgccctatgcccttgtgaattttctctcgcttctgggctggagccccggagacgatagagaggttatgagcttaaaagagatgatagaggctttttctttggagcgcattcacccaaaggcggtggcatttgacgaaaaaaaattggaatggatgaacggaatgcacataagagcattgccagattcctttttggcagatgagttgaaaaaactttacccgaactgccaagacgaaaataaatttttgaaagttgcagaactattgaaaccacgtttaaaattcacaacggaactcgcttcaatgtctaaatatttttttgaagcccccgaaaaatgcgaagacgaaaaagcaaagacaaaatactggacagagcaaagcccagaacatatagatttggtttcaaaggaactggaaaaaattgctaacgaagatttttgcgtaaagaacattgaggctgcgtttatgaaagtttgcgaaagcaataatcttaagcttggcttgctcgctcaacctgcgaggcttgtgattagcggagttggtgcaggtcctgggctttgggaaatatag

SEQ ID NO: 3494 - protein, 290 aa, Unknown
  Obtained from environmental sample
  DOMAIN (1)...(152): tRNA synthetases class I (E and Q), catalytic domain
  misc_feature (1)..(290): Xaa is any amino acid
MLRGEIETPNKDLDDLVLLKRDKFPTYHLASVVDDHAMQTSHILXGDEWISSTPKHVXLYKAFGWEAPLFCHLPVILAPGGGKLSKRKGAASVGDFRDLGYLPYALVNFLSLLGWSPGDDREVMSLKEMIEAFSLERIHPKAVAFDEKKLEWMNGMHIRALPDSFLADELKKLYPNCQDENKFLKVAELLKPRLKFTTELASMSKYFFEAPEKCEDEKAKTKYWTEQSPEHIDLVSKELEKIANEDFCVKNIEAAFMKVCESNNLKLGLLAQPARLVISGVGAGPGLWEI

SEQ ID NO: 3495 - DNA, 522 bp, Unknown
  Obtained from environmental sample
  misc_feature (1)..(522): n is a, c, g, or t
atggcagagaatttgaactgtgatgttgtgggcagtaaatgctacaacaacgacccagccaaatgtgccaaatacggcagactttatgattgggcaacggctatggacatagatacaaaatacaatagcgaagaatggggcggcattggtgtaaatcacaggggtatttgtccaagtggttggcatttgccgagctatgacgaatgggaaactctcttagattttgttggcggtattaaaacagcgggcaaatttttgaaggcaaaaagtggttggtacgatttcgaaggaaaccctgctggcaacggcgaggacaagtatgactttgcggctctgcctggcggcatcggcttttccgttggccatttccgcgatgtcggctacagcggctactggaggagtaccacggaagccaatgccgactctgcctactaccggattatgaactacttcgcagagaacgtgtacgaccaaaactacgataagggcgtcttgatcagtgtccgttgcgtgaaggattag

SEQ ID NO: 3496 - protein, 173 aa, Unknown
  Obtained from environmental sample
  misc_feature (1)..(173): Xaa is any amino acid
MAENLNCDVVGSKCYNNDPAKCAKYGRLYDWATAMDIDTKYNSEEWGGIGVNHRGICPSGWHLPSYDEWETLLDFVGGIKTAGKFLKAKSGWYDFEGNPAGNGEDKYDFAALPGGIGFSVGHFRDVGYSGYWRSTTEANADSAYYRIMNYFAENVYDQNYDKGVLISVRCVKD

SEQ ID NO: 3497 - DNA, 828 bp, Unknown
  Obtained from environmental sample
  misc_feature (1)..(828): n is a, c, g, or t
gtgaacgccatcgctcgcgagtgcgtggagaagatcgccaaaaaagattattctataactattacccaagcctttgtcgatcaagccgttcaaaacctcatcaagagctgggggacgcacttcgacagcatgatggcgaggctggaggaaccgcgcgtccgtaacatcatacagcccctgctgttgggcggcggcactaccatagacacacgctctgaagactatctgtacacaagagacttaggcataatcagggaggccggcaacaaggtggaaccggcaaaccccatctatgccgagctgatagtgcggacgctcaactggggcgtacagcagtctttgctgagggattgcgccgactacgaagtcccccgctacatgaaagacggcaagatcgacgttgactatttgctcaaagactttcagcagtattggcgggaaaacagcgatatatggacggagcgctacgaaacgcagttttatcaatacagcgaagccgccccccacctggttctgcaagcgttcctgcaacgcgtgataaacggcggcggccaaatcatacgagaaatggccttaggcaaaacgcggtcagatctgtgcgtggtctacgacgggcggaaatacccgatagaacttaaaattctgcaaaacatgagaggcggcatcaacgaggggatagagcaaattcttggatacatggacaaagtcggctcggataccgggtggcttgtgatttttgatcgcgatacggggaagatctgggacgagaagatttatatgcgggtcgagacggtgagggggaaaagggtcgcggtcgcggggtgctga

SEQ ID NO: 3498 - protein, 275 aa, Unknown
  Obtained from environmental sample
  misc_feature (1)..(275): Xaa is any amino acid
MNAIARECVEKIAKKDYSITITQAFVDQAVQNLIKSWGTHFDSMMARLEEPRVRNIIQPLLLGGGTTIDTRSEDYLYTRDLGIIREAGNKVEPANPIYAELIVRTLNWGVQQSLLRDCADYEVPRYMKDGKIDVDYLLKDFQQYWRENSDIWTERYETQFYQYSEAAPHLVLQAFLQRVINGGGQIIREMALGKTRSDLCVVYDGRKYPIELKILQNMRGGINEGIEQILGYMDKVGSDTGWLVIFDRDTGKIWDEKIYMRVETVRGKRVAVAGC

SEQ ID NO: 3499 - DNA, 816 bp, Unknown
  Obtained from environmental sample
  misc_feature (1)..(816): n is a, c, g, or t
gtggggcggtctgccggaatcttcaccgctacggtagaaccaagcaacgccacaaacaaaaccttaacatggatcagcgataatcctaatgtggcaacagtaagtgaaggcacagtcaccgcaattgccgccggatcggctactatcactgttaccactgttgatggcaataagaccgcaacctgtgttgtgaatgttggcgcggcaggttccactatcaatgtcgccttcaacagcattactgccaacggctcttcaacccagaccaccacccagttgaccctgaactttagccaggctatcaccggccttgccgccagcgacataaccttaagcggcgtttcaagcgtaaccaaaggaaccctcagcggctcagggacgacatacaccctgccaatcagcggctttaccgcaggcggaactttaaacgtggctgttggcaaatcagggtatagcataagcggctcgcccaaaacagtaaccatctattattatgcaacgggatcgggaactgccgctctgactatcacatttgcccaattatccgatgccgcgccctccattaccggccccactctgtaccgcgcaagcaacggaggccccaccagcgcgactttaactgtggacaatcccggccagtatgacagcatagcctggcgggtacaggacaccaccgtaaccggaaccggttcgtcctttaccctgagtacggccaacaccgcttacaaccttatcggcgagcattttgtaacagtaactgtgaaaaaaggcggagcgccttataacaagaccatctcgttcagagtcgagtattga

SEQ ID NO: 3500 - protein, 271 aa, Unknown
  Obtained from environmental sample
  DOMAIN (2)...(64): Bacterial Ig-like domain (group 2)
  misc_feature (1)..(271): Xaa is any amino acid
MGRSAGIFTATVEPSNATNKTLTWISDNPNVATVSEGTVTAIAAGSATITVTTVDGNKTATCVVNVGAAGSTINVAFNSITANGSSTQTTTQLTLNFSQAITGLAASDITLSGVSSVTKGTLSGSGTTYTLPISGFTAGGTLNVAVGKSGYSISGSPKTVTIYYYATGSGTAALTITFAQLSDAAPSITGPTLYRASNGGPTSATLTVDNPGQYDSIAWRVQDTTVTGTGSSFTLSTANTAYNLIGEHFVTVTVKKGGAPYNKTISFRVEY

SEQ ID NO: 3501 - DNA, 855 bp, Unknown
  Obtained from environmental sample
  misc_feature (1)..(855): n is a, c, g, or t
ttggagtgcgcctatttcgagccgggcggcatacgcaaaacctccaagcgtctcggcctctccacagactcctcttaccgcttcgaacgcggcgtagacccggcgcaaggtttggcggacgcattggaaagggcggcggaacttatgcttgaactcgccggcggcagcgtggccgacggggttatcgacaccaacccgaccccattccccgacaaggtgataaccgtacgcccgtcgcgaaccaagaggatattgggcatcgagttcccggcggacaacatggtcttctcactaaacacacttgggatcaaaagcgtaaaagaattcgaagatacggtgacctgcaacgtgccgcactaccgccacgacatcaccgaggagatcgacctgatcgaggaggtgggccgccagtacgggtacgacaacatccccaccgccgaaagcgtcgcggtgagcttggtcaggcagccgtcgacggcggagacgaaccgcgatgccgcgcgcttcgcgctgtgctacttcgggctgaacgagatcatgaccaacagcatggtgtcggagtcaaaacgaaagcttttaacgccctctgcggagccggtaaagattctaaacccgctgaaccccgatatggccgagatgcgcacctctatggcgctatcccttttggacacggttgcctataatctaaacagaaagaaccgcgacaatcggctcttcgagataggcaaggtattcgagccggacgcgaaatccggattggcgatagagagggacgtattggcgatagccgtagagggcgactgcgtcccgcagtcgtggggcatcagaaactggaaaacagcttcttcgtcctga

SEQ ID NO: 3502 - protein, 284 aa, Unknown
  Obtained from environmental sample
  DOMAIN (71)...(140): tRNA synthetase B5 domain
  misc_feature (1)..(284): Xaa is any amino acid
MECAYFEPGGIRKTSKRLGLSTDSSYRFERGVDPAQGLADALERAAELMLELAGGSVADGVIDTNPTPFPDKVITVRPSRTKRILGIEFPADNMVFSLNTLGIKSVKEFEDTVTCNVPHYRHDITEEIDLIEEVGRQYGYDNIPTAESVAVSLVRQPSTAETNRDAARFALCYFGLNEIMTNSMVSESKRKLLTPSAEPVKILNPLNPDMAEMRTSMALSLLDTVAYNLNRKNRDNRLFEIGKVFEPDAKSGLAIERDVLAIAVEGDCVPQSWGIRNWKTASSS

SEQ ID NO: 3503 - DNA, 657 bp, Unknown
  Obtained from environmental sample
  misc_feature (1)..(657): n is a, c, g, or t
ttgacaagccgccatagcgctttaatcgaagaggcctacaaaaaggtaatcaacgcccttatagtgtggcacggccaagacgtagccaactgcccgtttatcgtgccgcggtcaatggacgttgaaacgttcttttgggagactacttacttctcgcggcattgcgtggtggaattcttcggcgaggaacgcttgcttaccgcggattgggagaaagagcggcgcaaaatagccgtacacgcggcgggaattcaaccgacggtctgcatacaccgcgattttcaatcggagaacatacttattgccgatgggcatatcaagttcgtagactatcaaggcgcgcgcttagggccggcgcactacgacgcggcgtcgctgatctttgacccatacgtaaatctggggaaagagatgatggagcgtttagtggaatattacttgaccaaaacgaacagcgtctccgcaaagaacgatttttacatctgcgccgcacagcggttaatgcaggcgctgggagcgtacaccaacctgtctttgcacaaagacaaaccgcgctaccgcgaattcataccgactgcgctggagaggctgtattacataatggagttccttcccgattaccccgcgataaagggggtcgttcatgggtgccagtag

SEQ ID NO: 3504 - protein, 218 aa, Unknown
  Obtained from environmental sample
  misc_feature (1)..(218): Xaa is any amino acid
MTSRHSALIEEAYKKVINALIVWHGQDVANCPFIVPRSMDVETFFWETTYFSRHCVVEFFGEERLLTADWEKERRKIAVHAAGIQPTVCIHRDFQSENILIADGHIKFVDYQGARLGPAHYDAASLIFDPYVNLGKEMMERLVEYYLTKTNSVSAKNDFYICAAQRLMQALGAYTNLSLHKDKPRYREFIPTALERLYYIMEFLPDYPAIKGVVHGCQ

SEQ ID NO: 3505 - DNA, 300 bp, Unknown
  Obtained from environmental sample
  misc_feature (1)..(300): n is a, c, g, or t
atgacagattcggcacgaaatgtggtacattttctcggaatgcagcataagagtcacagcgccgctttcccgctggaattgcccagctggtttattagacttttcaccaaagaaaatgatacggtaatggacccgtttatgggttcagggacaacgttgttcgccgcagagaaattaaagagaaacgctattggaatagatatcttggaagagtattgccaaacagtgaaaaacgagatggaagggaaggaattgtacttatttgaagaggagaaagaatatgtcattgcaattagttga

SEQ ID NO: 3506 - protein, 99 aa, Unknown
  Obtained from environmental sample
  misc_feature (1)..(99): Xaa is any amino acid
MTDSARNVVHFLGMQHKSHSAAFPLELPSWFIRLFTKENDTVMDPFMGSGTTLFAAEKLKRNAIGIDILEEYCQTVKNEMEGKELYLFEEEKEYVIAIS

SEQ ID NO: 3507 - DNA, 462 bp, Unknown
  Obtained from environmental sample
  misc_feature (1)..(462): n is a, c, g, or t
ttgaagaggagaaagaatatgtcattgcaattagttgatgttattgaatatgtggaaaacaacatcgttcaatttcatatacaaagaatagcaaaaattaaaacgttatctctgaagcaggtactaaaaaagaaaaacccatacctatttaaggcaaaaaacctaagaacatccgatgaaatagtaaaactactcattgaagcgtatatctcctcaagcgaggaaacgatgttcggtgattggcttgaagggttagcaatattcataaatggaaaggtctatggtggtcggaagtctacaactaaaggggtcgatctagaatttgataaagaaaatatccgctatatcgtttcaataaaatcagggccgaattggggaaattcggctcanattgaaaagatgaaaaacatcttcgattcggcaaaaaaaccttgcgaacaagtcactcaacattgcaaatag

SEQ ID NO: 3508 - protein, 153 aa, Unknown
  Obtained from environmental sample
  misc_feature (1)..(153): Xaa is any amino acid
MKRRKNMSLQLVDVIEYVENNIVQFHIQRIAKIKTLSLKQVLKKKNPYLFKAKNLRTSDEIVKLLIEAYISSSEETMFGDWLEGLAIFINGKVYGGRKSTTKGVDLEFDKENIRYIVSIKSGPNWGNSAXIEKMKNIFDSAKKPCEQVTQHCK

SEQ ID NO: 3509 - DNA, 657 bp, Unknown
  Obtained from environmental sample
  misc_feature (1)..(657): n is a, c, g, or t
gtggtggaagtcaatgaaggcggcgggaacagggtggttgtttcctgcgtttacccccttagccgggactgcgaggtctttaccgaaagcgaagtaataaagggtattcgcaaaacaattctttccatgctgaagaccagagcgccggaaggggaaaggctttcttctctttgtcaaatgtacggagtagataccggccccgggcgtttcactgccgccaaaacgggggagggcagttccgctgaaaagcgcctggcctcatcgtgcgtgctttgcggcctctgcgcccaagcctgcgcaatccttggaactggcgcgatttccaccgtaggccggggagtgggaaaaaagatttcaactccttttgatgagccgtcggctgactgcgtgggctgcggaagttgcgccgccgtgtgtcctaccaaagccatcgaatgtattcagaccggagagagccgttccatctggggcaaggatttcacgctcctgaaatgcgcctcatgcggcagggcatttgccacccgtgaagaatatgcctttgctctgaaaaaagccgaggaaaacgcggtggctgaatttgaatccgctttatgcgacgcttgccgcaagaagaaaagcgccgatgtttttgccgcggcttttggtgaaagggcctga

SEQ ID NO: 3510 - protein, 218 aa, Unknown
  Obtained from environmental sample
  DOMAIN (122)...(145): 4Fe-4S binding domain
  misc_feature (1)..(218): Xaa is any amino acid
MVEVNEGGGNRVVVSCVYPLSRDCEVFTESEVIKGIRKTILSMLKTRAPEGERLSSLCQMYGVDTGPGRFTAAKTGEGSSAEKRLASSCVLCGLCAQACAILGTGAISTVGRGVGKKISTPFDEPSADCVGCGSCAAVCPTKAIECIQTGESRSIWGKDFTLLKCASCGRAFATREEYAFALKKAEENAVAEFESALCDACRKKKSADVFAAAFGERA

SEQ ID NO: 3511 - DNA, 558 bp, Unknown
  Obtained from environmental sample
  misc_feature (1)..(558): n is a, c, g, or t
ttgccaaacgagctgcaattcccgctgatggctattggcctgtgtttcgccatcccgcagacgctttggcccgatgccaccattgtagtgtccgagggcggatgggactacatttccgccagtgttttttacaacggcctacagtcagcgcctgcttggcatcaattgcatgaggcagtaacaataaagagcagtgtccttggcctagccttgggctatggcctaccttgggccttcaatttcacatacgtgaaaattcgcaacgccatagccaccaagatatttcacagagagccactagaatccggcatggggatgggcgacttcaagatgcttgcgtggcttggggccttttggggctgggggcacatgttgggcattctgttcgtcgccgtcgtgataatgaccgcttttgttttgccgacacactttttgcgaaagcgggccgccaacaccatgtatccattgggctgcggccttgccctagccgcgccgatagtggttttttgggggcctatgctttggggagcgtacatgggccttgggtatgggttttag

SEQ ID NO: 3512 - protein, 185 aa, Unknown
  Obtained from environmental sample
  misc_feature (1)..(185): Xaa is any amino acid
MPNELQFPLMAIGLCFAIPQTLWPDATIVVSEGGWDYISASVFYNGLQSAPAWHQLHEAVTIKSSVLGLALGYGLPWAFNFTYVKIRNAIATKIFHREPLESGMGMGDFKMLAWLGAFWGWGHMLGILFVAVVIMTAFVLPTHFLRKRAANTMYPLGCGLALAAPIVVFWGPMLWGAYMGLGYGF

SEQ ID NO: 3513 - DNA, 462 bp, Unknown
  Obtained from environmental sample
  misc_feature (1)..(462): n is a, c, g, or t
atggctctcgacccagtgcctgtggccgacctttccgaaagcatttcggcattggtttggaggcgcggccttggcggcccagaagtgctgatgatgcgccgccagtcctatggtatgaagtggcccagcgtcacaggaatagtggaagacggcgaaacgttcgaagcagccgccaatagtaaaacattaaatgaatgtaggctggttggcgaattgcggccactggacttcaaacacacttttttgattgacccaaggctggtgaaaaccagcggtggtgagcctcaattctgcaccgaaaatttctttcacattgaaattgcgccagacgctatggtttcgctcaatccaacggaacacagcgaataccgctggtgctcgcccagcgaagcgatgcagctaacggtaagggaaggttcaaaaatggccttgaaaaaactttttgcgtacctacactgctaa

SEQ ID NO: 3514 - protein, 153 aa, Unknown
  Obtained from environmental sample
  DOMAIN (11)...(150): NUDIX domain
  misc_feature (1)..(153): Xaa is any amino acid
MALDPVPVADLSESISALVWRRGLGGPEVLMMRRQSYGMKWPSVTGIVEDGETFEAAANSKTLNECRLVGELRPLDFKHTFLIDPRLVKTSGGEPQFCTENFFHIEIAPDAMVSLNPTEHSEYRWCSPSEAMQLTVREGSKMALKKLFAYLHC

SEQ ID NO: 3515 - DNA, 330 bp, Unknown
  Obtained from environmental sample
  misc_feature (1)..(330): n is a, c, g, or t
atgaacgaatttaaggcggacggcctaaaaaactttagaggaactatcgccatggcgcgccttaacgaccccaacagcgcgacaagccaattttttataaacttggccgacaactcaaggctggactttacatctagcgtatccgctggaatggggtactgcgtttttggcagggtggtttctgggatggaacatattgacaanatagccaaggtcaagaccgtcagaagcatggggcatgccgacgtgccgcagtttcccgtcaggttgctcaaggccacattgctgcccatcgaaggcgatgatgcaaaaagcgacagcgagaagtga

SEQ ID NO: 3516 - protein, 109 aa, Unknown
  Obtained from environmental sample
  DOMAIN (2)...(96): Cyclophilin type peptidyl-prolyl cis-trans isomerase/CLD
  misc_feature (1)..(109): Xaa is any amino acid
MNEFKADGLKNFRGTIAMARLNDPNSATSQFFINLADNSRLDFTSSVSAGMGYCVFGRVVSGMEHIDXIAKVKTVRSMGHADVPQFPVRLLKATLLPIEGDDAKSDSEK

SEQ ID NO: 3517 - DNA, 615 bp, Unknown
  Obtained from environmental sample
  misc_feature (1)..(615): n is a, c, g, or t
ttgacagaatccgctcctttcatgcgcctgaaccccatcatacagttaggtcccgtataccttgtctaccccggcgcgacgcatacaagggcaagccattcaataggcgtataccatttgggaaaaagactcttaaaaaacctgacgaaacgcggcgccgaagactggctgacaaacgaggggattaattccttccttgccgcctgcctgctgcatgacttaagtcattttccctatacccactcgttaaaagagttgtccctggcttctcatgagtcgcttacaggcgaaataatcatgaaagaacccatgaaaagcctcgtcggcagcggaggagcggaccctgagtttaccgcggcgataatcgacaagggaaaaaatggaattcagagcgatgagcttcatttttaccgtaaactcctgtccggggcgcttgatcccgataaactcgactatctgaaccgcgacgcccgatatttgcggagtcccctacggtgcgcaggaacatcgattttatccctttcaaggcttcaaccggacaagaaacgcggggatgacatcgattctcgcctgattcctaacgaaggaatccatacttgttttcaaaaattttga

SEQ ID NO: 3518 - protein, 204 aa, Unknown
  Obtained from environmental sample
  misc_feature (1)..(204): Xaa is any amino acid
MTESAPFMRLNPIIQLGPVYLVYPGATHTRASHSIGVYHLGKRLLKNLTKRGAEDWLTNEGINSFLAACLLHDLSHFPYTHSLKELSLASHESLTGEIIMKEPMKSLVGSGGADPEFTAAIIDKGKNGIQSDELHFYRKLLSGALDPDKLDYLNRDARYLRSPLRCAGTSILSLSRLQPDKKRGDDIDSRLIPNEGIHTCFQKF

SEQ ID NO: 3519 - DNA, 900 bp, Unknown
  Obtained from environmental sample
  misc_feature (1)..(900): n is a, c, g, or t
gtgttgaataatctcatctccaactcgttcaaatacacaaaagtcggagggataaatgtgtcgttcggggctgaggtgtccggagcggataacgcgaaatccgtagtaattattttctgtataaaagataccgggctcggtatgaccaaggaacaggtaagcaagttgtttgatggttatgcccgctttaactctgaagccaatcgtcaggttgagggtaccggtctgggtatgcccattaccaaaagctttattgacatgatgaaaggagagctgctggttgaaagcgagccgggaaaaggttcgacctttaccatccggataccgcaaggttatgttaacgcggatgtgctgggcaaggaacacgcggaaaatcttcaaaaatttgatgttgagaaaaaaataaaacaaaagaaaggcgcccagattaagcgggaatatatgccctatggcaaggtactggttgtagacgatatggagccaaatctttatgttgccaaaggacttcttgccccttacggattgtcgatagataccgcctcaagcggaagagcggcaattgatataattaaaggcggccagaaatttgatgttatatttatggaccattacatgccggaaatggatggaatggaagcgacaaaaattatacgcgagcttgggtataaagaacctatgatcgcgctgaccgccaacgccctggtcggacaggatcagatgtatttggcaaacggttttgacgggtttatgtccaaacctattgacacgcgccagctcaactcggtgttgaaccggtttattcgcgacaaatatcctcccgaaacggtagaagccgcccgtaagcttaaaatgaaactggagaaaggagaagacgcgggaccgccggatttagcaaagtaa

SEQ ID NO: 3520 - protein, 299 aa, Unknown
  Obtained from environmental sample
  DOMAIN (151)...(264): Response regulator receiver domain
  misc_feature (1)..(299): Xaa is any amino acid
MLNNLISNSFKYTKVGGINVSFGAEVSGADNAKSVVIIFCIKDTGLGMTKEQVSKLFDGYARFNSEANRQVEGTGLGMPITKSFIDMMKGELLVESEPGKGSTFTIRIPQGYVNADVLGKEHAENLQKFDVEKKIKQKKGAQIKREYMPYGKVLVVDDMEPNLYVAKGLLAPYGLSIDTASSGRAAIDIIKGGQKFDVIFMDHYMPEMDGMEATKIIRELGYKEPMIALTANALVGQDQMYLANGFDGFMSKPIDTRQLNSVLNRFIRDKYPPETVEAARKLKMKLEKGEDAGPPDLAK

SEQ ID NO: 3521 - DNA, 537 bp, Unknown
  Obtained from environmental sample
  misc_feature (1)..(537): n is a, c, g, or t
atggcgagcatcgaacagaatttcacctttggccgcagaacgcttgccgctgcgcagacttgcggcggacagaagcgaaaagccgcagagaacgcagcttcagatcgaggaaatgaaagcgttcgtatcgttctctcggccgcgtcaaaaacgcagtttgaggttcacaggatgaacgggcttttgcgtttttcacctgacaataacggaacctacattgctttttgcgaacctgatcatttgatactgcctgcgctgggtgaatatttttattcacgttttggcgaaactccgtgggtaattgtcgatataagacgaagattatgccttagccggcggttaggggaaaaagtaaaacttgctgtcatagaaactgcagcaaatatttcctcatcaatcggcgtacttggcgatgacgaatgggaggggctttggcggcattaccacaggataataaataacgagagcaggaagaatttacatttacagcgtcaactaatgccaaaacgctattggaaatatctgcctgaaatgtaa

SEQ ID NO: 3522 - protein, 178 aa, Unknown
  Obtained from environmental sample
  misc_feature (1)..(178): Xaa is any amino acid
MASIEQNFTFGRRTLAAAQTCGGQKRKAAENAASDRGNESVRIVLSAASKTQFEVHRMNGLLRFSPDNNGTYIAFCEPDHLILPALGEYFYSRFGETPWVIVDIRRRLCLSRRLGEKVKLAVIETAANISSSIGVLGDDEWEGLWRHYHRIINNESRKNLHLQRQLMPKRYWKYLPEM

SEQ ID NO: 3523 - DNA, 873 bp, Unknown
  Obtained from environmental sample
  misc_feature (1)..(873): n is a, c, g, or t
atgatggttcttnttctgtttcttcgcagctttaagggtacgcttatcataggtctcgcgattcctatttcaatgcttttaacccttatgtcaatgtcggtttttggttttacgctcaatctgcttacaatgacaggtcttataatgggtttaggaatgacaactgacgcatcggtagttattcttgaaaatatttacagttaccgtgagcgcggagcaaagccggaagtcgcggccattttaggaagccgcgaaatgatgagagcgattatggcttcaaccataacaaccctttgcgtttttataccgctgattatttttaaaaatgatcttaaggaaatgggacttatgttcagcgatctcatttttacggttattatttcagtatcagtttcgcttatagtcgcaataacgcttgttccaagcctctcgggaggaatactaaaactatacacaagaagccagaagccgttgaaattcccgcccctgcgttttattgacaatatgatggaatcatttctgcgtaccatggaaaaaatataccagacaacgttgaaatactgcctttcacaccgtctgataatttttgttctggttatgtttattcttgcctattcatttattcagtttaaaggagtcgggatgaatatgtatgtcagaatgaggaccgatgataacgtaaatataaatgtggcaatgcctgtgggaaccgcgattgatgttacagaaaaggttctgtttgaaattgaggaagttattaaggatgaagtgcagggttaccgcaatataattctcacggcaaggcgcactggagctaatcaagggtcgatacagataatgctccttcctccggccgaactcggccgattctga

SEQ ID NO: 3524 - protein, 290 aa, Unknown
  Obtained from environmental sample
  misc_feature (1)..(290): Xaa is any amino acid
MMVLXLFLRSFKGTLIIGLAIPISMLLTLMSMSVFGFTLNLLTMTGLIMGLGMTTDASVVILENIYSYRERGAKPEVAAILGSREMMRAIMASTITTLCVFIPLIIFKNDLKEMGLMFSDLIFTVIISVSVSLIVAITLVPSLSGGILKLYTRSQKPLKFPPLRFIDNMMESFLRTMEKIYQTTLKYCLSHRLIIFVLVMFILAYSFIQFKGVGMNMYVRMRTDDNVNINVAMPVGTAIDVTEKVLFEIEEVIKDEVQGYRNIILTARRTGANQGSIQIMLLPPAELGRF

SEQ ID NO: 3525 - DNA, 441 bp, Unknown
  Obtained from environmental sample
  misc_feature (1)..(441): n is a, c, g, or t
gtgtatcattgggtcatgttgagaacggacaccatccagatcacgccggagttgttgaacctgattgctcggattgacgagttcaggggcacatggcgctacttgggcacgctggagccagaccgactgtcggcgctgcggcgcgtggccacagtcgagagcattggctcctccacccgcatcgagggcagcagactgtcggacagtgaagtccggcaactgctgtcgaacctcgccatcacaaggttcgagacccgcgacgagcaggaggtggcgggctattccgagctgatggacctgttgttccagtcgtggatggacatcccgttcaacgagaaccacatcaagcagctacaccaaatcctgctgcaacactgccaaaaagacgaatggcacaaaggccaatacaaaaccggacccaacagcgggccgcttcggtaa

SEQ ID NO: 3526 - protein, 146 aa, Unknown
  Obtained from environmental sample
  misc_feature (1)..(146): Xaa is any amino acid
MYHWVMLRTDTIQITPELLNLIARIDEFRGTWRYLGTLEPDRLSALRRVATVESIGSSTRIEGSRLSDSEVRQLLSNLAITRFETRDEQEVAGYSELMDLLFQSWMDIPFNENHIKQLHQILLQHCQKDEWHKGQYKTGPNSGPLR

SEQ ID NO: 3527 - DNA, 654 bp, Unknown
  Obtained from environmental sample
  misc_feature (1)..(654): n is a, c, g, or t
gtgcgtcaaacagtaaaaatgaccgtcggcagacagggcaaccacttcccaatcctgacaagcgaatatttccgctgtggacctaatgatgtcgcttttcgggaaaatgtcataactatgttagccaagattgaaagtatagacaaggaagtgttctgccgcgtatataaaaacaagcttaaccgcatagtcccctatgtggtgctgctcccctgttacggcgatacgggggtttgctgggagccttttaataaacacaacagggcgaccagtcgggggcgtatttttgtccccatgtaccccaaaaatctctacgtagcggttctaagcgccgtcgcggacctccgctggcaggtagcgaaagaaaaggcgtctttttactggatggaagaaggccttacgggcaactactaccagtggtttgtggcgcagaagctgaaaggggatgtaaaggattatttcatagaggattacattctctggatgacaaaagaagccgaaggcatacagaaacttgataaagatgttcgcggagcattctggcggcacatgccgttctcacaggaagtaaaagaaaaactcaaaacccgcagttttgtttatcaggaactgtaccaacgggatcttaaccgcgcaatgtccgatggctattaa

SEQ ID NO: 3528 - protein, 217 aa, Unknown
  Obtained from environmental sample
  misc_feature (1)..(217): Xaa is any amino acid
MRQTVKMTVGRQGNHFPILTSEYFRCGPNDVAFRENVITMLAKIESIDKEVFCRVYKNKLNRIVPYVVLLPCYGDTGVCWEPFNKHNRATSRGRIFVPMYPKNLYVAVLSAVADLRWQVAKEKASFYWMEEGLTGNYYQWFVAQKLKGDVKDYFIEDYILWMTKEAEGIQKLDKDVRGAFWRHMPFSQEVKEKLKTRSFVYQELYQRDLNRAMSDGY

SEQ ID NO: 3529 - DNA, 738 bp, Unknown
  Obtained from environmental sample
  misc_feature (1)..(738): n is a, c, g, or t
gtgacagctttgattaaggacgataaatggctcgatgaaagcgcaggcaaatatatgcgaatacttcaaacaagccgcgaggaatgccgcaaaaaattgatattcatgctggaagaaattcgagacgatttaaaatccgttgatccgctggaagatgaaattgacagacgaaacgccgcatattcccgttccagtacggaaattatcaaagcttacattgaaccggacagcaccatagccggaaaaatcggactgcttattaaagcgatttacggcggtaatgaagaagttaaatccggtattgcccatggtctgcatcgcataagatttctttcaccttccagtttagtcctctcccagaaaagggcggacggtgattttattaccgccccttcaaaaaccgatattgaagctcttaccctatctgaaacggaatttattgaacgcatgaagaagcgactttctatcaaacggattaacgcatggcttgacgaacaaggcggaaaagaaaatattcttacccccgagaaattaatcacagaggaagattcttatatccgttttatttatgccctgctctacggcgactcacgaaacaattttagttatagtattgaagaaaccggtgaagaaaaagcaaacactgattctataaaagcggcggactatgtggttccaaatattcgttttcgtaagaggagcggtaatcgcattcctgttgacggagataagccatga

SEQ ID NO: 3530 - protein, 245 aa, Unknown
  Obtained from environmental sample
  misc_feature (1)..(245): Xaa is any amino acid
MTALIKDDKWLDESAGKYMRILQTSREECRKKLIFMLEEIRDDLKSVDPLEDEIDRRNAAYSRSSTEIIKAYIEPDSTIAGKIGLLIKAIYGGNEEVKSGIAHGLHRIRFLSPSSLVLSQKRADGDFITAPSKTDIEALTLSETEFIERMKKRLSIKRINAWLDEQGGKENILTPEKLITEEDSYIRFIYALLYGDSRNNFSYSIEETGEEKANTDSIKAADYVVPNIRFRKRSGNRIPVDGDKP

SEQ ID NO: 3531 - DNA, 861 bp, Unknown
  Obtained from environmental sample
  misc_feature (1)..(861): n is a, c, g, or t
ttgcagttgacaaaagcaaatccgactgtttcaacaacgaaaaaatatgacggcaatacatccgcgaatgttaccgctgacggcgctctgaacaataaagtcggaagcgatgatgtaaccgtatcctctgtagccaactacaactcggcaaatgtttcggaagcgaataaaatcactgttgtttactccattggaggaacaagcgcgtccaactatataaaacccgttgattatacaattgacggcactatcaccaaagcggacggcgggacggtcaacggcactgtgtcagcgtcttcaacaacatcaaccggcgtaaccgttaatttgttaacggtagcggcgcccaactcagggaatcaaaccgttgaatacgcaagagcgtcatcggcaactgtaccgacaacaggctggcaggacagtacaactttcaccggattaagcgccaataccaattattatttcttcgcgcgcgcaaaggccaatgacaattacctggcgggaaccgcgataagcgtgcaaataagaacagctcttcaggctaacataatagcgtttggcgatcctcttgaggaaagcaaaccttacggaaccaactttaccaaagcgctttcaagcacaggctcaggcaatggagcgataacctattcctcaagcgactcaagcatagcgacagtaagtaacaccggggaagtaactcccaagaaagtcggaggacccatcacaataacagcgacaaaggcggaaaacggaagttacgctcaagctactgcaacctatacccctgacattacgcctttgcagttaaccataggaaatccgaactatgcgtcgaagacatatgacggctctacaacgtga

SEQ ID NO: 3532 - protein, 286 aa, Unknown
  Obtained from environmental sample
  misc_feature (1)..(286): Xaa is any amino acid
MQLTKANPTVSTTKKYDGNTSANVTADGALNNKVGSDDVTVSSVANYNSANVSEANKITVVYSIGGTSASNYIKPVDYTIDGTITKADGGTVNGTVSASSTTSTGVTVNLLTVAAPNSGNQTVEYARASSATVPTTGWQDSTTFTGLSANTNYYFFARAKANDNYLAGTAISVQIRTALQANIIAFGDPLEESKPYGTNFTKALSSTGSGNGAITYSSSDSSIATVSNTGEVTPKKVGGPITITATKAENGSYAQATATYTPDITPLQLTIGNPNYASKTYDGSTT

SEQ ID NO: 3533 - DNA, 405 bp, Unknown
  Obtained from environmental sample
  misc_feature (1)..(405): n is a, c, g, or t
atgtatatttcattcggctattttgaaaaacatgaagacaatcttttaatggtacgcaacgcgtacgaatctcttaaaaacggcggctcatttatcatcgaaactttaggaaaggaaatcgccgtccgtgattttgttgacagggaatggtttgaacgcgccggttttatggtgcttaccgaatatgaagttttagactcatggacattcctgaaaaatcgttggatactgattaaagacggtaaaaaaatcgaaagggtcttttctcaaagactctattcagcgtctgaattaaggtcgttgatgcttgaagcggggttttccaaagttgagatttacggcgattgggacgaaagcccttacgacaagcgggcggctaaacttattgtaatagggagaaaataa

SEQ ID NO: 3534 - protein, 134 aa, Unknown
  Obtained from environmental sample
  misc_feature (1)..(134): Xaa is any amino acid
MYISFGYFEKHEDNLLMVRNAYESLKNGGSFIIETLGKEIAVRDFVDREWFERAGFMVLTEYEVLDSWTFLKNRWILIKDGKKIERVFSQRLYSASELRSLMLEAGFSKVEIYGDWDESPYDKRAAKLIVIGRK

SEQ ID NO: 3535 - DNA, 474 bp, Unknown
  Obtained from environmental sample
  misc_feature (1)..(474): n is a, c, g, or t
gtgtccagtaagtcagcacgtatttataacgaccttttttctaattttacattttatttaacacataccgtaaaattttctatggtagaaaaatgctacaagcaccccctcaaatcgctcaacacctttggcgttgacgtagttgccgattgccttataaaagcgtacagcgaacaggacattctgcaaacgctcaacgagccgagcgttagaaaaggtgcgctgctcatacttggcggcggcagcaacctgctattcaccaaagattttaacggaacaatcctgcaacccctgatgagcagcattgaagttgaagagagccgcgcggacagcgtgctgctgcgcgtgggcgcangcgtggtttgggacgacttggcggcgtatgctgtgcaaagggggtggtacggcttggaaaacctctcgctcattccccgcagggtaagcgcaagccctgtgcaaaacataggggcttaa

SEQ ID NO: 3536 - protein, 157 aa, Unknown
  Obtained from environmental sample
  misc_feature (1)..(157): Xaa is any amino acid
MSSKSARIYNDLFSNFTFYLTHTVKFSMVEKCYKHPLKSLNTFGVDVVADCLIKAYSEQDILQTLNEPSVRKGALLILGGGSNLLFTKDFNGTILQPLMSSIEVEESRADSVLLRVGAXVVWDDLAAYAVQRGWYGLENLSLIPRRVSASPVQNIGA

SEQ ID NO: 3537 - DNA, 609 bp, Unknown
  Obtained from environmental sample
  misc_feature (1)..(609): n is a, c, g, or t
ttgcttgattcgatatcagataaagaaaacagccgctttatagaaataatccataagaatgccggaaccatggaaaaccttaccaatgatcttttaatacttgccgaccttgaagacaacaccggaaataaacgtgacatggaagaattaaaaatcgctccgttaatcaacgaagctgtttcttctatggaaaaccaggctaataaaaaacaaatagaaattattacagactgcaaggaaaatttaagcgctaaattatacggctcttttattattcaggctttaattaatttaatagaaaacggaattaaatattctccgtcaaaatcaaaaatttgggtcagcgcgtttatacaaaacgatgaactgttgtttgaggtacgtgacaagggtatagggattccctcagaacatcaggagcggatatttgaaagattttacagggtagataaagcaaggagccgctcagcgggaggcaccgggcttgggctttccattgttcggcacatttgtctgcttcacaaaggaaaagccgaagtggaaagccgcgccggtggcgaaggatcaacttttaggattagaattcctattcgtcagaatcttcaataa

SEQ ID NO: 3538 - protein, 202 aa, Unknown
  Obtained from environmental sample
  DOMAIN (86)...(198): Histidine kinase-, DNA gyrase B-, and HSP90-like ATPase
  misc_feature (1)..(202): Xaa is any amino acid
MLDSISDKENSRFIEIIHKNAGTMENLTNDLLILADLEDNTGNKRDMEELKIAPLINEAVSSMENQANKKQIEIITDCKENLSAKLYGSFIIQALINLIENGIKYSPSKSKIWVSAFIQNDELLFEVRDKGIGIPSEHQERIFERFYRVDKARSRSAGGTGLGLSIVRHICLLHKGKAEVESRAGGEGSTFRIRIPIRQNLQ

SEQ ID NO: 3539 - DNA, 561 bp, Unknown
  Obtained from environmental sample
  misc_feature (1)..(561): n is a, c, g, or t
atgatgtttcttattgtcgaaggatatcatcatacaagaaatgtaaaaaaatacatttttagattgtttattttagcaattatttcacattttgcctatgcgttttgttttgataaacatttcaatacagtatttgatcagacaagcgttatttgggcatatatgttaggtttattggcgttgataataagagaaaatgacatattaaaaacatggcaaaaacatttaatactttttcctgttatgtggttggcttttcccgctgattggagtacccccgccgcttttgcaattttgtatatgggtttaaattacagaaatttcaaaaaacaaatgatttcccttgttatttgcgttgcggtttacgcaataatatacgcaatttttctaaatcttattcatggcttaattcaaatattaattgtattggctattcctttattatacaaatataacggtcaaagagggacatggaaaggaatgaaatggtttttttatattttttatccggcacatttgatattattagggcttattaggatatatgtgttacataaatga

SEQ ID NO: 3540 - protein, 186 aa, Unknown
  Obtained from environmental sample
  misc_feature (1)..(186): Xaa is any amino acid
MMFLIVEGYHHTRNVKKYIFRLFILAIISHFAYAFCFDKHFNTVFDQTSVIWAYMLGLLALIIRENDILKTWQKHLILFPVMWLAFPADWSTPAAFAILYMGLNYRNFKKQMISLVICVAVYAIIYAIFLNLIHGLIQILIVLAIPLLYKYNGQRGTWKGMKWFFYIFYPAHLILLGLIRIYVLHK

SEQ ID NO: 3541 - DNA, 861 bp, Unknown
  Obtained from environmental sample
  misc_feature (1)..(861): n is a, c, g, or t
atgactattgctatagacgctagaatgaaaaacaaaagccgcattggaacatatataaagaatctgatggcgcatatagactatgacgtcgtnttagacgagtcgaattttccgtgcaaaaactacagtataaaagagcagctgttcttcccgcatagcaaattgcgcaaagaaaaggttgacgttttgcatgttccgcatctgaatattccgattttctatcgcggaaagctcatagttaccgtacacgacttgacgcatttgagatatccgcaatttttacctagcagattgcatcatttctattttaagtttatgatcggcgtggcggtaaagaatgcgtctaaagttttaaccgattctctaagtacaaaaaacgatataatagagttttttaacgtcaagccggacaaaattaaagttataccgttaggagtcggaaatgagtttgttatccgacaaaaaaacgatatttcttatctgatggaaaaatataatattcctcatgataaaaagataattttgtatgtaggaaatcttttgccgcataaaaatttaaaagcgttgctaaaggcttttggtttaatagagggttgcgttctggttttggtcggaaagagttttaaagacaggtcggagcagaccgcggaacagagttctattatttatgccggagaggtcagccagaacgaacttgtggatttatataacctcgctgatctgtttgtactgccctctctttatgagggtttcggtctgccggtattggagagtatggcctgcggaacgcccgtagcatgttcaaacgtttccagtctacccgaagtcggcggggatcgcgcattactcgtgccgatctga

SEQ ID NO: 3542 - protein, 286 aa, Unknown
  Obtained from environmental sample
  DOMAIN (158)...(286): Glycosyl transferases group 1
  misc_feature (1)..(286): Xaa is any amino acid
MTIAIDARMKNKSRIGTYIKNLMAHIDYDVVLDESNFPCKNYSIKEQLFFPHSKLRKEKVDVLHVPHLNIPIFYRGKLIVTVHDLTHLRYPQFLPSRLHHFYFKFMIGVAVKNASKVLTDSLSTKNDIIEFFNVKPDKIKVIPLGVGNEFVIRQKNDISYLMEKYNIPHDKKIILYVGNLLPHKNLKALLKAFGLIEGCVLVLVGKSFKDRSEQTAEQSSIIYAGEVSQNELVDLYNLADLFVLPSLYEGFGLPVLESMACGTPVACSNVSSLPEVGGDRALLVPI

SEQ ID NO: 3543 - DNA, 423 bp, Unknown
  Obtained from environmental sample
  misc_feature (1)..(423): n is a, c, g, or t
gtgtgggcgcaggccagggcgggcggcactatgtttgtcgcgacgaaaagtatcgagcttaaatcatctacgggctttttcgcttcggcgcggggaacgcttgcttacggggcggcggtgactgtgctgcaggtaaacggtaaatgggccgaggtacgctccgcggcgggatccgtatcgggatggacagccgtcgctaacctttcggcaaaacgaattgtcgccggaaacggcaccagcggcgctacggcaaacgaagtcgccctcgcgggaaaaggcttcaatcaggaaattgaaaacgtctataaagccaatggccgtctgaattacaccgatgttgacaggaccgaaacgcaaagggtgacaaagcaggaattgcagaatttcattgttgagggacgcctgtttcagggagacaaataa

SEQ ID NO: 3544 - protein, 140 aa, Unknown
  Obtained from environmental sample
  misc_feature (1)..(140): Xaa is any amino acid
MWAQARAGGTMFVATKSIELKSSTGFFASARGTLAYGAAVTVLQVNGKWAEVRSAAGSVSGWTAVANLSAKRIVAGNGTSGATANEVALAGKGFNQEIENVYKANGRLNYTDVDRTETQRVTKQELQNFIVEGRLFQGDK

SEQ ID NO: 3545 - DNA, 450 bp, Unknown
  Obtained from environmental sample
  misc_feature (1)..(450): n is a, c, g, or t
atgataaagactggggaccgggtaccgggcattagacaaataaaaaaaacaaatcggcttttaatggtttttgccataatttcagtctcttgcgcggctctgtccggctgcaagacaatctcggacctggcgaagaaggccggttcggcgggcatgattgacagtaacacacaaaacgctatcaccaattcaagcaaagccatagcgaacgccgccgaggatataaccccggaacaggagtactatatcggcagggctgtcgccgctaacatccttaaaacatattctttatggaggaacagtccggctcttacagcttatgtcaaccgtatctgcagcgccatagtgatcaattcacccaggccggaaatctataacggctaccacgtggcgcttctggattcaacgagattaacgctttcgccacctcgggcggccatatttttataa

SEQ ID NO: 3546 - protein, 149 aa, Unknown
  Obtained from environmental sample
  misc_feature (1)..(149): Xaa is any amino acid
MIKTGDRVPGIRQIKKTNRLLMVFAIISVSCAALSGCKTISDLAKKAGSAGMIDSNTQNAITNSSKAIANAAEDITPEQEYYIGRAVAANILKTYSLWRNSPALTAYVNRICSAIVINSPRPEIYNGYHVALLDSTRLTLSPPRAAIFL

SEQ ID NO: 3547 - DNA, 477 bp, Unknown
  Obtained from environmental sample
  misc_feature (1)..(477): n is a, c, g, or t
atgaaaaaattttttatcgatatcgaaacgtataatgaaagcgttgctttgcgaacacgcggattgtacaggtacgccgagaacgcggagataatgcttgtaggctacgcgttggatgacgaaccagtatgcgtttgggacgcggtgaatgaatcgacgccgggcgtatttatgaaaatagcgaattctatagacgagaacgaatatcaaatcgtcgcgcataacgccgctttcgagcgaactattttcagtaagcaggacggcatctttaaggcgctgtacgacaaaaaaaattggcactgcacgatggcgcaggctttggcgcacggcttacccggagcgttacagtatctatccgatattttcaaactgtcgagcgacaaggcgaaagatcccgaagggcgcttgcttgtcaatctgttttgctcgccccgcgacggcttacgcgcaacgcgccgtacgcaccctgtcgaatga

SEQ ID NO: 3548 - protein, 158 aa, Unknown
  Obtained from environmental sample
  misc_feature (1)..(158): Xaa is any amino acid
MKKFFIDIETYNESVALRTRGLYRYAENAEIMLVGYALDDEPVCVWDAVNESTPGVFMKIANSIDENEYQIVAHNAAFERTIFSKQDGIFKALYDKKNWHCTMAQALAHGLPGALQYLSDIFKLSSDKAKDPEGRLLVNLFCSPRDGLRATRRTHPVE

SEQ ID NO: 3549 - DNA, 456 bp, Unknown
  Obtained from environmental sample
  misc_feature (1)..(456): n is a, c, g, or t
atgtgcgacaagtacggcaggctttacaattgggcaacagcaatgggtggctctgctagctctgctgaaaatccaagcggcgttcagggcgtttgtcctgctggctggcatttgcccagtgatgcggagtggacagcactgacggatttttttgataaagcgccacaggagaaatttactgatttagcaaccaggatgaaagcggattctcctttgtggtttaactatgacaaactcaaaggcagggacgatttcggcttttcggctctgcctggcggtgtgggacgtccagatgactatttcctcaatttctccgccaccggcttatggtggagcactacggagaaagacgcttctaacgcctacgaacgatacatatcctacatgaacacacatgtaactaggagattcagcgataagggctttttatattcagttcgctgcctcaaagactaa

SEQ ID NO: 3550 - protein, 151 aa, Unknown
  Obtained from environmental sample
  misc_feature (1)..(151): Xaa is any amino acid
MCDKYGRLYNWATAMGGSASSAENPSGVQGVCPAGWHLPSDAEWTALTDFFDKAPQEKFTDLATRMKADSPLWFNYDKLKGRDDFGFSALPGGVGRPDDYFLNFSATGLWWSTTEKDASNAYERYISYMNTHVTRRFSDKGFLYSVRCLKD

SEQ ID NO: 3551 - DNA, 849 bp, Unknown
  Obtained from environmental sample
  misc_feature (1)..(849): n is a, c, g, or t
ttgcgttcataccgcgacggcttaacgtatgatccccgccgccagcaggcaatcgacgagcggcttgccctgctgtacaaactaaagcgcaaatactgcgaggccgccgccggcgattcggtttccgttgaggacgccatcctcgcttaccgcgcctcggctgaggccgagatagaggccttatccaacatcgaggaaaaccgtgaaagtctcaaggccgcgatagccgagctggaaaaagacatcgcttgcagagccgcatctctgcgtcaaaaaaggacggctgccgccggaaccctgggacagcggataaccggaattctcaaacggcttggaatgcccaacgcccggttttccccctcaataaccccaaaaacccagcaggcgcaggatggccgacaaaccgtcgtctgcggcccctggggcgcggaagaagtcgagtttcttatctccgcgaacacgggcgagccgctcaaagacctttccagaatagcgtcgggcggggagctttcccgcgtcatgctggcgataaagtccgtgctgtcctcggctgacaacgtagagactttaatctttgatgaaatcgacgcggggataggcggggaagtcgcccttgcggtaggggagtaccttgaaaaaatgggggagagcagacagatattctgcgtcacccatcttgcgagcatcgcggtgcgcgccggtaatcatttcaaggtggagaaacggacggaagatggcaggacttttacgggggtcggccccttgagcacggatggcagaagaaaagagattgcaaggatgctggccggggacgggagcaaggcggctcttgcccatgcagatgattaa

SEQ ID NO: 3552 - protein, 282 aa, Unknown
  Obtained from environmental sample
  misc_feature (1)..(282): Xaa is any amino acid
MRSYRDGLTYDPRRQQAIDERLALLYKLKRKYCEAAAGDSVSVEDAILAYRASAEAEIEALSNIEENRESLKAAIAELEKDIACRAASLRQKRTAAAGTLGQRITGILKRLGMPNARFSPSITPKTQQAQDGRQTVVCGPWGAEEVEFLISANTGEPLKDLSRIASGGELSRVMLAIKSVLSSADNVETLIFDEIDAGIGGEVALAVGEYLEKMGESRQIFCVTHLASIAVRAGNHFKVEKRTEDGRTFTGVGPLSTDGRRKEIARMLAGDGSKAALAHADD

SEQ ID NO: 3553 - DNA, 564 bp, Unknown
  Obtained from environmental sample
  misc_feature (1)..(564): n is a, c, g, or t
atgaataaaacaaatgacgttctggaaggcgtcctggacgaaattgaaaacaacctcaaagacgatatcaatgccgatattctggctgatgaattttccgtgtcttcaatccatttacagcggctttttaagcaaacattcaaaaaaccgattggaacatatattcgctcccgaaaattatctgcaagcataggtgatttattgtatagcaggttaaatgttcaggatattgctttggattacggttttagctatgaacaggcttatatattaagctttaaacgtgaattcggttttaccccgggcgatttacgcaaaagcaggtattttgtaagaaccactccgcccctaaaacctttttgccaaaagtctgtatataaaaacgattttcttgtcggcaacatcattaacgaaagatatatggacggcgcttattttgacgttataaagaatcattttaatgttatcaccccagaaaataacttaaagcctgtttcagtaacatcaaaccgcggcggcgcgtacaactggtcatacgcggatcagatggtgaatcgtctctaa

SEQ ID NO: 3554 - protein, 187 aa, Unknown
  Obtained from environmental sample
  DOMAIN (10)...(56): Bacterial regulatory helix-turn-helix proteins, AraC family
  misc_feature (1)..(187): Xaa is any amino acid
MNKTNDVLEGVLDEIENNLKDDINADILADEFSVSSIHLQRLFKQTFKKPIGTYIRSRKLSASIGDLLYSRLNVQDIALDYGFSYEQAYILSFKREFGFTPGDLRKSRYFVRTTPPLKPFCQKSVYKNDFLVGNIINERYMDGAYFDVIKNHFNVITPENNLKPVSVTSNRGGAYNWSYADQMVNRL

SEQ ID NO: 3555 - DNA, 408 bp, Unknown
  Obtained from environmental sample
  misc_feature (1)..(408): n is a, c, g, or t
ttgcggcggtgtttcagctctgataaagccggctatgaggtgcttgtggaagcgggctaccagccggagagcgcctattttgaagttatgcatgagatgaagctaatcatagatcttgtaaaccggggcgggctttcctttatgcgctattcaatttcagacacggctgaatacggcgattatgtcacagggccgaagatcatcaccaaagaaacaaaggacacaatgcggcagatattgaaggatattcaaaacggaagtttcgcgcgggactggatacttgagaatcaggtgaaccgtcctttctttaaccgcatgagggcgattgaagcggaacatccaatcgagaaaacgggaaacgaactgcgcgccatgatgccctggttgaagaaaaacgaggaaaaataa

SEQ ID NO: 3556 - protein, 135 aa, Unknown
  Obtained from environmental sample
  DOMAIN (1)...(130): Acetohydroxy acid isomeroreductase, catalytic domain
  misc_feature (1)..(135): Xaa is any amino acid
MRRCFSSDKAGYEVLVEAGYQPESAYFEVMHEMKLIIDLVNRGGLSFMRYSISDTAEYGDYVTGPKIITKETKDTMRQILKDIQNGSFARDWILENQVNRPFFNRMRAIEAEHPIEKTGNELRAMMPWLKKNEEK

SEQ ID NO: 3557 - DNA, 516 bp, Unknown
  Obtained from environmental sample
  misc_feature (1)..(516): n is a, c, g, or t
ttggcgattgaaacaaatggaggtggtattgtattaaaacaaaaagatcaagacttcgctatatctaagcctttgtttttgaaatcaagtcactatgattcttttgaaaagagtgtggttcgtaaaacgaatattgcttatttaatatgtgaatgtaaaactaatttggataaaacaatgtttcaagaagcatcagctactgcgttagatttaaaatccactgtgccaatcgcaaaatatatcctattatgcgaatggcttgatatgacgccaataagttcaaatacaacagcaattgatgaaataatcattttacgaaaggccaaacgtattggatctggagaaagacaaaattattcttcggcagccgaaagagttacaaaattaaaaacatataaagaaattatttattctcatccatttgtagctgatacgtttatgcggttaattgaccatattaatagccttataaatgacattgaagaaaatgaaatattaaacagaggatatttttag

SEQ ID NO: 3558 - protein, 171 aa, Unknown
  Obtained from environmental sample
  misc_feature (1)..(171): Xaa is any amino acid
MAIETNGGGIVLKQKDQDFAISKPLFLKSSHYDSFEKSVVRKTNIAYLICECKTNLDKTMFQEASATALDLKSTVPIAKYILLCEWLDMTPISSNTTAIDEIIILRKAKRIGSGERQNYSSAAERVTKLKTYKEIIYSHPFVADTFMRLIDHINSLINDIEENEILNRGYF

SEQ ID NO: 3559 - DNA, 735 bp, Unknown
  Obtained from environmental sample
  misc_feature (1)..(735): n is a, c, g, or t
ttggatgagccgttgttattggctgaaccgcccgatacggttaattttgaaaacggcggtcaaaccatcgtattcacgccggaaacgacggaggcggatatcaaacggattgtccagtatctcccaacggataaacaggacgaagtcaaatggaaatattcatgttacaaacaagcgcaaccggattcggttccgtctccggcgcggttaggtgaaaagtttcttgttcctcgcttgatggtggagttgcagggcgaacttgtttttgctgaaccggagacaatttttgaggctttcgactgggacatagcgaaatttgccgatcctaagatgaacgccggagagttcaatatagagccgcagggcaacggtttcagcatcgacatagacggtcataaactaacgtattcaccagctggtgccgaacaatgttccttgccgttggtagaggtagaaacgtggacatcggcaaaccttatacgttggctcgacaagtctttacatcaggaggatatacctcagcctaatatggttgaatggttacgccgtatgattgaacacttaaccgatattcgaggtatgaaattgtccgcgttaatgttggccaagtatgctttggcgaataaaatagaagcaaaaatcaaaaaagcgcgaagcgaggctcgtacgagagcctttcaaactacactatttgaacgcgaaagccgcgttatgcttgacttgacaacgggttga

SEQ ID NO: 3560 - protein, 244 aa, Unknown
  Obtained from environmental sample
  misc_feature (1)..(244): Xaa is any amino acid
MDEPLLLAEPPDTVNFENGGQTIVFTPETTEADIKRIVQYLPTDKQDEVKWKYSCYKQAQPDSVPSPARLGEKFLVPRLMVELQGELVFAEPETIFEAFDWDIAKFADPKMNAGEFNIEPQGNGFSIDIDGHKLTYSPAGAEQCSLPLVEVETWTSANLIRWLDKSLHQEDIPQPNMVEWLRRMIEHLTDIRGMKLSALMLAKYALANKIEAKIKKARSEARTRAFQTTLFERESRVMLDLTTG

SEQ ID NO: 3561 - DNA, 339 bp, Unknown
  Obtained from environmental sample
  misc_feature (1)..(339): n is a, c, g, or t
atgggtttaaatgaaaaaaatcaaaagaacatattgaggtttggtccttatgccctggactatgactcctgtatccttaaaaagaacggtgagagaatccccctttcaacaaatgagtacagctgccttgcctggcttacggaacatcccgggaaacccatacctgtagagactatctataccggtgtttggaaaaacaaacacggcgatattaccaccgtggcggtttatgtccagcggctgcggaaaaaaatagaagaagacccgtcgaatccggtttatatagaaaccgtacacggtatgggttatcaatttaatttaaaaacggaccagccataa

SEQ ID NO: 3562 - protein, 112 aa, Unknown
  Obtained from environmental sample
  DOMAIN (30)...(105): Transcriptional regulatory protein, C terminal
  misc_feature (1)..(112): Xaa is any amino acid
MGLNEKNQKNILRFGPYALDYDSCILKKNGERIPLSTNEYSCLAWLTEHPGKPIPVETIYTGVWKNKHGDITTVAVYVQRLRKKIEEDPSNPVYIETVHGMGYQFNLKTDQP

SEQ ID NO: 3563 - DNA, 387 bp, Unknown
  Obtained from environmental sample
  misc_feature (1)..(387): n is a, c, g, or t
gtgcgcgagttcgaggaacgcagcgccgccattcaggcggaaattgacaagatgacaagggaaatccaggatttacgggcaaaacgaatcgatcttgtaaaccagggcgaccaaaccggggcgctcaggctggaaaatgaaatttaccgcaaatcggaattcttaagggaatactatacggttaaaaccgccgagcttgatgatcagcgcaaaaaacttgcccaatccgacagtttcatggaacaggtgtacggcgaaatacgatccatagccgaaagcgaaggttacagcatggtgatgaacctgaaggacgcgatctggtacagccccacggtggacattaccgacaaggttattcaaaatcttgtcagcagatcccggcgctaa

SEQ ID NO: 3564 - protein, 128 aa, Unknown
  Obtained from environmental sample
  misc_feature (1)..(128): Xaa is any amino acid
MREFEERSAAIQAEIDKMTREIQDLRAKRIDLVNQGDQTGALRLENEIYRKSEFLREYYTVKTAELDDQRKKLAQSDSFMEQVYGEIRSIAESEGYSMVMNLKDAIWYSPTVDITDKVIQNLVSRSRR

SEQ ID NO: 3565 - DNA, 387 bp, Unknown
  Obtained from environmental sample
  misc_feature (1)..(387): n is a, c, g, or t
atgtccgagaaccgttccagccccatgctggatcaatacagaaagataaaacgtgaacatcagggggacgttctttttttccggctgggtgatttttatgaaatgttcgcggatgacgcaatagaggtatccgcgcttttgaacctcgcgcttacaagccgtaacgggctgcccatgtgcggcgtcccctaccacgccgcgcgatcctatatcgcgcggcttttaaaatacggaaaaaaaatcgcgatatgcgagcagctttcagaacccggcagaggccagaagatcatcgacaggcaggtggtcgaggtcattacaccgggaaccaccgttgacgaagattaccttgagcagggctgttccaactacctttgcgccttgcagtga

SEQ ID NO: 3566 - protein, 128 aa, Unknown
  Obtained from environmental sample
  DOMAIN (7)...(114): MutS domain I
  misc_feature (1)..(128): Xaa is any amino acid
MSENRSSPMLDQYRKIKREHQGDVLFFRLGDFYEMFADDAIEVSALLNLALTSRNGLPMCGVPYHAARSYIARLLKYGKKIAICEQLSEPGRGQKIIDRQVVEVITPGTTVDEDYLEQGCSNYLCALQ

SEQ ID NO: 3567 - DNA, 918 bp, Unknown
  Obtained from environmental sample
  misc_feature (1)..(918): n is a, c, g, or t
atggttctcgcattccccgtatttgcaggcggcaaagttgatctaaagggaaaggaaattttaattggcggtttttcggacggttacgatgttaatacttttaaaccggcaaacgacgctcaggaacgcgagcttgaatggcgaaaaaaagtcatggccgaatatggctttaccatgaggggaatacaggttgccggctggggtgaaatgctccagactgtaggcaattccattatggcggggaagcccgcggctcaggctttctggcttcaatcggattgggcgatgacattatacaggagagggctgcttgcccctttgtctgaccagaaatccgttaatttaaaaaccgaagtcggtatccccggcaaacaggttgggtataatcagaacgtagcagctttatttacctttaaaggcaagcaatacgcgattggcatcgggtacgggggcagtcagcacggagcgggcgtatattttaataaaaggctgttcagggaagcaggtcttgatccaaatctcccgtatgatctgcaaaaatcgggaagatggacctgggatgagtttttaagaataagcaaaatacttacccgcgacacgaggaatacggggcgcattaatacctgggctatgaccgccgacctttcaacggaaatactggatcagattgtttattcgaacggggcgaattatgtgggcagggatcccagaacgggaaaattttttaacgcctcnaacaggcccgaagtcattgaagctttacagtttgccataaggctgaagaacgaaggcgttatgatgccgaggcctgaaggttccgattggaactggtactggcctatgttccacgacggtatagtcgcaatgatgatggaaacccgaatggaggaaggggcagctgcaaaatatgaaggatga

SEQ ID NO: 3568 - protein, 305 aa, Unknown
  Obtained from environmental sample
  misc_feature (1)..(305): Xaa is any amino acid
MVLAFPVFAGGKVDLKGKEILIGGFSDGYDVNTFKPANDAQERELEWRKKVMAEYGFTMRGIQVAGWGEMLQTVGNSIMAGKPAAQAFWLQSDWAMTLYRRGLLAPLSDQKSVNLKTEVGIPGKQVGYNQNVAALFTFKGKQYAIGIGYGGSQHGAGVYFNKRLFREAGLDPNLPYDLQKSGRWTWDEFLRISKILTRDTRNTGRINTWAMTADLSTEILDQIVYSNGANYVGRDPRTGKFFNASNRPEVIEALQFAIRLKNEGVMMPRPEGSDWNWYWPMFHDGIVAMMMETRMEEGAAAKYEG

SEQ ID NO: 3569 - DNA, 726 bp, Unknown
  Obtained from environmental sample
  misc_feature (1)..(726): n is a, c, g, or t
gtgtcaatattcaatccaaatcctccaaaaacagatgccgctcccgacaatgttctttccaacgcccaggatgcaattgttgaaatggaaggcatagaaataaaacgccccaccaatgaaatcagcgatttgattcccggcgttacgatctttgccagggccccttccgatacgcctgtacggcttaacattgaaccggaccgggaagcgattaaagaggctattgtaacccttgtgggaaactacaaccggcttgtgggtgaactgaacgtccttacccgaaccgatgaacgggtactccaggaattgaactacctgaccccggatgaaaggatcgaaatgaaaaagcgccttgggtctttttccggagattccatgctgaaccagttcaaaaaccgcctccagcaggcggttaccggagcctaccccaccgatgcggaacaggaactttccctgctggctcaaatcggcataggcaccgatgtgcgccgcgcgggggcaacaaccggttataatccgtcacagcttcggggttatcttgaaatcgacgaaaagatcctggacggggcattgcaaaaagacctgcggtccattcagcagctttttggctacgattcaaccggcgaccttatcgcggacaccggaagtgccgttgtcctggatactctgaccaaaccctatgtagaaaccgggggaaattatttccctgcgaaccggcngcattga

SEQ ID NO: 3570 - protein, 241 aa, Unknown
  Obtained from environmental sample
  DOMAIN (22)...(234): Flagellar hook-associated protein 2 C-terminus
  misc_feature (1)..(241): Xaa is any amino acid
MSIFNPNPPKTDAAPDNVLSNAQDAIVEMEGIEIKRPTNEISDLIPGVTIFARAPSDTPVRLNIEPDREAIKEAIVTLVGNYNRLVGELNVLTRTDERVLQELNYLTPDERIEMKKRLGSFSGDSMLNQFKNRLQQAVTGAYPTDAEQELSLLAQIGIGTDVRRAGATTGYNPSQLRGYLEIDEKILDGALQKDLRSIQQLFGYDSTGDLIADTGSAVVLDTLTKPYVETGGNYFPANRXH

SEQ ID NO: 3571 - DNA, 849 bp, Unknown
  Obtained from environmental sample
  misc_feature (1)..(849): n is a, c, g, or t
ttgattgatgagtatgacgttcccctgcaaaaatcttgggtgtgtaaatattacaaagagatgatagcgttcatccgtccgctattgggcagtgcgctcaaagacaacccgcacctgcaattagccgtgatgaccggatgtttgcggatttccaaagagagcatatttaccgggttgaacaatttaaatgtagtgtcgatcctaagcgattcttatagcgaacatttcggttttacacaaattgaagtggacaccatgcttaaatattacggattagagagcaaaacgcagatactcaaggactggtacaacggctatttgtttggaaataccgaagtatacaacccgctaagtaccgtccatgtagttagagcgtggacgcaaaatatagaaagagacccggagccgtattggtcaaatacaagcggtaacgatattgtccgcaggttggtagacatagccaatgtcgaaatgaagaccgatttggaaacactaatggccgcccaaacgatctcaaaaccgattcacgaggacatcacgtatgaagaaatagacgaggataaaaataaagaccccgacaacttttggaactttttgttcttcaccggctacctgaaaaaagtcgggaagggacgcatggacggcgtaaaaaaggttttggatttgtctattccgaacttggattgctgtacatttatgaaaccaaaatacaagattggtttaaagaggaagtcagccggaaaagattttgcccgttatatacagcgcttttttagtggagacgcagagacattgcaaaaagaactcggcaacttcctagtggagaccataagttatatgggacgctaa

SEQ ID NO: 3572 - protein, 282 aa, Unknown
  Obtained from environmental sample
  DOMAIN (1)...(282): Protein of unknown function (DUF1703)
  misc_feature (1)..(282): Xaa is any amino acid
MIDEYDVPLQKSWVCKYYKEMIAFIRPLLGSALKDNPHLQLAVMTGCLRISKESIFTGLNNLNVVSILSDSYSEHFGFTQIEVDTMLKYYGLESKTQILKDWYNGYLFGNTEVYNPLSTVHVVRAWTQNIERDPEPYWSNTSGNDIVRRLVDIANVEMKTDLETLMAAQTISKPIHEDITYEEIDEDKNKDPDNFWNFLFFTGYLKKVGKGRMDGVKKVLDLSIPNLDCCTFMKPKYKIGLKRKSAGKDFARYIQRFFSGDAETLQKELGNFLVETISYMGR

SEQ ID NO: 3573 - DNA, 426 bp, Unknown
  Obtained from environmental sample
  misc_feature (1)..(426): n is a, c, g, or t
atgacagattcngccgagatcggttattgctatgacaagaaagaaccccgaatgttttccttttcgcgggtaaaaaaactggtattaaaaaaagaacacttcactattccgccggactttaagccggataagtattttgacaaagagatgggagtattcgcttcctcccggactccgtacacggttgaattgctgataaacaacgaaatcggcacattcgcccttgaacggcaatggcacgacacccagacagttgaacaacgagaagacggctcggtatacgtcaagtttaccacgactcagataccggaagtcctgcgctgggtgcttgggcaggggcacacggtaaaggcgcttgccccgcctgagcttgtcggcatggtgaaggatgaagcggagaaagtgagggggatgtatgaaagataa

SEQ ID NO: 3574 - protein, 141 aa, Unknown
  Obtained from environmental sample
  misc_feature (1)..(141): Xaa is any amino acid
MTDSAEIGYCYDKKEPRMFSFSRVKKLVLKKEHFTIPPDFKPDKYFDKEMGVFASSRTPYTVELLINNEIGTFALERQWHDTQTVEQREDGSVYVKFTTTQIPEVLRWVLGQGHTVKALAPPELVGMVKDEAEKVRGMYER

SEQ ID NO: 3575 - DNA, 300 bp, Unknown
  Obtained from environmental sample
  misc_feature (1)..(300): n is a, c, g, or t
atgctttctatgcgaagtgcaatgtcgtctgcactttgcgcactctggttcgcaagttcttttatttcacctgccacaacagcaaagcccttgcctgcctcgcctgcgctggcagcttcaatggtggcattgagagcgagcaggtttgttttgtcggctatctttttgattacatttgtaacaagccctatttcctttgccgctgcaccgagtttgctcataacgtctgttgcatttgcggatttttccgtggcagctatggcaaccttgcgagcctcgctagcattggaggcaatttga

SEQ ID NO: 3576 - protein, 99 aa, Unknown
  Obtained from environmental sample
  SIGNAL (1)...(28)
  misc_feature (1)..(99): Xaa is any amino acid
MLSMRSAMSSALCALWFASSFISPATTAKPLPASPALAASMVALRASRFVLSAIFLITFVTSPISFAAAPSLLITSVAFADFSVAAMATLRASLALEAI

SEQ ID NO: 3577 - DNA, 597 bp, Unknown
  Obtained from environmental sample
  misc_feature (1)..(597): n is a, c, g, or t
atgccgccttatgatccgccccctgtacaaaatagaatcgtttatatttacagggttttgataaagtggtttttctttttatttttcggattttcctctataattcttgtggtttttgtcttgcctcctatgaggctgtttatacacccaaaggaaaaatttaaaaaaagcgcaagactttttgtttcagtttcattccgtttctttatcgggttaatgcatttttttcaagttgtagaccttgaagcgggaaaccgggaaatgtacagacggctttcttcaaaagtaatagtcgcaaatcatccttctctgattgatgttgtcatgctgttttcattaatcccgaatgccgactgcattgtagcaggacaccttaatcacactattgtaaaaggaatcgtacgttggctttacattttaaattcacaggattttgacgatattcttaaagcctgtgatgaatctttaaaatacggaaactgcattgttatttttcccgaaggaacaagaacgccgagaaacggaaaccctgttataaaaaaggagcggcgcgtattgccctcgcctgcggctgcggtattataccccttcatatag

SEQ ID NO: 3578 - protein, 198 aa, Unknown
  Obtained from environmental sample
  misc_feature (1)..(198): Xaa is any amino acid
MPPYDPPPVQNRIVYIYRVLIKWFFFLFFGFSSIILVVFVLPPMRLFIHPKEKFKKSARLFVSVSFRFFIGLMHFFQVVDLEAGNREMYRRLSSKVIVANHPSLIDVVMLFSLIPNADCIVAGHLNHTIVKGIVRWLYILNSQDFDDILKACDESLKYGNCIVIFPEGTRTPRNGNPVIKKERRVLPSPAAAVLYPFI

SEQ ID NO: 3579 - DNA, 663 bp, Unknown
  Obtained from environmental sample
  misc_feature (1)..(663): n is a, c, g, or t
atgtccatgcaaatagagctttccagccgctgtaatgagcgctgcgttcattgctatatacctcacgaaaataaattgaacgacattgatccggcgctcttttacgatgttctggaacaatgccgggacatgggcgttttgggattaaccctttcgggcggcgagcccatgctccacaaaaacttttgcgaatttttacgtaaagcgaaagaatacgacttttcgataaatattctcagtaaccttaccctgttgaatgatgaaatcataaaagaaatgaaagaaactcgtctttccagcgttcaggtttccctatacagcatgaaggcagaaatacacgattccattacccagcttaaaggctctttttacaaaactcagaataacatcctcaagcttattgaaaacgacataccaatgcagattagctgtcctaccatgaaacagaacaaggactgttatgcagaagtattaaactgggctcataagcacaagatcagggcggagacagattttattatgatggccagatatgaccatagcacaagcaatcttgataaccgcctgagtcttgaggaagttggaaaaatcataacagaaattatcgagtataatcccaattatcaggaagaaactgtaaaaactgattttgaaaaagtttga

SEQ ID NO: 3580 - protein, 220 aa, Unknown
  Obtained from environmental sample
  DOMAIN (5)...(161): Radical SAM superfamily
  misc_feature (1)..(220): Xaa is any amino acid
MSMQIELSSRCNERCVHCYIPHENKLNDIDPALFYDVLEQCRDMGVLGLTLSGGEPMLHKNFCEFLRKAKEYDFSINILSNLTLLNDEIIKEMKETRLSSVQVSLYSMKAEIHDSITQLKGSFYKTQNNILKLIENDIPMQISCPTMKQNKDCYAEVLNWAHKHKIRAETDFIMMARYDHSTSNLDNRLSLEEVGKIITEIIEYNPNYQEETVKTDFEKV

SEQ ID NO: 3581 - DNA, 630 bp, Unknown
  Obtained from environmental sample
  misc_feature (1)..(630): n is a, c, g, or t
atggatcagattngccgagcggcagaggggacagcgcgggcgcggtatgctctaaggggacaatcgcctatgcctgatccatgcacagacccccgcctggatatccggttcgcgccatgcatcatagtgccggtgtaccgccacgccgctaggtttgtggagttcgcaaagtcgctgcccaaggacatccaggtgatggtggtggacgacggcaacagcgaaaaagagtcgcgcatcctgcgctccatcggctacccgaccctccgcctttaccgcaacatggggaagggcggcgcggtgctggcggggctgcgaaaggccgcggccaaaggctacacgcacgccctacagattgatgccgacgggcagcacgacgtcgccgacatcccaaggttcctcgacaaagccagggccaatccggccgcgctggtgaacggctgccccgtttacgacgaggccgcgccgaagtcccgcgtcgtcgccaggaagttcaccaacttctgggtccgcctggagaccggcagcgatgatttcagggacgccatgtgcggcttcaggntttaccccctggagcccatgctgcccctgctgcgcaaaggccttgtcttcaagagatgggccgcgacatag

SEQ ID NO: 3582 - protein, 209 aa, Unknown
  Obtained from environmental sample
  DOMAIN (40)...(194): Glycosyl transferase family 2
  misc_feature (1)..(209): Xaa is any amino acid
MDQIXRAAEGTARARYALRGQSPMPDPCTDPRLDIRFAPCIIVPVYRHAARFVEFAKSLPKDIQVMVVDDGNSEKESRILRSIGYPTLRLYRNMGKGGAVLAGLRKAAAKGYTHALQIDADGQHDVADIPRFLDKARANPAALVNGCPVYDEAAPKSRVVARKFTNFWVRLETGSDDFRDAMCGFRXYPLEPMLPLLRKGLVFKRWAAT

SEQ ID NO: 3583 - DNA, 849 bp, Unknown
  Obtained from environmental sample
  misc_feature (1)..(849): n is a, c, g, or t
atgaatttttatgaaaaactggagccggagatacggcgtcaggaatatgaaaatacactgcatgctatttttgaggatatgccggaatttgtcaggatgtttaccatatggaaacctgacgccattgacaacatggacagccgtttcataggcagggcaggtatgaccgagacaggtcagtttgccctttcactgacaagagaaaacgggcggatagaaaaagtgaccagcgccgtcgttcagcaggcaatggcgcacatgaacggacccaacagcaaaacagtcgaaatgagcgatcccataatttttaagatacagggaaaagatacatggtgtttaagaatcatggttcccattgaaaataagcgtcttaatgaaacagtcggagttgtaggctgtatctttaatattgatctgatgcagcctctggtagagcaggctatcaataattacgatgaagtcaccagcatggcgatttacaccaacacagggtttgttttggcaaattaccttccggaaatgattggagggcaccttgttgaggtggaaacgcaatacggcgaacatttagaccgggtcgccgaggctgttaaaaacgcanaggaatggggagtttgcaatttcgatcctgaattgaaaacaaccatgtatatgagcattgctccaattcctctggncgctttccccgacacatggggcgtaatgatncggtcaaccgaggattacatccttaaagacataaactccatggaacaatttacatcatggttaatgggaaagttgttttgtccgcgggggcccctggggctcgtccttatccgggttgacccgccaaaaacaaaccgataa

SEQ ID NO: 3584 - protein, 282 aa, Unknown
  Obtained from environmental sample
  misc_feature (1)..(282): Xaa is any amino acid
MNFYEKLEPEIRRQEYENTLHAIFEDMPEFVRMFTIWKPDAIDNMDSRFIGRAGMTETGQFALSLTRENGRIEKVTSAVVQQAMAHMNGPNSKTVEMSDPIIFKIQGKDTWCLRIMVPIENKRLNETVGVVGCIFNIDLMQPLVEQAINNYDEVTSMAIYTNTGFVLANYLPEMIGGHLVEVETQYGEHLDRVAEAVKNAXEWGVCNFDPELKTTMYMSIAPIPLXAFPDTWGVMXRSTEDYILKDINSMEQFTSWLMGKLFCPRGPLGLVLIRVDPPKTNR

SEQ ID NO: 3585 - DNA, 375 bp, Unknown
  Obtained from environmental sample
  misc_feature (1)..(375): n is a, c, g, or t
atggcaaaaaaaatagcaaagaaaaacaatatggtgagagaagctttggagcttttggcaaaagaaaaaaacgttgccatagaagatgtattcacagcttttaaggaatctctcattgcggcagcccgcaaattcatgaagctgcacaaaaacatagaggtggatgttgacccagagaccgaagacataaaagttgtgcttagggtagaggttgtggacgatttccccgactacgacccaaatctctctcccgaagaagttgagaaaatggacgagcagtatatgcttgaagaagaagcaaaggaatatcatcccgaagctgccgcaggctatatgctagaagttgagctgccttttgagactacggtcgcttag

SEQ ID NO: 3586 - protein, 124 aa, Unknown
  Obtained from environmental sample
  DOMAIN (10)...(102): NusA N-terminal domain
  misc_feature (1)..(124): Xaa is any amino acid
MAKKIAKKNNMVREALELLAKEKNVAIEDVFTAFKESLIAAARKFMKLHKNIEVDVDPETEDIKVVLRVEVVDDFPDYDPNLSPEEVEKMDEQYMLEEEAKEYHPEAAAGYMLEVELPFETTVA

SEQ ID NO: 3587 - DNA, 720 bp, Unknown
  Obtained from environmental sample
  misc_feature (1)..(720): n is a, c, g, or t
ttgatatcgcgaggaaccatgggacaggcggagaaggcttacgaaacactgaccgacatacttgccagagagccggttccgggaatagacaaatttgaagtgttcttccggtttgggacttctgcaagcaaactgggcctgactgaacaggcctacagggggttttcccaggcccgtaccttaaaacaggacaattttgaggtaaacttcaatctcggcgaactggagtttgatcgaaagaactacgaaaaagccatacagctgctccaggcggcgcgcacccagaacccggataaccccgcggtgcttcgctgcatcggccattcgcttttcaggctgaaaaaaccgaaagaggcgatgagcattatccgcaaggcgatcgagcttgccccggatgacaaggaatccctttatactctggcggagtgttattatgaagccaaccaggtagaccaggccatcaaaatattcagccacctccgcgtcgatccggtaatgggccccaacgcctgtcttatatccgggaacatccataacgagattcgcagggcggacctggcgatacaggactatgaaatggggttaagacacgagcatataaagccggatatactggncgaattgcgttacttccttgccgtttcatacatcaagccgaatgatataagcaaggccctgcctttattcccaagctggaaagcggaaaaaatcctcgaataa

SEQ ID NO: 3588 - protein, 239 aa, Unknown
  Obtained from environmental sample
  DOMAIN (100)...(133): Tetratricopeptide repeat
  misc_feature (1)..(239): Xaa is any amino acid
MISRGTMGQAEKAYETLTDILAREPVPGIDKFEVFFRFGTSASKLGLTEQAYRGFSQARTLKQDNFEVNFNLGELEFDRKNYEKAIQLLQAARTQNPDNPAVLRCIGHSLFRLKKPKEAMSIIRKAIELAPDDKESLYTLAECYYEANQVDQAIKIFSHLRVDPVMGPNACLISGNIHNEIRRADLAIQDYEMGLRHEHIKPDILXELRYFLAVSYIKPNDISKALPLFPSWKAEKILE

SEQ ID NO: 3589 - DNA, 306 bp, Unknown
  Obtained from environmental sample
  misc_feature (1)..(306): n is a, c, g, or t
gtgaccggatcgaccgtgggcacaccggagtacatgtcgccggaacaggctcaggggaagaagatcgacgcgcagtcggacatctactcgctcggcatagtgatgtacgagatgctgacccgcaagccgccgttcgtggcgaacaactccatggcggtggcctataagcaagtgcacgagccgcccatgccgccctccgtcaaacgcaaagacacgccgaaagcattagaaactgatcatttctcaaaggcggataccaaaaaagggataaaacccgcggcccccccttccaaaaattcggtataa

SEQ ID NO: 3590 - protein, 101 aa, Unknown
  Obtained from environmental sample
  misc_feature (1)..(101): Xaa is any amino acid
MTGSTVGTPEYMSPEQAQGKKIDAQSDIYSLGIVMYEMLTRKPPFVANNSMAVAYKQVHEPPMPPSVKRKDTPKALETDHFSKADTKKGIKPAAPPSKNSV

SEQ ID NO: 3591 - DNA, 390 bp, Unknown
  Obtained from environmental sample
  misc_feature (1)..(390): n is a, c, g, or t
atggcagaacaacaaaaagaaatgcgaatggcttatgtcgatacagtaatggcattagccgaaaaaaataaaaacatcgtcgtgctggaagcggatttaatgagctgtacaaacacgggtgttttcaagaaaacatatcccgaccgttttttcaactgcggtatcgccgaagccaacatggtcggcgtcgccgccggtctttccactctgggcaaaatcccgtttgcctcaggcttcggctgtttttcatcaaggcgcgtatacgatcaatttttcctttccgccaactacgcaaagctaaatgtaaaattgatcggcactgacccgggcgtaaccgccgcattcaacggcggaactcatatgccctttgaggagcttgccctganntga

SEQ ID NO: 3592 - protein, 129 aa, Unknown
  Obtained from environmental sample
  DOMAIN (6)...(129): Transketolase, pyridine binding domain
  misc_feature (1)..(129): Xaa is any amino acid
MAEQQKEMRMAYVDTVMALAEKNKNIVVLEADLMSCTNTGVFKKTYPDRFFNCGIAEANMVGVAAGLSTLGKIPFASGFGCFSSRRVYDQFFLSANYAKLNVKLIGTDPGVTAAFNGGTHMPFEELALX

SEQ ID NO: 3593 - DNA, 414 bp, Unknown
  Obtained from environmental sample
  misc_feature (1)..(414): n is a, c, g, or t
atggataaaaaacatcgcccgtatacacaattattggcgacggcgaaatccaacgaagggcaggtttgggaaggcgcggcatttgcgggttttcaaaaactccccaacttaatcgcttttaccgatacaaacaaacaacagcttgacggctttaccaaagatattttggacatgggaaacctcgccgcaaagtgggaacaattcggctggttcactcaggaagttgacggtcacgacattgccgcattagatgccgcaattgacaaagctctagcggaaaaagtaagaccttcgatgattgttatgaacacaatcaaaggaaagggatgcagttttgcggaaggcgtggagaaaaaccacagcatggctttcgacatggaaaaagctaaagaagccatagcggcgttaggttaa

SEQ ID NO: 3594 - protein, 137 aa, Unknown
  Obtained from environmental sample
  DOMAIN (1)...(137): Transketolase, thiamine diphosphate binding domain
  misc_feature (1)..(137): Xaa is any amino acid
MDKKHRPYTQLLATAKSNEGQVWEGAAFAGFQKLPNLIAFTDTNKQQLDGFTKDILDMGNLAAKWEQFGWFTQEVDGHDIAALDAAIDKALAEKVRPSMIVMNTIKGKGCSFAEGVEKNHSMAFDMEKAKEAIAALG

SEQ ID NO: 3595 - DNA, 735 bp, Unknown
  Obtained from environmental sample
  misc_feature (1)..(735): n is a, c, g, or t
gtggatttaaacgggaaaaaagcgctggttacaggagcaggccgagggataggcagggcggttacaagctgttttcttgcggcaggcgcggaagtttgggggcttagtacaaaagaacccgaagacttacaggaatgtgccgaaaaaaccgcaggcaagctgcattggatcaccgcggatttaagcaatttaaacgaagtagataccgtaatagaaaattccataaaacaatcgggcgggtttgacatacttgtaaacaacgcgggaattacaaaagacaatctttcactcagaatgtctcatgaagagtggcagaaagtaatagacgtaaacctgtccgcggcgttttttgtcgcccgcactgtggcaagagacatgattcgcaaacgcgcaggttcaattattaacatgtcgagcgttatcggtattcacggcaatggcgggcaggcaaattatgccgcaagcaaagcgggtttaatcggcataacaaaaagtttggctaacgaggtggcaagccgcggagtgcgtgtgaacgcgatagcgcccggctatatcgagacggatatgaccgcggttttgccgcaggaaataaaacaaaaaatgcttgaggttgttccattgaagcgttccggaaagcctgaagatgtcgctaatgcggcgcttttcttcgcttccgatgtttcatcatatattacagggcaggtcctgcccgtagacggcggaatgtttttttag

SEQ ID NO: 3596 - protein, 244 aa, Unknown
  Obtained from environmental sample
  DOMAIN (8)...(239): NAD dependent epimerase/dehydratase family
  misc_feature (1)..(244): Xaa is any amino acid
MDLNGKKALVTGAGRGIGRAVTSCFLAAGAEVWGLSTKEPEDLQECAEKTAGKLHWITADLSNLNEVDTVIENSIKQSGGFDILVNNAGITKDNLSLRMSHEEWQKVIDVNLSAAFFVARTVARDMIRKRAGSIINMSSVIGIHGNGGQANYAASKAGLIGITKSLANEVASRGVRVNAIAPGYIETDMTAVLPQEIKQKMLEVVPLKRSGKPEDVANAALFFASDVSSYITGQVLPVDGGMFF

SEQ ID NO: 3597 - DNA, 411 bp, Unknown
  Obtained from environmental sample
  misc_feature (1)..(411): n is a, c, g, or t
gtgaatgatggactggacgtgccctaccggtttacggggaaggagcgggacaaggagacggggctgtactactacggggcgcgctaccttgacccgaaggactcatggtggctatctgttgacccggctttgggggaatatgtgccggttgcgcctattaacgacgaggcgaagaagcacaacgggaacctgccgggcatgggcggggtgtttaacacggtgaacctccacgtctaccattatgcggggaataatccggtgaagtatattgacccggatggtgaaacaccacaaagatcaaacttacttcgcggtattcaagcgcatattgatataatcaatgagttaacaagcaaatttgacggtactccaaaagtttatttgccaaaccccaatgaaaattatttttaa

SEQ ID NO: 3598 - protein, 136 aa, Unknown
  Obtained from environmental sample
  misc_feature (1)..(136): Xaa is any amino acid
MNDGLDVPYRFTGKERDKETGLYYYGARYLDPKDSWWLSVDPALGEYVPVAPINDEAKKHNGNLPGMGGVFNTVNLHVYHYAGNNPVKYIDPDGETPQRSNLLRGIQAHIDIINELTSKFDGTPKVYLPNPNENYF

SEQ ID NO: 3599 - DNA, 333 bp, Unknown
  Obtained from environmental sample
  misc_feature (1)..(333): n is a, c, g, or t
atgtccggggcaaaggccgcttttggcggcgagggggacaaatccgccatgccccaggcgaagctgtcaagggcgaaattcgaggcaggctacagcgtcgtcgagctgttctgcgatgccggcctagctcccaccaaaagcgaggcccgccgccttgtcgaacagggcggggcgtttatttccgcgcctggcaaagcttccagcagcgatctttcggcggtacccgatgtagccgccctcatcggcgcggatcgcctggacggcaatggggagcttattttacgcgcggggaagaaaaggtactgtctggtaagcgtgaattcccggggctag

SEQ ID NO: 3600 - protein, 110 aa, Unknown
  Obtained from environmental sample
  misc_feature (1)..(110): Xaa is any amino acid
MSGAKAAFGGEGDKSAMPQAKLSRAKFEAGYSVVELFCDAGLAPTKSEARRLVEQGGAFISAPGKASSSDLSAVPDVAALIGADRLDGNGELILRAGKKRYCLVSVNSRG

SEQ ID NO: 3601 - DNA, 771 bp, Unknown
  Obtained from environmental sample
  misc_feature (1)..(771): n is a, c, g, or t
atgatggataaccttatttcggttgtccgggagggggaaaccccttcgcttgagtatgttgaagcgcttgcagggacagttgtccccgctgaaagcgacgctattcacgatgcggttatccaaattccccacggattccgccgtatttacccgagaagcaaggggcagacggcctatattcagggaatgagggactgtgatattgccttttgcgtcgggcctgccggaaccggcaaaacataccttgccgtagccgaggcgctgcggctggtattgtccaaaaacctgcggaagctggtgctgacccgcccggtggtggaagcgggcgaaagcctgggtttcctccccggcgaccttgcccaaaaaataaacccctatctgcggcccctgtacgacgcgatggaatccatgatcccctttgaaatcatccgcagaatggaagataccagaacgattgaaatcgccccccttgcctatatgcggggacgcagcctcaatgactgcgcggtgattcttgacgaggcgcagaacaccaccaaagaacagatgaaaatgttcctcacccggattggatccggcgcgcgggcggtgatcgccggtgacgcgactcaaatagaccttccccggcgcagtgagtccggactgctccacgcggtggaaatccttcgtgatgtcgaaggaattcacttttcttttcttcacaccgccgatgtggtgcgtaacccgctcataaaaaagataatacaggcctatgatgaaaaagactcctaa

SEQ ID NO: 3602 - protein, 256 aa, Unknown
  Obtained from environmental sample
  DOMAIN (48)...(252): PhoH-like protein
  misc_feature (1)..(256): Xaa is any amino acid
MMDNLISVVREGETPSLEYVEALAGTVVPAESDAIHDAVIQIPHGFRRIYPRSKGQTAYIQGMRDCDIAFCVGPAGTGKTYLAVAEALRLVLSKNLRKLVLTRPVVEAGESLGFLPGDLAQKINPYLRPLYDAMESMIPFEIIRRMEDTRTIEIAPLAYMRGRSLNDCAVILDEAQNTTKEQMKMFLTRIGSGARAVIAGDATQIDLPRRSESGLLHAVEILRDVEGIHFSFLHTADVVRNPLIKKIIQAYDEKDS

SEQ ID NO: 3603 - DNA, 363 bp, Unknown
  Obtained from environmental sample
  misc_feature (1)..(363): n is a, c, g, or t
atgacagattggccgagtatacatcatcacggccatattgattacgccttgccgccattgtacattctccccgcaatcgcgaggatagtcagaaaacagattccaattttcgtcgactgcagcatcaacaggggcatggatgcctttaaggccctcgcccttggcgctgacgccgtatcagcaggacgaatcataatggaacctcttcgcgctgaaggagccgaaggggtacgaaaaacaattgttgaaatgacagaagaactggcaggcgcaatggcagccacaaactcgcccgatatacgccatattgatccttcagtattatggcttccaaaaaaatgggaaaatgagaagttattgtaa

SEQ ID NO: 3604 - protein, 120 aa, Unknown
  Obtained from environmental sample
  misc_feature (1)..(120): Xaa is any amino acid
MTDWPSIHHHGHIDYALPPLYILPAIARIVRKQIPIFVDCSINRGMDAFKALALGADAVSAGRIIMEPLRAEGAEGVRKTIVEMTEELAGAMAATNSPDIRHIDPSVLWLPKKWENEKLL

SEQ ID NO: 3605 - DNA, 366 bp, Unknown
  Obtained from environmental sample
  misc_feature (1)..(366): n is a, c, g, or t
atgaaaacattcctgagttctccctataaagtgagttttgattcagaccgcatgggcatacggcttgccggggaaaagatcgagcacaccggagcagcggacatcatctccgacggcatagccttcggttcggtgcaggcgccgggagacggccagcccatcatcatgctagccgaacgccagacgaccggcggctactgcaagatcgccaccgtgatcagcgccgaccgctccctgctcgcccaggcgcggcccaggagcctcgtgcgtttccgcgaagtcagtcaggaagatgccctggcggcattgaaggcctacaggggcttcttcgacaaactggatgagtattgcccggtatgcggctga

SEQ ID NO: 3606 - protein, 121 aa, Unknown
  Obtained from environmental sample
  DOMAIN (1)...(109): Allophanate hydrolase subunit 2
  misc_feature (1)..(121): Xaa is any amino acid
MKTFLSSPYKVSFDSDRMGIRLAGEKIEHTGAADIISDGIAFGSVQAPGDGQPIIMLAERQTTGGYCKIATVISADRSLLAQARPRSLVRFREVSQEDALAALKAYRGFFDKLDEYCPVCG

SEQ ID NO: 3607 - DNA, 672 bp, Unknown
  Obtained from environmental sample
  misc_feature (1)..(672): n is a, c, g, or t
gtggtattaccgcctgaaaacatacaggatttaagaagtctgtttacaacctacaggttatacaaaaaacagaacacccaattgaaaaaccggatacattccctgttaaaagagcgattgtacggtttcacagaggaagaaatcttcggcagaaaacatagggagtatatccgtacaatttcccccggaacagcgatgcattttcaggttaaccaattgcttgaccggcttgaacgtgatgaaacggacataaaagaactagaaaacaaagtgttgttacaggcggaagtatttatgccgcaaatagaaatactgaccagcatgaaaggagtgagcgtattcatagccatagccataattgcggacatcattgacgtaaacaggttcagaaactccaaagcgtttacttcttatctgcggtctgctccaaaggtgtcgaactcaaatacgtccgtgagcattagggggacaaacaaaaaaggcaggaagctttcagcgactttattgacccagtcgctgaaccatgttcttgacgccagccctaagctcagccgttggtataacagattatgcgagtataaaaaaccgggattggtaaggacaggtcttangcggcgtgttttggctgaaatattccagatgtttgaaaangggcgagtatcattattgtag

SEQ ID NO: 3608 - protein, 223 aa, Unknown
  Obtained from environmental sample
  DOMAIN (73)...(186): Transposase IS116/IS110/IS902 family
  misc_feature (1)..(223): Xaa is any amino acid
MVLPPENIQDLRSLFTTYRLYKKQNTQLKNRIHSLLKERLYGFTEEEIFGRKHREYIRTISPGTAMHFQVNQLLDRLERDETDIKELENKVLLQAEVFMPQIEILTSMKGVSVFIAIAIIADIIDVNRFRNSKAFTSYLRSAPKVSNSNTSVSIRGTNKKGRKLSATLLTQSLNHVLDASPKLSRWYNRLCEYKKPGLVRTGLXRRVLAEIFQMFEXGRVSLL

SEQ ID NO: 3609 - DNA, 699 bp, Unknown
  Obtained from environmental sample
  misc_feature (1)..(699): n is a, c, g, or t
atgacaatctggtttgccacgggcaatgcccataaaaaagctgaactctccgcaatcctgcgaacacatggggtagagtgccgcctgctcatcccaaaggatgccggccttgattttgacccggaagaaaccggggccagcttccacgaaaacgccctgctgaaggccaatgaactgcacgccctgctgaacaaggcccgccctcccctctttagccccggcgacccgattatcgccgacgattccggcatttgcgtggacgcgcttgacggcaggccggggatttattcggcacgttatgcgggcaaagggagaaatgaagagaagacctcacgcggaggcgcggaggacgggagtgggcgtgtgaacagcgcccgaaaactggaggcttctgaacggaatgctttgctcttagaagagattggaagcgctgccgacagaaaagcgcgctttgtctgcgctatggtattgatgtacggtcctgaccgtttctttattgcacaggaaacaatggagggcgagatcgtcaaagatatggaacacgcaaggggagccggaggcttcgggtacgaccccgttctttttattcccgaacttggcagaaccgttgccgaactttcggaagaagagaaaaatataagcagccatcggggaaaagcgggggaaattattgcgaaaataatgaggagtgaggaatga

SEQ ID NO: 3610 - protein, 232 aa, Unknown
  Obtained from environmental sample
  DOMAIN (3)...(228): Ham1 family
  misc_feature (1)..(232): Xaa is any amino acid
MTIWFATGNAHKKAELSAILRTHGVECRLLIPKDAGLDFDPEETGASFHENALLKANELHALLNKARPPLFSPGDPIIADDSGICVDALDGRPGIYSARYAGKGRNEEKTSRGGAEDGSGRVNSARKLEASERNALLLEEIGSAADRKARFVCAMVLMYGPDRFFIAQETMEGEIVKDMEHARGAGGFGYDPVLFIPELGRTVAELSEEEKNISSHRGKAGEIIAKIMRSEE

SEQ ID NO: 3611 - DNA, 450 bp, Unknown
  Obtained from environmental sample
  misc_feature (1)..(450): n is a, c, g, or t
gtgctatttcgcagcatttcgcatacngtagaggtattctgtgagggagaacgcatagcatgccatgtacgtagcatggatccccgcagacgtttcatcaccgagccttcccatatgccggaaaaccatcgtgccgttgccgactggtcgcctgagcgtttcatgtcttgggcggcaaagacgggggaaaagaccaaggcgtatattacttggctgttagagcggaaagaacacccgcagcaggcgtttagaacctgcgccggcatactccgtataggcgcgaccgtaacgccccagcggatggaagaagcctgcactctggccttggaacacaatgtgtactcgtattcgtatttcgcaaaactgctggagaaccgcaaacccgatacgccgctcatccatgaaaacttgcggggaaaagactatttcatcggaggcagccatgtttga

SEQ ID NO: 3612 - protein, 149 aa, Unknown
  Obtained from environmental sample
  misc_feature (1)..(149): Xaa is any amino acid
MLFRSISHTVEVFCEGERIACHVRSMDPRRRFITEPSHMPENHRAVADWSPERFMSWAAKTGEKTKAYITWLLERKEHPQQAFRTCAGILRIGATVTPQRMEEACTLALEHNVYSYSYFAKLLENRKPDTPLIHENLRGKDYFIGGSHV

SEQ ID NO: 3613 - DNA, 507 bp, Unknown
  Obtained from environmental sample
  misc_feature (1)..(507): n is a, c, g, or t
gtggccgtcccaggtgcaccgctgggtggagagggaggggctgtccgcgccggagccggaggtcagcggggaggtcagggagatagagtccgacgagatgtggcacttcgtggagtcaaaaaaaacaagctttgggtcatcagggcgcttgatcgcggcacacggcgaaccctggcctgggtgctcggcaatcgtgatgctgctaccttcaggaggctctacagaaaggcgaggcgcctgaagcactgcacgttccacgccgacgcctggcgggtgttcgcgggggcgctgcccgaaaagcggcacgtcgtcggcaaggcgcacaccgtcgccatagagcgcgacaacagcaacacccgccaccacctggcgaggttcacgcggcggacgaaggtggtctcgaagaagagggggatggtcgatctgacgctcagactgtggcacatgctcacgtccgagccctggttcacaaagtaccaagcgctggcattatctatctataagtga

SEQ ID NO: 3614 - protein, 168 aa, Unknown
  Obtained from environmental sample
  DOMAIN (34)...(148): IS1 transposase
  misc_feature (1)..(168): Xaa is any amino acid
MAVPGAPLGGEGGAVRAGAGGQRGGQGDRVRRDVALRGVKKNKLWVIRALDRGTRRTLAWVLGNRDAATFRRLYRKARRLKHCTFHADAWRVFAGALPEKRHVVGKAHTVAIERDNSNTRHHLARFTRRTKVVSKKRGMVDLTLRLWHMLTSEPWFTKYQALALSIYK

SEQ ID NO: 3615 - DNA, 897 bp, Unknown
  Obtained from environmental sample
  misc_feature (1)..(897): n is a, c, g, or t
atgaacgctcagggcggacgtattattcacacgtccaacctttactataacgagccgcagatgaatnnggcggcaaagttggtcaagcacagcttcgccacaaaagttttcctatgcaacagcggaaccgaggctaacgaggcggcgataaagtttgctcggaagcgcgggacaaaggcctcgtcgcagaagtttcacgtgctctccttttcggacggtttccacgggaggacatacggcgctctgagcgcgaccgctcaaccgaagtttcacgtcggcatcgggccgcttcccgacggttttcactacgcgccattcaacgacattcaatacgccaaagccacgcttgacaaccacgacttcgcggcgatcatagttgagcctttgcagggagagggcggggtcaacgcggcaagcgtcgagtttttgcgctttttgagggagtacgccacggaacacgctatttctcttatctttgacgagatacaatgcggaatgggcaggacgggtacgttgtggtgccacgagcaagccggcgtaacccccgacatcatgacattggcaaaacccttaggcggcggcctgccattgggagcggtgctatgtatcgacgacatagcctcctgcatctcccccggagaccacggaacgacattcggcggaaaccctgtagcctgcgccttgggttcaaaggtcattgacatagtcagcgacaagaaatttttagccaaagtgcatgagaacggcgattatctgaagggaaaattagcaacattggccgataaattcccgtccgtcgaccatataagaggcacgggcctgataataggcgtaaggatgaaagacgatccgttgaagttggttgacgagtgcaaaaagaaggggttactaggataa

SEQ ID NO: 3616 - protein, 298 aa, Unknown
  Obtained from environmental sample
  DOMAIN (1)...(282): Aminotransferase class-III
  misc_feature (1)..(298): Xaa is any amino acid
MNAQGGRIIHTSNLYYNEPQMNXAAKLVKHSFATKVFLCNSGTEANEAAIKFARKRGTKASSQKFHVLSFSDGFHGRTYGALSATAQPKFHVGIGPLPDGFHYAPFNDIQYAKATLDNHDFAAIIVEPLQGEGGVNAASVEFLRFLREYATEHAISLIFDEIQCGMGRTGTLWCHEQAGVTPDIMTLAKPLGGGLPLGAVLCIDDIASCISPGDHGTTFGGNPVACALGSKVIDIVSDKKFLAKVHENGDYLKGKLATLADKFPSVDHIRGTGLIIGVRMKDDPLKLVDECKKKGLLG

SEQ ID NO: 3617 - DNA, 405 bp, Unknown
  Obtained from environmental sample
  misc_feature (1)..(405): n is a, c, g, or t
ttggctaaaaatttcttgtcgctgactatgtcaatgacctttgaacccaaggcgcaggctacagggtttccgccgaatgtcgttccgtggtctccgggggagatgcaggaggctatgtcgtcgatacatagcaccgctcccaatggcaggccgccgcctaagggttttgccaatgtcatgatgtcgggggttacgccggcttgctcgtggcaccacaacgtacccgtcctgcccattccgcattgtatctcgtcaaagataagagaaatagcgtgttccgtggcgtactccctcaaaaagcgcaaaaactcgacgcttgccgcgttgaccccgccctctccctgcaaaggctcaactatgatcgccgcgaagtcgtggttgtcaagcgtggctttggcgtattga

SEQ ID NO: 3618 - protein, 134 aa, Unknown
  Obtained from environmental sample
  SIGNAL (1)...(20)
  misc_feature (1)..(134): Xaa is any amino acid
MAKNFLSLTMSMTFEPKAQATGFPPNVVPWSPGEMQEAMSSIHSTAPNGRPPPKGFANVMMSGVTPACSWHHNVPVLPIPHCISSKIREIACSVAYSLKKRKNSTLAALTPPSPCKGSTMIAAKSWLSSVALAY

SEQ ID NO: 3619 - DNA, 714 bp, Unknown
  Obtained from environmental sample
  misc_feature (1)..(714): n is a, c, g, or t
atgtcagttaacacagccgccccttacggtcagaacgacggcgtactctggcagggacgcggttttaacgcgctcctcaaaggcggcgtccgctttgagggatacggcgtagaattaacgctgctgcctcattttgctttttcgcagaacgcggattttgaaataatgccgtctgcttataaaagcgaatatggttatttttggggatacggcgttgacgcgcctcagcgttttggcaataaaccattttttgactgggatttcggcgattctgaaattcgctatacatggaagactcttacaatcggatttgggacgcaggcgatttggctggggccttcatacctaaattcaatactccattcgaataacgcgccggcgtatcccaagtttgacattggattgcggcggcaaaagattatacttccctggctcggctggtacataggagacgtggaagcgcggttatgggtagggcagctctcagaatccgattattttgataatgatgtttcaaataattataccatgtttcacggtttttcctttgcctacgcgccgtcatttctgcctgggatgacgctttttgncaaccgtgtatgtcttgttgattggaaatgggaaaatttgaaattttatgtcccaagtaatgaaaataccattgaagatcaaaaagctttcttttggattttcctgggattttcccacagttga

SEQ ID NO: 3620 - protein, 237 aa, Unknown
  Obtained from environmental sample
  misc_feature (1)..(237): Xaa is any amino acid
MSVNTAAPYGQNDGVLWQGRGFNALLKGGVRFEGYGVELTLLPHFAFSQNADFEIMPSAYKSEYGYFWGYGVDAPQRFGNKPFFDWDFGDSEIRYTWKTLTIGFGTQAIWLGPSYLNSILHSNNAPAYPKFDIGLRRQKIILPWLGWYIGDVEARLWVGQLSESDYFDNDVSNNYTMFHGFSFAYAPSFLPGMTLFXNRVCLVDWKWENLKFYVPSNENTIEDQKAFFWIFLGFSHS

SEQ ID NO: 3621 - DNA, 474 bp, Unknown
  Obtained from environmental sample
  misc_feature (1)..(474): n is a, c, g, or t
ttggtagtagacgacattgccacaaatcttaaagtggcggagggactcctgtctccttataatgcgaaaattgacacctgcttaagcggcgcggaagcgatagaactggtgaagcagaacgagtatgaccttatctttatggatcacatgatgccggaaatggacggaattgaagcgacagcggccataagaaaactggaaacaaaagaagagacagaaaacagcggaaagcaaattccaattgtcgcgcttacagctaacgcggttgtgggaatgcgggaaatgtttattaaaaacggttttaatgattttctgtcaaaaccaatagacgtttccaaactggacgaaattcttgatcgctggatacccagggaaaagcaaatttacaataataaagaagaaaatagaaatgatnaagaagatgacngacgggatgagccgccgngacaggatgatgattcctcacggtcataa

SEQ ID NO: 3622 - protein, 157 aa, Unknown
  Obtained from environmental sample
  DOMAIN (1)...(119): Response regulator receiver domain
  misc_feature (1)..(157): Xaa is any amino acid
MVVDDIATNLKVAEGLLSPYNAKIDTCLSGAEAIELVKQNEYDLIFMDHMMPEMDGIEATAAIRKLETKEETENSGKQIPIVALTANAVVGMREMFIKNGFNDFLSKPIDVSKLDEILDRWIPREKQIYNNKEENRNDXEDDXRDEPPXQDDDSSRS

SEQ ID NO: 3623 - DNA, 456 bp, Unknown
  Obtained from environmental sample
  misc_feature (1)..(456): n is a, c, g, or t
gtgtacacactgcgcagcggccttaaatggtcggacggctcccctcttaccgcggaggatattgtctattcatggcagcgtcttgttgatcctgaaaccaccgccgattacagttacatgatcgacatgattgtaaacgccaatgaaattattgaaggtgaaatggataagagcgcgttaggtgtaagagcgatcaacgccacaactctggaagtcaagctgacttatgactgtccattctttgacgagatcatggctttccccgcgacattccccgtgaagaaggatgttattgaaaaagcgggagatcaatggacttttactccgtcaacttatgtaagcaacggtccttaccgcatgaaagaatgggttcacaactcatacatccttcttgaaaagaatcccaaatatttaaccagcggggaacggtcccgaaatccattccatttgttttaa

SEQ ID NO: 3624 - protein, 151 aa, Unknown
  Obtained from environmental sample
  misc_feature (1)..(151): Xaa is any amino acid
MYTLRSGLKWSDGSPLTAEDIVYSWQRLVDPETTADYSYMIDMIVNANEIIEGEMDKSALGVRAINATTLEVKLTYDCPFFDEIMAFPATFPVKKDVIEKAGDQWTFTPSTYVSNGPYRMKEWVHNSYILLEKNPKYLTSGERSRNPFHLF

SEQ ID NO: 3625 - DNA, 753 bp, Unknown
  Obtained from environmental sample
  misc_feature (1)..(753): n is a, c, g, or t
ttgtctacatcggctctcagcggcggcgcaggcgccggtactttcgcgtggactaccccttctacaattcccacggtcaccaacagcgggtacagcgtaacgttcacgccgaccgacacggcaaattatggtaccgctaccaataccgtcagcattaccgttaataaagccgctgcttcgatcgttacactgccgaaagcgaccagcataaccgctggtcagaaagtgtctgattcctctttatccggaggcgtaggttcgcctgccggcggtaaattctcgtgggttacccccgatacccctcttctcggtgtcggaacatcctcccaaatgatacgctatacgccttctgcggacgatctgtccaattataaccccgtatccggatacgtagatgttatcgtcaaaccaaaagagcttaaattctctcatgacagcggtctttatagcgcgcaattcaatcttgcactaacaggggaggctggcgattctatctactacacgacagacggcagtattcccgtgccgaacaaaaccggcaccactcaatacagttctgctattaccgtgaaggatcgcaacgcaaacggaggagaggcgaatgttttggcgacacccgcggaccggttttatatggttcccggtgatcccagaggaaacgtgccgggagtccatgacccangcaaggtgccaaaggccacggtaattcgcgcaatacgggtggattcaaaacacataaaagcgatgttatga

SEQ ID NO: 3626 - protein, 250 aa, Unknown
  Obtained from environmental sample
  SIGNAL (1)...(16)
  misc_feature (1)..(250): Xaa is any amino acid
MSTSALSGGAGAGTFAWTTPSTIPTVTNSGYSVTFTPTDTANYGTATNTVSITVNKAAASIVTLPKATSITAGQKVSDSSLSGGVGSPAGGKFSWVTPDTPLLGVGTSSQMIRYTPSADDLSNYNPVSGYVDVIVKPKELKFSHDSGLYSAQFNLALTGEAGDSIYYTTDGSIPVPNKTGTTQYSSAITVKDRNANGGEANVLATPADRFYMVPGDPRGNVPGVHDPXKVPKATVIRAIRVDSKHIKAML

SEQ ID NO: 3627 - DNA, 933 bp, Unknown
  Obtained from environmental sample
  misc_feature (1)..(933): n is a, c, g, or t
atggcgagaacactcgccgcacactttaccagaattcaaacatttttcccagaaaacgccgttgaatattttgtaagctattacgattactaccagcccgaagcctatattgtggcaagcgatactttcatagccaaagacgccgctatcaatgaggagatagacaaactgcggctaagggcaacaaaaaatttgctgaccagaagagataccataatagtagcatctgtaagctgcatttacggtttgggaagccctgcggaatactttgagctgatggttcgcttaaaggttggggaagaacgggatagagacagcattctgcgagaattggtggcaattcaatacgatagaaacgactacgctttggagagagggactttcagagtacgtggcgatagaatagatatttacccaagttacgatgatataggatttcgcattgagctttttggcgatacggtagaaaaactctcttggttccatttggtgacaggcgaaaccataaaaaatgtgaatgaaattatagttgctcctgcaaagcattttgtgacaagagaggagagccgaataagaatcacggagcaaattcaaagggaattgaacaggagattagttgaattacaggcagaaggcaaagatttggaagcaacgcgcctaaacagccgagttcgttatgatatggaattgataagggaaacagggatttgcccaggcatagaaaattattcacgcattatagaaaatagaatgccgggcactcgcccctacacgctttgggattactttggcaaagactggcttttaatcgttgacgagtcgcacgccagcattccgcaagtcagcggaatgtgcgagggcgataaggctcgcaaaacaaacgctgttgattacggttggcggctaccctgcgcacttgataacgccctatga

SEQ ID NO: 3628 - protein, 310 aa, Unknown
  Obtained from environmental sample
  misc_feature (1)..(310): Xaa is any amino acid
MARTLAAHFTRIQTFFPENAVEYFVSYYDYYQPEAYIVASDTFIAKDAAINEEIDKLRLRATKNLLTRRDTIIVASVSCIYGLGSPAEYFELMVRLKVGEERDRDSILRELVAIQYDRNDYALERGTFRVRGDRIDIYPSYDDIGFRIELFGDTVEKLSWFHLVTGETIKNVNEIIVAPAKHFVTREESRIRITEQIQRELNRRLVELQAEGKDLEATRLNSRVRYDMELIRETGICPGIENYSRIIENRMPGTRPYTLWDYFGKDWLLIVDESHASIPQVSGMCEGDKARKTNAVDYGWRLPCALDNAL

SEQ ID NO: 3629 - DNA, 645 bp, Unknown
  Obtained from environmental sample
  misc_feature (1)..(645): n is a, c, g, or t
atgaaagtctgtacctgcctgaatcccctccacaccgctctggcaatttttggatgccttttgggttacaaacgaatcagcgatgagatgaaagattcggatcttgtaaaactcattgaaggcatcggttaccgcgaggggctacccgttgtaataaatccgggaattatcgatcctgaaaaatttattggcgaggtaataaaagtccgtcttcccaatcccttcatgccagacaccccccagcgcattgccgcagacacttcccagaagattcctgtccgctttggcgaaaccctcaaagcttataacgcctcaggcaaaaacctgaaagagttaaagctaatcccgctggttttcgcgggctggctccgttacctgctgggcattgacgatcaaggcaagccttttgagccaagccccgatcctctttatgaaaaccttgcggcaagcctttccggcattgctttgggacaatcagatcaagcggctattcacagcaaactggagcctatactttccaatcctgctctatttggcttgaacctctacgaagcgggacttggcaggcaagtggaggatcattttgcggaaatgatcgccgagccaggtgccgtaagaaaagttctttcccgcgtggttggctaa

SEQ ID NO: 3630 - protein, 214 aa, Unknown
  Obtained from environmental sample
  DOMAIN (1)...(177): Mannitol dehydrogenase C-terminal domain
  misc_feature (1)..(214): Xaa is any amino acid
MKVCTCLNPLHTALAIFGCLLGYKRISDEMKDSDLVKLIEGIGYREGLPVVINPGIIDPEKFIGEVIKVRLPNPFMPDTPQRIAADTSQKIPVRFGETLKAYNASGKNLKELKLIPLVFAGWLRYLLGIDDQGKPFEPSPDPLYENLAASLSGIALGQSDQAAIHSKLEPILSNPALFGLNLYEAGLGRQVEDHFAEMIAEPGAVRKVLSRVVG

SEQ ID NO: 3631 - DNA, 699 bp, Unknown
  Obtained from environmental sample
  misc_feature (1)..(699): n is a, c, g, or t
atgcgagtcttaaccatcacctctgggagaggcttttccgcagtgttcagcaacgatggcattatagcggctcattttgatcccagccgcgtagggaaaaaagtaatagaaacggaaacagatatgatgggaccttatctagatgaatatatgaaatctctcaaagaagggaaaccctattcctttgtcagatatattccagcagtaaactcggatatgacattatttttctccccgattaaagttgggtcgtccactaccccttggagttttgcggttgcaatcacaaccagaaccgttatggcaccagtgtacaaaatgatagaaattgctatttacataggtgctgctatgcttgtggcggtaataatagtagcagcgtttatggctaggtcaatcagcaagcctattgttagagtaaccaacaccatcaaaaatatttccgaaggagaaggcgatttaaccaaaagaatagaaactaaagctggaggtgaaataggcactttggtgcgttatttcaataaattaatggacaccattcagcacccaattaaagaaacaaaaataacagtaaacaacttggcagcagcggcagataaactctcttcccgtttcgacagactgtccgatatttccaaagaactgttaatcacgttagcagtgccaccactaccgcagagcaaatggcagagaatataa

SEQ ID NO: 3632 - protein, 232 aa, Unknown
  Obtained from environmental sample
  DOMAIN (111)...(182): HAMP domain
  misc_feature (1)..(232): Xaa is any amino acid
MRVLTITSGRGFSAVFSNDGIIAAHFDPSRVGKKVIETETDMMGPYLDEYMKSLKEGKPYSFVRYIPAVNSDMTLFFSPIKVGSSTTPWSFAVAITTRTVMAPVYKMIEIAIYIGAAMLVAVIIVAAFMARSISKPIVRVTNTIKNISEGEGDLTKRIETKAGGEIGTLVRYFNKLMDTIQHPIKETKITVNNLAAAADKLSSRFDRLSDISKELLITLAVPPLPQSKWQRI

SEQ ID NO: 3633 - DNA, 876 bp, Unknown
  Obtained from environmental sample
  misc_feature (1)..(876): n is a, c, g, or t
ttgcccccagtccgcgcacgtgctggncggcggcgcgtttttattcgcgacatggtgacggaattgcgcgtcttgcagcggctcaaggcgacggggctgcttcccgcntgtgtccctccgctgggctcggtgggcctggccgccgttgagcttgcccggggtttaacccgcgggaaaatcattgccgcgggcattgatttctcgtttaccctggataagtaccatgcccgttccacgccggggcacaggcacaagctgacaacgcacacccgtttgcgcagcctgttcaacgcggtgtccgcttttgacctttcagcttttggcgctgtatccaaagcggggcttcctgtccgcagcagcccggcgatgcggaattaccgcgatctttttgagcgagaattcgccgccgaatcccgtttgtttgacgttgcgggcagtggccttcccctgggccttgcaagcctttctcaggaagaagcctttgatatgctggcaccggacagggagcaaagcgccgcagggacccggtccctgcccgggtccggatcccaccccgaacagcagccatgtaaccgggacgcgctggcggaaaaactaacatcgtttttgtgcgccgaaaaaggccgcctgtcagcgctacggagtatcctgaccggcgaaggcgcggatcaggggcggcttgctgccctcattgacgaatgtgattacctgtgggcccatttcccggattacgcgggaggcggtcgtcccgatacagcggaactgagcgccgccggtcctgacagccgcgcgatttcattcctcaaacgcctgcgcgcggaaattgatccggcgctggctttgcttgagatggcccggatcgggtgccgtgcctag

SEQ ID NO: 3634 - protein, 291 aa, Unknown
  Obtained from environmental sample
  misc_feature (1)..(291): Xaa is any amino acid
MPPVRARAGRRRVFIRDMVTELRVLQRLKATGLLPACVPPLGSVGLAAVELARGLTRGKIIAAGIDFSFTLDKYHARSTPGHRHKLTTHTRLRSLFNAVSAFDLSAFGAVSKAGLPVRSSPAMRNYRDLFEREFAAESRLFDVAGSGLPLGLASLSQEEAFDMLAPDREQSAAGTRSLPGSGSHPEQQPCNRDALAEKLTSFLCAEKGRLSALRSILTGEGADQGRLAALIDECDYLWAHFPDYAGGGRPDTAELSAAGPDSRAISFLKRLRAEIDPALALLEMARIGCRA

SEQ ID NO: 3635 - DNA, 882 bp, Unknown
  Obtained from environmental sample
  misc_feature (1)..(882): n is a, c, g, or t
atgcgacagtgcagaatccaagacaaggcgagccacggcgagtggggcactccacacttggcggcagccattttggataacccagacggacgcttgaaaaatttattcaaagcaaaaaatgcaaaaacacaggaaatgcgaaccgcggttcaaaagattttggataaactgccgcgcattgtggaaagcacagatgcagatagccaccctagtagtgatttgtcgggtgtgttgagagccgctgtgaaattggtgcgttcagagcaaggtagcagtgcggaacccggtcatttgctcatctctttgatgaaaaattcgggcgataggcaacttgtttcaatttttgaaaatgcactcggcaatgcggaggcggttcgcacttggctttcggaccccatgagtgcggcggcggttgcgaaagaagattccgccttgaacaggtttggcaaagagttggtatctcttgccgcagatggaaagttagaccccgttatagggcgcgaagaggaaatccgcagggtgattcgcattttggctcgcaaaacgaaaaataatcctgtgctcgtgggggagccgggcacaggaaaaaccgccattgtagagggcttagcgcaccgcattcacagaaacgatgtgccagatgccttaaagggcaaaaaaatattttcgctcgatttatccgctttgattgctggcgcanaatatcaaggcgaatttgaggaacgcttaaaagccgttttagacgaattggaacaagagcaagacacgcttttgttcatagacgaaattcacaacatagtgggagcaggaaaaactcanggcagtatggatttgggcaatatgctaaaacccggacttgctcgcggagattgcattgcatag

SEQ ID NO: 3636 - protein, 293 aa, Unknown
  Obtained from environmental sample
  misc_feature (1)..(293): Xaa is any amino acid
MRQCRIQDKASHGEWGTPHLAAAILDNPDGRLKNLFKAKNAKTQEMRTAVQKILDKLPRIVESTDADSHPSSDLSGVLRAAVKLVRSEQGSSAEPGHLLISLMKNSGDRQLVSIFENALGNAEAVRTWLSDPMSAAAVAKEDSALNRFGKELVSLAADGKLDPVIGREEEIRRVIRILARKTKNNPVLVGEPGTGKTAIVEGLAHRIHRNDVPDALKGKKIFSLDLSALIAGAXYQGEFEERLKAVLDELEQEQDTLLFIDEIHNIVGAGKTXGSMDLGNMLKPGLARGDCIA

SEQ ID NO: 3637 - DNA, 333 bp, Unknown
  Obtained from environmental sample
  misc_feature (1)..(333): n is a, c, g, or t
atgcggtgcgctaagccctctacaatggcggtttttcctgtgcccggctcccccacgagcacaggattatttttcgttttgcgagccaaaatgcgaatcaccctgcggatttcctcttcgcgccctataacggggtctaactttccatctgcggcaagagataccaactctttgccaaacctgttcaaggcggaatcttctttcgcaaccgccgccgcactcatggggtccgaaagccaagtgcgaaccgcctccgcattgccgagtgcattttcaaaaattgaaacaagttgcctatcgcccgaatttttcatcaaagagatgagcaaatga

SEQ ID NO: 3638 - protein, 110 aa, Unknown
  Obtained from environmental sample
  misc_feature (1)..(110): Xaa is any amino acid
MRCAKPSTMAVFPVPGSPTSTGLFFVLRAKMRITLRISSSRPITGSNFPSAARDTNSLPNLFKAESSFATAAALMGSESQVRTASALPSAFSKIETSCLSPEFFIKEMSK

SEQ ID NO: 3639 - DNA, 843 bp, Unknown
  Obtained from environmental sample
  misc_feature (1)..(843): n is a, c, g, or t
gtgccgctcgtgccgctcgtgccgcaggattttatgtatttaattgactatctgcaccagcacgatataggggtgatactcgactgggtgccctcgcacttccccagcgacgagcacgggctcgtctactacgacgggacgtgcctctttgagcacgccgacccgaagaagggcttccaccccgactggaagagctacatcttcaactacgggcgcaacgaggtgcaggcgtttttgctgagcagcgcgatcttctggctcgacaggtaccacgccgacgccatccgggtggacgcggtggcctccatgctctacttggactactcccgcaaagagggcgagtggatacccaaccagttcggcgggcgcgagaacttggaggctatatccttccttaagcggatgaacgaagagatatacaaagcgttccccgacgtgcagacgatagcggaggagtctacggcgtggccgatggtttcgcgtccggcctacgtgggcgggctgggcttcggcatgaagtggaacatggggtggatgcacgacacgctcgagtacatggcgaaggactccatctacagaaagtaccaccacagcgagctgacgttcagtatgctgtacgcctttacggaaaactacgtgctgccgctctcgcacgacgaggtcgtccacggtaaaaattcccttgtgaataagatgcccggcgacgattggcggcggctcgcgaatttgcggctgctgctcagctatcagttcaaccatccgggtaaaaaactgctcttcatgggcggcgagttcgcgcagttcgtggagtggaccacgaccgccagctcaactgggagctga

SEQ ID NO: 3640 - protein, 280 aa, Unknown
  Obtained from environmental sample
  misc_feature (1)..(280): Xaa is any amino acid
MPLVPLVPQDFMYLIDYLHQHDIGVILDWVPSHFPSDEHGLVYYDGTCLFEHADPKKGFHPDWKSYIFNYGRNEVQAFLLSSAIFWLDRYHADAIRVDAVASMLYLDYSRKEGEWIPNQFGGRENLEAISFLKRMNEEIYKAFPDVQTIAEESTAWPMVSRPAYVGGLGFGMKWNMGWMHDTLEYMAKDSIYRKYHHSELTFSMLYAFTENYVLPLSHDEVVHGKNSLVNKMPGDDWRRLANLRLLLSYQFNHPGKKLLFMGGEFAQFVEWTTTASSTGS

SEQ ID NO: 3641 - DNA, 879 bp, Unknown
  Obtained from environmental sample
  misc_feature (1)..(879): n is a, c, g, or t
atgcatctggacgaaacaggccggatcagggaaaggcgaacgtggaatgatgtgtcttttccggtggatggcacccttgtccttcccggaaccaacatacttgccctgcggattttaggggatcccacctataggggtacagggctttactattcatcggcccccatatatatggacgactatagaagcatagagagcgggcagtttaattatttgtatatatttctgtgcggcttctttgcatttaccggcatctattatttgatgctgtttttatctgtcaaaaagaagactgaagtttttaacctctactttggaatcttctcgattcttatcggcgcttatattgtcagtttacaggggctgattaatacgcttattcccaattccgatatttccaaacgcctggaattcggctcactgatgctggcaattccggtattcggcatgtttttagaagctctgggacgggggggaaagactacaaaaataagctggagctatatggcattcagcttttttctttgcctgacccaatcttttttttgccgtcaatacggggaggaagtaataataatttggaatgcggtaaccgggatttatgtcagttacctcctcgtttacgaaatattttatttccatctttggagcaggcataaagttcaagcacagggaaacaatgccggcaaggcctcggccatgcctatcgacaatattctgattggcatggtgatatgttacttgtgcggggtttttgacattctgtacaatacgtttttcaaaaacaatatctctcttttttcatacagtgtatttgtggtttacatagggatggtttttactctgtcccggcggttcagcggaattacgagcagctaa

SEQ ID NO: 3642 - protein, 292 aa, Unknown
  Obtained from environmental sample
  DOMAIN (69)...(285): 7TM diverse intracellular signalling
  misc_feature (1)..(292): Xaa is any amino acid
MHLDETGRIRERRTWNDVSFPVDGTLVLPGTNILALRILGDPTYRGTGLYYSSAPIYMDDYRSIESGQFNYLYIFLCGFFAFTGIYYLMLFLSVKKKTEVFNLYFGIFSILIGAYIVSLQGLINTLIPNSDISKRLEFGSLMLAIPVFGMFLEALGRGGKTTKISWSYMAFSFFLCLTQSFFCRQYGEEVIIIWNAVTGIYVSYLLVYEIFYFHLWSRHKVQAQGNNAGKASAMPIDNILIGMVICYLCGVFDILYNTFFKNNISLFSYSVFVVYIGMVFTLSRRFSGITSS

SEQ ID NO: 3643 - DNA, 828 bp, Unknown
  Obtained from environmental sample
  misc_feature (1)..(828): n is a, c, g, or t
ttgcaagaattgcagcgtttggcagaaacggctggggcaagcgttgcagagacattccttcaaagagttcaggcttttaatccggctacgcttataggagagggcaaaatagaagaagtgcgtttagccgttgaaaaacacgatgcaactttggttgtttttgacgaggatttgagcggctcgcaggtgcgaaatttagaaaaacgtttgccagagataaaagtgctggatagaacggggcttatattggatatatttgcgcatcacgccaaaacagcggaaagccgccttatggtggaagtggcgcaaatgcagtatttgatgccacgcctcacccgtgcttgggttcatctttcacggcaggtgggcacgggcggcgcaagccccggaattggaatgcgtggacccggcgaaactcagttggaagtggataggcgtttggtgcgtaagcgaattcaggaactcaaagccaagttgaaaaaaatagagcgtgacagggaaaaccaagaaaagcgaagggaaaatacatttcacgttggcttggttggctacacaaacgcgggaaaaagcacccttgcaaaccgcctcacaggtgcgaacgtatatgtagaagacaaactctttgcaaccttggacagtacaactcgcaaatttcatttagcagacggtcaagacattatattaagtgatacagtcggttttattcgcaaattgccgcatcacttggtagagacgttcaaaagtacgcttggtgttgccgctaatgcagattgcattcttgaagttatagattcagcagccgccgattacaagaacatattgaggtaa

SEQ ID NO: 3644 - protein, 275 aa, Unknown
  Obtained from environmental sample
  DOMAIN (177)...(275): GTPase of unknown function
  misc_feature (1)..(275): Xaa is any amino acid
MQELQRLAETAGASVAETFLQRVQAFNPATLIGEGKIEEVRLAVEKHDATLVVFDEDLSGSQVRNLEKRLPEIKVLDRTGLILDIFAHHAKTAESRLMVEVAQMQYLMPRLTRAWVHLSRQVGTGGASPGIGMRGPGETQLEVDRRLVRKRIQELKAKLKKIERDRENQEKRRENTFHVGLVGYTNAGKSTLANRLTGANVYVEDKLFATLDSTTRKFHLADGQDIILSDTVGFIRKLPHHLVETFKSTLGVAANADCILEVIDSAAADYKNILR

SEQ ID NO: 3645 - DNA, 525 bp, Unknown
  Obtained from environmental sample
  misc_feature (1)..(525): n is a, c, g, or t
atgaaaacaatatttgaaacagacagattgtttttacgcgaatttgttgacagcgattataatgacttatgtgaaattctatgtgatggggatgttatgtatgcgtatgaacatccattttcgaaggatgaggttaaagcctggtacaataaactaattgtcgagcattacgaaaagcacaggtttgggttatgggccgttatacacaaagaagcaaatgaatttttgggacaatgcggtttaacaattcaggatgtaaacgggaaggaatatttggaaattggatatttattcaagaagaaacattggcataaaggctatgcaacagaagcggcgcttggctgtaaaaaatatgcttttgagaaattaaatgcggatagaatatattcaataataagagaaagtaatgtagcctcacaaaatgttgcaaaaagaacaggaatgaaaaaaacaagtgaggtaatgaaacattattataataaggacatattgcattacatatttgaagttaaaaaggaggcgtag

SEQ ID NO: 3646 - protein, 174 aa, Unknown
  Obtained from environmental sample
  DOMAIN (67)...(149): Acetyltransferase (GNAT) family
  misc_feature (1)..(174): Xaa is any amino acid
MKTIFETDRLFLREFVDSDYNDLCEILCDGDVMYAYEHPFSKDEVKAWYNKLIVEHYEKHRFGLWAVIHKEANEFLGQCGLTIQDVNGKEYLEIGYLFKKKHWHKGYATEAALGCKKYAFEKLNADRIYSIIRESNVASQNVAKRTGMKKTSEVMKHYYNKDILHYIFEVKKEA

SEQ ID NO: 3647 - DNA, 393 bp, Unknown
  Obtained from environmental sample
  misc_feature (1)..(393): n is a, c, g, or t
gtgcagatcaattcaaagtccggcctggaaggttcaaacaggaacagcgcttactcaggcagcaaattcggcagcctgggcctggtggcgagctttgccctggagttggttgacttcagtataaaggtaaatgcgatttgtccgggcaactttctggacggccccctctggtcagaccccgaaaaaggactttttgttcaataccttaaaacaggcaaagtgcccggggccaaaaccatagccgatgtccgttccttttacgagtccaaagttccgatgaagaggggctgcacaggcaaggatttaatccgctcactgttttacatcgtggagcaggaatacgagaccgggcaggccgttccggtaaccggtggccaggtaatgctgcactga

SEQ ID NO: 3648 - protein, 130 aa, Unknown
  Obtained from environmental sample
  misc_feature (1)..(130): Xaa is any amino acid
MQINSKSGLEGSNRNSAYSGSKFGSLGLVASFALELVDFSIKVNAICPGNFLDGPLWSDPEKGLFVQYLKTGKVPGAKTIADVRSFYESKVPMKRGCTGKDLIRSLFYIVEQEYETGQAVPVTGGQVMLH

SEQ ID NO: 3649 - DNA, 330 bp, Unknown
  Obtained from environmental sample
  misc_feature (1)..(330): n is a, c, g, or t
ttgaactgcgattatctaatagatatggtggcagcagattggactgagcattttgacgttattctgcaaacaatgagcttgaatgaggggcacaaaatttttgcaaaatgcagcctaccaaagccagaaaataaagaagaactgccagcaattccaagcctaaccaaaatttaccccgccgtggaatggaaagagcgcgaagtttacgatatgtttggaatttcctttgatgggcaccccgatttgcgccgcattttcacagaagacaattttgagggctggcctctccgcaaggattttacaaactctagtatgcttatcaagccttaa

SEQ ID NO: 3650 - protein, 109 aa, Unknown
  Obtained from environmental sample
  DOMAIN (39)...(108): Respiratory-chain NADH dehydrogenase, 30 Kd subunit
  misc_feature (1)..(109): Xaa is any amino acid
MNCDYLIDMVAADWTEHFDVILQTMSLNEGHKIFAKCSLPKPENKEELPAIPSLTKIYPAVEWKEREVYDMFGISFDGHPDLRRIFTEDNFEGWPLRKDFTNSSMLIKP

SEQ ID NO: 3651 - DNA, 588 bp, Unknown
  Obtained from environmental sample
  misc_feature (1)..(588): n is a, c, g, or t
gtggcaaaaaaaccttcagatattttagccaaaaacttaaaggatttatgctttgtaatagcccatttggggaatggctgctccgctgccgccgtaaaattcgggctttctgcagataccaccttgggcttaacacccttggagggtatggttatgggaacgcgcagcggttcaatagaccctgggataatcctccatttaatgaaatctttgggctatgattacgataaattgaacaagttgctcaacaaagagagcggccttttaggtcttagcggcatttccagcgatatgcgtgttcttttgggcgaagcagaaaagggttccgaaagagccaaaatagcaatagaggttttctgttatcgggtagcaaaggaaataggctctcttgtaccagctctccccaaattggatgcccttgttttcaccggaggaataggcgaaaactccgaacctgtccgcaaaaaaatactgtctttcctaaacgttttcaaatttggcgaaccaaatggccctaaggttatggttgtgccaacgaatgaagaacttatgattgcaatggatacggaagaggtggttaaggcttga

SEQ ID NO: 3652 - protein, 195 aa, Unknown
  Obtained from environmental sample
  DOMAIN (1)...(187): Acetokinase family
  misc_feature (1)..(195): Xaa is any amino acid
MAKKPSDILAKNLKDLCFVIAHLGNGCSAAAVKFGLSADTTLGLTPLEGMVMGTRSGSIDPGIILHLMKSLGYDYDKLNKLLNKESGLLGLSGISSDMRVLLGEAEKGSERAKIAIEVFCYRVAKEIGSLVPALPKLDALVFTGGIGENSEPVRKKILSFLNVFKFGEPNGPKVMVVPTNEELMIAMDTEEVVKA

SEQ ID NO: 3653 - DNA, 594 bp, Unknown
  Obtained from environmental sample
  misc_feature (1)..(594): n is a, c, g, or t
ttgttgcccgatatgattgaggtaggcagttttatcggcatggctgccctcacccgttcggaaatcacgataaagaacgtagggattgattatctgggtattatccccaatgttttttcccgtttgggtattaaaatggagtatataaatgacgatatttacattcccgaacaggaaagttacgaggttgaaacctttatggacggctcaattatgacaatcagcgatgccccttggcccggatttacgcctgacttgataagcattgcacttgtaaccgccattcaggcaaaaggcagcgtactgatacatcaaaagatgtttgaaagccgtttgtttttcgttgataaactgatagatatgggggcgcagattatcctttgcgacccgcaccgtgccaccgtaatcggttttgaacacaaaaacncgttgcggggtacggttatgagttcgcccgatattcgtgcgggtgtggcgcaactgttagctgctctctccgcccaagaaaaagcatcatcaacaatattcgaacagatggacagagggtatcaaaataatgatgctcgtctgcaaacccattggggcagatattaa

SEQ ID NO: 3654 - protein, 197 aa, Unknown
  Obtained from environmental sample
  misc_feature (1)..(197): Xaa is any amino acid
MLPDMIEVGSFIGMAALTRSEITIKNVGIDYLGIIPNVFSRLGIKMEYINDDIYIPEQESYEVETFMDGSIMTISDAPWPGFTPDLISIALVTAIQAKGSVLIHQKMFESRLFFVDKLIDMGAQIILCDPHRATVIGFEHKNXLRGTVMSSPDIRAGVAQLLAALSAQEKASSTIFEQMDRGYQNNDARLQTHWGRY

SEQ ID NO: 3655 - DNA, 393 bp, Unknown
  Obtained from environmental sample
  misc_feature (1)..(393): n is a, c, g, or t
ttgatatgcaaaggttttttctattccagtttcccattctttgctcttattggcggaattggaattatatgctctgccgcatatatgttaaggcttattaaaaacgtgttgtttggacctattcccgaaaattcaaggcgaactggcatttccctttctttttccgaaggcgcagcggcaatacctataatactctttatactttattttgggctacatcccgctcccatattgaattcttttggctccgggaccggagctagcgtaagcactatgaccgagcaggaaaggcaagagtttgaagagtatttaaaatctttgcaaattatagatgatgataccgaagaaggctctgaaaacgatacattggaggacgacagcgatgttcactga

SEQ ID NO: 3656 - protein, 130 aa, Unknown
  Obtained from environmental sample
  misc_feature (1)..(130): Xaa is any amino acid
MICKGFFYSSFPFFALIGGIGIICSAAYMLRLIKNVLFGPIPENSRRTGISLSFSEGAAAIPIILFILYFGLHPAPILNSFGSGTGASVSTMTEQERQEFEEYLKSLQIIDDDTEEGSENDTLEDDSDVH

SEQ ID NO: 3657 - DNA, 609 bp, Unknown
  Obtained from environmental sample
  misc_feature (1)..(609): n is a, c, g, or t
gtggggaagattcagcgcggatcaggtcggctcctctacatgccgcagaaacgcaatccgtggaattcggaacacgttaaaagtttatggaaagcattcatgccgcgcgttaatactttctttatggatcagataagcgaacaccagagagaccttaccaattcggcaagccagagatttaccgccgactatgttacaggtttctgccttgcggtttcccgcatgacaaaagttatcgaagaactcggcgcggaccgcgaaaaactactcgccaacctgaaaagcggcagtatacccggcggaataatggctgaacccgcctacatcctgttagctgaaagcggagtctctgacgcgcacgaggttatccgtaaaatcacccttgccgcggaaaaagagaaaacaagtttcgcctgcgccctttcaaaagaagcacaagcgctggaaaaaataagcggcaaactgacgcagctcggacttataggcgataaaacgcaggcattatcattttttgaaaacccgcatcattacagcggcattgcttccaaaaaagcaagggcgcttgcggaaaaatacaaagcattaatgggaggaaataatgttcactga

SEQ ID NO: 3658 - protein, 202 aa, Unknown
  Obtained from environmental sample
  misc_feature (1)..(202): Xaa is any amino acid
MGKIQRGSGRLLYMPQKRNPWNSEHVKSLWKAFMPRVNTFFMDQISEHQRDLTNSASQRFTADYVTGFCLAVSRMTKVIEELGADREKLLANLKSGSIPGGIMAEPAYILLAESGVSDAHEVIRKITLAAEKEKTSFACALSKEAQALEKISGKLTQLGLIGDKTQALSFFENPHHYSGIASKKARALAEKYKALMGGNNVH

SEQ ID NO: 3659 - DNA, 501 bp, Unknown
  Obtained from environmental sample
  misc_feature (1)..(501): n is a, c, g, or t
atggaaaagaaagacgagcgcataaaacaggaacttgatctttggtacgaaaaaatctgcacaaaagattttattcaatctgatccggttcagtttccgcgtaagttttcaaagcgggaagatattgaaattgcggcgtttctttccgcgacaatcgcttggggcaggcgcgatatgattttgcgtaacgcacagaagatgtttgccgttacggaagacagcccgtataactttgtaatgtcaggcggatacaaaaaactgaaagaccgcaacattcaccgcactttttttgtggatgattttaaatacctttgccgcggcttagaacgctgttatacgatttatgacagccttgaaaaaatattcacatccgcgccggatgtgtgggaagggtttgcgctgttccgcgaagaggcggcaagggcaaacagggagcgttattcaaaacacatttcaaatccgggcgtgcgggacggaaacggctccgcgtgcaagcggtga

SEQ ID NO: 3660 - protein, 166 aa, Unknown
  Obtained from environmental sample
  misc_feature (1)..(166): Xaa is any amino acid
MEKKDERIKQELDLWYEKICTKDFIQSDPVQFPRKFSKREDIEIAAFLSATIAWGRRDMILRNAQKMFAVTEDSPYNFVMSGGYKKLKDRNIHRTFFVDDFKYLCRGLERCYTIYDSLEKIFTSAPDVWEGFALFREEAARANRERYSKHISNPGVRDGNGSACKR

SEQ ID NO: 3661 - DNA, 330 bp, Unknown
  Obtained from environmental sample
  misc_feature (1)..(330): n is a, c, g, or t
ttgacggtagaatttacaagggaataccggggcatgggcagcatgggcgcaattgcggacggagccgcgacccgttatcagatcagcaaagatgaagaacctgttcccgaaggcattgaaggccgcgttccgtacaaaggcgaactgcgcacatacatgaaccagcttgtcgcaggtcttcgcaaaggcatgggctactgcggctgcgccaacatcacggagcttaaaaattacaggaaatttgtaaaaattacagctgccggcctgcgcgagagtcatccccataatattacaattactcaggaagcgccgaattattcccgtctataa

SEQ ID NO: 3662 - protein, 109 aa, Unknown
  Obtained from environmental sample
  DOMAIN (2)...(95): IMP dehydrogenase / GMP reductase domain
  misc_feature (1)..(109): Xaa is any amino acid
MTVEFTREYRGMGSMGAIADGAATRYQISKDEEPVPEGIEGRVPYKGELRTYMNQLVAGLRKGMGYCGCANITELKNYRKFVKITAAGLRESHPHNITITQEAPNYSRL

SEQ ID NO: 3663 - DNA, 300 bp, Unknown
  Obtained from environmental sample
  misc_feature (1)..(300): n is a, c, g, or t
atggaattcatactgcatacgggacgcacgcaccaaatacgcgtccactgcagccataaaggttttcctatcgtgggggatgatttgtacggcggggcgcgtgaatctgtaatcaaaataccgccgatggaaaggccgttcgcgtatagcatcttcaagtgctttgaaaggcaagctctgcacgccttgtcgctctcgtttgtccacccgttgacgcaagaaagcatacagattacagcgccgtatcctgacgactttaatagggcgttggaagtgttttcggtagggcggaccaactga

SEQ ID NO: 3664 - protein, 99 aa, Unknown
  Obtained from environmental sample
  misc_feature (1)..(99): Xaa is any amino acid
MEFILHTGRTHQIRVHCSHKGFPIVGDDLYGGARESVIKIPPMERPFAYSIFKCFERQALHALSLSFVHPLTQESIQITAPYPDDFNRALEVFSVGRTN

SEQ ID NO: 3665 - DNA, 390 bp, Unknown
  Obtained from environmental sample
  misc_feature (1)..(390): n is a, c, g, or t
gtgatctcggcgatctccggcctcaaatcgctgcagctcgactacttcgtctttctgaccgctgtcggactggggatgatattcggcatcttagccttcgcccgcgtcatcaaattcgtcttcgagcgtttctacaacggcacggtggccgtattgataggcctgaccgccggttcgctttacgccctgtggcccttcaaaaaattcgtaacgatggatctataccaaaaaggcgccgacgggatcgcgctcgtcaaaaacgtcgcggtgcagacaaacgccaatatcctcccgccggacacaagcctaatcctcccggcgctgatgttctgtggaatcggggtggcggttatggtcgtgctggataggtacggggcggaaaagtcataa

SEQ ID NO: 3666 - protein, 129 aa, Unknown
  Obtained from environmental sample
  misc_feature (1)..(129): Xaa is any amino acid
MISAISGLKSLQLDYFVFLTAVGLGMIFGILAFARVIKFVFERFYNGTVAVLIGLTAGSLYALWPFKKFVTMDLYQKGADGIALVKNVAVQTNANILPPDTSLILPALMFCGIGVAVMVVLDRYGAEKS

SEQ ID NO: 3667 - DNA, 435 bp, Unknown
  Obtained from environmental sample
  misc_feature (1)..(435): n is a, c, g, or t
atggcagataacggcccatttgtgcggctcgccctctcgcttgtaaccgcggacgaagaactgcgtaaacaactgatgcccattgccgccgccaaccctcttaatgaagtaaaacaagccctgtccgcgtttcaaaacaaaagcggcggccgcgtaactttagaagtgccccttatcggcggtatcaacacccgcgcccaagacgcgctatccatagcgcgtttcgcgaaaggaatggacaccgtaattaacataatcccctggaaccccgcagacggccttgaatttcaaggcaagcccctgcgcgagcctgagaagaaagagacggaagattttgtaaaactgcttgaaaaacaaggcttaaaagtgaccctgcgccgacacaaaggaaggggcgttatgggcgcttgcggacagttgggagtaattagttaa

SEQ ID NO: 3668 - protein, 144 aa, Unknown
  Obtained from environmental sample
  misc_feature (1)..(144): Xaa is any amino acid
MADNGPFVRLALSLVTADEELRKQLMPIAAANPLNEVKQALSAFQNKSGGRVTLEVPLIGGINTRAQDALSIARFAKGMDTVINIIPWNPADGLEFQGKPLREPEKKETEDFVKLLEKQGLKVTLRRHKGRGVMGACGQLGVIS

SEQ ID NO: 3669 - DNA, 414 bp, Unknown
  Obtained from environmental sample
  misc_feature (1)..(414): n is a, c, g, or t
atggcttcttttgcagggggtttcgactcgctgtgggcggcgctttcatcgccatctattgatggcgaatcatccaccgaaatacaattaggcatcttaaaactgctgcccggtacggcgattgcccggcataatgcagcctttggaatgtgttacaatctttcgccgccttatgaagtaatggaaaccgccgccatgcccgctggcgacattgaccgcctgaaaaattttgcccgcttttgggaacttattgttaaccggaggcttatagacatccaccaatactgcggcgattctccggtattcgaccggtttatgaccctgtcagattctttatttgcccgttttggtcgtaactggggcatagataaagaagacctgcgcgaggcggtaacagcctttttcaccccgtaa

SEQ ID NO: 3670 - protein, 137 aa, Unknown
  Obtained from environmental sample
  misc_feature (1)..(137): Xaa is any amino acid
MASFAGGFDSLWAALSSPSIDGESSTEIQLGILKLLPGTAIARHNAAFGMCYNLSPPYEVMETAAMPAGDIDRLKNFARFWELIVNRRLIDIHQYCGDSPVFDRFMTLSDSLFARFGRNWGIDKEDLREAVTAFFTP

SEQ ID NO: 3671 - DNA, 681 bp, Unknown
  Obtained from environmental sample
  misc_feature (1)..(681): n is a, c, g, or t
ttggccgagatgacgaactatccgcgcccttgccgacactgggaaggccacgagatacttcaggccaaggcaaagaacaaagcccccaaatacggcagggacgacagcgaggccgatgctttggcgaagcgctttatggaattctggtctgaagaggtaacaaaataccgcacgccttccggccatacctgccgcggcggaatgttgtcctggaactactgggtaagcgacggctacgtcctctgcgccagccccgacgggcgtaagcgcggccagtttctctcaaacgcgatctgccccacaaacggagcggacgtcaacggcccgactgccaacagcaactcggtcggcatcgccctcggcggcaaggacgaaaaaggcgggtacatcaactaccttcccaacggggcaagccatacaattaccatgagcccctcgctcatgcgggatggcgagcatcgttccaagttcaagtcttttctgcggggctatattgaaaatggcggtactgctttacaaattaacatgcttgatcctgagacgctgcgggatgcccagaaaaacccggaagaataccgccacttgcttgtgcgcgtaacgggctacaacgcctactttaccgccataggccgggagttgcagaacgagatcattgaacgggaatcgcatggccggttctga

SEQ ID NO: 3672 - protein, 226 aa, Unknown
  Obtained from environmental sample
  DOMAIN (94)...(207): Glycine radical
  misc_feature (1)..(226): Xaa is any amino acid
MAEMTNYPRPCRHWEGHEILQAKAKNKAPKYGRDDSEADALAKRFMEFWSEEVTKYRTPSGHTCRGGMLSWNYWVSDGYVLCASPDGRKRGQFLSNAICPTNGADVNGPTANSNSVGIALGGKDEKGGYINYLPNGASHTITMSPSLMRDGEHRSKFKSFLRGYIENGGTALQINMLDPETLRDAQKNPEEYRHLLVRVTGYNAYFTAIGRELQNEIIERESHGRF

SEQ ID NO: 3673 - DNA, 774 bp, Unknown
  Obtained from environmental sample
  misc_feature (1)..(774): n is a, c, g, or t
gtgtactttgtcctgaatagtacaaccaagccaatcgtcaaggtagcggacaccctcaaggacatttccgagggcgaaggcgacctgacgcggagtattgccgtccattccaaagatgagatcggcgaccttgccctgtattttaacaagactctggagaagatcaaaaatctgattataattatcaagaaagaagctgcaaacctccagaacatcggaaacgatcttgccagcaacatgaccgagaccgccgctgctattaaccagattactgccaacatccagagcatcaaaggccgtgtgatcaaccagtccgccagcgtaaccgaaacaaacgccacaatggaacaggttatctcaaacatcaacaaactcaatggtcatgtagagaatcagagcagaaatgtttcccaggcatcgtccgccattgaggaaatggtagctaacataagttctgtcaccaacacgctggtcagcaacgccgctaatgtaaattcattaaaagaagcttccgaagtaggacgggccggattgcaggaagttgcaacggatattcaggagatatcccgtgagtccgaaggcttgctggagattaacgcggtaatggaaaacatcgcaagccagaccaacctgctttcgatgaacgccgcgatagaagccgcgcacgcgggagaagccggaaagggctttgccgtagtcgccgatgaaatccgcaaacttgcggaatcgtctggcgagcaatccaaaacgattggcacggtactngaaaaatag

SEQ ID NO: 3674 - protein, 257 aa, Unknown
  Obtained from environmental sample
  DOMAIN (130)...(257): Methyl-accepting chemotaxis protein (MCP) signaling domain
  misc_feature (1)..(257): Xaa is any amino acid
MYFVLNSTTKPIVKVADTLKDISEGEGDLTRSIAVHSKDEIGDLALYFNKTLEKIKNLIIIIKKEAANLQNIGNDLASNMTETAAAINQITANIQSIKGRVINQSASVTETNATMEQVISNINKLNGHVENQSRNVSQASSAIEEMVANISSVTNTLVSNAANVNSLKEASEVGRAGLQEVATDIQEISRESEGLLEINAVMENIASQTNLLSMNAAIEAAHAGEAGKGFAVVADEIRKLAESSGEQSKTIGTVLEK

SEQ ID NO: 3675 - DNA, 321 bp, Unknown
  Obtained from environmental sample
  misc_feature (1)..(321): n is a, c, g, or t
ttgctttcggatatgaagcttgaaaaccgccaaggccattacccctcacaactgtccggcggcgagcgtcagcgggtggctgcggcgcgggctatggtaaacgatcccgacataattctggcggatgagccaacgggaaaccttgacccagacaacagcgccctggtagcggagcttctttacctgggcgcggaaaagtggggcaagacgctcattgtggttacgcataacgaaactgtcgcgtcccgcgcaaaagtgcgctatgttcttgaaaacggccttcttgaagatgaggatttagccaaaagggaagccccttga

SEQ ID NO: 3676 - protein, 106 aa, Unknown
  Obtained from environmental sample
  DOMAIN (1)...(93): ABC transporter
  misc_feature (1)..(106): Xaa is any amino acid
MLSDMKLENRQGHYPSQLSGGERQRVAAARAMVNDPDIILADEPTGNLDPDNSALVAELLYLGAEKWGKTLIVVTHNETVASRAKVRYVLENGLLEDEDLAKREAP

SEQ ID NO: 3677 - DNA, 348 bp, Unknown
  Obtained from environmental sample
  misc_feature (1)..(348): n is a, c, g, or t
atggaaataaaaagcttagtcccgatagccctgctgatagcctcaaatgttttcatgacatttgcatggtacgggcatttgaaattcagggaaagtcccttgtggatcgtaattccggtaagctgggggattgcgttttttgaatactgcctccaagttcccgccaaccgcataggttattcatacttttcggcggctcagcttaaagtagcgcaggaagttattacgctgattgtatttgcggttttttccgttacttacttaaaagagcagttaaaatggaactatatagtcgggtttgtttttatcctgtttgccgtcttctttatgttcaaaaagtgggattaa

SEQ ID NO: 3678 - protein, 115 aa, Unknown
  Obtained from environmental sample
  SIGNAL (1)...(19)
  DOMAIN (6)...(112): Protein of unknown function, DUF486
  misc_feature (1)..(115): Xaa is any amino acid
MEIKSLVPIALLIASNVFMTFAWYGHLKFRESPLWIVIPVSWGIAFFEYCLQVPANRIGYSYFSAAQLKVAQEVITLIVFAVFSVTYLKEQLKWNYIVGFVFILFAVFFMFKKWD

SEQ ID NO: 3679 - DNA, 564 bp, Unknown
  Obtained from environmental sample
  misc_feature (1)..(564): n is a, c, g, or t
ttgcttatactgccgtccgatacggcggacgcgaaaatgcgtatgttcancgttgacggaagcgagggcagtataagcggaaacgcgattcgctgcgtcgcaaaatatttgttcgataacaatattgtaaaaaaacacgatatgaaaattgagacaaaaagcggtataaaaaaactttatctctccacgcgtaacggcgtagtatcgtccgtaaaagttgatatgggacgcgcggaactgcgccccgaaaaaatccctgtcaaattaactggtgaaaatgtaattaacagaaaagtaatcattgacaacgaaggatacgaaattacctgcgtatctatgggcaaccctcacgccgtagtcttctgcgataaaattgacaatcttgatttgagcaaaataggtcccctgtttgaaaacgatccgctgtttcccgaccgcgtaaacgttgagtttgtaaaagtaatggacaagaaccatttaaaacttcgtatatgggaacgcggaagcggcgagacacaggcaagcggaagcgccgcctgcgccagcgcggtagccgcggtatga

SEQ ID NO: 3680 - protein, 187 aa, Unknown
  Obtained from environmental sample
  DOMAIN (109)...(187): Diaminopimelate epimerase
  misc_feature (1)..(187): Xaa is any amino acid
MLILPSDTADAKMRMFXVDGSEGSISGNAIRCVAKYLFDNNIVKKHDMKIETKSGIKKLYLSTRNGVVSSVKVDMGRAELRPEKIPVKLTGENVINRKVIIDNEGYEITCVSMGNPHAVVFCDKIDNLDLSKIGPLFENDPLFPDRVNVEFVKVMDKNHLKLRIWERGSGETQASGSAACASAVAAV

SEQ ID NO: 3681 - DNA, 504 bp, Unknown
  Obtained from environmental sample
  misc_feature (1)..(504): n is a, c, g, or t
atgcttgaagaaggaagctggaagggcaaaacgttcagatcgtataatgttaaaacgccccctgtccgccttacacccggacgtagcaacccttacgctaaatttctggaaaatgttaaagataaactggtttcacttggattcgaggaatttgacgggccgttggttgaaactgaattctggaattcggacgctctttttatgccgcagtttcattcggcgcgggatattcatgacgcatacagtattgcggactcgtcaactaaagacggaattgcaagggcaaagtccattgatgagccgtggctctccaatgttgcttccgcacatgaaaacggaggcaagacgggaagccgcggatggagttacagctttgatcgtgattttacgcgtcgccttatccttcgctctcaagggactgtgctgtcggctaaaacactgccggtttgcaaaattcccggtaagtattttggcattgtgcgctgtttcgctacgaccgtgtag

SEQ ID NO: 3682 - protein, 167 aa, Unknown
  Obtained from environmental sample
  DOMAIN (14)...(167): tRNA synthetases class II core domain (F)
  misc_feature (1)..(167): Xaa is any amino acid
MLEEGSWKGKTFRSYNVKTPPVRLTPGRSNPYAKFLENVKDKLVSLGFEEFDGPLVETEFWNSDALFMPQFHSARDIHDAYSIADSSTKDGIARAKSIDEPWLSNVASAHENGGKTGSRGWSYSFDRDFTRRLILRSQGTVLSAKTLPVCKIPGKYFGIVRCFATTV

SEQ ID NO: 3683 - DNA, 411 bp, Unknown
  Obtained from environmental sample
  misc_feature (1)..(411): n is a, c, g, or t
ttgtcggcggngaaagcgacacatggggtcgacaggatacttgagaccatggacacatcaaaaatgataattatcaaaatgctggacatggttgacgccgttgaggaagaaatcgtcgagggcatggaggcggaggatgaggaagaaggagaagaaacagcctacgacgagcatgtctggacatctccccaaaacgcgattctgattgtaaaggcgataaatacggcgctttgcgaagccgatcccgccaacgccgatttttaccgtaaaaacaccgcggactacatcgaaaaactggtgcagcttgacgcggcgtttaagggagtaattgccggagcaaagcggaaaacaattatttttgccgaccgtttccccttccgttacttcgccgaaacgcatacggggatttaa

SEQ ID NO: 3684 - protein, 136 aa, Unknown
  Obtained from environmental sample
  misc_feature (1)..(136): Xaa is any amino acid
MSAXKATHGVDRILETMDTSKMIIIKMLDMVDAVEEEIVEGMEAEDEEEGEETAYDEHVWTSPQNAILIVKAINTALCEADPANADFYRKNTADYIEKLVQLDAAFKGVIAGAKRKTIIFADRFPFRYFAETHTGI

SEQ ID NO: 3685 - DNA, 486 bp, Unknown
  Obtained from environmental sample
  misc_feature (1)..(486): n is a, c, g, or t
atgaaatacacgccacgggacatacaacgccgcgaattcgactcctcctttcgagggttgaaccccgaccaggtgtatgaatatctccgcgaaatagccgcagacattgaggaactgctgcaagagaaccagcagataaacaatgaactggcggaacacagaaaccgcatcctccagtaccacgaacaagatcgcattttcaaagagaccttgatgcaggcccagaaaactagggaagagtggatggagattgccgagagggaagccgacttgatgaaaaaagaggcgcgcttccagtccgacgagcttatcaaggccgcccaagaagaggtggcaaaaatggaagtccaactgcgtggcatgaagctggaaagggtgcgcttcctgcaagacatggacgccttggccgcccgcacaaagcgcttcctgagccaagaagccccagagatgttcccgcctgcggatgtaactaggaagttggagtga

SEQ ID NO: 3686 - protein, 161 aa, Unknown
  Obtained from environmental sample
  DOMAIN (1)...(161): DivIVA protein
  misc_feature (1)..(161): Xaa is any amino acid
MKYTPRDIQRREFDSSFRGLNPDQVYEYLREIAADIEELLQENQQINNELAEHRNRILQYHEQDRIFKETLMQAQKTREEWMEIAEREADLMKKEARFQSDELIKAAQEEVAKMEVQLRGMKLERVRFLQDMDALAARTKRFLSQEAPEMFPPADVTRKLE

SEQ ID NO: 3687 - DNA, 357 bp, Unknown
  Obtained from environmental sample
  misc_feature (1)..(357): n is a, c, g, or t
ttgagcgacttggccacctcttccgtgatcttgacgccgccgtcggcgttcttcaccgactcctcaatcatgttcgccgtgttcttcgccgcctcggcgctgcgcatagcgaggttgcgcacctcctcggccacaaccgcgaagccctttccggcctcgccggcgcgggccgcctcgaccgcggcgttgagcgccagcaggttggtctggaaagcgatgtcgtctatggacttgataattttagcggtgttgtcggacgattgctttatctcccggatggcctcggccattttcttcatggaggcgtcgccctcgttggcggcggatttggcttcggtagccagtaatttcgcctga

SEQ ID NO: 3688 - protein, 118 aa, Unknown
  Obtained from environmental sample
  SIGNAL (1)...(30)
  misc_feature (1)..(118): Xaa is any amino acid
MSDLATSSVILTPPSAFFTDSSIMFAVFFAASALRIARLRTSSATTAKPFPASPARAASTAALSASRLVWKAMSSMDLIILAVLSDDCFISRMASAIFFMEASPSLAADLASVASNFA

SEQ ID NO: 3689 - DNA, 627 bp, Unknown
  Obtained from environmental sample
  misc_feature (1)..(627): n is a, c, g, or t
ttgctgatgccttggcggcaggccgcgccttccgccccctccgctgccgaccgcgctcagcttgaactcgttcaccatgttagagagttccgccgcctggctggacagctcctcggaggcgctcgcggactcttcggagttggcggcgttgctctgggtaacctgattcatttgcgccacggcggtgttcacctgctctatgccctgcgcctgttcgttggaggcggcggcgatctcggctatcaggtcgcccaccttgcccacgcggtctacaatctgattgagcgacttggccacctcttccgtgatcttgacgccgccgtcggcgttcttcaccgactcctcaatcatgttcgccgtgttcttcgccgcctcggcgctgcgcatagcgaggttgcgcacctcctcggccacaaccgcgaagccctttccggcctcgccggcgcgggccgcctcgaccgcggcgttgagcgccagcaggttggtctggaaagcgatgtcgtctatggacttgataattttagcggtgttgtcggacgattgctttatctcccggatggcctcggccattttcttcatggaggcgtcgccctcgttggcggcggatttggcttcggtagccagtaa

SEQ ID NO: 3690 - protein, 208 aa, Unknown
  Obtained from environmental sample
  misc_feature (1)..(208): Xaa is any amino acid
MLMPWRQAAPSAPSAADRAQLELVHHVREFRRLAGQLLGGARGLFGVGGVALGNLIHLRHGGVHLLYALRLFVGGGGDLGYQVAHLAHAVYNLIERLGHLFRDLDAAVGVLHRLLNHVRRVLRRLGAAHSEVAHLLGHNREALSGLAGAGRLDRGVERQQVGLESDVVYGLDNFSGVVGRLLYLPDGLGHFLHGGVALVGGGFGFGSQ

SEQ ID NO: 3691 - DNA, 705 bp, Unknown
  Obtained from environmental sample
  misc_feature (1)..(705): n is a, c, g, or t
atgaagaaaatggccgaggccatccgggagataaagcaatcgtccgacaacaccgctaaaattatcaagtccatagacgacatcgctttccagaccaacctgctggcgctcaacgccgcggtcgaggcggcccgcgccggcgaggccggaaagggcttcgcggttgtggccgaggaggtgcgcaacctcgctatgcgcagcgccgaggcggcgaagaacacggcgaacatgattgaggagtcggtgaagaacgccgacggcggcgtcaagatcacggaagaggtggccaagtcgctcaatcagattgtagaccgcgtgggcaaggtgggcgacctgatagccgagatcgccgccgcctccaacgaacaggcgcagggcatagagcaggtgaacaccgccgtggcgcaaatgaatcaggttacccagagcaacgccgccaactccgaagagtccgcgagcgcctccgaggagctgtccagccaggcggcggaactctctaacatggtgaacgagttcaagctgagcgcggtcggcagcggagggggcggaaggcgcggcctgccgccaaggcatcagcaacggcccgccgccgcggcccttccgaacaaatcggcgaaaacggcggccggggccgtaagttccgcgaaagcggtgaacgcgtcggagatcatttcgctggacgacgatgaattgaacgagttttaa

SEQ ID NO: 3692 - protein, 234 aa, Unknown
  Obtained from environmental sample
  DOMAIN (1)...(175): Methyl-accepting chemotaxis protein (MCP) signaling domain
  misc_feature (1)..(234): Xaa is any amino acid
MKKMAEAIREIKQSSDNTAKIIKSIDDIAFQTNLLALNAAVEAARAGEAGKGFAVVAEEVRNLAMRSAEAAKNTANMIEESVKNADGGVKITEEVAKSLNQIVDRVGKVGDLIAEIAAASNEQAQGIEQVNTAVAQMNQVTQSNAANSEESASASEELSSQAAELSNMVNEFKLSAVGSGGGGRRGLPPRHQQRPAAAALPNKSAKTAAGAVSSAKAVNASEIISLDDDELNEF

SEQ ID NO: 3693 - DNA, 594 bp, Unknown
  Obtained from environmental sample
  misc_feature (1)..(594): n is a, c, g, or t
ttggcgctcaacgcggcggtcgaggcgcccagagcgggcgaggcggcaaagggcttcgcggtcgtggccgaggaggtgcgcaacctcgcgatgcgcagcgccgaagcggcaaggaacaccgccgacatgatcgaggcgtccgtaaagaacgccgaaggcggcgtcaagatcacggaagaggtggccaatgcgctcagccagatcgtagaccgcgcgcagaaagtgggcgacctgatagccgaaatagccgccgcctccaacgagcaggcgcttggcatagagcaggtgaacaccgccgtggcgtctatgaaccaggtcacccagcaaaacgcggccaactccgaagagtccgcgagcgcctccgaggagctatccagccaggcggcggaactctctaacatggtgaacgagttcaagctgagcatcggcaacggagggggcggaaggcacagcctgccgccgccaaggcatcagcaacggccggtagtcgcggcccttccgaacaaatcggcgaaaacggcgaccttgaccgcgaaagcggtgaaagcgtcggaggtcattccgatggacgacgatgagttgaacgatttttaa

SEQ ID NO: 3694 - protein, 197 aa, Unknown
  Obtained from environmental sample
  DOMAIN (1)...(141): Methyl-accepting chemotaxis protein (MCP) signaling domain
  misc_feature (1)..(197): Xaa is any amino acid
MALNAAVEAPRAGEAAKGFAVVAEEVRNLAMRSAEAARNTADMIEASVKNAEGGVKITEEVANALSQIVDRAQKVGDLIAEIAAASNEQALGIEQVNTAVASMNQVTQQNAANSEESASASEELSSQAAELSNMVNEFKLSIGNGGGGRHSLPPPRHQQRPVVAALPNKSAKTATLTAKAVKASEVIPMDDDELNDF

SEQ ID NO: 3695 - DNA, 528 bp, Unknown
  Obtained from environmental sample
  misc_feature (1)..(528): n is a, c, g, or t
atgtttccggcagcgcattatatgtgcggcggtgtgcttgtggattcttttagcagaacaaccatagagggtctttacgcttgcggcgaaatagcagcgacaggcgttcacggggcaaaccgcttggcttcaaattctctgcttgaaagtgtggtttttgccttgagagcttgcgaggatataaataaaaaggtagctcgtgaggagcggctagtggctagtagaaagcaaatcaagctgaataattttaactgtcaaaaatttaaaaagcaggttcagactattatgtgggaatattgcggaattgtgcgttctatcgagggtttgaaaactgggctaaaaaaattgaaagaacttgaaaattcctcttttgcctcttttgaatttcgcaattttgtgcaaagcgcaaggcttattgtggaaagcaccttaaaacgaaaggaatcaaggggtttgcaatgcctaactgattatccacagaaaaattcaaagtatttgaagcattttactttggtaaaagatatttaa

SEQ ID NO: 3696 - protein, 175 aa, Unknown
  Obtained from environmental sample
  DOMAIN (89)...(175): Fumarate reductase/succinate dehydrogenase flavoprotein C-terminal domain
  misc_feature (1)..(175): Xaa is any amino acid
MFPAAHYMCGGVLVDSFSRTTIEGLYACGEIAATGVHGANRLASNSLLESVVFALRACEDINKKVAREERLVASRKQIKLNNFNCQKFKKQVQTIMWEYCGIVRSIEGLKTGLKKLKELENSSFASFEFRNFVQSARLIVESTLKRKESRGLQCLTDYPQKNSKYLKHFTLVKDI

SEQ ID NO: 3697 - DNA, 915 bp, Unknown
  Obtained from environmental sample
  misc_feature (1)..(915): n is a, c, g, or t
atgaagttttttctgtttcacagatgtaatttaacggtcattcccgatcatatatgcggctggacaaatctggaaggatttgaactaaccatggatgacacctttcagggcccttatacaaaattaaaaaaaatcccacggaatatcggaaatctgaaaaagttaaaacacctcggtttttactgtaccagtattacaaaaatacccgattcacttggcagttgtcctttggaacaccttgtacttacaggcgattttagtattgtgccggaaactttagggaattgttctaaacttgaaatcctcaagcttttttccggtaagcccataagcttacctgacagtattgggaaactttcgtatctcaaagaattatggatagatacgcctgccctgacaatcccggcaagtttcggcaggctttcctcgctggaagacctttccctgttaactcaaaaagaacttgtattacccaaaagtttcggcggcctacgctcactggataccctttggcttgattctcctcaaatgcgaaaaatacctgattcaatagggaattgcgggaaccttaagagcgttcttattaaaagcgataaacttgccgcggtgccggattcgttttgcagattgaaaaagttagaaggacttcaccttgacacctttgccctggaagcgcttccttccgctttcggaaatctctcttcgctgaaaagccttgagatttcttcaggcgcgttgactgcttttcccgaaagcatgggcggtttaaaaaaattggtaaggctcagccttgacgcccataatgtcaaagagcttccggcttcgtttaaaaaactctcttatgtaaaatacacgcaaattgagattggtcaaaaagaaccggtatggcgcaaaaaaaagactcggccgatctga

SEQ ID NO: 3698 - protein, 304 aa, Unknown
  Obtained from environmental sample
  misc_feature (1)..(304): Xaa is any amino acid
MKFFLFHRCNLTVIPDHICGWTNLEGFELTMDDTFQGPYTKLKKIPRNIGNLKKLKHLGFYCTSITKIPDSLGSCPLEHLVLTGDFSIVPETLGNCSKLEILKLFSGKPISLPDSIGKLSYLKELWIDTPALTIPASFGRLSSLEDLSLLTQKELVLPKSFGGLRSLDTLWLDSPQMRKIPDSIGNCGNLKSVLIKSDKLAAVPDSFCRLKKLEGLHLDTFALEALPSAFGNLSSLKSLEISSGALTAFPESMGGLKKLVRLSLDAHNVKELPASFKKLSYVKYTQIEIGQKEPVWRKKKTRPI

SEQ ID NO: 3699 - DNA, 321 bp, Unknown
  Obtained from environmental sample
  misc_feature (1)..(321): n is a, c, g, or t
atgaacattgcgtaccacaagcaaaaagagccagaagaatataaaaagcggagctataattggaaaacggctataggcttgcaggctgttgatggcttggtgccttcgcagtatttgcttgaatgtgctaatttaaatatagaggggaaggcttcccttaatgaagttcaacgaaaaattcatggctattacgaagcanaacccaaaaaaaatgtagaagaaaggcaaagggaagcagatctggtctctttgagaattgctaaactgctctccaatgatgctttcagtttttcctccgcaactttgctctcgattcantaa

SEQ ID NO: 3700 - protein, 106 aa, Unknown
  Obtained from environmental sample
  misc_feature (1)..(106): Xaa is any amino acid
MNIAYHKQKEPEEYKKRSYNWKTAIGLQAVDGLVPSQYLLECANLNIEGKASLNEVQRKIHGYYEAXPKKNVEERQREADLVSLRIAKLLSNDAFSFSSATLLSIX

SEQ ID NO: 3701 - DNA, 906 bp, Unknown
  Obtained from environmental sample
  misc_feature (1)..(906): n is a, c, g, or t
gtgggtatgcccactggggtttatctgtcacctggaaaacctgcctgcgtttatatgcagaacagcggcataggcaatgcggtaaatccaatcacttcaattgctaacaccgaagtctataatattcccatgctttttattgtgggatatagaggctcaccaggtttaaaagatgagcctcagcataaatttatggggcgaataacagagaaaatgtttgattgccttgaaattgagtatgaagttattgatggtagcatatctgagggaaaattgaaagaaatatttgatagaataaaaaatactctgtcaaataaaaagcaattttcgttgataataaaaaaagatacatttgagaaaagagcaaatgctgcttatgccaatagttacaaattaaatcgcgagcatattatctctgaaattatgaaaaaaataacggagaaagatttggttgtgtccacaacaggcaaaatttcaagagaggtttacgagcagaacaatcgcaatcaatgttttttaacggtgggaggcatgggacatgcttcaatgatagcttttggcatagccgaaaattctccgaataaaagaattatttgcctagatggagatggagcggctttgatgcatttgggcaatttagcctttataggcagtaggggagttgaaaatttggttcacatttgcctgaataacgatgcgcacgaatccgtaggaggtatgccaaccgctgcaccgaatttcaaatatgccgaaacagcaaaagtttgcggttattccaatatttttgttattcaaacagcagatgaattcaacaatcttatgaatgattttaataatcttggaaaattgacgtttatagaaataaaggttgccaatgaatcaagagatgattctcggcccatctga

SEQ ID NO: 3702 - protein, 301 aa, Unknown
  Obtained from environmental sample
  DOMAIN (154)...(288): Thiamine pyrophosphate enzyme, C-terminal TPP binding domain
  misc_feature (1)..(301): Xaa is any amino acid
MGMPTGVYLSPGKPACVYMQNSGIGNAVNPITSIANTEVYNIPMLFIVGYRGSPGLKDEPQHKFMGRITEKMFDCLEIEYEVIDGSISEGKLKEIFDRIKNTLSNKKQFSLIIKKDTFEKRANAAYANSYKLNREHIISEIMKKITEKDLVVSTTGKISREVYEQNNRNQCFLTVGGMGHASMIAFGIAENSPNKRIICLDGDGAALMHLGNLAFIGSRGVENLVHICLNNDAHESVGGMPTAAPNFKYAETAKVCGYSNIFVIQTADEFNNLMNDFNNLGKLTFIEIKVANESRDDSRPI

SEQ ID NO: 3703 - DNA, 561 bp, Unknown
  Obtained from environmental sample
  misc_feature (1)..(561): n is a, c, g, or t
atgtttcctgagtttgggctaacgatggaagactttgccctggaagagccccacattacttccagaatcctcctcaattcggcggccatggtaaccgcccgcataaaagccacaaggaaactgctgtttgaaagcgcgtattgggttcaggaactgcaccgcaagatccacgaagatcccgctaccggtctttggaaacagaccttccttaccgaggaaatcaacaggattctaggaaagccaatggctttaattatgcttaagccggatcggtttaagatcctggttgattctctgggacataatgccggggacgaagcgatgataaaaatcgcggcagttcttaaaggcattacccgcaagctggataaaggctgggcaatgagattcaaaagcaacgaaacagggcttgttatcaacaaatgcgatgtcgctgaggcagaatctgtcgccctcgctctggctgaagccattgccgcccttccgtatgtcccgctgggggggggaagacttttactttacaggcagcattgcctggggagtttggtctgccgacgataa

SEQ ID NO: 3704 - protein, 186 aa, Unknown
  Obtained from environmental sample
  DOMAIN (52)...(185): GGDEF domain
  misc_feature (1)..(186): Xaa is any amino acid
MFPEFGLTMEDFALEEPHITSRILLNSAAMVTARIKATRKLLFESAYWVQELHRKIHEDPATGLWKQTFLTEEINRILGKPMALIMLKPDRFKILVDSLGHNAGDEAMIKIAAVLKGITRKLDKGWAMRFKSNETGLVINKCDVAEAESVALALAEAIAALPYVPLGGGRLLLYRQHCLGSLVCRR

SEQ ID NO: 3705 - DNA, 555 bp, Unknown
  Obtained from environmental sample
  misc_feature (1)..(555): n is a, c, g, or t
atggcgaataacacggtggagtaccgcaacgtcagggcggagccttggcgggtgacggtgctctataccggggagcggaccatgacgggcgggcggcttttgcgggcgcgggagttcttgggcggcgagaggtttctcctcacatacggcgacggcgtgagcgacgtggacatccccgcggtcgtcgcctgccacgaggccgcgggcaagctcgtcacgatcaccgccgtgaagccggcggagcgcttcggcaccatagcggttggcggcgacggcgccgtcagcgcgtttcgcgaaaaacccgacaacggcggcgtatgggtaagcggcggattctttgtcatggaaccgggcgtctttgattacctgacccgcggcgacgaaacggtgctggaacgcgaaccctttgagcgcttggctgacgaagggcggatgaacgcctacaaacacgccggattctggcaccccatggatacgatgcacgacaaaaatatgctgacggagatgtggacgaacgccggagccccgtgggcgcattgngagaagagacgatga

SEQ ID NO: 3706 - protein, 184 aa, Unknown
  Obtained from environmental sample
  misc_feature (1)..(184): Xaa is any amino acid
MANNTVEYRNVRAEPWRVTVLYTGERTMTGGRLLRAREFLGGERFLLTYGDGVSDVDIPAVVACHEAAGKLVTITAVKPAERFGTIAVGGDGAVSAFREKPDNGGVWVSGGFFVMEPGVFDYLTRGDETVLEREPFERLADEGRMNAYKHAGFWHPMDTMHDKNMLTEMWTNAGAPWAHXEKRR

SEQ ID NO: 3707 - DNA, 930 bp, Unknown
  Obtained from environmental sample
  misc_feature (1)..(930): n is a, c, g, or t
ttgccattgcgcctaacatctcttttcagatctgcttatggggtgtggatcagagtttttctagggatgttctacgaaaagaagancgagggcgagagggcggcgctggcgcttctgtgcctcgcctgggcgctgaccgccacggcgctgataatttgctgctttctgcccttttggcggcgcatatcatcaatgcttttcgacgccgaggatttgcgggcggcgctgctcttggccgcgtgcctgctgctatcggtgaccggctgtttcactacgacagcggtgaagatgcacaagcgggggcacctcctatccatgacccaaatatccgccgcgttgacaaacgtcgcggtaacggtcgcctacgcgctttatgtgtcgccggactttcacgccgtcgtctgcgggacggcggccgccttgtttgtaagtacggcggtaccttttatatttgagttgcgcttttgggtgcggttgccgctaagcgccgcctttgatatgaccgagacggcgcggctcttgcgctacggcctgccgctcgtcccggcgtttatcatcacctccgtattccaaggcatggacaagatggcgctgcgtgcctacgcctcttttgaggagataggcctatacgccgccgcgagcaaattcgccttcctcctcaccgtaatgcacaccggcttctaccacttttggcagcccacatccatggaacgctacgaggccgaccataacgacgttcgtttcttcgaaaaagtattcgagtacgcggccatggccgtgttgatctctgccggcctattgctcatgatgagggatgtcgtcaaatacttgttggcgtcgacctattgggattccgtgatgataatgccgtttctgcttctcgtaccgctaatgaacatacttagcgagatcacagctcggccgatctga

SEQ ID NO: 3708 - protein, 309 aa, Unknown
  Obtained from environmental sample
  misc_feature (1)..(309): Xaa is any amino acid
MPLRLTSLFRSAYGVWIRVFLGMFYEKKXEGERAALALLCLAWALTATALIICCFLPFWRRISSMLFDAEDLRAALLLAACLLLSVTGCFTTTAVKMHKRGHLLSMTQISAALTNVAVTVAYALYVSPDFHAVVCGTAAALFVSTAVPFIFELRFWVRLPLSAAFDMTETARLLRYGLPLVPAFIITSVFQGMDKMALRAYASFEEIGLYAAASKFAFLLTVMHTGFYHFWQPTSMERYEADHNDVRFFEKVFEYAAMAVLISAGLLLMMRDVVKYLLASTYWDSVMIMPFLLLVPLMNILSEITARPI

SEQ ID NO: 3709 - DNA, 669 bp, Unknown
  Obtained from environmental sample
  misc_feature (1)..(669): n is a, c, g, or t
gtgatcgccgagagacagatcacatcaaagtttctatatatgcttggggggctgtcggtgccggaatactccgtctacggcgtcaaccatccggaaacgagcgtagacggcataatcgagaagcacggcttcccttgtttcctcaagtgcccgcagtccggctccagccgtctgatggggcgggcggaggatagggagtcgttggttgctctgcttaacgagttgcaggagagcgccgacgatattttggtagagacgatggttaaaggcatagagttctcctgcggcgtgataaatatgccggacggatcaacgcacgcgcttccgcctatagagatccgcccgatggggtcggagtttttcgactacaaggcgaagtactcgcacggcgggtcggaagagattgttccggcgccgcgcgaaccggagctgctggctcaaattgaggatgccgcgttgcgggcgcataaactcttaaggtgctacggcgtctcaaggacggacatgatatacagcgattcaaaacttcatatcctagagacaaatacgttgccgggaatgacatccgcttcgctattgccgcaggctttcaaggcatggcgaggcggaacgtattcggagcttttggacatattgctgacatctgccctaaaaagagcaaaccgttga

SEQ ID NO: 3710 - protein, 222 aa, Unknown
  Obtained from environmental sample
  DOMAIN (7)...(214): D-ala D-ala ligase C-terminus
  misc_feature (1)..(222): Xaa is any amino acid
MIAERQITSKFLYMLGGLSVPEYSVYGVNHPETSVDGIIEKHGFPCFLKCPQSGSSRLMGRAEDRESLVALLNELQESADDILVETMVKGIEFSCGVINMPDGSTHALPPIEIRPMGSEFFDYKAKYSHGGSEEIVPAPREPELLAQIEDAALRAHKLLRCYGVSRTDMIYSDSKLHILETNTLPGMTSASLLPQAFKAWRGGTYSELLDILLTSALKRANR

SEQ ID NO: 3711 - DNA, 315 bp, Unknown
  Obtained from environmental sample
  misc_feature (1)..(315): n is a, c, g, or t
atgagtgcactagttatgcgtccggttccgtctgtgtctgatctcttcagcatcttcgacagggtcttcggcgacagaccgctgaccgacgaccgcgcggattacagggtgcagccgcgcatggacgtctccgaagaggagaacaagtacgccgtcacgctcgacatccccggtcttgccaaagaggagatctccataaaggttgagaacggcacgatgaagatcgagggcgagcgcaaagaggagcgcaccggaaagtaccacctcacggagcgcacctacggccgcttcacagaagcttgcgcgccgcgataa

SEQ ID NO: 3712 - protein, 104 aa, Unknown
  Obtained from environmental sample
  DOMAIN (42)...(104): Hsp20/alpha crystallin family
  misc_feature (1)..(104): Xaa is any amino acid
MSALVMRPVPSVSDLFSIFDRVFGDRPLTDDRADYRVQPRMDVSEEENKYAVTLDIPGLAKEEISIKVENGTMKIEGERKEERTGKYHLTERTYGRFTEACAPR

SEQ ID NO: 3713 - DNA, 390 bp, Unknown
  Obtained from environmental sample
  misc_feature (1)..(390): n is a, c, g, or t
atgatcacgaacgccataaacaacgggctgctccccgtctacggcgacggcacgaacgtgcgcgactggatacacgtaagcgaccactgccgcgccgtggaggccgtgctggagaggggcgttgcgggagaggtgtacaacatcggcgcgcacaacgagatgcgcaacatcgacatcgttaagctcatattgtcgctattggagaagccggagagcctgatctcgtttgtggcggacaggcccggccacgacaggcgctacgccatagacgcgtcgaaaattaaacaggagctgggctggacgccgcaggtggagtttgaggccggtatacgggagaccataaagtggtatatttataggagcggcaacctgccgcccgcttcgttataa

SEQ ID NO: 3714 - protein, 129 aa, Unknown
  Obtained from environmental sample
  misc_feature (1)..(129): Xaa is any amino acid
MITNAINNGLLPVYGDGTNVRDWIHVSDHCRAVEAVLERGVAGEVYNIGAHNEMRNIDIVKLILSLLEKPESLISFVADRPGHDRRYAIDASKIKQELGWTPQVEFEAGIRETIKWYIYRSGNLPPASL

SEQ ID NO: 3715 - DNA, 540 bp, Unknown
  Obtained from environmental sample
  misc_feature (1)..(540): n is a, c, g, or t
atgaaacttctgataataggctccaccggtcagttaggctccgacttcgtcaaaatcgcggaacagcaaggccgcgccgtcatccctatcgattatccgcagattgacatacgcgataaatcatccgtagaatccgttatcggcagtaccgccccggacgccgtgataaactgcgccgcgttcacggccgtcgacaattgcgagaccgacagcggggccgccttcgccttgaacgcagacgcctgcgaaaacttggcgcttgccgcgaaggcgcgcgattcattgctggtgcacatcagtacngactacgtcttcgacggcgcggcgtcgtccccctataccgaagatggcccggcggatccgcaaactgtctacgggaggtctaaactgcgncgggaaggagatcgttacccgaactgtacggccggcggcagcatgattttcaggatcgcgtggctctacggcgtccaccggcataattttgttcaaaagaattcggcgccgtcccgcttttccaatcaaaaaaaattaaccgcttaa

SEQ ID NO: 3716 - protein, 179 aa, Unknown
  Obtained from environmental sample
  DOMAIN (3)...(179): NAD dependent epimerase/dehydratase family
  misc_feature (1)..(179): Xaa is any amino acid
MKLLIIGSTGQLGSDFVKIAEQQGRAVIPIDYPQIDIRDKSSVESVIGSTAPDAVINCAAFTAVDNCETDSGAAFALNADACENLALAAKARDSLLVHISTDYVFDGAASSPYTEDGPADPQTVYGRSKLRREGDRYPNCTAGGSMIFRIAWLYGVHRHNFVQKNSAPSRFSNQKKLTA

SEQ ID NO: 3717 - DNA, 846 bp, Unknown
  Obtained from environmental sample
  misc_feature (1)..(846): n is a, c, g, or t
ttgatggaagatggcgaaaatcaccgctctggggcggaaatagtaaaaaaaacgcccgggcccaatatggcgcagcttttggtgggcagcgagggcatctttgggataatcacgtcggcggcggtgcgcctcataccagccccaaaagagcgcgttgcaatgctgctgcccgtgtcgagctggggcgacctgctgagcctgcccagtcgccttgtgggcggcggcttagtgccaagtgcgctagaattttgggatcctcaagtacttcaacacttacgtcaatttggcccggaggaggccaagagcctgcccggcgaggcgctggctattctcgaatttgatgacgcaggctgcacgggcgaaaaatttttgggcggcttgatggacttgctgggcccgctggccgaacacgcacaggcggctaaggacgagaggcagcgtgaggcagtttgggccgtccgccgccagacaagcacgatgctaaaggaacacttcccccacaaagtgagcgaggacatagcagtgccaaggccaaagatagtggcatttttcgagggcgcacagaagctggggctgcccatagtcacgtacggccaccttggggacggcaacctgcacgtcaacatcctcggcaaactgggccgcgaagaaatggacgcccacataatgacccttttcaggctggtgctggagctgggaggcaccatcaccggcgaacacggcataggcctggcaaagagggatgcattcttggcactctctgacccctggcaagtgcaggccatcagagccatgaagaaagctctggatccgtgcggcgttttcaatgcgggcaaaataatttga

SEQ ID NO: 3718 - protein, 281 aa, Unknown
  Obtained from environmental sample
  DOMAIN (47)...(280): FAD linked oxidases, C-terminal domain
  misc_feature (1)..(281): Xaa is any amino acid
MMEDGENHRSGAEIVKKTPGPNMAQLLVGSEGIFGIITSAAVRLIPAPKERVAMLLPVSSWGDLLSLPSRLVGGGLVPSALEFWDPQVLQHLRQFGPEEAKSLPGEALAILEFDDAGCTGEKFLGGLMDLLGPLAEHAQAAKDERQREAVWAVRRQTSTMLKEHFPHKVSEDIAVPRPKIVAFFEGAQKLGLPIVTYGHLGDGNLHVNILGKLGREEMDAHIMTLFRLVLELGGTITGEHGIGLAKRDAFLALSDPWQVQAIRAMKKALDPCGVFNAGKII

SEQ ID NO: 3719 - DNA, 528 bp, Unknown
  Obtained from environmental sample
  misc_feature (1)..(528): n is a, c, g, or t
gtgaaaagtttatacgccgacggctttaacgcgattcttttggcgattggctctcaaaaaggatacccgttaggtgttgacggcgaaagaaattgtccccatgtattaatcggcgttgattttctcggctctgttacaaggggcaaacagcccgactttgacggcaaaaaaatcgccgttgtcggcggcggcaacaccgcgatggactgcgtaagaaccgcagtccgtcttggcgcggaaaatgtcaaacttatttaccgcagaacaattgccgaaatgcccgccgatgaagaagaaattgaagaagcccaattagagggcattgaatttttagtattgaataatcctttaagagtatccgagagcggcggtaaggtgacaatgagacttaccaaaatggaacttggcgaaagcgacgcgtccggcagaagatcgccgcgccctgttgcgggatcggaatataatatcgaagttgactatgtaatttcagctattgggcaaacaccaggatttgtcttttataaataa

SEQ ID NO: 3720 - protein, 175 aa, Unknown
  Obtained from environmental sample
  DOMAIN (57)...(166): Pyridine nucleotide-disulphide oxidoreductase
  misc_feature (1)..(175): Xaa is any amino acid
MKSLYADGFNAILLAIGSQKGYPLGVDGERNCPHVLIGVDFLGSVTRGKQPDFDGKKIAVVGGGNTAMDCVRTAVRLGAENVKLIYRRTIAEMPADEEEIEEAQLEGIEFLVLNNPLRVSESGGKVTMRLTKMELGESDASGRRSPRPVAGSEYNIEVDYVISAIGQTPGFVFYK

SEQ ID NO: 3721 - DNA, 465 bp, Unknown
  Obtained from environmental sample
  misc_feature (1)..(465): n is a, c, g, or t
ttggacgacagcaactttaattctcataacgaaagggagcaaaaaatagataacgctgtctcctttgcttccttgagtaaagatttaagttttttccgagacggaaaggacacgcttgtaggggaacgcggtttaacgctttcaggcggacagaagcaaaggactgcaatagcgagagccgctgtcatggacagtgaatttcttatattagacgattctctgtccgccgttgataacgaaacagagttgaaaatactggaggcgttaagaaaggagagaaaggggcggacgacgataattatttcgcatagggtttctacccttaaatacgccgataacattcttgttttggacaagaggaaggttcttgagtacggaagtccgtcacagcttgcggcgcagggcggcttctacggcagaatagcggcgttccaaaaattagagtcaggagcggtaaatggctga

SEQ ID NO: 3722 - protein, 154 aa, Unknown
  Obtained from environmental sample
  DOMAIN (1)...(120): ABC transporter
  misc_feature (1)..(154): Xaa is any amino acid
MDDSNFNSHNEREQKIDNAVSFASLSKDLSFFRDGKDTLVGERGLTLSGGQKQRTAIARAAVMDSEFLILDDSLSAVDNETELKILEALRKERKGRTTIIISHRVSTLKYADNILVLDKRKVLEYGSPSQLAAQGGFYGRIAAFQKLESGAVNG

SEQ ID NO: 3723 - DNA, 333 bp, Unknown
  Obtained from environmental sample
  misc_feature (1)..(333): n is a, c, g, or t
ttgtccaaaacaagaatgttatcggcgtatttaagggtagaaaccctatgcgaaataattatcgtcgtccgcccctttctctcctttcttaacgcctccagtattttcaactctgtttcgttatcaacggcggacagagaatcgtctaatataagaaattcactgtccatgacagcggctctcgctattgcagtcctttgcttctgtccgcctgaaagcgttaaaccgcgttcccctacaagcgtgtcctttccgtctcggaaaaaacttaaatctttactcaaggaagcaaaggagacagcgttatctattttttgctccctttcgttatga

SEQ ID NO: 3724 - protein, 110 aa, Unknown
  Obtained from environmental sample
  misc_feature (1)..(110): Xaa is any amino acid
MSKTRMLSAYLRVETLCEIIIVVRPFLSFLNASSIFNSVSLSTADRESSNIRNSLSMTAALAIAVLCFCPPESVKPRSPTSVSFPSRKKLKSLLKEAKETALSIFCSLSL

SEQ ID NO: 3725 - DNA, 699 bp, Unknown
  Obtained from environmental sample
  misc_feature (1)..(699): n is a, c, g, or t
ttggcacaagagcagcaaataaaaacgcttgccgcccagtttgactctgtgaatacatcggttagggataataaaatagacaaagctcaagcattgaaaaaatttcaagatattttacccgaattgcaaaccgcatataataagctaaaaccaaatgaaacaaaaaacgaaaagtggatttttccagtggagggttattcctcaaaagacataggcggtacccacggtgaaggttatgttccaaaaggatatgattactttgacggcaacaagcacggcgggcatccggctcaggatatttttatcaaagacaaaaaccaagactgcaaagacgatgcaacaggaaagtttgtgaatgttcgctctgtgagcaacggtattgtggttgcattggaaaaacattgggaaaatgcgagttctttgcgcggaggcaagtacatatatatttattccccaaacgacaacgctcttttttattacgctcataataacgaggttcttgtgaatatagggcaagtaatcagtaaaggcgataccattgccaccgtaggtcgcacaggtttgaatgcttttaaaaaaaggtcgccaacacatttgcattttatgaaattggaattggatagtaaattttatcccaagcctgtgaatgtatatgaggatctcaccgacacgcgagacggcnatcttgtgagatattga

SEQ ID NO: 3726 - protein, 232 aa, Unknown
  Obtained from environmental sample
  DOMAIN (93)...(208): Peptidase family M23
  misc_feature (1)..(232): Xaa is any amino acid
MAQEQQIKTLAAQFDSVNTSVRDNKIDKAQALKKFQDILPELQTAYNKLKPNETKNEKWIFPVEGYSSKDIGGTHGEGYVPKGYDYFDGNKHGGHPAQDIFIKDKNQDCKDDATGKFVNVRSVSNGIVVALEKHWENASSLRGGKYIYIYSPNDNALFYYAHNNEVLVNIGQVISKGDTIATVGRTGLNAFKKRSPTHLHFMKLELDSKFYPKPVNVYEDLTDTRDGXLVRY

SEQ ID NO: 3727 - DNA, 483 bp, Unknown
  Obtained from environmental sample
  misc_feature (1)..(483): n is a, c, g, or t
atggaagattacgagcttgactggattgtggggcaggggcctatggcaagaaccctgcgaatccccatccagccttttacgctggtaggggcgactaccaaggcggggattgtctccggcccgcttatcagccgttttggcattacctgccgtttttcgttttatgagcaaccggatatggaagccatagtcaggcgttccgcagggttgctcaaaattaaaattgacaatgatgccgccgcattgctggcaaaatcctcaaggggaactccccgggttgtaaaccggctgctcaggcgtttgagggattttgcccagtactcaggcagcgccaatattacgttaaccgttgtgaaagatgggttaacaaagcttgaaatagacgtgctagggcttgaaaagcangatagagacatactacgcatcataatcgaaacgtatcagggcgggccggttggcgcaaagacccttgcatatccatag

SEQ ID NO: 3728 - protein, 160 aa, Unknown
  Obtained from environmental sample
  DOMAIN (124)...(160): Holliday junction DNA helicase ruvB C-terminus
  misc_feature (1)..(160): Xaa is any amino acid
MEDYELDWIVGQGPMARTLRIPIQPFTLVGATTKAGIVSGPLISRFGITCRFSFYEQPDMEAIVRRSAGLLKIKIDNDAAALLAKSSRGTPRVVNRLLRRLRDFAQYSGSANITLTVVKDGLTKLEIDVLGLEKXDRDILRIIIETYQGGPVGAKTLAYP

SEQ ID NO: 3729 - DNA, 303 bp, Unknown
  Obtained from environmental sample
  misc_feature (1)..(303): n is a, c, g, or t
ttgatacaatgggcgaaaggagtttttaatagatgctgctgttttccaggttcaagcggttcacctgtattaatcataaatgatagtcctcggattgaaaaagaaggagtacttagtttaggttcaataagactttttttgatgggtactttatatgcaggtccgcaatatacatcaaaaggcgatattcatattgtgaaaatacctacatcaagcaaggctattgtattgacagacattcctaacaatctcggttttgttataaagtcggagaggataagggaattagagttactcttttaa

SEQ ID NO: 3730 - protein, 100 aa, Unknown
  Obtained from environmental sample
  misc_feature (1)..(100): Xaa is any amino acid
MIQWAKGVFNRCCCFPGSSGSPVLIINDSPRIEKEGVLSLGSIRLFLMGTLYAGPQYTSKGDIHIVKIPTSSKAIVLTDIPNNLGFVIKSERIRELELLF

SEQ ID NO: 3731 - DNA, 516 bp, Unknown
  Obtained from environmental sample
  misc_feature (1)..(516): n is a, c, g, or t
gtgaactctcagctagtattaaaaccaacttcccatttcaatggcgaaattaaagttcctggttcaaaaagcatttccaatagggtattgttgatgggagctttggcagaaggggaaagcaaattcattggaattttggaaagcgaagataccagatatatgagagaggcacttgaaaaacttggcaaaaatttttcaaacgaaaaagcggaattatttttaggcaatgcaggaacagctatgcgttctttaacggctgcgctgtgcttgaaaaacggcgaatacattttacgtggcgaacctagaatgcacgagaggcccatagaagatttagtggatgctttgagaacgctgggtgcaaatattgagtatttgggaaacgatggttgcccgcctttgaaaataagggcaaatggattaagtgggggagttgttcatataaaaggaaatatatccagccagtttttatctgccttattgattgccgctccgtattgcagagagccttggaaataa

SEQ ID NO: 3732 - protein, 171 aa, Unknown
  Obtained from environmental sample
  DOMAIN (7)...(170): EPSP synthase (3-phosphoshikimate 1-carboxyvinyltransferase)
  misc_feature (1)..(171): Xaa is any amino acid
MNSQLVLKPTSHFNGEIKVPGSKSISNRVLLMGALAEGESKFIGILESEDTRYMREALEKLGKNFSNEKAELFLGNAGTAMRSLTAALCLKNGEYILRGEPRMHERPIEDLVDALRTLGANIEYLGNDGCPPLKIRANGLSGGVVHIKGNISSQFLSALLIAAPYCREPWK

SEQ ID NO: 3733 - DNA, 417 bp, Unknown
  Obtained from environmental sample
  misc_feature (1)..(417): n is a, c, g, or t
gtgtttcaagattcaaatttgcttggcgatagaaccgttgcagaaaatgttgctctttcgcttttggtttctagcaatctttcgcaggcagaaataaaaaaacaggttttggaaactcttagcacagttgggattttgcaaaagaaaaattctttgccagcagaactctctggcggtgagcagcagagggtagccattgcaagggcaatgatacacagcccatatcttttgattgcagacgaaccaacaggtaacctagacccagaaaatgcgagcgaggtttttaggatttttcaaaaaataaatgcaagcggaacagcggtgataatggcaacccacaatccaacattctatcaaaacacgccatacagacatttgattatgaaacaaggaattttgcaaagggaaattttgtga

SEQ ID NO: 3734 - protein, 138 aa, Unknown
  Obtained from environmental sample
  DOMAIN (2)...(131): ABC transporter
  misc_feature (1)..(138): Xaa is any amino acid
MFQDSNLLGDRTVAENVALSLLVSSNLSQAEIKKQVLETLSTVGILQKKNSLPAELSGGEQQRVAIARAMIHSPYLLIADEPTGNLDPENASEVFRIFQKINASGTAVIMATHNPTFYQNTPYRHLIMKQGILQREIL

SEQ ID NO: 3735 - DNA, 579 bp, Unknown
  Obtained from environmental sample
  misc_feature (1)..(579): n is a, c, g, or t
gtggggtggtttttttttttttttnnnnnnntncccnnnnnccccccccccccccccccccccccacaacccccaaaanannnnnntntttttttttatgggggttggggggggggggggggggggggggggtgtttttttttcccccccccccccccccgggggggggggggggggggccccccccaaataaatttttgtgggggggcgcgcccaccccccaaaaaaaaaaaaaaannnngggaagggggggtttttttttttttttttttttggggggggtgtgtgtgtttttttccacccccaaaaaaaaaaaaaaattgtgggggggggggggtgtttttttttttaaaaaaaaaaaaaccccccccccccccccttctatattgtgggtgggggggggggggggaacctcttttaaagaagaggggcgcggttttttttttttttttacccccccccccaaaaaaaaaaaaacccggggaaaaattgggggtttttaatttccaaagtcaaaaccttcgggaaaatccctcgcgtaatgggaatcaatcncccaacggatttatagcaggataa

SEQ ID NO: 3736 - protein, 192 aa, Unknown
  Obtained from environmental sample
  misc_feature (1)..(192): Xaa is any amino acid
MGWFFFFFXXXPXXPPPPPPPPQPPKXXXXFFYGGWGGGGGGGGCFFFPPPPPRGGGGGGPPQINFCGGARPPPKKKKKXXEGGVFFFFFFWGGCVCFFPPPKKKKNCGGGGVFFFLKKKKPPPPPLLYCGWGGGGEPLLKKRGAVFFFFLPPPPKKKKPGEKLGVFNFQSQNLRENPSRNGNQSPNGFIAG

SEQ ID NO: 3737 - DNA, 498 bp, Unknown
  Obtained from environmental sample
  misc_feature (1)..(498): n is a, c, g, or t
gtggtttttttttttttttnnnnnnntncccnnnnnccccccccccccccccccccccccacaacccccaaaanannnnnntntttttttttatgggggttggggggggggggggggggggggggggtgtttttttttcccccccccccccccccgggggggggggggggggggccccccccaaataaatttttgtgggggggcgcgcccaccccccaaaaaaaaaaaaaaannnngggaagggggggtttttttttttttttttttttggggggggtgtgtgtgtttttttccacccccaaaaaaaaaaaaaaattgtgggggggggggggtgtttttttttttaaaaaaaaaaaaaccccccccccccccccttctatattgtgggtgggggggggggggggaacctcttttaaagaagaggggcgcggttttttttttttttttacccccccccccaaaaaaaaaaaaacccggggaaaaattgggggtttttaa

SEQ ID NO: 3738 - protein, 165 aa, Unknown
  Obtained from environmental sample
  misc_feature (1)..(165): Xaa is any amino acid
MVFFFFXXXXXXPPPPPPPPTTPKXXXXFFLWGLGGGGGGGGVFFFPPPPPPGGGGGGPPPNKFLWGGAPTPQKKKKXXGRGGFFFFFFLGGVCVFFSTPKKKKKLWGGGGVFFFKKKKTPPPPPSILWVGGGGGTSFKEEGRGFFFFFTPPPKKKKTRGKIGGF

SEQ ID NO: 3739 - DNA, 501 bp, Unknown
  Obtained from environmental sample
  misc_feature (1)..(501): n is a, c, g, or t
ttgggggggggggtaaaaaaaaaaaaaaaaccgcgcccctcttctttaaaagaggttcccccccccccccccacccacaatatagaaggggggggggggggggtttttttttttttaaaaaaaaaaacacccccccccccccacaatttttttttttttttgggggtggaaaaaaacacacacaccccccccaaaaaaaaaaaaaaaaaaaaacccccccttcccnnnntttttttttttttttggggggtgggcgcgcccccccacaaaaatttatttggggggggcccccccccccccccccccgggggggggggggggggaaaaaaaaacaccccccccccccccccccccccccccaacccccataaaaaaaaanannnnnntnttttgggggttgtggggggggggggggggggggggggnnnnngggnannnnnnnaaaaaaaaaaaaaaaccaccccaccccccccccccccccnnnnggagggggtggtgtag

SEQ ID NO: 3740 - protein, 166 aa, Unknown
  Obtained from environmental sample
  misc_feature (1)..(166): Xaa is any amino acid
MGGGVKKKKKPRPSSLKEVPPPPPTHNIEGGGGGVFFFLKKKTPPPPHNFFFFLGVEKNTHTPPKKKKKKKPPLPXXFFFFWGVGAPPHKNLFGGGPPPPPPGGGGGGKKNTPPPPPPPPNPHKKKXXXXLGVVGGGGGGGGXXXXXXKKKKTTPPPPPPXXEGVV

SEQ ID NO: 3741 - DNA, 720 bp, Unknown
  Obtained from environmental sample
  misc_feature (1)..(720): n is a, c, g, or t
atgacaaacatatcagctaaggatttaggtcacaaagaacttaacacactgatcagggcagccggggaagacattagcattgaagactgttttgggcaaagatttatcggcagcggcatgagcggaaaaaaaataacgataaacggaacaccggggaacgcgatgggcgcatattttaacggtggaaccattacggtaaacggcaacgcgcaggacgctgtcggcgatacaatgaacgacggcaagatcatcatccacggcaacgcgggggacgcgcttggctacgccatgcgaggcggcaaaatatttgtcaaaggcaatgccgggtacaggacaggcattctcatgaaagagtacaaggagaaaaaacctgtcatcgttatcggcggcaaaacgggcagtttcctgggcgaatacctcgccggggggctgatcatcgtgcttggtatcggttcggaagaagcccctgtctattactttacggggaccggaatgcacggcgggcaaatctttatccggacgaccaaggatctcctgggcctgcccgcgcaggttaccctgacagatgtcagggcggaagacctaaacgaaattaagccctacgtttccgaattcgcggaatatttcggtatggacgcggaatcacttttaaaagacaatttccatttattaaagccaaacgccaggaacccatacaaacaactatatacaacaaattga

SEQ ID NO: 3742 - protein, 239 aa, Unknown
  Obtained from environmental sample
  DOMAIN (2)...(211): GXGXG motif
  misc_feature (1)..(239): Xaa is any amino acid
MTNISAKDLGHKELNTLIRAAGEDISIEDCFGQRFIGSGMSGKKITINGTPGNAMGAYFNGGTITVNGNAQDAVGDTMNDGKIIIHGNAGDALGYAMRGGKIFVKGNAGYRTGILMKEYKEKKPVIVIGGKTGSFLGEYLAGGLIIVLGIGSEEAPVYYFTGTGMHGGQIFIRTTKDLLGLPAQVTLTDVRAEDLNEIKPYVSEFAEYFGMDAESLLKDNFHLLKPNARNPYKQLYTTN

SEQ ID NO: 3743 - DNA, 690 bp, Unknown
  Obtained from environmental sample
  misc_feature (1)..(690): n is a, c, g, or t
atgtgctgccccatgttacagattncccggttcatgaaagaagattaccgcgaatggctaaagccggaatacggaaaaaagagggcttccgaaattggagaaaaagcctgcatgcccaggcctttgcatctaccaaaggaaggcacggtttatctcgccactgccgacggcgatggaaacatggtctcgtacatacaaagcaattacatgggctttggcagcggcgttgtaatccgtggaacaggcatttcccttcaaaaccggggggcggacttttcccttgatgccagtgctcctaacgcgctggctccgggcaaaaagagctaccacactatcatacccggttttcttaccaaagacgggaaagccgttggcccctttggggtcatgggagcatatatgcagccccaagggcatgtccaggtgataaccaatatgctggattttggccttaacccccaacaggctctggatgccccacgctggcagtgggtcgaaggccggaaaattcaagtggaaccgggctttaattccgaaattgtccatgcccttgcaaaccgggggcacgaggtaagcgtttcccttcagacatcaagcttcggcagggggcaatgcatcgtccgtctggataacggtgtactcgtgggcgctactgaaggacgtacggatgggaatattgcgtgtgtgtaa

SEQ ID NO: 3744 - protein, 229 aa, Unknown
  Obtained from environmental sample
  DOMAIN (1)...(224): Gamma-glutamyltranspeptidase
  misc_feature (1)..(229): Xaa is any amino acid
MCCPMLQIXRFMKEDYREWLKPEYGKKRASEIGEKACMPRPLHLPKEGTVYLATADGDGNMVSYIQSNYMGFGSGVVIRGTGISLQNRGADFSLDASAPNALAPGKKSYHTIIPGFLTKDGKAVGPFGVMGAYMQPQGHVQVITNMLDFGLNPQQALDAPRWQWVEGRKIQVEPGFNSEIVHALANRGHEVSVSLQTSSFGRGQCIVRLDNGVLVGATEGRTDGNIACV

SEQ ID NO: 3745 - DNA, 933 bp, Unknown
  Obtained from environmental sample
  misc_feature (1)..(933): n is a, c, g, or t
atgtattcttccttatactacaataacgcgggaaaaatcgcgggtagtgaagacggtattgcctactattttaaagaagttgacaaagataaaaatttcaggataagcgcggatttctatattaacaattacgggttcacgggaggcaggcccgatctgaacggacaggaagcgtttggcataatggcccgtgactatgttccgcagtatgacattgataccggcaactatacaatggaagctttaaagacggtgcggtgggacggccgttattatacaggttataaccgtcctgacggccccggcggttcgggaaacatgataatggtcggcggggttaaacgcggggcgcgagtatactggcggacaggcgtagatgatccaagtgaagataatgaagccattaccaatcccaactatgtggcacgcgcggactttgcgaaattttattttctgcccagggaatttgccgactactcgatgtacggatccggtaaggatggcatacaaagccgcccggattttccaagcgcggggttgacttacaggttaagtcttgaaaaaacaaattccggttttaaggcgaagattacgccgcctgcgggagtcgggaaaggaacaaccaaagaccgtatcccaaaagacgggcaggtgctggaatacagcgacagggaactgccctttcctgatctgttattcgaaatcaacaaagaaaaatattatgtcggcttttttgcggcgcgtgacgcgcgggtaaccatcaccaatatcagttatgaagaatctgacgcggcattatgccctaagcgcgtagatccgccacctacaaatattgtaccgtctttcgaggtgcagtctcctttcgcggtttccctgccgacgtatactcttatagcccgttccatgttgaaagttccctccttgtcagcatga

SEQ ID NO: 3746 - protein, 310 aa, Unknown
  Obtained from environmental sample
  misc_feature (1)..(310): Xaa is any amino acid
MYSSLYYNNAGKIAGSEDGIAYYFKEVDKDKNFRISADFYINNYGFTGGRPDLNGQEAFGIMARDYVPQYDIDTGNYTMEALKTVRWDGRYYTGYNRPDGPGGSGNMIMVGGVKRGARVYWRTGVDDPSEDNEAITNPNYVARADFAKFYFLPREFADYSMYGSGKDGIQSRPDFPSAGLTYRLSLEKTNSGFKAKITPPAGVGKGTTKDRIPKDGQVLEYSDRELPFPDLLFEINKEKYYVGFFAARDARVTITNISYEESDAALCPKRVDPPPTNIVPSFEVQSPFAVSLPTYTLIARSMLKVPSLSA

SEQ ID NO: 3747 - DNA, 726 bp, Unknown
  Obtained from environmental sample
  misc_feature (1)..(726): n is a, c, g, or t
gtgtttctggctacggagtcggccatatacaacagcctgctgaaagaggccgccgccctcgacgcacagccggccaagataaggtttgaccactctgccctgccccccgaacagcggatagccttcttcaccggcgacaacagccgcgtcacgggtgcggcctccattgacaaactgaccttcacctatggcagggaaggccaaaaagaggagcatctcctagtcagtgtcatcaccgacagcggagctgaaatagatgccaagacattcgaccgcatgatggaattgcccgcccaaatagttggcccagcggtgcccgacccgcgcttggaaaacacacgggcggagaaccaggcacgaaggcgggacgaaattgacgaggccaacaaaaagagcctcatccagcgcttcatggagttgcatgcctggcgcaacgactgcgaggatgccttacaccgcgagttggaagacctccaggtcaccatacagttgaagaagggccagatgagcgcgaacgtcggcgccctctcctttcaggacatactggacatcaacgccgagataaacaggcttacggaagagaaagaccaaaagcagcgccagatgctgcagcgcaaggacgccataaggaaaagcgccgccgatttgcaggaggaggctttcaggcagttgaacggtcgggccgacgtagagaacataatggcgttttcattcgagatcgcgtag

SEQ ID NO: 3748 - protein, 241 aa, Unknown
  Obtained from environmental sample
  misc_feature (1)..(241): Xaa is any amino acid
MFLATESAIYNSLLKEAAALDAQPAKIRFDHSALPPEQRIAFFTGDNSRVTGAASIDKLTFTYGREGQKEEHLLVSVITDSGAEIDAKTFDRMMELPAQIVGPAVPDPRLENTRAENQARRRDEIDEANKKSLIQRFMELHAWRNDCEDALHRELEDLQVTIQLKKGQMSANVGALSFQDILDINAEINRLTEEKDQKQRQMLQRKDAIRKSAADLQEEAFRQLNGRADVENIMAFSFEIA

SEQ ID NO: 3749 - DNA, 960 bp, Unknown
  Obtained from environmental sample
  misc_feature (1)..(960): n is a, c, g, or t
atgctcggcaaagagcacctaagcactgctatggcttataaaaatattgcaagtgtttttgaaagccagggaaagtaccccaaggctcttgagttataccagagagttatagaaatccgcgagaaagcgctgggcaaagagcacccggacaccgccgccgcttataataatattgcaggtgtctacgaaagccagggaaagtaccctaaggctcttgagttataccagagagttttagaaatccataagaaagcgctgggcaaagagcacccggacaccgccagtacttataacaacattgcatttgtctaccataatcagggagagtacccaaaagctctggtatggttccggaaagccttagagatccgtgagaaaatactgggcaaaaaacatcttgataccgccgccagttataacaacattgcgactgtctgcaatgatcaaggagattatccaaatgcgttgaaatggtacaagaaggctatgggtatctttgaaataaaactgagcaaggaacacccggacacggcaatcatttacaacaacatggggcttgtctgcaataattttggagaatacgcaaaggcactggaatggttccagaaagctttacaagtccgtgaaaaagtactgggcaaaaaacacccggacaccgcaatcacatacaacaatattgcaggtgtttacaatagccaagaaaattacccaatagcgcttaaattgtataagaaagctttatctatcggcataaaagtactgggcgaagaacaccctttcaccgccaccatttataacaatattgctattgcctatgataaccaaaaagaatacgcaaaggcactggaatggttccagaaagcattagaaatccgtgataaagtgctgggcaggaaacacccgnataccgtctccacttataaaagtattattagcgtttgcataaaaacagtatcctaa

SEQ ID NO: 3750 - protein, 319 aa, Unknown
  Obtained from environmental sample
  DOMAIN (10)...(43): Tetratricopeptide repeat
  misc_feature (1)..(319): Xaa is any amino acid
MLGKEHLSTAMAYKNIASVFESQGKYPKALELYQRVIEIREKALGKEHPDTAAAYNNIAGVYESQGKYPKALELYQRVLEIHKKALGKEHPDTASTYNNIAFVYHNQGEYPKALVWFRKALEIREKILGKKHLDTAASYNNIATVCNDQGDYPNALKWYKKAMGIFEIKLSKEHPDTAIIYNNMGLVCNNFGEYAKALEWFQKALQVREKVLGKKHPDTAITYNNIAGVYNSQENYPIALKLYKKALSIGIKVLGEEHPFTATIYNNIAIAYDNQKEYAKALEWFQKALEIRDKVLGRKHPXTVSTYKSIISVCIKTVS

SEQ ID NO: 3751 - DNA, 714 bp, Unknown
  Obtained from environmental sample
  misc_feature (1)..(714): n is a, c, g, or t
atggataatttgcttgaccttatgatctgccgcattcccggactcaaagccaatgaacgcgtagaattggtaaagaaatttgacaaggaagatgatttttcgatactgggaataagggatattgaaaatcttgtaggaagggttttggaaaaagcccccaataaaattaaaatgtcagatatccattcgattacgatgaacgatattcgttcaatggcggaaaaggacgcggaaaaggccaaaaagcttggcatccgcattgtgtcctggcgcgaggagagttatccgcctttgcttcgcgagatatacgattccccggcgctgttgttttaccgcggcgttcttcccaatccggttaagcccctggttgcggtggtgggaaccagaaggccgtcttcgcagggggcaaagcgggcctttgatattagctgggaacttggcaaggccggtatccctgttgtgtcggggcttgcgttgggcattgactcaatggcccatcgtggaaacatagaagccggatcgcctacggttgccgtacttggttcaagccccgacatgctttaccctgcttctaaccgccttcttgcaaagcgtattttggatacaggcggcgttattctttcggagtacccgccgggaacaagcccccggaaatggaattttcccgagcgtaccggattatatcgggtcttgcgcgtgggaccgttattgtag

SEQ ID NO: 3752 - protein, 237 aa, Unknown
  Obtained from environmental sample
  DOMAIN (79)...(237): SMF family
  misc_feature (1)..(237): Xaa is any amino acid
MDNLLDLMICRIPGLKANERVELVKKFDKEDDFSILGIRDIENLVGRVLEKAPNKIKMSDIHSITMNDIRSMAEKDAEKAKKLGIRIVSWREESYPPLLREIYDSPALLFYRGVLPNPVKPLVAVVGTRRPSSQGAKRAFDISWELGKAGIPVVSGLALGIDSMAHRGNIEAGSPTVAVLGSSPDMLYPASNRLLAKRILDTGGVILSEYPPGTSPRKWNFPERTGLYRVLRVGPLL

SEQ ID NO: 3753 - DNA, 858 bp, Unknown
  Obtained from environmental sample
  misc_feature (1)..(858): n is a, c, g, or t
ttgttcccctgcatgttttttacaatgggcggcagcaacagcgtaataatggtttattttgttttaagcatttcagtggtgttttttcttgcctgggggaaaagccttctgttttttcttgtcagccacctcgcaataattttcttatgctactatctggatttcctgaatctatttccatcttacttattgcaaaacagcgagttaacgcttttcgatcaaattttttcttttttactgacaggtatttgtatcggggtaatgattatctttcaaaagcgtatctatgttctggataaaaaaaagactgatctggcgaaggaattattggggaccaagaacaagcttttggagatggtagcagccacttcggaaatactccttacttcagaagcgagcaatctggaaaaaacccttatggaagccatggaactcatggctaattgtgttgacattgatcgtatgtatatatggaaaaatcggttttatggcaggatacttatatatgaacagcagtatgaatggttaaaagacaggaacgataaaaaaacaccccgcgctgaacctcaatatttttacagggatacgcttccggaatgggaaggccgcctatccgcaggcatgtatgtaaacggccctgtcagttccattccggaaaaagagcaaaaatttttttccgcttttggcatccgctccatattgatcattcctgtattcctgcaggaaaatttttggggctttgtcagttttgacgattttaagcaggaaagaactttttcggacgaagaaagcagcattctccgttcgggctgcctgctgctggncaacgcgaccgtccggtatcataatcaaaattaa

SEQ ID NO: 3754 - protein, 285 aa, Unknown
  Obtained from environmental sample
  DOMAIN (134)...(278): GAF domain
  misc_feature (1)..(285): Xaa is any amino acid
MFPCMFFTMGGSNSVIMVYFVLSISVVFFLAWGKSLLFFLVSHLAIIFLCYYLDFLNLFPSYLLQNSELTLFDQIFSFLLTGICIGVMIIFQKRIYVLDKKKTDLAKELLGTKNKLLEMVAATSEILLTSEASNLEKTLMEAMELMANCVDIDRMYIWKNRFYGRILIYEQQYEWLKDRNDKKTPRAEPQYFYRDTLPEWEGRLSAGMYVNGPVSSIPEKEQKFFSAFGIRSILIIPVFLQENFWGFVSFDDFKQERTFSDEESSILRSGCLLLXNATVRYHNQN

SEQ ID NO: 3755 - DNA, 951 bp, Unknown
  Obtained from environmental sample
  misc_feature (1)..(951): n is a, c, g, or t
atgacagattggccgagcttcgatatgatgatatgtccttttcatccgngcactaccggctatcccaaaatggtagcgcatgattacacctacgcgctgggtcacttagggacgggcgtattctggcaccgggtggaaaaaggcggcctgcattttaccatttccgacaccggatggctcaagtcgctgtggggcaaaatgtacgggcaatggctgggggaatgtgccgtattgacatacgactttgaaaaatttaacgcgcacgatattttaaaagttctcgaaaaatatcacgttaccagtttctgtgcgccgccaaccatgtaccgaatgataatgaacgaagacgtggccgcgtttaacctttcaagcctcaagcactgcacagccgcaggcgaggccttgggccaggatctgtttgataaatggaaaaaaatgactgggcttaccatatacgaaggtttcgggcagacggaaacgaccctatgctgcggcacgctgtacccctttaccgaaccgcagcccagttccatgggcaagcccgtgccgatgtacgatattatgctggccgatgccgaaggcaaccgggtacccacgggcgcaacaggggaaatctgcattaaatcaacgcatgaaaaccgcacaaaaggcctgtttatcggttattacaaaaacaaggaagctaccgacagacaatggcatgacggatatttccacacgggcgatctggcgtatttcgatgagcagggttatttgtggtacgtgggccggaacgatgatgtgattaaatcgtcaggttaccgcatcgggccttttgaagttgaaagcgtattgctgcagcacccggcggtcggcgaagccgcggtgacaggtgtgcccgatcccatacgaggctttaacgttcaggcgacaatcgtgcttaaaaagaatacgcgccgtctgatacgctga

SEQ ID NO: 3756 - protein, 316 aa, Unknown
  Obtained from environmental sample
  DOMAIN (1)...(289): AMP-binding enzyme
  misc_feature (1)..(316): Xaa is any amino acid
MTDWPSFDMMICPFHPXTTGYPKMVAHDYTYALGHLGTGVFWHRVEKGGLHFTISDTGWLKSLWGKMYGQWLGECAVLTYDFEKFNAHDILKVLEKYHVTSFCAPPTMYRMIMNEDVAAFNLSSLKHCTAAGEALGQDLFDKWKKMTGLTIYEGFGQTETTLCCGTLYPFTEPQPSSMGKPVPMYDIMLADAEGNRVPTGATGEICIKSTHENRTKGLFIGYYKNKEATDRQWHDGYFHTGDLAYFDEQGYLWYVGRNDDVIKSSGYRIGPFEVESVLLQHPAVGEAAVTGVPDPIRGFNVQATIVLKKNTRRLIR

SEQ ID NO: 3757 - DNA, 885 bp, Unknown
  Obtained from environmental sample
  misc_feature (1)..(885): n is a, c, g, or t
ttgcggctcacggatgtttacgatctgaaccttgtctccagcacccgtgagcttgtccatcgtaaaacacagcaaaagccagcctcaggaattgtttacggcgggcttcagtataccgtagacgaagaaagcatgaggcagaatgcccaaccataccatacacccgacgtaaaaattcaagaagaaacagacctgccagataaattacgaaaaagcaatatgcttcaacactgggatatgttaccctgcatggcagaagaaagcatagacataaagaacatcctatcaaaaaacaacatacccgttgatttgtacatgggcgttaaaggcaacaaagaatcgtttaagaatctggatgggaagaaaaaaaacgtgttgcatttgtctactcacggctttttctttggcgacatagaaaaaaattacgaagagtgggaacaactggtgcgtcttggaggcgggccaaaggtctttgaaaatccgttgatgcgttcagggttgatattggctggcggtaacaacgcgtggaaaggcaaaccggtggccggagtggaaaacggcattttatttgcggatgacgtggcgaagatggatctggtgggagcgcagttggtggtgctttccgcctgcgaaaccgccttaggtgaagtaaacaacagcgagggcgtgtttggcttacaacgggcgttcaagctggcaggcgcggagacgttgataatgagcctgtggagcgtaagcgatatggccacgtcagaactgatgaaatcgttttacgagaaatggctttccggaaaaagcaaacaggaagcgttcaaagaggcccagagggagttacgcgcaataccgaaatactcgtcacccttctattgggctgcttttgtatga

SEQ ID NO: 3758 - protein, 294 aa, Unknown
  Obtained from environmental sample
  misc_feature (1)..(294): Xaa is any amino acid
MRLTDVYDLNLVSSTRELVHRKTQQKPASGIVYGGLQYTVDEESMRQNAQPYHTPDVKIQEETDLPDKLRKSNMLQHWDMLPCMAEESIDIKNILSKNNIPVDLYMGVKGNKESFKNLDGKKKNVLHLSTHGFFFGDIEKNYEEWEQLVRLGGGPKVFENPLMRSGLILAGGNNAWKGKPVAGVENGILFADDVAKMDLVGAQLVVLSACETALGEVNNSEGVFGLQRAFKLAGAETLIMSLWSVSDMATSELMKSFYEKWLSGKSKQEAFKEAQRELRAIPKYSSPFYWAAFV

SEQ ID NO: 3759 - DNA, 957 bp, Unknown
  Obtained from environmental sample
  misc_feature (1)..(957): n is a, c, g, or t
ttgatgatttctgccaatagcgtcagaacactccgccgatatagtaataagaattatacgcgggttgtaatgacgcgcaaatttttctttctttngccggcgttgtttctttntgttgcggcttctacttttgctcaaaacgcgcttttcaagccgttcacttcttttcgggttattcaaacagatcattttgaaattatctttccaaaagaatcggaagaatccgcccgtcttttggcttcctacgcggacaacgtatatgatcaaataagctctttgcttgatatcaaggttcgaggacgtattcccgtaactattacgcctcatacggatttgttcaacggttattatactcctatttttaatcatattatgctttttgatacgcctatggatgttgaatggactaattttgaaaataatctaaaaaaacttttccttcatgaattgacccacgcggtttccatgaacacaagatctaagtcttacgatcttaggtatcgtatttttggcagtctatgtactcccgctttatggaacgcgccgcaatttatggtggaaggagttacggtcagttttgaaagccttgacggtacaggcagggcaaatgatccccacactaaacaatatctcaggcaagccgtacatgaaaacaaattccttacgccttttcaggcttccggtgtttatgatcgttcaataagttccggcagcgggtactggtatgaatacggcgggcttttttccgcatggcttcagcaaaattacggaatggaaaaatactcgcagctttggaaggaaatgggaaaagatgggaaattttctttctttgtatacagatcaggtttttacagtatttttaaaaaggtatanncggcgttanattttttggatgaatggaataaattcagcgcttcccttcctctcgtgccgctcggccgatctgatcaatggtaa

SEQ ID NO: 3760 - protein, 318 aa, Unknown
  Obtained from environmental sample
  misc_feature (1)..(318): Xaa is any amino acid
MMISANSVRTLRRYSNKNYTRVVMTRKFFFLXPALFLXVAASTFAQNALFKPFTSFRVIQTDHFEIIFPKESEESARLLASYADNVYDQISSLLDIKVRGRIPVTITPHTDLFNGYYTPIFNHIMLFDTPMDVEWTNFENNLKKLFLHELTHAVSMNTRSKSYDLRYRIFGSLCTPALWNAPQFMVEGVTVSFESLDGTGRANDPHTKQYLRQAVHENKFLTPFQASGVYDRSISSGSGYWYEYGGLFSAWLQQNYGMEKYSQLWKEMGKDGKFSFFVYRSGFYSIFKKVXXALXFLDEWNKFSASLPLVPLGRSDQW

SEQ ID NO: 3761 - DNA, 522 bp, Unknown
  Obtained from environmental sample
  misc_feature (1)..(522): n is a, c, g, or t
atgctgatgggcatgatccgcagtccattaccgtgttgccgaggggaaaacatcgcggatgcgcccgaaccaggcgccgcgcctgtaccggcaggggtgaaaattcctgccgatcaaatcgccctggcgcggatagtagaggattattatcagacagtcgaaatacgcctgaccgatgacggctttgaaccggcaatcgtcgtaatgcaaaaacaattacccgcgctatggaacatcaatgcagcttcccttgattcggaaaacaacacgcttatttttcccgcctattacaccgtactggatataaatcagggaattaacgcaatacagatattgccaaccggcgattttgatttttctaccggggataatgtgttctacggatatgtgaaagtggtagacgatattaacaatgtcgatatagaaataattaaaacggagcttataaattatgagacaatgatataccccgcagcgtattttgaaacaggcggaggaggaggctgcgcctgttgccgttaa

SEQ ID NO: 3762 - protein, 173 aa, Unknown
  Obtained from environmental sample
  misc_feature (1)..(173): Xaa is any amino acid
MLMGMIRSPLPCCRGENIADAPEPGAAPVPAGVKIPADQIALARIVEDYYQTVEIRLTDDGFEPAIVVMQKQLPALWNINAASLDSENNTLIFPAYYTVLDINQGINAIQILPTGDFDFSTGDNVFYGYVKVVDDINNVDIEIIKTELINYETMIYPAAYFETGGGGGCACCR

SEQ ID NO: 3763 - DNA, 321 bp, Unknown
  Obtained from environmental sample
  misc_feature (1)..(321): n is a, c, g, or t
ttgcacttgggttcaatctgcaaaacnnggccgtttgacattcgtagggctccgccttttttgaaaatctattcacttttggaaaatccggtatcaatcccagaggggaaaaattacatggattacgtggataaagattcccttatagtaaaacacgcaaaagcggaaccgttgctctcaaacgttaaaccttacgataggttccagtttttgaggcacggctatttctgcgtggactccaaagatacgcaaaagcctgtgttcaaccgcatagttggtttaaaggatacctggggtaagctccaggctgccggaggctag

SEQ ID NO: 3764 - protein, 106 aa, Unknown
  Obtained from environmental sample
  misc_feature (1)..(106): Xaa is any amino acid
MHLGSICKTXPFDIRRAPPFLKIYSLLENPVSIPEGKNYMDYVDKDSLIVKHAKAEPLLSNVKPYDRFQFLRHGYFCVDSKDTQKPVFNRIVGLKDTWGKLQAAGG

SEQ ID NO: 3765 - DNA, 675 bp, Unknown
  Obtained from environmental sample
  misc_feature (1)..(675): n is a, c, g, or t
ttgcttccggtaacccaaacttatagtacggtagatggagttttgtacaataaaaaccgtaccgctttgatccaatggccggcaggaaaaacaggtaaagtaaccattccctcaagcgttacctccattggggaaggggcgtttgctggaaaccaactgaccaacgtcaccatccctaacagcgttacctccattggggattatgcgtttgcggcgaaccgactgaccagcgttaccattcctaacagcgttacctccattggggagggagcgtttaggagcaaccaactgaccagcgtcaccattcctagcagtgttacctccattggatatcgggcgtttaacggcaaccaactgaccaacgtcaccatccctaacagcgttacctccattggggaggaggcgtttgctggaaaccaactgaccagcgtcaccatccctaacagcgttacctccattggggaggaggcgtttgctggaaaccaactgaccagcgtcaccattcctaacagcgttacctccatcggcggctatgcgttttacggcaaccaactgactagggttaccattcctagcagcgttacctccattggggaggaggcgtttggcgacaattttacttttagagggccgggaacctacacctaccgtaacggcaactggcaaaaacaatga

SEQ ID NO: 3766 - protein, 224 aa, Unknown
  Obtained from environmental sample
  misc_feature (1)..(224): Xaa is any amino acid
MLPVTQTYSTVDGVLYNKNRTALIQWPAGKTGKVTIPSSVTSIGEGAFAGNQLTNVTIPNSVTSIGDYAFAANRLTSVTIPNSVTSIGEGAFRSNQLTSVTIPSSVTSIGYRAFNGNQLTNVTIPNSVTSIGEEAFAGNQLTSVTIPNSVTSIGEEAFAGNQLTSVTIPNSVTSIGGYAFYGNQLTRVTIPSSVTSIGEEAFGDNFTFRGPGTYTYRNGNWQKQ

SEQ ID NO: 3767 - DNA, 561 bp, Unknown
  Obtained from environmental sample
  misc_feature (1)..(561): n is a, c, g, or t
ttgtttttgccagttgccgttacggtaggtgtaggttcccggccctctaaaagtaaaattgtcgccaaacgcctcctccccaatggaggtaacgctgctaggaatggtaaccctagtcagttggttgccgtaaaacgcatagccgccgatggaggtaacgctgttaggaatggtgacgctggtcagttggtttccagcaaacgcctcctccccaatggaggtaacgctgttagggatggtgacgctggtcagttggtttccagcaaacgcctcctccccaatggaggtaacgctgttagggatggtgacgttggtcagttggttgccgttaaacgcccgatatccaatggaggtaacactgctaggaatggtgacgctggtcagttggttgctcctaaacgctccctccccaatggaggtaacgctgttaggaatggtaacgctggtcagtcggttcgccgcaaacgcataatccccaatggaggtaacgctgttagggatggtgacgttggtcagttggtttccagcaaacgccccttccccaatggaggtaacgcttga

SEQ ID NO: 3768 - protein, 186 aa, Unknown
  Obtained from environmental sample
  misc_feature (1)..(186): Xaa is any amino acid
MFLPVAVTVGVGSRPSKSKIVAKRLLPNGGNAARNGNPSQLVAVKRIAADGGNAVRNGDAGQLVSSKRLLPNGGNAVRDGDAGQLVSSKRLLPNGGNAVRDGDVGQLVAVKRPISNGGNTARNGDAGQLVAPKRSLPNGGNAVRNGNAGQSVRRKRIIPNGGNAVRDGDVGQLVSSKRPFPNGGNA

SEQ ID NO: 3769 - DNA, 909 bp, Unknown
  Obtained from environmental sample
  misc_feature (1)..(909): n is a, c, g, or t
atgcttacccacgtcttcctgacaaccattggcgttgaacttccgggaaaattcccccggctgacttatgaggaagcgatagaaaactacggcacggacaaaccagacctgcgctttgaaatgctcctgcaggatttttctccatacgttgaggcgggcggttttcaggccttcaaggacgctctttcccaaaaaacaggcgccgtaaaggcgcttgtggtaaagggacaggccggctattcccgcaaacagattgaggaactggaagcccacgcgaagatttacaaagccaaaggcatggcctggatgaaagttacagctaacaacgcgcttgaaggccggggccccaccctggagggcggggtaagcaagttctttacagataacgccgcgcagataatcagcgggcttggcgccgcccagggggatctgatcctcatagtagcggatacccagcggcgtattgccaacaccgcccttggcgcggtacgctccaggcttggaaaggatcttaatctttgcgatccgaaagattttaaatttgtatggatagttgacttccccctgtttgaattcaacgaggaggagaacaaatgggaggcggcgcaccaccttttcagctggcctcaggaaaagtaccacgcgacgctggaaagcgacccgggttccgtaaaaggagatttgtacgaccttgtcctcaacggctatgagattgcgtccggttccattcgtattcacgatccggcgctgcagcagagggtcttcagcatagccggatttgatcccgcggaagcggaaaaacgcttcggctttttaccggcgcgttncaatacggcgcgcccccccacggcggcatcgcgcccgggctggacaggcttgntatgctcatgtccgggcagacttcgataa

SEQ ID NO: 3770 - protein, 302 aa, Unknown
  Obtained from environmental sample
  DOMAIN (1)...(277): tRNA synthetases class II (D, K and N)
  misc_feature (1)..(302): Xaa is any amino acid
MLTHVFLTTIGVELPGKFPRLTYEEAIENYGTDKPDLRFEMLLQDFSPYVEAGGFQAFKDALSQKTGAVKALVVKGQAGYSRKQIEELEAHAKIYKAKGMAWMKVTANNALEGRGPTLEGGVSKFFTDNAAQIISGLGAAQGDLILIVADTQRRIANTALGAVRSRLGKDLNLCDPKDFKFVWIVDFPLFEFNEEENKWEAAHHLFSWPQEKYHATLESDPGSVKGDLYDLVLNGYEIASGSIRIHDPALQQRVFSIAGFDPAEAEKRFGFLPARXNTARPPTAASRPGWTGLXCSCPGRLR

SEQ ID NO: 3771 - DNA, 567 bp, Unknown
  Obtained from environmental sample
  misc_feature (1)..(567): n is a, c, g, or t
atgatgagcgataaagttatccatacttccgatacaaaaaccctgataaaaaacaacatcagaaattattcgatgtttatcatgctggcgttaataatgctgattttcgccccgctgaccaacggaaacaactggaatccgcgcaattttaccaatattttctttcaaaacagctatgtactcattctggcaataggtatggttcaggtaataatcgtacaggggattgacctttcagtaggttcggtctgcgcctttgtaggcgcgctcagcgcgatgatctacaataccggcgttggaatgcctgtcgcgctactggccgctcttgccatgggcgttggcatcggcgcttttcagggagcatgggtcgcctacgcaagaatgcccgcgtttatcgtaacccttgcaggaatgttgcttttccggggccttacctacattgttaccaaagttaatccaatcggcctcaaggataccggttattcccatctttccaccggaaccctggatgaagtgttccgtaccagcagaattggccctttttcccatggcttgtactgtcgataa

SEQ ID NO: 3772 - protein, 188 aa, Unknown
  Obtained from environmental sample
  misc_feature (1)..(188): Xaa is any amino acid
MMSDKVIHTSDTKTLIKNNIRNYSMFIMLALIMLIFAPLTNGNNWNPRNFTNIFFQNSYVLILAIGMVQVIIVQGIDLSVGSVCAFVGALSAMIYNTGVGMPVALLAALAMGVGIGAFQGAWVAYARMPAFIVTLAGMLLFRGLTYIVTKVNPIGLKDTGYSHLSTGTLDEVFRTSRIGPFSHGLYCR

SEQ ID NO: 3773 - DNA, 408 bp, Unknown
  Obtained from environmental sample
  misc_feature (1)..(408): n is a, c, g, or t
atgttgttttttatcagggtttttgtatcggaagtatggataactttatcgctcatcatttcctcctcatccgaccagcgccagatgcattattttttcctgggtcgcctcttccttgttaagcaccccttttatcttaccttcgttcattacataaatacgatccgccatacccaacgcttcgggaagctcggaactgatcataatcacgctcttgccggcggcgatcatgttgttcagaatcccgtaaatttctgttttggccccgacatcaatgcctctggtcggctcgtcaacgataaaaatttccggatccgccagaaggcttttgcttactacaactttctgctggttgccgccggagaaggtacgcacaagctgatttatggaaggcgttcttatgtttag

SEQ ID NO: 3774 - protein, 135 aa, Unknown
  Obtained from environmental sample
  misc_feature (1)..(135): Xaa is any amino acid
MLFFIRVFVSEVWITLSLIISSSSDQRQMHYFFLGRLFLVKHPFYLTFVHYINTIRHTQRFGKLGTDHNHALAGGDHVVQNPVNFCFGPDINASGRLVNDKNFRIRQKAFAYYNFLLVAAGEGTHKLIYGRRSYV

SEQ ID NO: 3775 - DNA, 309 bp, Unknown
  Obtained from environmental sample
  misc_feature (1)..(309): n is a, c, g, or t
gtgcgtaccttctccggcggcaaccagcagaaagttgtagtaagcaaaagccttctggcggatccggaaatttttatcgttgacgagccgaccagaggcattgatgtcggggccaaaacagaaatttacgggattctgaacaacatgatcgccgccggcaagagcgtgattatgatcagttccgagcttcccgaagcgttgggtatggcggatcgtatttatgtaatgaacgaaggtaagataaaaggggtgcttaacaaggaagaggcgacccaggaaaaaataatgcatctggcgctggtcggatga

SEQ ID NO: 3776 - protein, 102 aa, Unknown
  Obtained from environmental sample
  misc_feature (1)..(102): Xaa is any amino acid
MRTFSGGNQQKVVVSKSLLADPEIFIVDEPTRGIDVGAKTEIYGILNNMIAAGKSVIMISSELPEALGMADRIYVMNEGKIKGVLNKEEATQEKIMHLALVG

SEQ ID NO: 3777 - DNA, 579 bp, Unknown
  Obtained from environmental sample
  misc_feature (1)..(579): n is a, c, g, or t
atggatgttctgaatccctacattgacaagggtgtactcagagtcgttggcccctatcccaaacactacacagataccgccaacttccagcgtgttgccactgaaaactggcaggctcccatcgccaaagcccgtatggagaacctcctgaatggcgacgcccgcaatgttaccctggatgcggtactggcccccaatgacacactggccagggccatcatcgaagcctgcaaagccgacgccaaatatcggaccaaactgccggtagttaccgggcaggacgctgaatttgaatccgccttatcaataaagaatggcgaacagaccagcactgttttcaaagacaccgcaaaacttgccgaagctgccataatcctggttgatcagctcctcaagggacaacctgtcaatgttcccggcacagttctcgccgctggtggtactacagagattgccaataccggcaagggatatgtaaccacctacctcttggaccccattctggttactaaatccaacctcaatgttccggtagacgccggattctatgaggccgcgcaagctgcgcagcttaaatag

SEQ ID NO: 3778 - protein, 192 aa, Unknown
  Obtained from environmental sample
  misc_feature (1)..(192): Xaa is any amino acid
MDVLNPYIDKGVLRVVGPYPKHYTDTANFQRVATENWQAPIAKARMENLLNGDARNVTLDAVLAPNDTLARAIIEACKADAKYRTKLPVVTGQDAEFESALSIKNGEQTSTVFKDTAKLAEAAIILVDQLLKGQPVNVPGTVLAAGGTTEIANTGKGYVTTYLLDPILVTKSNLNVPVDAGFYEAAQAAQLK

SEQ ID NO: 3779 - DNA, 348 bp, Unknown
  Obtained from environmental sample
  misc_feature (1)..(348): n is a, c, g, or t
gtggtttgcagcggctcggcagaccttaaggaccaaggcaaggaaattttgaaggatatcagcgatgttataaagaataactcagatttgaaagttcgcgttgaagggcatacagatgatgttcccatacattccaatcgttatcacagcaattgggaactttctagtgcaaggtctctttccgtggttcagttgcttgccggtaacacaggcattcagccgcagaatatgagtgcggttggctatggcgaataccgtcccattgttccaaacacaagtcccgaaaaccgcagcaaaaaccgtcgcatccaaatttttgtggactacataaacgacgataaaaaataa

SEQ ID NO: 3780 - protein, 115 aa, Unknown
  Obtained from environmental sample
  DOMAIN (1)...(101): OmpA family
  misc_feature (1)..(115): Xaa is any amino acid
MVCSGSADLKDQGKEILKDISDVIKNNSDLKVRVEGHTDDVPIHSNRYHSNWELSSARSLSVVQLLAGNTGIQPQNMSAVGYGEYRPIVPNTSPENRSKNRRIQIFVDYINDDKK

SEQ ID NO: 3781 - DNA, 918 bp, Unknown
  Obtained from environmental sample
  misc_feature (1)..(918): n is a, c, g, or t
ttgctgtttttcgggagaatttatatgaaatatggatattttgattccaaaaacagggaatatgttatagataagcccgatacgcccgccccatgggcgaattatctcggctctccggcgtacggcgcgattatttccaacaatgccggcggttacagctttgtaaaaagcggcgcggcgggcagaattatccgttatcgctttaacgaacaggaccgtccaggcagatacatctacctgcgcgacgatgaatccggcgattactggtctgcctcatggcagcctgtgggcaagccgttgaacgagtataaatccgtctgccgtcatggtacgggttacactcagcttgaagcggattacaaggacattcattcgcaggcgctttactatgtgcctcaggacgcggactacgaagtgtggaaagtcaaggtgacaaataccggaaacaaagcgcgaaaaatttcctgttttggttttgttgaatttacctgcgaaagtttttacgagcaggatcaggtgaaccttcaatatacccagtttattacccgcacttattttaaggaaaaatttattctgcaaaccattaacgaaaactgcctgaacgccgtaaaccaaagccgcgtagagacgcgctttttcgccatgaccggcgcgaaggtcgcaagttactgcggagacaaggcaagttttttgggcaaataccgcgaatacggaaatccaatttccgtggaaaacggcaaactggacggcactcttaactataatctgaacccctgcggcgcgttgcacacagctttcgatcttgatcccggtaaaagcgccgagtttattttccttctggggcaaaaacgcgaacctcaggtaaaaaaaacttgtgtctcgttacgaggatatgagtctgcccggaaaaagagatga

SEQ ID NO: 3782 - protein, 305 aa, Unknown
  Obtained from environmental sample
  DOMAIN (206)...(288): Glycosyltransferase 36 associated family
  misc_feature (1)..(305): Xaa is any amino acid
MLFFGRIYMKYGYFDSKNREYVIDKPDTPAPWANYLGSPAYGAIISNNAGGYSFVKSGAAGRIIRYRFNEQDRPGRYIYLRDDESGDYWSASWQPVGKPLNEYKSVCRHGTGYTQLEADYKDIHSQALYYVPQDADYEVWKVKVTNTGNKARKISCFGFVEFTCESFYEQDQVNLQYTQFITRTYFKEKFILQTINENCLNAVNQSRVETRFFAMTGAKVASYCGDKASFLGKYREYGNPISVENGKLDGTLNYNLNPCGALHTAFDLDPGKSAEFIFLLGQKREPQVKKTCVSLRGYESARKKR

SEQ ID NO: 3783 - DNA, 675 bp, Unknown
  Obtained from environmental sample
  misc_feature (1)..(675): n is a, c, g, or t
atgtatcagattggccgaggactcagattacggggttatgcggagatcatgacaaaagccctgaatcaggcaaagaatggaaggctccacatcctctcgatcatgaatcaaacaatcggcaaacctgccggttccatcagtgaatttgccccgaagatcgtaactctgaaaattgaggttgacaagatcggcgccctgattggtccggggggcaagaacatcaaagccctctgtgaacagtacagtgttacgatcaacacagaaaacgacggcacggtaacgatctacggaaaaaactccaaggatgccgaagatgccaaggcggcggttatgggaattgtttccgatccggaaacaggacgaatttacaacggcgtggtcaagcggattatggaattcggcgcctttgtagaaatcctccccggtaaggaagggctggtacatatttccaaactttcccggcagcgtatagctcaggtaagcgatgttctttccgaaggacaggaaattcccgtaaaactggttgaaattgacaaggtgggccggttgaatctttcttatatcgacgccatcgatcccaacggcagtactcccgaaagagaaggaagccgtcagagggacggtcagagggataacagttcatttcatcaacggggaaaccgccggcgtttttaa

SEQ ID NO: 3784 - protein, 224 aa, Unknown
  Obtained from environmental sample
  DOMAIN (53)...(110): KH domain
  misc_feature (1)..(224): Xaa is any amino acid
MYQIGRGLRLRGYAEIMTKALNQAKNGRLHILSIMNQTIGKPAGSISEFAPKIVTLKIEVDKIGALIGPGGKNIKALCEQYSVTINTENDGTVTIYGKNSKDAEDAKAAVMGIVSDPETGRIYNGVVKRIMEFGAFVEILPGKEGLVHISKLSRQRIAQVSDVLSEGQEIPVKLVEIDKVGRLNLSYIDAIDPNGSTPEREGSRQRDGQRDNSSFHQRGNRRRF

SEQ ID NO: 3785 - DNA, 417 bp, Unknown
  Obtained from environmental sample
  misc_feature (1)..(417): n is a, c, g, or t
atgtaccagcccttccttaccggggaggatttctacaaaggcgccgaattccataatccgcttgaccacgccgttgtaaattcgtcctgtttccggatcggaaacaattcccataaccgccgccttggcatcttcggcatccttggagttttttccgtagatcgttaccgtgccgtcgttttctgtgttgatcgtaacactgtactgttcacagagggctttgatgttcttgccccccggaccaatcagggcgccgatcttgtcaacctcaattttcagagttacgatcttcggggcaaattcactgatggaaccggcaggtttgccgattgtttgattcatgatcgagaggatgtggagccttccattctttgcctgattcagggcttttgtcatgatctccgcataaccccgtaa

SEQ ID NO: 3786 - protein, 138 aa, Unknown
  Obtained from environmental sample
  misc_feature (1)..(138): Xaa is any amino acid
MYQPFLTGEDFYKGAEFHNPLDHAVVNSSCFRIGNNSHNRRLGIFGILGVFSVDRYRAVVFCVDRNTVLFTEGFDVLAPRTNQGADLVNLNFQSYDLRGKFTDGTGRFADCLIHDREDVEPSILCLIQGFCHDLRITP

SEQ ID NO: 3787 - DNA, 927 bp, Unknown
  Obtained from environmental sample
  misc_feature (1)..(927): n is a, c, g, or t
atgtcgtccgccgcgaagatgttctccctgctggacaaagtaactcccgatctgatccttctcgacatagaaatgccggagatgaacggcatggacgcgataaaaaaactgaaagcctgcgaaacatggaaagacatccccgtaatattcctgacagggcgcaaagacgaaaccgtagaagtcaactgcttcgagtacggcgcggttgatttcgtcaccaaaccgttttccgcgcccgtacttttaaagcgcgtaaaaacacaccttgaaattgacagagcaatacgcgaacgctccgcgcaaatcagccgcctccagtacagcatagtttccgtactcgcgaacgttgcggaaaaccgcgacaaaataaactcaggtcacattgagcgcacgtcggaatacgtcaaaatacttataagcgaaatgaaaaggagaggagtatactggcaggaaactgcggattgggacatagaaaaaataatattatcctcacgcatgcacgacctcggcaaaatatccgtaacggaccttatcatgaacaaacccggcaaactctccaacgaagaatatgagataatgaaaacgcacgtaatggaaggcgagcgcataatcgatgaaatcatcgcgcagacaggagaaggcgaatatctgcgtgacgcgaagaagttcgcgggctaccaccacgaacgctgggacggcaagggctatccgtacggcctcaaaggaacggacatcccccttcaaggccgcgtaatggccatcgttgacgtgtacgacgcaatcacttccaaccggccgtacaagaaagccttttcaagcgaagacgccgtacagataatcatggacaacgccggtacgcactacgatcctgagttagctaaaatattcttcgaagtaaaagaccgtctcggccgattctgtctttga

SEQ ID NO: 3788 - protein, 308 aa, Unknown
  Obtained from environmental sample
  DOMAIN (1)...(86): Response regulator receiver domain
  misc_feature (1)..(308): Xaa is any amino acid
MSSAAKMFSLLDKVTPDLILLDIEMPEMNGMDAIKKLKACETWKDIPVIFLTGRKDETVEVNCFEYGAVDFVTKPFSAPVLLKRVKTHLEIDRAIRERSAQISRLQYSIVSVLANVAENRDKINSGHIERTSEYVKILISEMKRRGVYWQETADWDIEKIILSSRMHDLGKISVTDLIMNKPGKLSNEEYEIMKTHVMEGERIIDEIIAQTGEGEYLRDAKKFAGYHHERWDGKGYPYGLKGTDIPLQGRVMAIVDVYDAITSNRPYKKAFSSEDAVQIIMDNAGTHYDPELAKIFFEVKDRLGRFCL

SEQ ID NO: 3789 - DNA, 945 bp, Unknown
  Obtained from environmental sample
  misc_feature (1)..(945): n is a, c, g, or t
atgacaccgaatcagaaagacgcgctgcatacgtttctggaaaatataactgacccgttcactttggaggttgtagcggaatttgtgcgtataatggataactctgtccgtaacagaaacctgtcggatgaaatcgccgcctttctcaattccagcgatatggcgttccggctgaacgacaaggggcaatggctgtcccggcgcggctgttttgaagatgttccttttgtaataagtccgacaaggcttgaattgctcaacggcattctgatacccggtcaccgctgcgtacccttcgctaacccggtaacaatgccccatgaatacaaatttttctggcagggaaaagaaatcccctggacaaccaccgaaggcccgcccgaagatttctaccgtttttattcctttttcggggaagagtacgccccgcaatatatggcaagggacaatccggagaacgaaacggcctttaacatcgatccttttgaagacccgccggaggtgtcgatccacacgctggatatgaccaacatcttccgcgagagctcctttgttcccggggaccgttttctggttcacacaaaggactggaaagaagcgcacttcaaccttgaaaaagccggaaaggacgagtggtcacagcaggaactggacgcgtggttcgaggccgccgagagcggttttgacaacagtttttccatgctgggtcccggtaactctaccgaggagcagatcgcgttcgcctactggtacggaggggggaggatgagggatgtcccggcgtattcgctggaggaatttctctttgaaaaaaccgacagcatagaaaacgtggtttacggcatcgcatcccgtctctggtttgccggaaaagacattcccgacagcaagcggcttcttggactggcggtcccgccagacaagacttttctcgtgccgatctga

SEQ ID NO: 3790 - protein, 314 aa, Unknown
  Obtained from environmental sample
  misc_feature (1)..(314): Xaa is any amino acid
MTPNQKDALHTFLENITDPFTLEVVAEFVRIMDNSVRNRNLSDEIAAFLNSSDMAFRLNDKGQWLSRRGCFEDVPFVISPTRLELLNGILIPGHRCVPFANPVTMPHEYKFFWQGKEIPWTTTEGPPEDFYRFYSFFGEEYAPQYMARDNPENETAFNIDPFEDPPEVSIHTLDMTNIFRESSFVPGDRFLVHTKDWKEAHFNLEKAGKDEWSQQELDAWFEAAESGFDNSFSMLGPGNSTEEQIAFAYWYGGGRMRDVPAYSLEEFLFEKTDSIENVVYGIASRLWFAGKDIPDSKRLLGLAVPPDKTFLVPI

SEQ ID NO: 3791 - DNA, 852 bp, Unknown
  Obtained from environmental sample
  misc_feature (1)..(852): n is a, c, g, or t
atgcgcaagcaggtaaaagacgtgcccgtgtttgatantgtcgagaagcggcagaagatgctctttgaggaatttgccgcgcctgcattaattgagaataactctagcggaggcgtagaacnttcggctcgtaaggcgcaaagaaattttgttgttggcattccacgggctttttccgtacatacgctttatcctctttatagctggtttttttatgaattgggaattaagacgtttctttctacggaagttgcccatgccggagtagctcgcgctgaatcaacatattgtttccctgcggaaatcgcccacggtgcgattcaagattgtcttgataagggggctgattatgtgttaatgccccatttccgcgatatgccaagttacgaggagaaagtacatgcgaatttctgtcctattacccaggctcttccttattatatggaaaaagcttttcctgatatcgataaaaagaaatggctgccgcttgtcgtaagtttcaagtttggcgaaggaaaagcgcttgaattgttctgtgagatgacaaaattgttgggtatcggcgaagcggaaacaaaaactgcgtttgatgcggctttggctaaacagaaaagttattttgaagcggttgaaaaaatgggtcatcaggcgcttgaagacgcgcgtaagtcggacaggcccgttattgccgttttgggcagaccgtacaacgccttcacgccggaagcgaatatgggtattccgcgtaagtttaccacgcgcggctattcaatcattccatttgacatcttgccgttccacgatgaagttattttcccgaatatgtattggttcttcggccagcaggattaa

SEQ ID NO: 3792 - protein, 283 aa, Unknown
  Obtained from environmental sample
  misc_feature (1)..(283): Xaa is any amino acid
MRKQVKDVPVFDXVEKRQKMLFEEFAAPALIENNSSGGVEXSARKAQRNFVVGIPRAFSVHTLYPLYSWFFYELGIKTFLSTEVAHAGVARAESTYCFPAEIAHGAIQDCLDKGADYVLMPHFRDMPSYEEKVHANFCPITQALPYYMEKAFPDIDKKKWLPLVVSFKFGEGKALELFCEMTKLLGIGEAETKTAFDAALAKQKSYFEAVEKMGHQALEDARKSDRPVIAVLGRPYNAFTPEANMGIPRKFTTRGYSIIPFDILPFHDEVIFPNMYWFFGQQD

SEQ ID NO: 3793 - DNA, 399 bp, Unknown
  Obtained from environmental sample
  misc_feature (1)..(399): n is a, c, g, or t
atgccaaaagttttctgtctcttaaatcacgagcttactgccaatcaaaaaaccgaattatttaatactttcggtgtgacacatattgtagattcaccggagcaaatatcaatattatggtcttcaattcctaccaacagggaattatcaagatcgcagctggagccgtttataacatggcttgaggaagcccgtgcggatgatgttgtggtactacagggagaacacagcgcgactttcgccctggccgatttcgcgcttcaaaaggggcttgtcccggtgtgcgcggtaacggaacggacgacgcaggaagttcaggaaggcgagaaagttataaaaagaaatattttcgagcatatttgtttcagaaagtatcattatttcaaggacttggattga

SEQ ID NO: 3794 - protein, 132 aa, Unknown
  Obtained from environmental sample
  misc_feature (1)..(132): Xaa is any amino acid
MPKVFCLLNHELTANQKTELFNTFGVTHIVDSPEQISILWSSIPTNRELSRSQLEPFITWLEEARADDVVVLQGEHSATFALADFALQKGLVPVCAVTERTTQEVQEGEKVIKRNIFEHICFRKYHYFKDLD

SEQ ID NO: 3795 - DNA, 489 bp, Unknown
  Obtained from environmental sample
  misc_feature (1)..(489): n is a, c, g, or t
ttgcccctatccccccagatgccccgcaaaatgcagacgctgctctcggttggcctgggttatgtgaaacttggccagtccgcgctgaccctttccggcggcgaggcgcagcgggtgaagctggcgctggagctttcaaaacgctccaccggcagcaccctgtatattttggacgagccgacaaccggcctgcactttgccgatgtaaaacagcttatggatgttattcagcggctggtggatcagggaaacacggtaataatgatagaacataaccttgatgtactgctgcaggcggattacattattgatctgggaccggagggcggcgacaagggcgggcagatcgtggcgaccggtacgccggaacaaatagccgtcaataccgcttcttatacgggaacgtatatcagggaaatgctggaacgcagccaaaagcgcggaaagttttctcccaggatcgtccaaaggcggcgtagttccggatga

SEQ ID NO: 3796 - protein, 162 aa, Unknown
  Obtained from environmental sample
  DOMAIN (2)...(109): ABC transporter
  misc_feature (1)..(162): Xaa is any amino acid
MPLSPQMPRKMQTLLSVGLGYVKLGQSALTLSGGEAQRVKLALELSKRSTGSTLYILDEPTTGLHFADVKQLMDVIQRLVDQGNTVIMIEHNLDVLLQADYIIDLGPEGGDKGGQIVATGTPEQIAVNTASYTGTYIREMLERSQKRGKFSPRIVQRRRSSG

SEQ ID NO: 3797 - DNA, 333 bp, Unknown
  Obtained from environmental sample
  misc_feature (1)..(333): n is a, c, g, or t
ttggacgatcctgggagaaaactttccgcgcttttggctgcgttccagcatttccctgatatacgttcccgtataagaagcggtattgacggctatttgttccggcgtaccggtcgccacgatctgcccgcccttgtcgccgccctccggtcccagatcaataatgtaatccgcctgcagcagtacatcaaggttatgttctatcattattaccgtgtttccctgatccaccagccgctgaataacatccataagctgttttacatcggcaaagtgcaggccggttgtcggctcgtccaaaatatacagggtgctgccggtggagcgttttga

SEQ ID NO: 3798 - protein, 110 aa, Unknown
  Obtained from environmental sample
  misc_feature (1)..(110): Xaa is any amino acid
MDDPGRKLSALLAAFQHFPDIRSRIRSGIDGYLFRRTGRHDLPALVAALRSQINNVIRLQQYIKVMFYHYYRVSLIHQPLNNIHKLFYIGKVQAGCRLVQNIQGAAGGAF

SEQ ID NO: 3799 - DNA, 903 bp, Unknown
  Obtained from environmental sample
  misc_feature (1)..(903): n is a, c, g, or t
atggaaaaaaaccagaaagataatgtactattctcaatcggaactaaactgataactattatctccattatagtcgttctttctttgggttcaattaccgcccttgtttcatggatggtacgcgaagacttaaaaatagctgcggaagaaaacaactttgaggcgaacagaagagcctcagaggaagctgaagaaatgctgtcaaatatacgcgccgcttccgcccaactcctgtacacgataaacgccctaagcgcgcaaaaggatgcggcggcacagcaaacaacggcgcagcaagcggcggattttttctttgctcaaaatccccgtaccgccgcatttacctatacgctcaaagatacacgcaatattttggtcaacaataattactttctttcccgcgatatagatcaatcccttgcggagacttactttaatgataacgaaaattccatgtcacgcgccgcgcagggggagacggcattgttaaacgccgctcctgtttttacaagacctgttcttgcactgttttttccgtatcaaatggcgggtgaacaaagcggagcgtgttgcgtcctaatcgcttcggaaaaattagttgacagttttggttcagggacaaaccagtcctttttaataaatgacaaatgcgatttgttaatacactccgattccacgcttttgttgaatggcgtaaatgtggcgaactttgattttatccgcgggatacaggaagctcccgaccgtaataaacaacagattgtaaacgccgattttaactttgagccgcanacttcggaaacatcgactcggaaagaatcgcagtattatatggcgtttaccaaacttgcctacggtggttgtatagttatcaccggcatagaacacgataaagttttttga

SEQ ID NO: 3800 - protein, 300 aa, Unknown
  Obtained from environmental sample
  misc_feature (1)..(300): Xaa is any amino acid
MEKNQKDNVLFSIGTKLITIISIIVVLSLGSITALVSWMVREDLKIAAEENNFEANRRASEEAEEMLSNIRAASAQLLYTINALSAQKDAAAQQTTAQQAADFFFAQNPRTAAFTYTLKDTRNILVNNNYFLSRDIDQSLAETYFNDNENSMSRAAQGETALLNAAPVFTRPVLALFFPYQMAGEQSGACCVLIASEKLVDSFGSGTNQSFLINDKCDLLIHSDSTLLLNGVNVANFDFIRGIQEAPDRNKQQIVNADFNFEPXTSETSTRKESQYYMAFTKLAYGGCIVITGIEHDKVF

SEQ ID NO: 3801 - DNA, 852 bp, Unknown
  Obtained from environmental sample
  misc_feature (1)..(852): n is a, c, g, or t
gtgtacctcggcgatcttatccgtgtggcggaatattccgccgcaactttgaatattaacgatggtattatcgatatagacgaaaattccntgatacgtatacgcgcttcctcggacggcgaaggcggcgttgtaatagatctgggttcaggaagtttaagtatcaccggctccgattccgccgacagcaatatagctcttaatgttatgggacgcataatagcgccggcagccggagcgacgatgagcgcctccgccggggaaaaaggcatgacattgaaggtaaacgaaggaagcgtaatcattaaagagaaagacgggcagagccgttccatgagcgccggtgaagcgttgattttagataccgagggagttgaaaaagcggaaccggcggcagttgttacattaccccgtccaaacgcgcgttttttaaaaaacagtgttgaaccggtaaatatccgctttgcgtggaacgcgttaaatatagatcaaaaaacacccttgcgtttggaaatagcctcaggacctaattttacgcgcgttgtacggacagtcgagagcgttgattcctccaatgttactcttggcgcgggaatctggtattggcggctatcgtaccagaataccgttctgagttccggacagttcaccattgttgacgcggcaatctccgcatcgacaagccccattcaggacagcctgttccgctatcgggaaaattcgccgacagtccgttttgaatggcagcctgtggaagaagtgtcctattatattcttgaggcaggtctaacgccggatataattagtcctacaataacaaaacagaccgctgtcgcttcccttgtgaaatga

SEQ ID NO: 3802 - protein, 283 aa, Unknown
  Obtained from environmental sample
  misc_feature (1)..(283): Xaa is any amino acid
MYLGDLIRVAEYSAATLNINDGIIDIDENSXIRIRASSDGEGGVVIDLGSGSLSITGSDSADSNIALNVMGRIIAPAAGATMSASAGEKGMTLKVNEGSVIIKEKDGQSRSMSAGEALILDTEGVEKAEPAAVVTLPRPNARFLKNSVEPVNIRFAWNALNIDQKTPLRLEIASGPNFTRVVRTVESVDSSNVTLGAGIWYWRLSYQNTVLSSGQFTIVDAAISASTSPIQDSLFRYRENSPTVRFEWQPVEEVSYYILEAGLTPDIISPTITKQTAVASLVK

SEQ ID NO: 3803 - DNA, 552 bp, Unknown
  Obtained from environmental sample
  misc_feature (1)..(552): n is a, c, g, or t
atgaccatgcccaactacaattccgcaacggagctaagggcgttcctggacgggaaagatctgggcatgaggaaaaaattcgggcagaatttcctgatcaatccctgtatacggcaggcccttgcggacgctttggaggcggaggcgggggagtccgtctgggaaatcggagccggacttggggcgatgaccggcctgcttctgggaaagggtctttgcgtccgggcttttgagatagaccggggcttcatcagcctgcttaacgattttttttcagctaacggtaattttaccttaattgaaggggacgttcttaaaacctggcatgaccagcctccagcccaatatctttttggaaacctgccttataatatagccgcgaccctgcttgcggaccttatcgttaagaggcgttttttcaggcggttggttgttacagtccagcgggaagtcgccttgcgtatggcggccggcgtgggaacgccgaattactcctctttttccgtcctatgcgcttcggcttattatgtaaaacccactgatgattattag

SEQ ID NO: 3804 - protein, 183 aa, Unknown
  Obtained from environmental sample
  DOMAIN (20)...(182): Ribosomal RNA adenine dimethylase
  misc_feature (1)..(183): Xaa is any amino acid
MTMPNYNSATELRAFLDGKDLGMRKKFGQNFLINPCIRQALADALEAEAGESVWEIGAGLGAMTGLLLGKGLCVRAFEIDRGFISLLNDFFSANGNFTLIEGDVLKTWHDQPPAQYLFGNLPYNIAATLLADLIVKRRFFRRLVVTVQREVALRMAAGVGTPNYSSFSVLCASAYYVKPTDDY

SEQ ID NO: 3805 - DNA, 897 bp, Unknown
  Obtained from environmental sample
  misc_feature (1)..(897): n is a, c, g, or t
atgccggtgttttgttataataaaattgttcttggccttgtagggcttgggattgtagtttttgtccacgaacttgggcattttttagccgcccggctggtaagaatagacgttgaagctttttccataggatggggaaaacccgtcttaaaaaagaaaataggaacggttgaatacaggcttggaatgttccctgtaggcggctactgcaagatgaagggagagggcgattacgcccaagcgtgggaagagagaaataaaggcattatgccggaaaaaggctcttatcttgcggcaaatcccgctgcaaggatccttgtgtgctttgcgggcccttttttcaatttattattggctgtccttttgctttcatctctttggggcgtagggttccagatacaaacgcttggaaataaaattattcttgcctcggaaataacgccgggcgaggtttttccagccgataccgccggttttaagacaggcgacagaattctggaaatcgaagggaataaaatttcctacttccatgagatacaggaaaatatcgccgcaaatccaaacaagcctcttcccataacggtggagagagacggaaaaattattcagcttcaagttactccgtcccttgaaaaatcaagcggcgcgggaagaatcggagtcgcgtactgggcggacatcgtaattgaaagcgtaaaagacggaagcccctccgcagaagccggactgttgccgggcgacattgttacagccgccaacgggcagcctcttcgcaacatttatgatctcaagaaagcgcttgatcagcagccgggcgctattgtccttgaatatgaacgtaacggcactgggggacaagccgtgatttacagcaaagatattgaagaagaaatttga

SEQ ID NO: 3806 - protein, 298 aa, Unknown
  Obtained from environmental sample
  DOMAIN (207)...(279): PDZ domain (Also known as DHR or GLGF)
  misc_feature (1)..(298): Xaa is any amino acid
MPVFCYNKIVLGLVGLGIVVFVHELGHFLAARLVRIDVEAFSIGWGKPVLKKKIGTVEYRLGMFPVGGYCKMKGEGDYAQAWEERNKGIMPEKGSYLAANPAARILVCFAGPFFNLLLAVLLLSSLWGVGFQIQTLGNKIILASEITPGEVFPADTAGFKTGDRILEIEGNKISYFHEIQENIAANPNKPLPITVERDGKIIQLQVTPSLEKSSGAGRIGVAYWADIVIESVKDGSPSAEAGLLPGDIVTAANGQPLRNIYDLKKALDQQPGAIVLEYERNGTGGQAVIYSKDIEEEI

SEQ ID NO: 3807 - DNA, 336 bp, Unknown
  Obtained from environmental sample
  misc_feature (1)..(336): n is a, c, g, or t
ttgtcccagattaccggtattccgctggcgcgtatctacggggtaatcactttttatcattttttcaagaccaccaaacccggcaaaaataaaatttccgtttgcctgggaactgcctgttatctgaagggcggtcaggatcttattgaggaagcccggaaaattttgaaccttgcccccggcggcgtgacggaagacgggcttttttccattgatgaagtccgctgcgtaggatgctgcggcctttcaccggtaataaccgtgggccctgatacttacggcaagcttacagcggaaatgcttccggaaattatcgccaagtataagaatgtgtaa

SEQ ID NO: 3808 - protein, 111 aa, Unknown
  Obtained from environmental sample
  DOMAIN (1)...(109): Respiratory-chain NADH dehydrogenase 24 Kd subunit
  misc_feature (1)..(111): Xaa is any amino acid
MSQITGIPLARIYGVITFYHFFKTTKPGKNKISVCLGTACYLKGGQDLIEEARKILNLAPGGVTEDGLFSIDEVRCVGCCGLSPVITVGPDTYGKLTAEMLPEIIAKYKNV

SEQ ID NO: 3809 - DNA, 450 bp, Unknown
  Obtained from environmental sample
  misc_feature (1)..(450): n is a, c, g, or t
ttgcattttaccttagcggatttgataactgatataacccaaaacggggttgaatcgggagcttctattgtggagcttcaggtaagcgagacagtggattctgcggaacctactggttccgacgggaaaggagagttcaggtttactgtaactgataacggcaaagggatgacagaggaggaacttaaacgggcccaggatccttttgttactgatggcataaagcaccctcaccgcaaagtggggttggggcttccttttttaatccagaccgccgaagcgtcaggcggcgggtggaaaatggaatccaaaaaagccggtcagggccaggcatcgggtactgttataagcgcgtggtttgatatggggaatgtggataccccaccggtgggggacattccgggaatgtttcggacggtactgctcttcggcggtcgggaaaaatggtga

SEQ ID NO: 3810 - protein, 149 aa, Unknown
  Obtained from environmental sample
  DOMAIN (4)...(123): Histidine kinase-, DNA gyrase B-, and HSP90-like ATPase
  misc_feature (1)..(149): Xaa is any amino acid
MHFTLADLITDITQNGVESGASIVELQVSETVDSAEPTGSDGKGEFRFTVTDNGKGMTEEELKRAQDPFVTDGIKHPHRKVGLGLPFLIQTAEASGGGWKMESKKAGQGQASGTVISAWFDMGNVDTPPVGDIPGMFRTVLLFGGREKW

SEQ ID NO: 3811 - DNA, 507 bp, Unknown
  Obtained from environmental sample
  misc_feature (1)..(507): n is a, c, g, or t
gtgccttttaaatttcggggcattggtttctcatttgatctttcacacgggcttttcagttccgccggagttgacgcgggaacgcaatttttattaaaggttttttcgcgttttttagacgaagatattgcggcaggcaagcctccgccgcggcgcgtactggacgcgggctgcggtacgggcgttatcgggatatgcgcggcctcggcaatcaaagctctttccggagaggacgccgcggtatatgtgcgctgtcaggacagggacgaacttgcccggcttataacatcgcataacgcggtaaaaaacaatgtccctccaggcatgcttgaggcgtttaccgagcctttgcttgccgggtccgcaaataataaatgggatctgattctgacaaatattcccgcgaaagcgggaaatcccgtgctggaggattttgtcagccgttcaagttctttgttgaatcccgaaggnnccgcgttatcatggttgcggttaacacgctggtga

SEQ ID NO: 3812 - protein, 168 aa, Unknown
  Obtained from environmental sample
  DOMAIN (9)...(167): Methyltransferase small domain
  misc_feature (1)..(168): Xaa is any amino acid
MPFKFRGIGFSFDLSHGLFSSAGVDAGTQFLLKVFSRFLDEDIAAGKPPPRRVLDAGCGTGVIGICAASAIKALSGEDAAVYVRCQDRDELARLITSHNAVKNNVPPGMLEAFTEPLLAGSANNKWDLILTNIPAKAGNPVLEDFVSRSSSLLNPEGXALSWLRLTRW

SEQ ID NO: 3813 - DNA, 765 bp, Unknown
  Obtained from environmental sample
  misc_feature (1)..(765): n is a, c, g, or t
atgaaacttgttcaaagcgccgaaaactaccaagctcaaagcccggagttaaccaccggcggcagcctgcgaaaacaatggatttataacgaattggaacataaaaattatttaataaaagcgggaagcaagaaggattatcaggaaccttttaatgaatatttttcgcacttgttgtcagaggaactgggttttactcatactccctacttattggaaaaacgcggagatgaatatgtaagcgtttgtccctgtattgctgataataaaacagaaatggtctgcgcctcggacattataagaaaatacggaattgaaaaatcttataatgggtttgttgaattggctcagcaaaaaggatgtgctaatttcaaagatgaagtcaatcaaatgattatacttgattatttgatagacaacattgaccgtcactggtttaatttcgggatactgcacaatgcccaaaacggctcatggaaagggctaattcccattttcgataatggttattctttgtggaacaaagactttgttgatccacgaataatttccgaaagccaatcgtttgctgattcgaatgaagagtgcatgaagctcgttgatattacgaaatatgtaaaacgcttgcctgatatggttcaaatatttgatcgcgcatttgagctttatcctttggctgaacggaagaaagaaataagacaggggttatgtgaacgggttgtaggtattgagcgatattttgagggatgttccggtggtggataa

SEQ ID NO: 3814 - protein, 254 aa, Unknown
  Obtained from environmental sample
  misc_feature (1)..(254): Xaa is any amino acid
MKLVQSAENYQAQSPELTTGGSLRKQWIYNELEHKNYLIKAGSKKDYQEPFNEYFSHLLSEELGFTHTPYLLEKRGDEYVSVCPCIADNKTEMVCASDIIRKYGIEKSYNGFVELAQQKGCANFKDEVNQMIILDYLIDNIDRHWFNFGILHNAQNGSWKGLIPIFDNGYSLWNKDFVDPRIISESQSFADSNEECMKLVDITKYVKRLPDMVQIFDRAFELYPLAERKKEIRQGLCERVVGIERYFEGCSGGG

SEQ ID NO: 3815 - DNA, 498 bp, Unknown
  Obtained from environmental sample
  misc_feature (1)..(498): n is a, c, g, or t
ttggcaaattatacccgaaaccccgaaatccgcggggcagccgatgccgaattgtggaaatcccgcctgcttaccgaatttccccaaagccccgaagcccgcgccgccaacccggaaaaacaaagagattcatcgtctgtcagtaccatacaaagtccgctttggctgctttttcccggcgcagccggtcccgttgccgttgaaccgcccaagcctgccgctcccgttgaacagccaaaatccgcccctccggtaaaacccgccgttaccggaaacgctcctgtccccgttgtcctgcaaaccggattgttcagcaaagaggctaatgcccgcgtccagtctgacactttacgaaaagccggttttaccgctatggtgtcccgtaaactggtcaacggtacggaatactgggtcgttacggttcccggcggccagaacaccaacaaaaccattcaagagttaaaaaaagccggatttgattcgtttccggttaaataa

SEQ ID NO: 3816 - protein, 165 aa, Unknown
  Obtained from environmental sample
  DOMAIN (93)...(165): Sporulation related domain
  misc_feature (1)..(165): Xaa is any amino acid
MANYTRNPEIRGAADAELWKSRLLTEFPQSPEARAANPEKQRDSSSVSTIQSPLWLLFPGAAGPVAVEPPKPAAPVEQPKSAPPVKPAVTGNAPVPVVLQTGLFSKEANARVQSDTLRKAGFTAMVSRKLVNGTEYWVVTVPGGQNTNKTIQELKKAGFDSFPVK

SEQ ID NO: 3817 - DNA, 897 bp, Unknown
  Obtained from environmental sample
  misc_feature (1)..(897): n is a, c, g, or t
ttgtgggtttggtcggcattattgccgtcgccngttttttttatcgccgtgcgcggggcggaacagacaatggttccggacgtagtgggcaaggaactgacgcaggccctgcttgaattgcaggtaaaagaactttatccccgccttcttctgcgttattcgcaaacttccagcgataaaggccatatactggaacaggagcctaaatccggaacaattgtaaaggcgggcaggagagtccgccttgtagtaagccagggcgtaattataaacaaagtggaaaattttataggccgcggcattaacgacgtaaaaatggacttgcaggcgctttacgcgcaggctaacggaattgccgtgcttaccgtgaaagagcctgttatgtacgatttttcttccgagacgccgggtacgatccttgcccagaaacctgaaccgggaacggatatttccgggcctatggtacttgagttcgttgtaagcaaggggcgtgaaaacgccgtcgtttcggtgcctaatctaatgggcatgaaactttcggaagcgcttggagttatcggcaataccggaattaattttaaatttaacattagaaacagaaacggagacgaacagggcgagattgtcgttaatcaaatgcctcccggaaacgcgacttctccgataagttctgttgttgacataacggtaacgtccccagaaaaaatcgcggagaacgaaattttcggccttttcagttacgcgatacccgtaaatccctatccgttgtctgtgcgtcttgaagcgactcttccccacggggagaggatgcggctttttacaacgattatatcggcggcgaatttaccctcccctacaaattgcccattggatcgacattggttctgtccatgctga

SEQ ID NO: 3818 - protein, 298 aa, Unknown
  Obtained from environmental sample
  SIGNAL (1)...(19)
  DOMAIN (23)...(86): PASTA domain
  misc_feature (1)..(298): Xaa is any amino acid
MWVWSALLPSPVFFIAVRGAEQTMVPDVVGKELTQALLELQVKELYPRLLLRYSQTSSDKGHILEQEPKSGTIVKAGRRVRLVVSQGVIINKVENFIGRGINDVKMDLQALYAQANGIAVLTVKEPVMYDFSSETPGTILAQKPEPGTDISGPMVLEFVVSKGRENAVVSVPNLMGMKLSEALGVIGNTGINFKFNIRNRNGDEQGEIVVNQMPPGNATSPISSVVDITVTSPEKIAENEIFGLFSYAIPVNPYPLSVRLEATLPHGERMRLFTTIISAANLPSPTNCPLDRHWFCPC

SEQ ID NO: 3819 - DNA, 651 bp, Unknown
  Obtained from environmental sample
  misc_feature (1)..(651): n is a, c, g, or t
ttggtgtgcgccaacgccgatgagctatgggcctgtgccgcagtggttgaccctcccatgcgccntgggttgcttgagagggcatacgcgctttcccttgacgctggaatgacgttccgcatagtcgtaaccaagagggacagggccagcgtgaaagatacgctgccagagctggacccgataagggggctggacatcccgataatagagacgagcgcaaagacaggagtcggcatagacgaattgagggaactgctgaagagtagggcggtcgctctgataggccacagcggcgtcgggaagagtacgctcataaatgccctgctgccagggcgcacactcaagacgggcgagattggcaagtacggcacagggcggcagaccaccacctccgcctgctggatacaggtgccaaacggcggcgcactgattgacacccctgggataaggactctttccgtaaggggcttggatagggggctactggcaaaaattttccccgaattcccccccgagtggatagaggaccccatgccttatgacccagaggacgaggcacttggcatcccctaccccgagcgcctcgccagcctacagaggctgtgggccgagatggcggacaggaacccgaatcagaatgtgcatagatag

SEQ ID NO: 3820 - protein, 216 aa, Unknown
  Obtained from environmental sample
  DOMAIN (89)...(207): GTPase of unknown function
  misc_feature (1)..(216): Xaa is any amino acid
MVCANADELWACAAVVDPPMRXGLLERAYALSLDAGMTFRIVVTKRDRASVKDTLPELDPIRGLDIPIIETSAKTGVGIDELRELLKSRAVALIGHSGVGKSTLINALLPGRTLKTGEIGKYGTGRQTTTSACWIQVPNGGALIDTPGIRTLSVRGLDRGLLAKIFPEFPPEWIEDPMPYDPEDEALGIPYPERLASLQRLWAEMADRNPNQNVHR

SEQ ID NO: 3821 - DNA, 624 bp, Unknown
  Obtained from environmental sample
  misc_feature (1)..(624): n is a, c, g, or t
atgctctacaccgccatacatgaatacgcccatcatctgcacgcctgcgcccacgggggaaaactttcgcctagggcgcataacagcgaattttgggctatttttcacgaccttcttgaaaaggcggaaaagaaaaaaatctataacgatgttttttccgtctcgcctgaacttttaaaattaacggatgttatccgcgacaagtatttaaaaaataacggtgagcttgtaaaagaaatgggaaaacatctgctaaaagcgcatgatctttgcacgaaaatcggcgtgcgttttgaagactatgttgacagaatgttgcgcattccaagaacagccgccaacatggcgattaaaatgttcgagtacgatatcgcccctgaagtaggcgctgataacatgcgcttccttgccggtatccgtgacggcgacgagcggaaagccgcagaaaaagcccttattaaaggcaagagccctgacagcgttaaagttcaagtacgtaataaaaacaaagaagaagaccctgttgttttgttggaaaaagaaaaaactaggttagagcggacaatcgccactcttaacaaacgtcttaacgaagtaataaaggaaataaaagaaaaaaaatga

SEQ ID NO: 3822 - protein, 207 aa, Unknown
  Obtained from environmental sample
  misc_feature (1)..(207): Xaa is any amino acid
MLYTAIHEYAHHLHACAHGGKLSPRAHNSEFWAIFHDLLEKAEKKKIYNDVFSVSPELLKLTDVIRDKYLKNNGELVKEMGKHLLKAHDLCTKIGVRFEDYVDRMLRIPRTAANMAIKMFEYDIAPEVGADNMRFLAGIRDGDERKAAEKALIKGKSPDSVKVQVRNKNKEEDPVVLLEKEKTRLERTIATLNKRLNEVIKEIKEKK

SEQ ID NO: 3823 - DNA, 750 bp, Unknown
  Obtained from environmental sample
  misc_feature (1)..(750): n is a, c, g, or t
atgcctttatgggtaacaaggcaaaagtccaaaaacctttttgacgctgttaggcgctaccgtgatttccccgtaaccgccgaagcctggagaacctgccttaaagatcaattcgacatgaaaggctttatctccgttctggaagatattggctcaggcgcgctttcctttgattttttcacaacccgccaggcaagccctttctcaaaagaattaacctgggccgaaacaaatgtcctaatgtacgaatacgacgagcggccggatctcacagccgacggcccctccctttcggacaaggtcatctccgaagccttgggaagcgccgctgcccggcctcccctcaaagccgcattggtcgaagacttctgctcaaggctcaggcgggaaattcctggctgggccccggatgacgagctaaccctttgcgaatgggtgaaagaacgaattgccatccccgcctgcgaatgggaaaagcttttgcaatgcgtccccgccgaattgctggaagcgatacacagcaataaaagccttggaggaaaactcgaatacttcgggcaggagaattcagaaaactccgtcgtggttcaccgtgaatgggcaaaaaaatggaaaggcagcgacaggaaaaaattggcggaagattgccttggacaatggctccgttatcaggggccaattcaaattttaaaaatcgcaaatgtatttgggctttccataaacgaagcgaaagaagtcatcctgttttag

SEQ ID NO: 3824 - protein, 249 aa, Unknown
  Obtained from environmental sample
  misc_feature (1)..(249): Xaa is any amino acid
MPLWVTRQKSKNLFDAVRRYRDFPVTAEAWRTCLKDQFDMKGFISVLEDIGSGALSFDFFTTRQASPFSKELTWAETNVLMYEYDERPDLTADGPSLSDKVISEALGSAAARPPLKAALVEDFCSRLRREIPGWAPDDELTLCEWVKERIAIPACEWEKLLQCVPAELLEAIHSNKSLGGKLEYFGQENSENSVVVHREWAKKWKGSDRKKLAEDCLGQWLRYQGPIQILKIANVFGLSINEAKEVILF

SEQ ID NO: 3825 - DNA, 630 bp, Unknown
  Obtained from environmental sample
  misc_feature (1)..(630): n is a, c, g, or t
gtggcagcgggtatgttcacggctatactgaaaaaaaatcccgaatcggcagaggcaaattatcagtacgggcgttatataatgcaaaaaggagattttaagaagtcgcaggaatatttggaaaaagcggttaaaattgaaccatataattcacgctatatagcacgtctaggaatggcggagttttatttaaagcacgattcaaatgcagaagacctttacaaaaaagctttgaaaataaacccttacgattaccacacttggtttaaccttggcgaactatacctcagcagggcaaacgaaagtggtagtgcatcggaggttcgcaaaaaaacaaaaaatgctttggaatcatatttaaaagccatagaattggattcttcgcacgcaaatgcgcattatcgcataggcgttatattaaacgtaaacggcgggtacaaagaggctatacggcatttgacaatagcttctgaaaaaatgccaaaaaatacttctgttatgatgcaactcggttctgcttatatgcaactgggcgataccgctaaatatattggttatttgaatgatattttgcgattagatccatttgacagagtagcgggaagtgagtttaaacgattgaataaataa

SEQ ID NO: 3826 - protein, 209 aa, Unknown
  Obtained from environmental sample
  DOMAIN (51)...(84): Tetratricopeptide repeat
  misc_feature (1)..(209): Xaa is any amino acid
MAAGMFTAILKKNPESAEANYQYGRYIMQKGDFKKSQEYLEKAVKIEPYNSRYIARLGMAEFYLKHDSNAEDLYKKALKINPYDYHTWFNLGELYLSRANESGSASEVRKKTKNALESYLKAIELDSSHANAHYRIGVILNVNGGYKEAIRHLTIASEKMPKNTSVMMQLGSAYMQLGDTAKYIGYLNDILRLDPFDRVAGSEFKRLNK

SEQ ID NO: 3827 - DNA, 522 bp, Unknown
  Obtained from environmental sample
  misc_feature (1)..(522): n is a, c, g, or t
gtgggacgcgtttggcatttcctttatcgggctgtcaggggagagccggctgaaaattttgacagggagcccggctcgcgttccatcagcaccgaacgcactttcgcttatgatctctcagacgaatttgcgatagaaactgccctccttgaaatatgcgaaacgctgatgtttcggcttatttcaagcagggtacaaagcgcgacagtttcccttaaaatccgttatggcgatttttccaccgggaacgctcaaaaaacattgcacgatccggttcttacactgaatgacttttataagcatgttcttgatctgtttcataaaaagtaccagagggggaggggagtgcggctcattggggcggggctggcaaacttgatggaagaaaacaacctgcgccagggggatctttttgatccctcaaaagaaaaagaacgccgcctggaagaatccatcttaaaaataaacgagaaatttccggaagctacccttcgccggggccgctcaattctggctccctga

SEQ ID NO: 3828 - protein, 173 aa, Unknown
  Obtained from environmental sample
  misc_feature (1)..(173): Xaa is any amino acid
MGRVWHFLYRAVRGEPAENFDREPGSRSISTERTFAYDLSDEFAIETALLEICETLMFRLISSRVQSATVSLKIRYGDFSTGNAQKTLHDPVLTLNDFYKHVLDLFHKKYQRGRGVRLIGAGLANLMEENNLRQGDLFDPSKEKERRLEESILKINEKFPEATLRRGRSILAP

SEQ ID NO: 3829 - DNA, 420 bp, Unknown
  Obtained from environmental sample
  misc_feature (1)..(420): n is a, c, g, or t
atggggggtgctccagtttacgcgaaatttattccaagtataggcagtattgcggtaggcctcgcggctactgttttcagcgcgattcagttttggcctaatcttgcgccgatggccgctgtgggccttgtcatgttgattattaatattatctttggctttattctggagcctaaaattatgggcgacaggctgggtatttccccgctgatcgtgcttgcctcccttttggtctggggatatatatggggctttgtaggccttattcttgccgtgcccatgatggcgataataaaaatcgtttgcaaaaatatacccgtgctggagccaatttccatactattgggatcgcataaggtcgctctgccctccttaaagaaaacaggcatggaggattcggtttcagggagccagaattga

SEQ ID NO: 3830 - protein, 139 aa, Unknown
  Obtained from environmental sample
  misc_feature (1)..(139): Xaa is any amino acid
MGGAPVYAKFIPSIGSIAVGLAATVFSAIQFWPNLAPMAAVGLVMLIINIIFGFILEPKIMGDRLGISPLIVLASLLVWGYIWGFVGLILAVPMMAIIKIVCKNIPVLEPISILLGSHKVALPSLKKTGMEDSVSGSQN

SEQ ID NO: 3831 - DNA, 642 bp, Unknown
  Obtained from environmental sample
  misc_feature (1)..(642): n is a, c, g, or t
atgaaaaaaatcggcaagaaacaccataaaaacctggcagctttggttatcattttggtgctttcaggggcacttatcgcaggttacatggttggcatgtttaattttgttgaatacaaactatatgatcctagaataaacgtttttgccaacggatctataaaatcccatgatataattctgatcctgttggatcagcacagtatcgaatggggccaccaggagcggggctggggctggccatggccaagagaggcttatgcggagttggtggattacatgaaccttggacaagccaagtctgttgttttcgatatacttttcactgagccttcgatttaccgtaacgccaggcagaacgaaatcattgaaagcgtgttaaaaacccgtgatatgaccaaatccgcttccgacggaggagagctgcaaacggcgcttcgcctttccatggaagcgtttgaggaaattgaggaattgagaggcaaggacgatgcttcttttgcagaggctgcgaaaaggtatggcagagttgtgcaggggattaatttcagcagccagacgggaagcagttacacatggccttcgtatctgaataagccngtttttttatacagagactttcggcaccctcggccaatctga

SEQ ID NO: 3832 - protein, 213 aa, Unknown
  Obtained from environmental sample
  SIGNAL (1)...(27)
  misc_feature (1)..(213): Xaa is any amino acid
MKKIGKKHHKNLAALVIILVLSGALIAGYMVGMFNFVEYKLYDPRINVFANGSIKSHDIILILLDQHSIEWGHQERGWGWPWPREAYAELVDYMNLGQAKSVVFDILFTEPSIYRNARQNEIIESVLKTRDMTKSASDGGELQTALRLSMEAFEEIEELRGKDDASFAEAAKRYGRVVQGINFSSQTGSSYTWPSYLNKPVFLYRDFRHPRPI

SEQ ID NO: 3833 - DNA, 366 bp, Unknown
  Obtained from environmental sample
  misc_feature (1)..(366): n is a, c, g, or t
gtgtcggttccttctgttccaatagacgaaaacagattgagcggtggcggcgagagttcaaaggaaatacaaaaacgtgttgaagcagcttgcgaaattcaagagaatagacttaaagagagaaaaatttttcgcaatgggcatttagatggcaaaactcttaaagacattcttttttgggactctgaatcagaaaattttgctatgaaagctgcggaaaaatggcgaatgagccacagaggttacgataggatgttgaaagttgcccgtacaattgcagatttgaggcaaagcagcagggtagagagaacagaccttgcagaggcaattcaatacagagctttggaggcctcatggatagactaa

SEQ ID NO: 3834 - protein, 121 aa, Unknown
  Obtained from environmental sample
  misc_feature (1)..(121): Xaa is any amino acid
MSVPSVPIDENRLSGGGESSKEIQKRVEAACEIQENRLKERKIFRNGHLDGKTLKDILFWDSESENFAMKAAEKWRMSHRGYDRMLKVARTIADLRQSSRVERTDLAEAIQYRALEASWID

SEQ ID NO: 3835 - DNA, 840 bp, Unknown
  Obtained from environmental sample
  misc_feature (1)..(840): n is a, c, g, or t
ttgatggccgagatcccctcgcgagctgaagccccggacgtcctgtccgtctgccgacgcgtagaggcccgtggcgcggtgactgccgcccataagataaacgcgtccgtcagcctgatcatgcggtacgccatcgccaccgggagagcagaaagggacccctgccccgacctccgcggagcattgaagccccacccgtcaaagccattcgccagcctgaccgaccctgcgaaagttgccggcctgctgaaagcaatagacggctacagggggacacacgtcgtccgctgcgccctggccttcgcccccctggtgtttgtccggccaaacgagctcaggcatgcaaaatgggaggacatagacctggagcgcagagagtgggtcttcgtctactcaaagcaaaaaacaagcgcaccggtaaagcgcaggctggtcgtgccgctgtcggaccaggcgctggccatactacgagacatacagcctctgacgggcgacgggaaatacgtcttcccaggcctccggcacggccagcccctgagccagcccgccctcaacgccgccctccagacgctgggctatgacaccggcagcgagatgacgctgcatggcttccgcgccatggcccgcaccatcctcgccgagaggcttcacttcgacccccagtggattgagcggcagctctcccacaagacccacgagaaccttggggagtcctacgaccgcactcaattcctggaacagcgaanagcaatgatgcaggcttgggctgactacctagacaggctgaaaggcggggaaacggcggataaagcgagtcgcggcggaggcagcgacagctga

SEQ ID NO: 3836 - protein, 279 aa, Unknown
  Obtained from environmental sample
  DOMAIN (82)...(249): Phage integrase family
  misc_feature (1)..(279): Xaa is any amino acid
MMAEIPSRAEAPDVLSVCRRVEARGAVTAAHKINASVSLIMRYAIATGRAERDPCPDLRGALKPHPSKPFASLTDPAKVAGLLKAIDGYRGTHVVRCALAFAPLVFVRPNELRHAKWEDIDLERREWVFVYSKQKTSAPVKRRLVVPLSDQALAILRDIQPLTGDGKYVFPGLRHGQPLSQPALNAALQTLGYDTGSEMTLHGFRAMARTILAERLHFDPQWIERQLSHKTHENLGESYDRTQFLEQRXAMMQAWADYLDRLKGGETADKASRGGGSDS

SEQ ID NO: 3837 - DNA, 582 bp, Unknown
  Obtained from environmental sample
  misc_feature (1)..(582): n is a, c, g, or t
gtgaagttttttcccgcggagcaagccggaggcattgaatatatcaaagcgatatcagccccctaccctaacatgaaattcattcccaccggcggcatcaacgcggtaaatatcgccaagtatatttcttttgataaaaccctcgcctgcggcacttcatggatagcaagcgccgatcttatcaacgcgggtaatttcgaaagaataacagccctgtcaaaggaagcggtactgggaatgctcggcttcagcgtttcccacatcgggatcaactcccctaatgagcccgaggcaataaaagccgcggaactctttaacaggcttttcgggcatccgctaaaacacggaaacagctccgtttttacgggcgaaaacattgagttcttaaaaacatcggcgccgggagcccgcgggcatatagcgatcaagaccaacagcctgtcccgggccatcgcgtatcttgaacgcgccggtatcgcgtttgattacgggagcgccacaaaagatcctaaaggcaatattaccgcgctgtatctgaaagaagagattctgggcttcgccctgcatttggtacgaggatag

SEQ ID NO: 3838 - protein, 193 aa, Unknown
  Obtained from environmental sample
  DOMAIN (1)...(72): KDPG and KHG aldolase
  misc_feature (1)..(193): Xaa is any amino acid
MKFFPAEQAGGIEYIKAISAPYPNMKFIPTGGINAVNIAKYISFDKTLACGTSWIASADLINAGNFERITALSKEAVLGMLGFSVSHIGINSPNEPEAIKAAELFNRLFGHPLKHGNSSVFTGENIEFLKTSAPGARGHIAIKTNSLSRAIAYLERAGIAFDYGSATKDPKGNITALYLKEEILGFALHLVRG

SEQ ID NO: 3839 - DNA, 921 bp, Unknown
  Obtained from environmental sample
  misc_feature (1)..(921): n is a, c, g, or t
gtgctgtttttgaatctggcgctggcttcttatgcgcacaatgtaaggaatttctccgaagcggagaggctgtacaaagaattggctgacacggctcagaattacaataccgctgaatatgaagccggtacttaccatcaactggggtgggtcgcactggaacggcgggattttgatgccgccgaggactggtacaaacgctcgctggaaattactgagaaacatggaaacgagcatggcatggccggtacttaccatcaactggggtgggtcgcacaggaacggcgggattttgatgccgccgaggactggtacaaacgctcgctggaaataaagcagaaacagggaaacgagcatggcatggccattacttaccatcaactggggatggttgcggagaaacggggggatttagacgccgccgaggactggtacaaacgctcgctggcaatagagcagaaacagggaaatgagcatgacatggccagtacttaccatcaactggggagggtcgcggaggaacggcgggattttgacgccgccgaggactggtacaaacgctcactggcaataaagcagaaacagggaaacgagcatggcatggccagtacttaccatcaactggggatggttgcggaggaacggggggatttagacgccgccgaggactggtacaaacgttcactggcaataaagcagaaacagggaaatgagcatggcatggccagtacttaccatcaactggggagggtcgcggaggaacggcgggattttgacgccgccgaagactggtacaacctgtcgttgactattttcgagcggtttaatgaccagcataacgcaaacaattgtcaggaaagtatgacccggcttcaaacaaaaaaatcagccaagcccgacggttcagaaaccaaagcatag

SEQ ID NO: 3840 - protein, 306 aa, Unknown
  Obtained from environmental sample
  DOMAIN (42)...(75): Tetratricopeptide repeat
  misc_feature (1)..(306): Xaa is any amino acid
MLFLNLALASYAHNVRNFSEAERLYKELADTAQNYNTAEYEAGTYHQLGWVALERRDFDAAEDWYKRSLEITEKHGNEHGMAGTYHQLGWVAQERRDFDAAEDWYKRSLEIKQKQGNEHGMAITYHQLGMVAEKRGDLDAAEDWYKRSLAIEQKQGNEHDMASTYHQLGRVAEERRDFDAAEDWYKRSLAIKQKQGNEHGMASTYHQLGMVAEERGDLDAAEDWYKRSLAIKQKQGNEHGMASTYHQLGRVAEERRDFDAAEDWYNLSLTIFERFNDQHNANNCQESMTRLQTKKSAKPDGSETKA

SEQ ID NO: 3841 - DNA, 618 bp, Unknown
  Obtained from environmental sample
  misc_feature (1)..(618): n is a, c, g, or t
ttgggactacaaatccttcttgaaaaagatcaaaggtttgagattatcggaacagccgaaaacagcgccgacgctataaaaatagttgaaaaagaaagacctaatttggtgcttatggaaatgcagcttggcaaggaaaacggattggaattaatcccaaagttaagggcaataaaccctgaagtttctattttaataatctccgcacacgacgagcgtttttacgccgaaagggttcttcgtcttggagccagaggatatgttttaaaaaccgaatctgccgacgccataatgtccgcgataaataccgttctggacaacaaggtttatttaagcgagaccgaaagggacagaatactccaaacaatgacggaagaatcaaaacccggcgttaaagactggattacttcaattcaattcctttcaaaccgcgaattgcagattttttcttttcttgcaaaggggttaggcaccattgaaattgcgtcgcggttaaatttaagcacaaagacaattgacactcataaggagcatattaagataaaacttcaatgcaataccgtgcaggaactcaggcaaaaagcgatagaatggtccaaccgttcaggcaatctttaa

SEQ ID NO: 3842 - protein, 205 aa, Unknown
  Obtained from environmental sample
  DOMAIN (138)...(195): Bacterial regulatory proteins, luxR family
  misc_feature (1)..(205): Xaa is any amino acid
MGLQILLEKDQRFEIIGTAENSADAIKIVEKERPNLVLMEMQLGKENGLELIPKLRAINPEVSILIISAHDERFYAERVLRLGARGYVLKTESADAIMSAINTVLDNKVYLSETERDRILQTMTEESKPGVKDWITSIQFLSNRELQIFSFLAKGLGTIEIASRLNLSTKTIDTHKEHIKIKLQCNTVQELRQKAIEWSNRSGNL

SEQ ID NO: 3843 - DNA, 462 bp, Unknown
  Obtained from environmental sample
  misc_feature (1)..(462): n is a, c, g, or t
gtgtcaattgcggttatatttttatatagaaataatacgtacatcaccaataatagtgaattatcttattatatcatgaatcaggggaaaaaaataaataatgttgaaaaatttgttccgatacagaggatatttattccgcaaagattatcttttgatataatacaggatttgggaattagaagtttatgtgaatacacgttattattttatattaactcaaacaggacaatgagtttttcacaatggataaagggagaatttaaattcgaatcggatatagaattttcattaattgacaatcaaacaaccgcgataatcgcatccgatagattgtactcaagtgtaataaaaaagacgacaattttaagtaataaagacatagaagaagcgacagatgaagtttatacattacaggcggagttattggcggaaaaactgaattcattatttagtaattaa

SEQ ID NO: 3844 - protein, 153 aa, Unknown
  Obtained from environmental sample
  misc_feature (1)..(153): Xaa is any amino acid
MSIAVIFLYRNNTYITNNSELSYYIMNQGKKINNVEKFVPIQRIFIPQRLSFDIIQDLGIRSLCEYTLLFYINSNRTMSFSQWIKGEFKFESDIEFSLIDNQTTAIIASDRLYSSVIKKTTILSNKDIEEATDEVYTLQAELLAEKLNSLFSN

SEQ ID NO: 3845 - DNA, 456 bp, Unknown
  Obtained from environmental sample
  misc_feature (1)..(456): n is a, c, g, or t
ttgggagcgaataaagagcttatagagctctattggaatatcgggcggattattatctcaaatacaagatatggtgctaaattcatagaaaaccttgcccgtgacattaagctggcgtttccgaacattaaggggtattctgtccgtaacctcaattatatgcgtaaattcgcggaaattgtgagtgatgaggcaaaagtgcagacagtgtctgcacttttgagctggtcgcacaacaccttgctttttgacaagacaaagactcttgacgaatatttatggtatagcgaacaaacgattaaaaacgggtggtcattatcgtcattagaacatcatgttggtacgaaaacgtaccataggcaagagttggcggaanaagcgaaacattacgantactcgctctcaccgcatttagcggttagcagccgatacgttgaaaaacccgtatgtttttga

SEQ ID NO: 3846 - protein, 151 aa, Unknown
  Obtained from environmental sample
  DOMAIN (3)...(147): Protein of unknown function (DUF1016)
  misc_feature (1)..(151): Xaa is any amino acid
MGANKELIELYWNIGRIIISNTRYGAKFIENLARDIKLAFPNIKGYSVRNLNYMRKFAEIVSDEAKVQTVSALLSWSHNTLLFDKTKTLDEYLWYSEQTIKNGWSLSSLEHHVGTKTYHRQELAEXAKHYXYSLSPHLAVSSRYVEKPVCF

SEQ ID NO: 3847 - DNA, 339 bp, Unknown
  Obtained from environmental sample
  misc_feature (1)..(339): n is a, c, g, or t
gtgccggtaatgtgcctgcaatgcgaggaagcctgctgtgtcaaggtttgcccagtgggggctatgcacaaggatgagaacggcgttgtaaagaccgacgccaacaagtgcattgtctgcaagatgtgcgttaacgcctgccctctggggaatgtctcattcagccaatcaagccgaaaaattgttaaatgcgaactctgcgacggagatccgggatgcgccaaatactgcccggcgggctgtctggtatataccgaagaggaagacggtctgggccggaaaagagctatagctctttctcttaaaaaaatttttgggcaagaggaggcggcaaaatga

SEQ ID NO: 3848 - protein, 112 aa, Unknown
  Obtained from environmental sample
  DOMAIN (30)...(53): 4Fe-4S binding domain
  misc_feature (1)..(112): Xaa is any amino acid
MPVMCLQCEEACCVKVCPVGAMHKDENGVVKTDANKCIVCKMCVNACPLGNVSFSQSSRKIVKCELCDGDPGCAKYCPAGCLVYTEEEDGLGRKRAIALSLKKIFGQEEAAK

SEQ ID NO: 3849 - DNA, 963 bp, Unknown
  Obtained from environmental sample
  misc_feature (1)..(963): n is a, c, g, or t
atggatgatgagcttatgcggctttttggcggagaaaaaatgaagaatctcatgtcagaaattggcatgacaggcggagagccgatttatcaccccatgcttaaccgtagcattgaaaatgcgcagaaaaaagtggaagagcggaactntgagatacgcaagcaccttctggaatacgatgatgttttgaatcaacagcgtaaatatatttatgaacagcgtgatgcgatactcatggatcaggatttaaaaaagcgggtaaacgattccactgcggcaatggtcggcgacttaattgatgaatacgttggaaattacaaacacagcgtaaataccgcaatcaaacaactcgcggaacaattaaaaactaaattcggctggcagcttgcccttgagccaaacagccctgaaatgaaagctcctgaactgctggaaaaacatataacaacagaactggaacaagaattgaatgataaggaagcccttatcggttctgcttatttaaatatgattatccgtgaaaattaccttcatgcggtagatcgtaaatggctggatcatcttgaaaatatggaagcccttcgtgaagctgtgtatttgcgtcattatgcgcaaaaaaatccgcttactgaatacaaactggaaggttatcgtatttttgaggacatgattgaagagataaggcaggagattgcctcccgtatgcatctaatccgtatacaagttgcagaaggaggagggcaaaggcctgtaagccgttcaatcggtactgtccactcggcaagccacaacagtatggcttctttcggcggagtatcacaggctgccgattcttctcctatgtcaagagcaagccgtcccgataacgttacggtaattcgtacacagcccaaagtcggacgaaatgacccctgtccctgcggaagcggcaaaaagtacaaattttgccacggcgcgcaatag

SEQ ID NO: 3850 - protein, 320 aa, Unknown
  Obtained from environmental sample
  DOMAIN (301)...(320): SEC-C motif
  misc_feature (1)..(320): Xaa is any amino acid
MDDELMRLFGGEKMKNLMSEIGMTGGEPIYHPMLNRSIENAQKKVEERNXEIRKHLLEYDDVLNQQRKYIYEQRDAILMDQDLKKRVNDSTAAMVGDLIDEYVGNYKHSVNTAIKQLAEQLKTKFGWQLALEPNSPEMKAPELLEKHITTELEQELNDKEALIGSAYLNMIIRENYLHAVDRKWLDHLENMEALREAVYLRHYAQKNPLTEYKLEGYRIFEDMIEEIRQEIASRMHLIRIQVAEGGGQRPVSRSIGTVHSASHNSMASFGGVSQAADSSPMSRASRPDNVTVIRTQPKVGRNDPCPCGSGKKYKFCHGAQ

SEQ ID NO: 3851 - DNA, 378 bp, Unknown
  Obtained from environmental sample
  misc_feature (1)..(378): n is a, c, g, or t
ttgatggccgaggcgggggggtttctcggggcttttatcgttcttaaaatcggcgacagatcagcgtcggcgattaagtcgggcggcacgactaggcgcgctgccaagatggtaacgcttgatatcgaccatcccgacgtagaaaagtacataagctggaaagccggagaggaacataaagtcgcctctatggtaaccggttctttgatacttaaaaaacatatcgacgccgttaaaagggcgctggccggtttcagaggtcctgaagaagacaaattcagcgccgaanaaaaccacgatctcgctatggctctgcgcgcggcgttaggtgataaaataccgccttcttacctgtaccagcagcttcgccgtctttga

SEQ ID NO: 3852 - protein, 125 aa, Unknown
  Obtained from environmental sample
  misc_feature (1)..(125): Xaa is any amino acid
MMAEAGGFLGAFIVLKIGDRSASAIKSGGTTRRAAKMVTLDIDHPDVEKYISWKAGEEHKVASMVTGSLILKKHIDAVKRALAGFRGPEEDKFSAEXNHDLAMALRAALGDKIPPSYLYQQLRRL

SEQ ID NO: 3853 - DNA, 930 bp, Unknown
  Obtained from environmental sample
  misc_feature (1)..(930): n is a, c, g, or t
ttgattttacaggtattaagaaacgtacttttctttaaagaaaacaaaatggcgcatcgccgtgtggatttgcttccgcctcctacagagcaggaaagtgttaatacaaatgaaaacgccgttgtnttcgacactgagaatttgcatcctgttgtctcttttgaagatattagacggaaacctcaaactaattttaatgcggaaaataatatagaagcaaataagaatattgatgttacagatagagacattgataatataaaagatattgttgaacaggatattgatgagccgggtattgatatggataccgaaactgacagtgaagatgatgatattgatgccgtaacacgcgcgctggaagaagcggaagccgccgcggctgttcatgcggaacaggtgcgtaataaaaacaaacagttaaataatcttcgtcataaaaaatacatggttcctgtggatatacttaacgaataccccgacggcgaatattggattattgatcaggccactcgggacgctgctatcgcattaaaagaaactttaaatgaatttaatattcaagctgaagttacaggcataagaaaagggccggtaattaccatgtttgagatacttcccgctccgggcgttaaactttcaaaaattgtcggcttgcaggacaacatcgccctgcgtcttgccgccgcttccgtgcgtattgtcgcccctattcctggaaaacacgctgtaggaatcgaagttcccaatgccaaacgtaacattgtttcttttaaagaaattatcgaaggcgagcttcaacgcaccgaaaagaaaatggaaattcccgtcgttatgggaaaagacatcacgggagaggcgcagacggttgaccttgttcagatgccccaccttttaatcgctggcgcaccggttcctcggccaatctga

SEQ ID NO: 3854 - protein, 309 aa, Unknown
  Obtained from environmental sample
  misc_feature (1)..(309): Xaa is any amino acid
MILQVLRNVLFFKENKMAHRRVDLLPPPTEQESVNTNENAVVFDTENLHPVVSFEDIRRKPQTNFNAENNIEANKNIDVTDRDIDNIKDIVEQDIDEPGIDMDTETDSEDDDIDAVTRALEEAEAAAAVHAEQVRNKNKQLNNLRHKKYMVPVDILNEYPDGEYWIIDQATRDAAIALKETLNEFNIQAEVTGIRKGPVITMFEILPAPGVKLSKIVGLQDNIALRLAAASVRIVAPIPGKHAVGIEVPNAKRNIVSFKEIIEGELQRTEKKMEIPVVMGKDITGEAQTVDLVQMPHLLIAGAPVPRPI

SEQ ID NO: 3855 - DNA, 834 bp, Unknown
  Obtained from environmental sample
  misc_feature (1)..(834): n is a, c, g, or t
ttgggcgcatatatgtacaaaaaaatgatgacgggcaaatttgtctcggtttataaatatttcgctgttgtaaacgcgtggtgctacgcgatttatattatcaataaacttggggatatgttatttacttattattcaggcggacaagtttatcaaatagcgtatcttatttccgcggcttcggtaaccgctactttttttatcgcgtattttattacgcgcataaaactgctgtcaggaaagggaataaaaattctttcaataatactttactgcataggcattatttggatgtttatcaataatggctctctttcgcctgtcgcgtccgcttatttcagtatggccacgccgaattttggcattactctggccgggacgttaattctggctatgttggggcttttgtccgttctttctatgctggatgtaatgaagattgttattatagaacggaaaaaaggaatcgaatggctgcccttgattgtttcaggatactttgtgattcttctttcgcagaatttaatagcgcagtataatttgagtttttcaagcgcggtaatcagcattatttacgcgcttaccgcgttggcatggaacatttttgggtttgtacgccgttttgtttttatccgccgctttggactagttcttgctattttcgctgtggtaaagttgttccttatagatctggcgggtctcgcccagggatacagaatcgcgtcgtatttcgcgcttggaatatctcttataggaatttcatttgtgtatcaatatttcagcaaacggctggaattaaaggaaggaatctcttttcatgccgaaaaaaattaa

SEQ ID NO: 3856 - protein, 277 aa, Unknown
  Obtained from environmental sample
  misc_feature (1)..(277): Xaa is any amino acid
MGAYMYKKMMTGKFVSVYKYFAVVNAWCYAIYIINKLGDMLFTYYSGGQVYQIAYLISAASVTATFFIAYFITRIKLLSGKGIKILSIILYCIGIIWMFINNGSLSPVASAYFSMATPNFGITLAGTLILAMLGLLSVLSMLDVMKIVIIERKKGIEWLPLIVSGYFVILLSQNLIAQYNLSFSSAVISIIYALTALAWNIFGFVRRFVFIRRFGLVLAIFAVVKLFLIDLAGLAQGYRIASYFALGISLIGISFVYQYFSKRLELKEGISFHAEKN

SEQ ID NO: 3857 - DNA, 858 bp, Unknown
  Obtained from environmental sample
  misc_feature (1)..(858): n is a, c, g, or t
gtgggggtaatgattctgttttctctatcatttttgacggttttttttctgaaaatacgaggcgccggccgaaacgaaaatcaacaactacgggattcttttgaatcaggcgcgttcgaagccgcctatgagcaaagtgaccagatgctgaagaaaaagcccctggatttttttctgttgacaatacacgggttttccgcttaccagctagccatcgcccagacaaacactttcgacaccctttctttcattgataattgcatctggtcgctcagaaaggctttgctgaccagggtgaatgacggaagagttttttacgtacttggaaaagcgtactattacaagggaacggggtactcggatttggccgttaattaccttgaaaaagccagatcggcatactatatggccgccgacattcctgaatatctggggctggcttacgcggcaatgagggatttccgaagcagtgtggaagctttttcgctggccctgaccggcgaaacttcaccctcggatattttgctgcttgccatcgccagatcttaccttgcccttgatgaagttgagcaggcaaaagcgtatttgatccgttgtctggaaatcacaaaggattccaaaactacaggcgcggcgcggttggtgttgggcaatacgctggtaaaaaccggagatattcggggggcggaaaaggaatatttgaaagtgatagaggaagacgatgataatgccgaagcgcattatcagcttggagaactgtacgctttggggggagacgtaaccagagcaagggcagagtggcgcagggcgctcagaattgatcccgcccatggaccggcgcgcagccggttgaattaa

SEQ ID NO: 3858 - protein, 285 aa, Unknown
  Obtained from environmental sample
  DOMAIN (244)...(277): Tetratricopeptide repeat
  misc_feature (1)..(285): Xaa is any amino acid
MGVMILFSLSFLTVFFLKIRGAGRNENQQLRDSFESGAFEAAYEQSDQMLKKKPLDFFLLTIHGFSAYQLAIAQTNTFDTLSFIDNCIWSLRKALLTRVNDGRVFYVLGKAYYYKGTGYSDLAVNYLEKARSAYYMAADIPEYLGLAYAAMRDFRSSVEAFSLALTGETSPSDILLLAIARSYLALDEVEQAKAYLIRCLEITKDSKTTGAARLVLGNTLVKTGDIRGAEKEYLKVIEEDDDNAEAHYQLGELYALGGDVTRARAEWRRALRIDPAHGPARSRLN

SEQ ID NO: 3859 - DNA, 426 bp, Unknown
  Obtained from environmental sample
  misc_feature (1)..(426): n is a, c, g, or t
atgggacatgcgtcctccatagcgttgtccatagccctccaaaaacctgaattacaggtaacctgccttgacggagacggagcggctcttatgcacatgggctcctttgccgcaattgggacgctaaaaccgcataatctttgccacatcgttcttaataacagcgcccatgattcagtagggggacagcctacgattgccccatttattgatatgcagtccgtcgcacgcgcctgcggttatgttcatgtttatcaagcaaaaacaaaagaagaattaaaggcaatttttaatgaaaaacacgaagagcttacatttatcgaagtgaaagtaaaaaaaggcgcgcgaaaaaatttgggacggccaaaaacaacaccgcaagaaaacaaggcggcgtttatgaaattcatcggagaacaaaaatga

SEQ ID NO: 3860 - protein, 141 aa, Unknown
  Obtained from environmental sample
  DOMAIN (1)...(109): Thiamine pyrophosphate enzyme, C-terminal TPP binding domain
  misc_feature (1)..(141): Xaa is any amino acid
MGHASSIALSIALQKPELQVTCLDGDGAALMHMGSFAAIGTLKPHNLCHIVLNNSAHDSVGGQPTIAPFIDMQSVARACGYVHVYQAKTKEELKAIFNEKHEELTFIEVKVKKGARKNLGRPKTTPQENKAAFMKFIGEQK

SEQ ID NO: 3861 - DNA, 528 bp, Unknown
  Obtained from environmental sample
  misc_feature (1)..(528): n is a, c, g, or t
ttgtttcgtattctcgcggcgcaaacaggaaatttactgaatgtcaatgaattgtcaaaaacccttcaaattaaacacgaaaccgcggaaaattatttatatgttctacagaaatgttttcatatcgcgcttgtcaggccttatagcaaaaacatcagaagcgagctgacaaaaatgtcaaaagtttacctgttggatacggggatgatgaatgttttaacaaataatttccagccgttaaacgagaaaatcaataagggcaattattgggaaaatatttatttcaggcggattgccgaactttacggtatgagtaatattaatttttggagaaccacatcgggtaatgaagttgattttatcatacacgaaacaggaaaaccttcgcacgcggtggaaattaagtacaacaatgaaaaaattaacgagactaaatataaaaaattccgtgaggattaccctgagataggtttgtcattcgcttattatgaacctttttccgaggattttttcagaataggtatttaa

SEQ ID NO: 3862 - protein, 175 aa, Unknown
  Obtained from environmental sample
  misc_feature (1)..(175): Xaa is any amino acid
MFRILAAQTGNLLNVNELSKTLQIKHETAENYLYVLQKCFHIALVRPYSKNIRSELTKMSKVYLLDTGMMNVLTNNFQPLNEKINKGNYWENIYFRRIAELYGMSNINFWRTTSGNEVDFIIHETGKPSHAVEIKYNNEKINETKYKKFREDYPEIGLSFAYYEPFSEDFFRIGI

SEQ ID NO: 3863 - DNA, 315 bp, Unknown
  Obtained from environmental sample
  misc_feature (1)..(315): n is a, c, g, or t
atggcaaacattagggaaatactggcgaaaaatataaaagaacaccggcacaagtatggtttttcacaagataaattggcagaaatagccggtatttcttcacaatatctagccactgttgagacttgccgtaaatttccaacacccgaagtgctagatcgccttgcagaagcattaggcattgaaacacatgagctttttacatctgcccctactcctcaaaatgaactggaaaagctgagaaaggaaattattggagaggttgtaaaaacaataaaacaatccttcgcagaagagagtaaaaagaagaaataa

SEQ ID NO: 3864 - protein, 104 aa, Unknown
  Obtained from environmental sample
  DOMAIN (12)...(66): Helix-turn-helix
  misc_feature (1)..(104): Xaa is any amino acid
MANIREILAKNIKEHRHKYGFSQDKLAEIAGISSQYLATVETCRKFPTPEVLDRLAEALGIETHELFTSAPTPQNELEKLRKEIIGEVVKTIKQSFAEESKKKK

SEQ ID NO: 3865 - DNA, 399 bp, Unknown
  Obtained from environmental sample
  misc_feature (1)..(399): n is a, c, g, or t
gtgtctttcggaattatacgcggcggccatgtggacgctaccattattgnggcgctgaaagtggacgaaaagggcaacatctcaaactggatagtgccgggaaaaacgattcccggcatgggcggcgccatggatctgatggcagccgcaaaaaaagttattgtcacaatgactcatacccagaaaggcgctccaaagatactgaagagctgcacccttccgtatacggccctaggcgctgttgacatgatcatcacggaaatgggagtgatggaaattacgcccgacggcattgtgctgacggagctgcaccctgattatacgagagagcagatacaggcggagacgggggccaggttgataatcagcccggatttgaaagtagggaatagtgagtag

SEQ ID NO: 3866 - protein, 132 aa, Unknown
  Obtained from environmental sample
  misc_feature (1)..(132): Xaa is any amino acid
MSFGIIRGGHVDATIIXALKVDEKGNISNWIVPGKTIPGMGGAMDLMAAAKKVIVTMTHTQKGAPKILKSCTLPYTALGAVDMIITEMGVMEITPDGIVLTELHPDYTREQIQAETGARLIISPDLKVGNSE

SEQ ID NO: 3867 - DNA, 576 bp, Unknown
  Obtained from environmental sample
  misc_feature (1)..(576): n is a, c, g, or t
ttgtacggcaaacataaagactcgcggcaaacgtataaacgcctgcggagaacattagggctggtactgcaggacgcagacgcacagattgtgggcgagaccgttatggaagacacggaatttgggcctgagaaccttgggtggccggcttctgatgtaaagatcgcagcggaaaaggcgctgttcgatatgaggcttatcgaaaaacaggacaattctccgcgccaactttcgggcggggagaaacgccgcctggctattgccggagtcgccgctatgggcagcagtacgataatcatggacgagccttttgccaacttggactggccgggcgtggttcagacgcttaacgttatacgcattttaaaaaaatttgatcataccatgataatcctgactcatgagcttgaaaaggcccttgcgttagctgacaggctgataatccttcataagggcaaagtccgcgctgactcgtctccggccgaagttcttgattcccttgatccttgctggggcgtgcgcgatccccgcaaacattacgcgtcaatagaggactgctcatggctggaaaattaa

SEQ ID NO: 3868 - protein, 191 aa, Unknown
  Obtained from environmental sample
  DOMAIN (15)...(152): ABC transporter
  misc_feature (1)..(191): Xaa is any amino acid
MYGKHKDSRQTYKRLRRTLGLVLQDADAQIVGETVMEDTEFGPENLGWPASDVKIAAEKALFDMRLIEKQDNSPRQLSGGEKRRLAIAGVAAMGSSTIIMDEPFANLDWPGVVQTLNVIRILKKFDHTMIILTHELEKALALADRLIILHKGKVRADSSPAEVLDSLDPCWGVRDPRKHYASIEDCSWLEN

SEQ ID NO: 3869 - DNA, 345 bp, Unknown
  Obtained from environmental sample
  misc_feature (1)..(345): n is a, c, g, or t
ttgtttttttcttttttaccttttaccttttcttttgtcttgccgataataacaatgatgaaacatagaattttttgtcaaatattggcttttatttgcgtttttttgctgttttccgcgggtgttttcgcacaacaggccgaaaattcgggtgggagtggggctgaagacgggcaaaaacccctgccaaggcagttcagggagattagcttgggtatggagctggataatctcaaagaagccctgcaaaaagacaaattattcaattttcgcggcgacaaggatgtttccttccttccggcgagggaagaaagtctggttgaaacaacaggttcctcgttgtaa

SEQ ID NO: 3870 - protein, 114 aa, Unknown
  Obtained from environmental sample
  misc_feature (1)..(114): Xaa is any amino acid
MFFSFLPFTFSFVLPIITMMKHRIFCQILAFICVFLLFSAGVFAQQAENSGGSGAEDGQKPLPRQFREISLGMELDNLKEALQKDKLFNFRGDKDVSFLPAREESLVETTGSSL

SEQ ID NO: 3871 - DNA, 807 bp, Unknown
  Obtained from environmental sample
  misc_feature (1)..(807): n is a, c, g, or t
ttggaagacgaaactgtttggcttacacagatgcaaatgggacaattatttgaaaaaagtagaaacacaataaccgagcatattcaacatattttcaaagaaggcgaattgcaagaaaaagtggtgtgtcgggatttccgacataccactcagcacggggcaatggaaggcaaaacacaaacaacaacaacaaaatattataatttagatgtcattatttcggtaggttatcgcgttaagtcaaaaaaaggtactcaatttaggatttgggctacccaagtgttaaagaattacctgcttaaaggatatgctatccatcagcaaatagaggatataaaaaatatatcccataatcacgagaatcgtttggttgaagttgaaaagaaaattgacgttttcataaaaacatccgcgttacctctagaaggtgttttctataatgggcagatttttgatgcttacgcttttgtctgcgacttggtaaagaaagcgaaaaagtcaattattctcattgataattacgtagatgaaagcgttttaacattactttccaagagaaacagcgatgtgtctgcaacgatttacacatccaaaatctcacctaaattacaactagatattcaaaaacacaattcgcaatatccacaaattatagtgaaaacatacacaaaagcacacgataggtttattctgattgatgagtatacatatcacataggagcatcgcttaaagacttggggaagaaattgtttgcgttttcaaagatgcagataaaagcaagtgattttatgaaaaatatttgttaa

SEQ ID NO: 3872 - protein, 268 aa, Unknown
  Obtained from environmental sample
  misc_feature (1)..(268): Xaa is any amino acid
MEDETVWLTQMQMGQLFEKSRNTITEHIQHIFKEGELQEKVVCRDFRHTTQHGAMEGKTQTTTTKYYNLDVIISVGYRVKSKKGTQFRIWATQVLKNYLLKGYAIHQQIEDIKNISHNHENRLVEVEKKIDVFIKTSALPLEGVFYNGQIFDAYAFVCDLVKKAKKSIILIDNYVDESVLTLLSKRNSDVSATIYTSKISPKLQLDIQKHNSQYPQIIVKTYTKAHDRFILIDEYTYHIGASLKDLGKKLFAFSKMQIKASDFMKNIC

SEQ ID NO: 3873 - DNA, 411 bp, Unknown
  Obtained from environmental sample
  misc_feature (1)..(411): n is a, c, g, or t
gtgccgccgctgatagtgattgtgccgccgttgcctctactaccaccgccgcctatacccgccccgccccaattgctactgccatcgcaggtcgccgttacagtgccgccactgatagtgatagtgccgccatcgctattagcgttgccaccaccgataccagctccggagttaccagttgccgttatagtgccaccgctgatggtgattttggcactgctacctttgtcgccaccaccgatgcctgctccagaggcaccgccagtcgccgttatattgccgccaataatgttaatttcgccgctattgccattgccgttgctaaggaactcaccaccgccaccaccgataccagcaccgccaaagccgccggtcgccgtcagcttgcccatattactacccgtggattga

SEQ ID NO: 3874 - protein, 136 aa, Unknown
  Obtained from environmental sample
  misc_feature (1)..(136): Xaa is any amino acid
MPPLIVIVPPLPLLPPPPIPAPPQLLLPSQVAVTVPPLIVIVPPSLLALPPPIPAPELPVAVIVPPLMVILALLPLSPPPMPAPEAPPVAVILPPIMLISPLLPLPLLRNSPPPPPIPAPPKPPVAVSLPILLPVD

SEQ ID NO: 3875 - DNA, 684 bp, Unknown
  Obtained from environmental sample
  misc_feature (1)..(684): n is a, c, g, or t
atggcgagacataaccggagcggcacaatggtaatgaatgaaggctctaaaatcacaggcaactccagtgcttcttcttctgccagtggcggcggagtttatgtggcaggaacccttaccatgaatggcggagaaatctcaggcaatactctatccagggcacaaggcggcggagtttatatattaggaacatttaccatgaatggcggagcaatatcaggtaatactgtctcttccgatgggagttatggcggtgggatttatgtaacaggaacattcaccatgaatgacggaaaaatctcaggcaacaccattaactccgtttggtcctctcaaggtggtggggtttgtgttgttggaggaacattttatatgaacggaggagaaatatccgccaattctgtttctactacttcaacgtcaaaatatgcttacgctattggcggcggggtttacgtatcttcttcaaaagacggattcattatgagcggtggtgttatttatgggagtaatgtaacaacaaacataagaaacatcgcaaaaactgacggagcggcattatctacatctgtaggagttgccaaatatggcacatacagcggtaacacattttacaaagcaggtgatttagcaactaccaataacaccatacggatagtgaacggcaatttgcagacgaattag

SEQ ID NO: 3876 - protein, 227 aa, Unknown
  Obtained from environmental sample
  misc_feature (1)..(227): Xaa is any amino acid
MARHNRSGTMVMNEGSKITGNSSASSSASGGGVYVAGTLTMNGGEISGNTLSRAQGGGVYILGTFTMNGGAISGNTVSSDGSYGGGIYVTGTFTMNDGKISGNTINSVWSSQGGGVCVVGGTFYMNGGEISANSVSTTSTSKYAYAIGGGVYVSSSKDGFIMSGGVIYGSNVTTNIRNIAKTDGAALSTSVGVAKYGTYSGNTFYKAGDLATTNNTIRIVNGNLQTN

SEQ ID NO: 3877 - DNA, 570 bp, Unknown
  Obtained from environmental sample
  misc_feature (1)..(570): n is a, c, g, or t
gtgcggccccagatggccacggtccgcccccggtcttcaaggcccttggagaaagacacaagccggaaagggaaggtgaatcgcttttctctgaaagacaccctccccggaggcgggagttttcctgttcttaaagaaacaaggacaagggtaacaggctaccgtcgggaagccgccggtttcgcgaaccttgaggaagcggaagtgattgtcgcggggggccggggtcttaaaaagggcgagaacatcggcatactacgggaaatcgccgcgcttcttggcggggaagtaggggcaagcagggacgtagtagaccggggctggataagttacccccaccaggtaggtctttcgggcaaaaccgtttctcccaaagtctatttggctttcggcatatccggggccattcagcatttggcgggaataaaaaccagcgaaactattgtttcggtcaatacggatcccgacgcgaatatccacaagttggcggatattgccattgtgggcgatgcctttgaggtattgggggaattgaaaaaacgcctaaagaaagcgggaaaggaggagtga

SEQ ID NO: 3878 - protein, 189 aa, Unknown
  Obtained from environmental sample
  DOMAIN (61)...(146): Electron transfer flavoprotein FAD-binding domain
  misc_feature (1)..(189): Xaa is any amino acid
MRPQMATVRPRSSRPLEKDTSRKGKVNRFSLKDTLPGGGSFPVLKETRTRVTGYRREAAGFANLEEAEVIVAGGRGLKKGENIGILREIAALLGGEVGASRDVVDRGWISYPHQVGLSGKTVSPKVYLAFGISGAIQHLAGIKTSETIVSVNTDPDANIHKLADIAIVGDAFEVLGELKKRLKKAGKEE

SEQ ID NO: 3879 - DNA, 531 bp, Unknown
  Obtained from environmental sample
  misc_feature (1)..(531): n is a, c, g, or t
atggtcgctatcgacgttcttcggagcagcaggagtagtaatcttacaacgataatggcgtttgtgtctacattatggtataagattcacgaggcggttcggccgtttaccgagactttgctttttacaggttacggacatatgaaccttgcccatctttttatagcggggatttctattgtcgcatcaggagcgatgatggatctttcaatggatgtcgccgccgcaatggatgaaattaaaaaccagcagcccgctattacacgcatgggaatcatgcgctccgggttgacagtcgcccgtcaagccgccggaacaatgtcaacaacactgcttcttgcgtattccgccgaatacaccgccatgattatgacatttctcgctcagggcgtcccccttgaaaatgtgataaacatggtctgggtctcctccgaggtagtgcatacattagtcggttgtttcggacttacccttgtcgctccactgaccgtatttgccggaggtatgctgctaggcaaaaaaaatgtataa

SEQ ID NO: 3880 - protein, 176 aa, Unknown
  Obtained from environmental sample
  DOMAIN (1)...(170): YibE/F-like protein
  misc_feature (1)..(176): Xaa is any amino acid
MVAIDVLRSSRSSNLTTIMAFVSTLWYKIHEAVRPFTETLLFTGYGHMNLAHLFIAGISIVASGAMMDLSMDVAAAMDEIKNQQPAITRMGIMRSGLTVARQAAGTMSTTLLLAYSAEYTAMIMTFLAQGVPLENVINMVWVSSEVVHTLVGCFGLTLVAPLTVFAGGMLLGKKNV

SEQ ID NO: 3881 - DNA, 888 bp, Unknown
  Obtained from environmental sample
  misc_feature (1)..(888): n is a, c, g, or t
atggtacggtcactttactcaggcatcagcggccttcgcacacaccaagtcggtatggacgtaacggccaacaacatctccaacgtcaacacggtggcatntaaggcggggagagccacgtttaaggaatcaatggttcagatgctgcaaggcccgtcgcgtcccgcgggcaaccagggcggcaggaacccgttgcagatcgggctgggcgttgcggtcggttccatcgacacgatgctgcgtcagggtaacatgcagacgacggggcagattacggatatcgcgcttgagggcagggcttatttggctttctcgaacggtagcggtacgtattatagcaggaacggcgggttgcagttggacgatatgggacgccttacgtcaccgacgaacgggtttaggttgcagggcaagatggcgcagccggacgggtcgttcaccgggaaagagatgatcggggatatcaggataccttggggtgagaagtcgccggctaaggctacggagaatatgacgttcggttgtaacttgaacagcgactcggaggcgcttgggacggttacgcatacaaataggttcttggcgaacgcgggtgtgctcaaccaacgtaatatgtatgacgggccgaatgggtttagccgcggcaagcttaccgaccttgttgacgagtatgggaatgaccttggaattagagagggcgatacccttacgttcgctaccggcgataagggaataccggtgtttagtttcaatgttgagaagtttccgctttatggttataatagtgcgacgcctccggtttgggaggcggtgcttgattccgacggcaaacaggtgcagcagattccgacgttgcaggattttgctaatcagcttgaagggtattaa

SEQ ID NO: 3882 - protein, 295 aa, Unknown
  Obtained from environmental sample
  DOMAIN (5)...(35): Flagella basal body rod protein
  misc_feature (1)..(295): Xaa is any amino acid
MVRSLYSGISGLRTHQVGMDVTANNISNVNTVAXKAGRATFKESMVQMLQGPSRPAGNQGGRNPLQIGLGVAVGSIDTMLRQGNMQTTGQITDIALEGRAYLAFSNGSGTYYSRNGGLQLDDMGRLTSPTNGFRLQGKMAQPDGSFTGKEMIGDIRIPWGEKSPAKATENMTFGCNLNSDSEALGTVTHTNRFLANAGVLNQRNMYDGPNGFSRGKLTDLVDEYGNDLGIREGDTLTFATGDKGIPVFSFNVEKFPLYGYNSATPPVWEAVLDSDGKQVQQIPTLQDFANQLEGY

SEQ ID NO: 3883 - DNA, 624 bp, Unknown
  Obtained from environmental sample
  misc_feature (1)..(624): n is a, c, g, or t
atggcttccattgcgtttacagggggaggcaccggagggcatatttatccggggcttgcggttgtttcgcatttaaaaaaaattgttccccacaggattttctggattggctcaggcaatggaatggacagggctataattgaaggcgctggggtagaattttttggcatcccgtccggaaaactcaggcgctatttttcactgcacaattttctggatgtttttaagattgcggcaggtttttttgcggccaggaagatactaaaaagggaaggcgcgtcttttttgttttcaaaaggaggctttgttagcgttcccccctgtgcagccgcgcgcttaatgaaaataccagtctttacccacgaatcggatttttcgccgggcattgctacgcggctgaatgcgagatttgccgaaagggtcttcattccctataaagaatccgctgctttcttcacaggcaaagcggcgaggaaagtccgcgtttccggaaaccccgtgcgcgccgagttcgcgatggcggatcccgtaaagggccgcgctttcctcggcttgggagacggcgaaaggatacttcttgtcctgggtgggagccttggttccagggagatcaataacctgtaa

SEQ ID NO: 3884 - protein, 207 aa, Unknown
  Obtained from environmental sample
  DOMAIN (4)...(143): Glycosyltransferase family 28 N-terminal domain
  misc_feature (1)..(207): Xaa is any amino acid
MASIAFTGGGTGGHIYPGLAVVSHLKKIVPHRIFWIGSGNGMDRAIIEGAGVEFFGIPSGKLRRYFSLHNFLDVFKIAAGFFAARKILKREGASFLFSKGGFVSVPPCAAARLMKIPVFTHESDFSPGIATRLNARFAERVFIPYKESAAFFTGKAARKVRVSGNPVRAEFAMADPVKGRAFLGLGDGERILLVLGGSLGSREINNL

SEQ ID NO: 3885 - DNA, 690 bp, Unknown
  Obtained from environmental sample
  misc_feature (1)..(690): n is a, c, g, or t
atgctgcaagccgccactgcggtagccaacgacggcatccttgttccggtaaaaaccgtttcgcggattgtttcggcggacggcaaaaccgtgaacagcttccagtcaagcgctccccggcgggttttcagcgctgcaactgcaagaatgatgcgctcttacatgatggacgtaacttccagcattggaacaggctggcgcgccaacgttgaggatctttccctggcggtaaaaaccggcaccgcccagatcatcgatccccaaaccggcgcttattcttccacggattttatagcgagctgcatagcaatgctcccggccgagcaaccttccctcgtgctttacattgtgatttacaaaccccagggcgcgtcctacctcggcggcaggattgcagcgccgcccatcagggaagccgccgaagccctcattaactacctgggcattccccggggcagaaacccgcagatcagccattcaggcgctctttccatcccagccctcccctaccccgcggtagacgaaaccgtccccgattttagaggcgtcgcaaaaaggctcctgctccccctcctcttgcgggacgacctccatctgcaaatcgtcggggacggctgggttgtacgccaaagccccgcgccaggaacgcccattacgccggatacggtgattattctggagctggagtaa

SEQ ID NO: 3886 - protein, 229 aa, Unknown
  Obtained from environmental sample
  DOMAIN (175)...(229): PASTA domain
  misc_feature (1)..(229): Xaa is any amino acid
MLQAATAVANDGILVPVKTVSRIVSADGKTVNSFQSSAPRRVFSAATARMMRSYMMDVTSSIGTGWRANVEDLSLAVKTGTAQIIDPQTGAYSSTDFIASCIAMLPAEQPSLVLYIVIYKPQGASYLGGRIAAPPIREAAEALINYLGIPRGRNPQISHSGALSIPALPYPAVDETVPDFRGVAKRLLLPLLLRDDLHLQIVGDGWVVRQSPAPGTPITPDTVIILELE

SEQ ID NO: 3887 - DNA, 867 bp, Unknown
  Obtained from environmental sample
  misc_feature (1)..(867): n is a, c, g, or t
ttgatagatagcaaacaaaaaactgctgttcttaatgaattctatgagctatatacggctaaccagaatgcttcaatcgctggcattgattttgcacgcgagcttcttgaaaaatccctgggcagccagaaagccattgacataataaaccgccttactttaagcctccaggtaaggccgtttgattttatccgccgaactgatccggagcatttattcaattttattcagcaagagtacccgcaaataatagcacttgttctggcttatcttgagccctacaaggcttcggtaatactgcaaaagctcccaggggaaatacaaagcgacgttgccagccgtattgctacaatggacagtacaagccccgaagtgcttcgcgaagtggaacgcatactggaaaaaaagctttccaccctgtcagacatagattattgcgtggcgggaggtgtggaaagcgttgtagatatactcaacctggttgaccgttccgcagaaaaacatattatcgataccttacagcacgaagatccgaagctcgcggaaaaaatcattcagaggatgtttgtattcgaggacattgttatgctcgacgaccgcgctatacaaaaggttttgcgggaagtagaaatgcaggaattggcaaaagcgctcaaaaccatagatccggaaattcaggacaaaatttactgcaacatgagcaagaaagccgccagccagcttaaagatgatatggattacatggggccagtacggctaaaagacgttgaggaagcccagcagaagatcatttccacaatccggcgccttgaaggctcaggtgaaatctatatcgccagggccggagaagacgaacagattatttaa

SEQ ID NO: 3888 - protein, 288 aa, Unknown
  Obtained from environmental sample
  DOMAIN (170)...(279): FliG C-terminal domain
  misc_feature (1)..(288): Xaa is any amino acid
MIDSKQKTAVLNEFYELYTANQNASIAGIDFARELLEKSLGSQKAIDIINRLTLSLQVRPFDFIRRTDPEHLFNFIQQEYPQIIALVLAYLEPYKASVILQKLPGEIQSDVASRIATMDSTSPEVLREVERILEKKLSTLSDIDYCVAGGVESVVDILNLVDRSAEKHIIDTLQHEDPKLAEKIIQRMFVFEDIVMLDDRAIQKVLREVEMQELAKALKTIDPEIQDKIYCNMSKKAASQLKDDMDYMGPVRLKDVEEAQQKIISTIRRLEGSGEIYIARAGEDEQII

SEQ ID NO: 3889 - DNA, 681 bp, Unknown
  Obtained from environmental sample
  misc_feature (1)..(681): n is a, c, g, or t
atggagnaaaaattcaacaacgccataaaaacatctcagtcgttaaaagataaaattgagcaggtttcttcctccgatgatattatcacaggtctacaggttcaaatacgcaaactggaagattcaatcaaggatgcgaatgaaaaataccagcgtatcgagaaaaagaatgaagtgcttgaacagactaacgaaggtatcgaccgcaactttaagtccctgcaaaaaacagaaaccgcgattaagaacgccgagaaaaccatcacatcgcttgccggtcagtttgacattctgcgctcctcaatagaccttcttgcgtcgcaaagtgaaaaagcgaacaatgccgttgataaaatagcctctcttgatgaatcgctcgagcaaattgaaaaacgcattgaagtcatgaatggcgcgcgtgagtggcttgcgcgcacggaaacggaacttaaagcgctggataatgacgcaaggtctctccttaaattaaccaaaggaataatagacgagaaaaaaagcaaaaccccgtcaaagagtgaaggttcaattactccgcaggagcgcgaggacattctaaaattaaaaagtcaaggctggacaacagaagaaatcgcgcaaagcgtcaagcgttcaaggggagaaattgagttactgctggaacttgcttccagaggcgcttaa

SEQ ID NO: 3890 - protein, 226 aa, Unknown
  Obtained from environmental sample
  misc_feature (1)..(226): Xaa is any amino acid
MEXKFNNAIKTSQSLKDKIEQVSSSDDIITGLQVQIRKLEDSIKDANEKYQRIEKKNEVLEQTNEGIDRNFKSLQKTETAIKNAEKTITSLAGQFDILRSSIDLLASQSEKANNAVDKIASLDESLEQIEKRIEVMNGAREWLARTETELKALDNDARSLLKLTKGIIDEKKSKTPSKSEGSITPQEREDILKLKSQGWTTEEIAQSVKRSRGEIELLLELASRGA

SEQ ID NO: 3891 - DNA, 630 bp, Unknown
  Obtained from environmental sample
  misc_feature (1)..(630): n is a, c, g, or t
gtgctctcttcgccctatgaccaaactaaagaacagttgcatctggctgtcgaaagcctgaaggaacgccaggaaagccagattatcaataacgacgattacggcttgctcaaaaatatcgcggacagccagcgcgtacagcccatcaagggcgcgcccatgcccgacgatctggatgagctgatctccaaggtatggaaagagccttcgttctttctggcgcatccgcgggcgatagcggcgtttacccgcgagtgtacccgtcgcggcgtaccgccggcgaccacaaccatatttggcggaacttttatcctgtggcgcgggatccccattgtgcctacggacaagttgtttgtggacggtctcaaaaacccaaaaagcaagagcggcaaaacaaatattctgctggtgcgcaccggcgagacaaaacgcggggtggtgggcttatatcaatccggcttgcaaaatgagcaggcaaaagggttgtccgtccgtttcaggggcgtggacaacaagggtctggcttcgtatctgctgtcactatactgctcggcggcaatcctcgcggacgacgccatcgccgtgctcgaggatgtggaagtgggtgactactatgattaccgccaatga

SEQ ID NO: 3892 - protein, 209 aa, Unknown
  Obtained from environmental sample
  misc_feature (1)..(209): Xaa is any amino acid
MLSSPYDQTKEQLHLAVESLKERQESQIINNDDYGLLKNIADSQRVQPIKGAPMPDDLDELISKVWKEPSFFLAHPRAIAAFTRECTRRGVPPATTTIFGGTFILWRGIPIVPTDKLFVDGLKNPKSKSGKTNILLVRTGETKRGVVGLYQSGLQNEQAKGLSVRFRGVDNKGLASYLLSLYCSAAILADDAIAVLEDVEVGDYYDYRQ

SEQ ID NO: 3893 - DNA, 618 bp, Unknown
  Obtained from environmental sample
  misc_feature (1)..(618): n is a, c, g, or t
atggccggaatccagcatgaattgaccgatatcgaacagtccgtaatggaaggaattatcgtccgtattttaggaaatatgcgcgaagcgtggacaacggttatcgacctgcgcccccgtctcgggcagattgacaccaatccgcagtttgcgcaaattgtgcctcctacggaaatggtagtccttgtaacattggaaaccaaagtaggcgacgtggaaggcatgatgaacttctgtatcccttaccttaccatagaaccgattatcagcaagctgtccgcgcaattctggtattcttcggtacggcgcaacgcgactaccgagaacctcaatgttctaaaggagaagcttacatcggtcgatgttaatataacagccgaaatcggaaaaataaacgttcctgtaagggacgttctttccttgcagattggggatgtaatacggctctataatacccgcattggcgatccctattcactgaatatcggctccaggaaaaagtttttgtgccgccccggcgtacttggaaagaaaatggcggtgcagataacgcagaagattgccgagcttggacaggaagaatttgaagagctcgtatctgaaggagaagaattatga

SEQ ID NO: 3894 - protein, 205 aa, Unknown
  Obtained from environmental sample
  DOMAIN (2)...(92): Flagellar motor switch protein FliM
  misc_feature (1)..(205): Xaa is any amino acid
MAGIQHELTDIEQSVMEGIIVRILGNMREAWTTVIDLRPRLGQIDTNPQFAQIVPPTEMVVLVTLETKVGDVEGMMNFCIPYLTIEPIISKLSAQFWYSSVRRNATTENLNVLKEKLTSVDVNITAEIGKINVPVRDVLSLQIGDVIRLYNTRIGDPYSLNIGSRKKFLCRPGVLGKKMAVQITQKIAELGQEEFEELVSEGEEL

SEQ ID NO: 3895 - DNA, 852 bp, Unknown
  Obtained from environmental sample
  misc_feature (1)..(852): n is a, c, g, or t
ttgttatataaaaaatacaaagaggaaaaatactggatcgccatcgaaaagctcagacaccaactgtatagccatccccgaactaattcaggtggtttctggcacaagcagatttatccctggcagatgtggctggacggactttatatgcagggaccgttttacgcccaatacgcggctgaatacggcaatgaatctgactttgacgatctggtttttcagtttaccctgatggaatccaaagcccgcgacgggaaaaccggccttttataccacgcctgggacgaatcccgcaaacaaccatgggcaaaccccgaaaccggctgttcaccccatttctggggacgggctatgggatggtactgcatggccattctggatgcgctggatttcattcctccttcacattcaaaacataccgaagcgctcaaggccattgcccgccgcttgattgcgccgctttttaaatatcaggacgcgcagagcggtctttggtatcaggtgatggatcgaagccaatcaccgggtaattacctggaaacttccgcatcatccatgtttacctatttccttttaaaaatgttacgcatcggccttgtaccggcatctgatgcggaggctgttaaagccgccgctgtaaaggcgtataaggggcttttggaacaaaagctacaggaagatccgtccggagagctccacctgacaagcatctgcaaggttgccggtcttggaggaaaaccctatcgggacggttcttacgagtattacataaacgaaccgcaagtcaccgatgacttcaagggtgttggcccctttattctggcatcgattgaatatgagggaaataaataa

SEQ ID NO: 3896 - protein, 283 aa, Unknown
  Obtained from environmental sample
  DOMAIN (1)...(283): Glycosyl Hydrolase Family 88
  misc_feature (1)..(283): Xaa is any amino acid
MLYKKYKEEKYWIAIEKLRHQLYSHPRTNSGGFWHKQIYPWQMWLDGLYMQGPFYAQYAAEYGNESDFDDLVFQFTLMESKARDGKTGLLYHAWDESRKQPWANPETGCSPHFWGRAMGWYCMAILDALDFIPPSHSKHTEALKAIARRLIAPLFKYQDAQSGLWYQVMDRSQSPGNYLETSASSMFTYFLLKMLRIGLVPASDAEAVKAAAVKAYKGLLEQKLQEDPSGELHLTSICKVAGLGGKPYRDGSYEYYINEPQVTDDFKGVGPFILASIEYEGNK

SEQ ID NO: 3897 - DNA, 798 bp, Unknown
  Obtained from environmental sample
  misc_feature (1)..(798): n is a, c, g, or t
atggaaacaagcgcgcaaaccataatttttgcagcggttgaatttatgggagaaaccgcaaaaattctaaacccagataaaagagtgttgattccaggaacaaacacgggatgcagcctagcagacagcataaccggagaacaagtgaaaaaattaaaagagcaatacaaagaccacacatttgtctgctatataaatacaacagctgatgtgaaagctgcttgcgatgtttgcgtaaccagctcaaatgtgattaaaattgtgagcaacattccaaacgataaaatagtgtttttgccagacaagctcatgggcgaaaacttgaaaaacgaactggaaaaaatgggcgtaaaaaaagagcttgtgctacacacaggaacctgttatgtgcacgagcaatacgaccctgacttggttgagtatttcagaattcaaaacaaaggtttgcgagtcgtgtgtcacccggagtgccaccctggggttgccatgctgagcgactatgtgggcagcacggggcaaatgctggattatatccgcaacctcccagaggaatctccagttttgcttttaaccgaatgtgggctaaacgccagacttcagagcgaactcccaaaccgccgctttataggcagttgcaatctatgcaaatatatgaagagcaattctctggaaaacatccttcaaactttgaaggagcctgataaagcaaaagaggttaaattgaatacaaccgttttggcagcagcaaaacggtgcatcgaaaatatgttcatttacaatgaacgctgnaacatttga

SEQ ID NO: 3898 - protein, 265 aa, Unknown
  Obtained from environmental sample
  DOMAIN (2)...(259): Quinolinate synthetase A protein
  misc_feature (1)..(265): Xaa is any amino acid
METSAQTIIFAAVEFMGETAKILNPDKRVLIPGTNTGCSLADSITGEQVKKLKEQYKDHTFVCYINTTADVKAACDVCVTSSNVIKIVSNIPNDKIVFLPDKLMGENLKNELEKMGVKKELVLHTGTCYVHEQYDPDLVEYFRIQNKGLRVVCHPECHPGVAMLSDYVGSTGQMLDYIRNLPEESPVLLLTECGLNARLQSELPNRRFIGSCNLCKYMKSNSLENILQTLKEPDKAKEVKLNTTVLAAAKRCIENMFIYNERXNI

SEQ ID NO: 3899 - DNA, 972 bp, Unknown
  Obtained from environmental sample
  misc_feature (1)..(972): n is a, c, g, or t
gtggtccgggacgcttttgcctggggcggcacatcaggcgcctcggggcagatcgccgtggcggctttcggcgaaggtaaatttgtggctctgtctaaaaacggcgcgaacgcgtacacatcggaagacgcccagaattggacgtccgtctcggcaagcggcgcggcggctgatatgaacgacatgatcttcggcggcggcaagttcgtggcggttgggaaagcgggcaaaggttgttattcgagcgacggaacctcgtggacgtcgtttacattgaatcaggacgacgaattcacggcggtaaagtacgggactaactctttcttggcgcttggcgcgaaaggctccgtttataaatcaaccaacggcgaaagttggactcaattatatggaaacagcgtcacgtcgtacaagcagatcgccttcgggaacagtaagtacgtggcggtcggcgactccggggtatctgtgtcgccggacggaataaagtgggaaaggaagagcagcgcgaagaatctgacgagcgtggcgttcggcgcgaacaaatttgtggccgtgagcgataacggggtcataatctcctccggcgacggaaatacgtggacagaccacaatgtcggggacgcggttttcacgtcggtcgcgtttggcggcgcgacattcatcgccggcgggaggacgcccggaacgccggcgcaaagccaagtcgtcatctatacatcggccgatggagaggagtggagcggatatagcttgagcgatttgagcggatgggcggtatcgggtgagtatatcgcgtcgttgtgctcctccggcgataggtttatcgctgcggtcggcggcgtcaccaaggcgctgaaggaatgcgccgctaccggctctaatgtcggcaggtactggtctaatgtgccggggttgcccgacgccgctgagggatatcccatggcttccgctgtatacgcggaacgatag

SEQ ID NO: 3900 - protein, 323 aa, Unknown
  Obtained from environmental sample
  misc_feature (1)..(323): Xaa is any amino acid
MVRDAFAWGGTSGASGQIAVAAFGEGKFVALSKNGANAYTSEDAQNWTSVSASGAAADMNDMIFGGGKFVAVGKAGKGCYSSDGTSWTSFTLNQDDEFTAVKYGTNSFLALGAKGSVYKSTNGESWTQLYGNSVTSYKQIAFGNSKYVAVGDSGVSVSPDGIKWERKSSAKNLTSVAFGANKFVAVSDNGVIISSGDGNTWTDHNVGDAVFTSVAFGGATFIAGGRTPGTPAQSQVVIYTSADGEEWSGYSLSDLSGWAVSGEYIASLCSSGDRFIAAVGGVTKALKECAATGSNVGRYWSNVPGLPDAAEGYPMASAVYAER

SEQ ID NO: 3901 - DNA, 972 bp, Unknown
  Obtained from environmental sample
  misc_feature (1)..(972): n is a, c, g, or t
ttgatggccggttcatttcgatattaccttcgcggcgaagacggctgggaaatagttcatcgggacggaaagcaaagaacgtataggaagatcggcatgcccggcaaggaaccgcgggacggggccgacctctatttgactatcgatgtcaacttgcagaagatcgttcaatccgttctcaaacagacggtggagtcgctgaacgccaagggcgcgatgtgcattgtgatggacccgcgtacaggcaagatactcgcgatggccaacgaaccgtcgttcaacccgaacatctattcgtcgtactcgcttgcggacaggcagaacaagccgataagtttgatatacgaacccggttcgactttcaaggcggttacggcctccgtggcgttgcaggagggcgcgtattccgagggcgatttgataaacggcaacaacggcgccttcgagatatacggcgaacagataagggacgacacgccgcaaggccagatcacctttgcgagggcgctcgcggtgtccagcaacgtgtgcttcgctcagatagcgaacggcttcaaaaacgagcgcttctaccgctacgttagagatttcggttttggagccaagaccggcattgcgcttccgggagaagagggcggcatcttgcatccggtgaacaattggtcggggcgcacaagggtgactatggctatgggttacgaggtctcgtcgacgtttttgcagatgataatggcctacgccgccgtggccaacggcggcgttctgctcacgccgattatctgcgagcgggtggagaagaagaacgggacggcggcggagtctgcggcggtaaagccagtgcgccgggtgatctccgaggagacggcgggcaggctgcgtaagatgatgcanggcgtcgtggagaccggcaccggcaaacaagcgatcgttccgggaatttccgtgggcgggcagacgggtacgagccgttag

SEQ ID NO: 3902 - protein, 323 aa, Unknown
  Obtained from environmental sample
  DOMAIN (72)...(323): Penicillin binding protein transpeptidase domain
  misc_feature (1)..(323): Xaa is any amino acid
MMAGSFRYYLRGEDGWEIVHRDGKQRTYRKIGMPGKEPRDGADLYLTIDVNLQKIVQSVLKQTVESLNAKGAMCIVMDPRTGKILAMANEPSFNPNIYSSYSLADRQNKPISLIYEPGSTFKAVTASVALQEGAYSEGDLINGNNGAFEIYGEQIRDDTPQGQITFARALAVSSNVCFAQIANGFKNERFYRYVRDFGFGAKTGIALPGEEGGILHPVNNWSGRTRVTMAMGYEVSSTFLQMIMAYAAVANGGVLLTPIICERVEKKNGTAAESAAVKPVRRVISEETAGRLRKMMXGVVETGTGKQAIVPGISVGGQTGTSR

SEQ ID NO: 3903 - DNA, 648 bp, Unknown
  Obtained from environmental sample
  misc_feature (1)..(648): n is a, c, g, or t
atgactcccgcccaaagcgacgattttatttattcactccggggcagatccgccgcttccgtccggctggacgttgccgccgcttcgtcgttctttacctggatgcaccgccgacataacgccattgacaatccgttcagggggagcaaggcaaggccagccaaaaaatccgtgaaggaagtaaactcgccgcaatccgccgaagagatagaaaccataatccgggagcttcccgcaagcctggccgccgccgccgcaataatggtttataggggcctccgggccggggcgctgcctaccctctcaattaccggcggaaaatttacgggctatagcaagggaaagccgatacaggggaagcttccccccgaagccctggccgcaattaaagccgcttcgcttccgcttcgggggccgtttgccggagtgcttccaaacacccttgaaaagcagatcgcaagggcgattaaaaaactgtaccaggcagggaaggtaaaggccacatacagcgcacacgatctcaggcactattacgcgataacggaataccgaaaagacagggacatccgcagggtttcaaaattgctgggccatgcttcaattcaaataacgcagaactaccttgagggattgggagaagtggaataa

SEQ ID NO: 3904 - protein, 215 aa, Unknown
  Obtained from environmental sample
  DOMAIN (61)...(212): Phage integrase family
  misc_feature (1)..(215): Xaa is any amino acid
MTPAQSDDFIYSLRGRSAASVRLDVAAASSFFTWMHRRHNAIDNPFRGSKARPAKKSVKEVNSPQSAEEIETIIRELPASLAAAAAIMVYRGLRAGALPTLSITGGKFTGYSKGKPIQGKLPPEALAAIKAASLPLRGPFAGVLPNTLEKQIARAIKKLYQAGKVKATYSAHDLRHYYAITEYRKDRDIRRVSKLLGHASIQITQNYLEGLGEVE

SEQ ID NO: 3905 - DNA, 528 bp, Unknown
  Obtained from environmental sample
  misc_feature (1)..(528): n is a, c, g, or t
atgccgttgacttgggacgaaatacagaatcgcgcactggccttttcaaaacgatggaaaggcgggaagttcgagcgatccgaaggacagagctttatacgagactttttatacgtctttggcgtaaaagacccgcttaaagtcggaatgtatgaatacgaggtcttgtacgctagcggggaaagcggttttggattaatagactatttttggaaaggtaaaatcgctatagagatgaaaagcctcggcaaagatttggctaaagcttaccaccaacaactatacaaataccttgcaaatctaccggaggaagacaagcccgaaatatggcttgtttgcgattttgagaccatgcgggtttatcgccgtttcaagaaagaacccgtagaaattaagatcgctgctctgtacaagcgcgttaaactgttcgctgaactcgcaggatacggagataccgagcgtatcgtccaaccaaagagggtcacgtcaaagccgccgaaaaaatggccgtgcctcacgacgccctga

SEQ ID NO: 3906 - protein, 175 aa, Unknown
  Obtained from environmental sample
  misc_feature (1)..(175): Xaa is any amino acid
MPLTWDEIQNRALAFSKRWKGGKFERSEGQSFIRDFLYVFGVKDPLKVGMYEYEVLYASGESGFGLIDYFWKGKIAIEMKSLGKDLAKAYHQQLYKYLANLPEEDKPEIWLVCDFETMRVYRRFKKEPVEIKIAALYKRVKLFAELAGYGDTERIVQPKRVTSKPPKKWPCLTTP

SEQ ID NO: 3907 - DNA, 831 bp, Unknown
  Obtained from environmental sample
  misc_feature (1)..(831): n is a, c, g, or t
gtgattgctataaatacagatacgaaaattgccgccgaaaagcacgaacgccttaaggagtatctgcgctcactcggcagcgtggccgtggccttttccggcggggtcgattcgacctttttgttgaaaacggcgtatgacgttctgcgtgaccgcgccatagccgttaccgcccgttcctccacctttccgaggcgcgagctgacggcggcgtccgcgttttgcgagggcgagggtatacgccatattatatgcgacagcgatgaactcagcgtagacggtttctcgcaaaatccggttaaccgttgctatctatgcaagagcgaattgttcgccaagatacgggccgtagcgaaggaagagggggtggagcacgtcgccgagggttccaacgtcgacgacgacggcgactaccgtcccggccttgaggctgtgagggagcaggggataaagagcccgctccgtcatgccgggttggcgaaggcggagatacgcgtgttgtctaaggagatgggtctctcggtgtgggacaaaccgccgtttgcctgtctcgcctcgcgtttcccctacggcgagtccatcacgccggagaaattgagcatgattgaccgggcggagcagtttttattggatatggggcttaaacaggtgcgggtacggcatcacggtaccttggcgcggattgagaccgacgaggccggattttccatattgatcaataaggagaatagagagaagatttacgcccggataaaggggtacggatttacatacgtctccgttgatttgttgggttatcgcgttgggagtatgaacgagacgttggcgtag

SEQ ID NO: 3908 - protein, 276 aa, Unknown
  Obtained from environmental sample
  DOMAIN (10)...(213): NAD synthase
  misc_feature (1)..(276): Xaa is any amino acid
MIAINTDTKIAAEKHERLKEYLRSLGSVAVAFSGGVDSTFLLKTAYDVLRDRAIAVTARSSTFPRRELTAASAFCEGEGIRHIICDSDELSVDGFSQNPVNRCYLCKSELFAKIRAVAKEEGVEHVAEGSNVDDDGDYRPGLEAVREQGIKSPLRHAGLAKAEIRVLSKEMGLSVWDKPPFACLASRFPYGESITPEKLSMIDRAEQFLLDMGLKQVRVRHHGTLARIETDEAGFSILINKENREKIYARIKGYGFTYVSVDLLGYRVGSMNETLA

SEQ ID NO: 3909 - DNA, 891 bp, Unknown
  Obtained from environmental sample
  misc_feature (1)..(891): n is a, c, g, or t
gtggatcaggcgatacgccgaaaggacgcggaaaccggacgcgatcaatggctgtatggggatgattttcgggaagtctacagccgggacggctataaaagcaaaaggcgcacgggcggcgacgggaatttttgcggcaacggcattgtcgcggcggatcgaaagccgcatccggcggcctgggagctgaaaaaatgttaccagaccctgtgtgtggaagctgtggaagggcaagagaacaggtaccgcgtccgcaacaagcagatgttcagcgggcttgaggactataccctcaaatggcaatgcgcctgtgacggcgccgcgcttgaagaaggagaagtgtccgatcagacccttgcgggtatagggccggggcaatgcgccgaaattgtcgttaaacctgcggcggaattacccgccggcggccatgtcacgctgactttttcatggcggcttaaggaaacccgcgcctgggcggacgcgggttatgaacaggcttttgaccaattcacgcttcgaaaaaatgttaaacgcgatgatgaagcggcgggaaatacctcccgcgcggcggatgaattttttatcgccccgatacagccaaacctttgccgcgccatgacagataacgatgtcggcgccgcgaattttgttcatttcctgcgtccttttatattgggcgccagatgggaaagggccgccgccaggcagcgggcgctgcgaaccgcggaaagccatgacgcccaaacaggcgcgcgccgcgttcataccgaatggaaacacccgctttgcaaaaagctggagacggattacacggtatacaaagacggctctatgcttgtttcgctgacggttcaatcgaaaaagcttgacccttgtccgcgtgggaagtag

SEQ ID NO: 3910 - protein, 296 aa, Unknown
  Obtained from environmental sample
  misc_feature (1)..(296): Xaa is any amino acid
MDQAIRRKDAETGRDQWLYGDDFREVYSRDGYKSKRRTGGDGNFCGNGIVAADRKPHPAAWELKKCYQTLCVEAVEGQENRYRVRNKQMFSGLEDYTLKWQCACDGAALEEGEVSDQTLAGIGPGQCAEIVVKPAAELPAGGHVTLTFSWRLKETRAWADAGYEQAFDQFTLRKNVKRDDEAAGNTSRAADEFFIAPIQPNLCRAMTDNDVGAANFVHFLRPFILGARWERAAARQRALRTAESHDAQTGARRVHTEWKHPLCKKLETDYTVYKDGSMLVSLTVQSKKLDPCPRGK

SEQ ID NO: 3911 - DNA, 381 bp, Unknown
  Obtained from environmental sample
  misc_feature (1)..(381): n is a, c, g, or t
atgattatagagagatattcccatgttatgcacattgtatctaacataaaagcagaacttgataattcctacgatatatttgatgttctaaaagccgcattcccagcaggcacgctttctggcgcaccaaaggttagggctatggagataatcgcggaatgcgaaacaagggcaagaggcaattatggcggtgcagttggctatatgacttttgacggaagaatggattttgcaatttgcattcgcacagcagttgtacaaaacggcaaactgacattgcaggcaggggcaggcatagttgcagacagcgaccccgaaacggagaggcaagaaaccataaataaagcgaaatctgttgccaaagctttggagatgctatga

SEQ ID NO: 3912 - protein, 126 aa, Unknown
  Obtained from environmental sample
  DOMAIN (1)...(123): chorismate binding enzyme
  misc_feature (1)..(126): Xaa is any amino acid
MIIERYSHVMHIVSNIKAELDNSYDIFDVLKAAFPAGTLSGAPKVRAMEIIAECETRARGNYGGAVGYMTFDGRMDFAICIRTAVVQNGKLTLQAGAGIVADSDPETERQETINKAKSVAKALEML

SEQ ID NO: 3913 - DNA, 507 bp, Unknown
  Obtained from environmental sample
  misc_feature (1)..(507): n is a, c, g, or t
atgatactccttatagacaattacgatagttttacctataacatttaccaataccttttggaacttggggcagatgtaaaggttgttagaaatgataaaattacaatagaagaagctggggagttaaaacccgaaaaacttctgctttcgcctggtcccggtcgccccgaagatgctgggataacagttgcatcaattggttattttgcaggcaaaattcctatttttggcgtgtgccttgggcatcaagccatagggcatttttttggtggaaaaattattggcgcanaaagacttatgcacggcaaaatttcaaaaataaatgcaaacggcaaaggcgtgtttgcaggcattgacgaaccctttgacggaatgcgttatcacagccttgttattgaaaaagaaagtttgccagattgtttggaaataaccgctacctcggaagacggcgagataatgggagttcgccacaaaacgctaatgttgaggggattcatttcaccctga

SEQ ID NO: 3914 - protein, 168 aa, Unknown
  Obtained from environmental sample
  DOMAIN (3)...(168): Glutamine amidotransferase class-I
  misc_feature (1)..(168): Xaa is any amino acid
MILLIDNYDSFTYNIYQYLLELGADVKVVRNDKITIEEAGELKPEKLLLSPGPGRPEDAGITVASIGYFAGKIPIFGVCLGHQAIGHFFGGKIIGAXRLMHGKISKINANGKGVFAGIDEPFDGMRYHSLVIEKESLPDCLEITATSEDGEIMGVRHKTLMLRGFISP

SEQ ID NO: 3915 - DNA, 438 bp, Unknown
  Obtained from environmental sample
  misc_feature (1)..(438): n is a, c, g, or t
gtgaaccgcgcattaattgtatattttgatacttgttgctatagccggctatttgacggcaaaataagcccggaagtaatagcggaagccgagcggattcggcatattatccgtagccgcctntccgataagtacatcattgtgggcagtgatattgtaactactgaaattcgtcaaaacccggacgataacgagcgcgggatcattgaagaactttataatacgattatatgcgatgaagcgacggcgcacccgcaacgcgcaacacgcgccgccgaactggaattaaaaggactgaaaacgatggacgcccggcaccttgcggcggctgaagtgatgggcgccgattaccttttaacggtggacaaagattttataaaaacgtgttcaaaaccgaactttacaacggttaaagttataaaccctataggtttttga

SEQ ID NO: 3916 - protein, 145 aa, Unknown
  Obtained from environmental sample
  misc_feature (1)..(145): Xaa is any amino acid
MNRALIVYFDTCCYSRLFDGKISPEVIAEAERIRHIIRSRLSDKYIIVGSDIVTTEIRQNPDDNERGIIEELYNTIICDEATAHPQRATRAAELELKGLKTMDARHLAAAEVMGADYLLTVDKDFIKTCSKPNFTTVKVINPIGF

SEQ ID NO: 3917 - DNA, 600 bp, Unknown
  Obtained from environmental sample
  misc_feature (1)..(600): n is a, c, g, or t
gtgatgaaatgtgatgttattcttgcgggtgtgggcggacagggtgtgctttctgtcgccgctattatcgctcaggctgcggtgagcgaggggttagaggtgcgtcagtctgaagtgcacggtatggcgcagcggggaggggcggtgttggcgcatttgcggatttccggcggagaaattgcctccgacctggttcccaaaggcggggccgatattattatctcgatggaacctctggaaagtcttcgctatgcggcatggcttgcgccgtcggggacactggtgacggcggcggaaccgctgatcaatatagccaattatcccgaaccgggcagtgtaatcgccgctattaacggatttcctgtccggcggataattgaagcgtcggcgctggcaaaagaagcggggttgccccgcgcggtgaatactgtcatggtaggcgccgcctcgccgtttttgccgattggggcggaaacgctggaaaaaaccatctccgccgtatttgcggcgaagggcgggcaggtgctgacagccaatatacaggcgttcaaattgggaaggaaggcggcggaaactgcctccggtggagataactcatga

SEQ ID NO: 3918 - protein, 199 aa, Unknown
  Obtained from environmental sample
  SIGNAL (1)...(26)
  DOMAIN (12)...(188): Pyruvate ferredoxin/flavodoxin oxidoreductase
  misc_feature (1)..(199): Xaa is any amino acid
MMKCDVILAGVGGQGVLSVAAIIAQAAVSEGLEVRQSEVHGMAQRGGAVLAHLRISGGEIASDLVPKGGADIIISMEPLESLRYAAWLAPSGTLVTAAEPLINIANYPEPGSVIAAINGFPVRRIIEASALAKEAGLPRAVNTVMVGAASPFLPIGAETLEKTISAVFAAKGGQVLTANIQAFKLGRKAAETASGGDNS

SEQ ID NO: 3919 - DNA, 330 bp, Unknown
  Obtained from environmental sample
  misc_feature (1)..(330): n is a, c, g, or t
atgaactttcaatatttggatccgcatatcgaaaaaatgccccgcgcggaacttgaggcgctgcaactggaaaaactgcgggaagaaatcggttttgccctgcgaacgtctttttatcaaaagcggcttgcggcggcgggcattacaagtcccgatgacattacggcgttaagcgacatgaaacgcatcccctttacctcaaaaacgatctgcgggacgggtttccctacggtttttttagcataccgaaagaggatgtggtcaggctgcacgcctcaagcggtactaccggtatccccaccacgatttatttcagtaaagacgacataa

SEQ ID NO: 3920 - protein, 109 aa, Unknown
  Obtained from environmental sample
  misc_feature (1)..(109): Xaa is any amino acid
MNFQYLDPHIEKMPRAELEALQLEKLREEIGFALRTSFYQKRLAAAGITSPDDITALSDMKRIPFTSKTICGTGFPTVFLAYRKRMWSGCTPQAVLPVSPPRFISVKTT

SEQ ID NO: 3921 - DNA, 531 bp, Unknown
  Obtained from environmental sample
  misc_feature (1)..(531): n is a, c, g, or t
gtgatcgggatacagtcccaccagcatcagggttactggggggcggcatacacgcgggaaattcttgagcgttattcgcaattcggcctgcccatacattttaccgagaacacgatcatatcgggcgacattatgccccctcatatcgtcgaccttaacgactggcaggtagacgcctggcccggcacgcccgaaggcgaggagcgccaggcgcgtgaaaccgtggagatgtactcgatactttttgcccatcccctggttgaggcgattaccgcgtggagtgcagtggacggaggctggctgaaagcccccgccggccttctccatgaagacaacagcgtcaagcctgtttttaccgagctggaaaagaagataaagggcgaatggatgacaaaagccgagttgttaaccaacgcctccggggagcttaatattgaaggtttccggggcagctacgaactggaatgtgaccagcggaaagtggcctttaccctggacaagaagggcgggactattacggtggagttgtga

SEQ ID NO: 3922 - protein, 176 aa, Unknown
  Obtained from environmental sample
  misc_feature (1)..(176): Xaa is any amino acid
MIGIQSHQHQGYWGAAYTREILERYSQFGLPIHFTENTIISGDIMPPHIVDLNDWQVDAWPGTPEGEERQARETVEMYSILFAHPLVEAITAWSAVDGGWLKAPAGLLHEDNSVKPVFTELEKKIKGEWMTKAELLTNASGELNIEGFRGSYELECDQRKVAFTLDKKGGTITVEL

SEQ ID NO: 3923 - DNA, 372 bp, Unknown
  Obtained from environmental sample
  misc_feature (1)..(372): n is a, c, g, or t
ttgcccattatctccagtgcgcggttggcgatcacttcgttggcgttcatgttggtcgaggtgcccgcgccgccctgcaccatgtcaacggggaagtgcccctgccagtggccgtccatgatttcctggcaggcctggtctattgcccttgccaccattggatccagcagcttgagtttggagttggccctggccgacgcctgcttgaccatcgccagagcccgcaccagcgcggggaagtgggaaagctgtatgccggtgatggggaagttctctagggcacgaagggtctgcacgccaaacagcgcgtcctccggcacgttcatggcgcccagcaggtcggattcggacctgacggcgcctgaatcgtag

SEQ ID NO: 3924 - protein, 123 aa, Unknown
  Obtained from environmental sample
  misc_feature (1)..(123): Xaa is any amino acid
MPIISSARLAITSLAFMLVEVPAPPCTMSTGKCPCQWPSMISWQAWSIALATIGSSSLSLELALADACLTIARARTSAGKWESCMPVMGKFSRARRVCTPNSASSGTFMAPSRSDSDLTAPES

SEQ ID NO: 3925 - DNA, 318 bp, Unknown
  Obtained from environmental sample
  misc_feature (1)..(318): n is a, c, g, or t
gtgatcattggggtggcaggcagcgtaatcgccgcgctttttgcccattatctccagtgcgcggttggcgatcacttcgttggcgttcatgttggtcgaggtgcccgcgccgccctgcaccatgtcaacggggaagtgcccctgccagtggccgtccatgatttcctggcaggcctggtctattgcccttgccaccattggatccagcagcttgagtttggagttggccctggccgacgcctgcttgaccatcgccagagcccgcaccagcgcggggaagtgggaaagctgtatgccggtgatggggaagttctctag

SEQ ID NO: 3926 - protein, 105 aa, Unknown
  Obtained from environmental sample
  misc_feature (1)..(105): Xaa is any amino acid
MIIGVAGSVIAALFAHYLQCAVGDHFVGVHVGRGARAALHHVNGEVPLPVAVHDFLAGLVYCPCHHWIQQLEFGVGPGRRLLDHRQSPHQRGEVGKLYAGDGEVL

SEQ ID NO: 3927 - DNA, 384 bp, Unknown
  Obtained from environmental sample
  misc_feature (1)..(384): n is a, c, g, or t
ttgggtaaaacgaagcatttaaaacggtttgacctagacaaaaacttgataaaagccgttattcgccaagaatctggcggaaattcccttgcagtttccagcaaaggggcaaagggacttatgcagcttatggattcaaccgccaaagatatgggcgttacaaactcctacaacgggcggcaaaacgtgatgggtggcgcaagatatcttaaacaaatgctcgtgcgctttaacggcgatgaaagcaaagctcttgccgcttacaacgcaggacccggaactgtggagcaatatggcggaattccaccttatgaagaaactaaaaactatattaaaaacgttttgcagtacaaggaacaattttcaaaagaggaggcgttatga

SEQ ID NO: 3928 - protein, 127 aa, Unknown
  Obtained from environmental sample
  DOMAIN (1)...(111): Transglycosylase SLT domain
  misc_feature (1)..(127): Xaa is any amino acid
MGKTKHLKRFDLDKNLIKAVIRQESGGNSLAVSSKGAKGLMQLMDSTAKDMGVTNSYNGRQNVMGGARYLKQMLVRFNGDESKALAAYNAGPGTVEQYGGIPPYEETKNYIKNVLQYKEQFSKEEAL

SEQ ID NO: 3929 - DNA, 375 bp, Unknown
  Obtained from environmental sample
  misc_feature (1)..(375): n is a, c, g, or t
atggcaattacacgcgtatattcagtatgggtaataggaggagccgctgttattgccgtatttctttcattctttaataaattcagcgcgattataaaaactatcccttcgccggttctcggcggtatttcaatgctgcttttcgggataattgcgtcaagcggacttcgtacaattgttgataacggcgttgattacaaagataaacgtaatctgactattacctcagtcattcttgtaatcggtatcggcggcggcagacttgcctttaatataaccaacgatcttcattttgaacttgcgggcgtagcttttgctactgttgtcggtatcattttgaatcttgtttttcccgcaagtaaaaaaggacagtaa

SEQ ID NO: 3930 - protein, 124 aa, Unknown
  Obtained from environmental sample
  SIGNAL (1)...(29)
  misc_feature (1)..(124): Xaa is any amino acid
MAITRVYSVWVIGGAAVIAVFLSFFNKFSAIIKTIPSPVLGGISMLLFGIIASSGLRTIVDNGVDYKDKRNLTITSVILVIGIGGGRLAFNITNDLHFELAGVAFATVVGIILNLVFPASKKGQ

SEQ ID NO: 3931 - DNA, 543 bp, Unknown
  Obtained from environmental sample
  misc_feature (1)..(543): n is a, c, g, or t
gtggcaattctgcagttaccctacatcttcggcatacagccgggacgcgagcctgtttggacgataatcgtgaaagccctgcggagcatgaaaggcgtaacgatgtacnccaaaggaggcacgactatggttacaaggaaacaggtcggacaggcattggcgggcgcgctggaaaaaacaaagggagggcagtgttggccaatcggctggtacaatatgcactggaaagaattccttgccatcgtccatacaaacatgggtatgccgggaaggaaaatcattaccattcccaactggatgctgactttgggaatgaaatttatggagaaaaaattacgcaaccccgataccgagggcggcatgtatatgccgaaattcgccgatatacaatccgcggagtgttttatagataaatccctgggctgcgttccccttggggttgaggatgatgacattacctccgcgatagccgagtcaatcaagttgtcagtggatgtccttgacggcaaggtagataacctggtccgcatgaggggtgaataa

SEQ ID NO: 3932 - protein, 180 aa, Unknown
  Obtained from environmental sample
  misc_feature (1)..(180): Xaa is any amino acid
MAILQLPYIFGIQPGREPVWTIIVKALRSMKGVTMYXKGGTTMVTRKQVGQALAGALEKTKGGQCWPIGWYNMHWKEFLAIVHTNMGMPGRKIITIPNWMLTLGMKFMEKKLRNPDTEGGMYMPKFADIQSAECFIDKSLGCVPLGVEDDDITSAIAESIKLSVDVLDGKVDNLVRMRGE

SEQ ID NO: 3933 - DNA, 783 bp, Unknown
  Obtained from environmental sample
  misc_feature (1)..(783): n is a, c, g, or t
ttggccgagatatgtaaggcgatattaagaataagcaataaagatgcttacgccgtgatacattcttttttacggtgtctgtatgaaaacggcactttgagcaatgacctgtcaaaaataatccccaaataccacaggcctataccattgccgacaacatacacggatgatgaaataaggcgcctggaaggggttataaacagaacaacaagggcagggaagcgggactatgccattattcttcttgcgtcacgattagggacgaggtcggcggatatcgcggggatagcttttgacgctgttgattttaatggcggcagtattaactttctgcaaaaaaagagcagcgtaccgctatccatgcctttgttgcctgagatacgtgaatccattctggattataaacagtatgcaaggccaactgttgaaaataattatgtgttcatcaaagcaaaagctccttttgaaaaaatttcaacttctgtaataaggcatacgcttacaaagcattttaaagccgccgggattgacatttcaaacaagaaacacgggccccatacgctccgttcttctatggccagttctatggtaaatagcggtgttccttatgatgttgtaagaaaagtgctcggacataccgccccgcaggcaatcaagcactatgccaaagtagatatagaaaacttgcgccttcatgctcttgatgttcccatcccaaccgaggcgtttgcgatgtttcttcaaggaggggacagttatggtaacctttnaaagcatttttaa

SEQ ID NO: 3934 - protein, 260 aa, Unknown
  Obtained from environmental sample
  DOMAIN (66)...(231): Phage integrase family
  misc_feature (1)..(260): Xaa is any amino acid
MAEICKAILRISNKDAYAVIHSFLRCLYENGTLSNDLSKIIPKYHRPIPLPTTYTDDEIRRLEGVINRTTRAGKRDYAIILLASRLGTRSADIAGIAFDAVDFNGGSINFLQKKSSVPLSMPLLPEIRESILDYKQYARPTVENNYVFIKAKAPFEKISTSVIRHTLTKHFKAAGIDISNKKHGPHTLRSSMASSMVNSGVPYDVVRKVLGHTAPQAIKHYAKVDIENLRLHALDVPIPTEAFAMFLQGGDSYGNLXKHF

SEQ ID NO: 3935 - DNA, 564 bp, Unknown
  Obtained from environmental sample
  misc_feature (1)..(564): n is a, c, g, or t
atgtctgcatcgaagtttacgaagaggaagtttaaaatgagcgaaaaagttttaatgaaaggaaacgaagctatcgccgaatcagcgataagagcgggctgcggcgcttactttgggtatcctatcactccgcagaatgagatacccgcttacatggcaaggcacatgcttgatcgcggacgcatttttattcaggcggagagcgagatagcggctattatcatggtatacggcgcggcttgttctggcgtaagagcgatgacaagctcctcaagccccggcataagtcttaaacaggaaggaatatcctacgccgcgggcgcggacgttccgcttgtggtagcgaatataaatcgcggaggacccggacttggaaatatcgcccctgcgcagagcgattattttcagtcaacgcgcggaggcggacacggcgattacagatgtattgttcttgcgccgaaaaatgtgcaggaatgcgccgacctaacttatcttgctttcgatcttgccgaaaaataccgaatgcccgtgataattcacgcggacggaatgatgggcagatga

SEQ ID NO: 3936 - protein, 187 aa, Unknown
  Obtained from environmental sample
  DOMAIN (27)...(187): Pyruvate flavodoxin/ferredoxin oxidoreductase, thiamine diP-binding domain
  misc_feature (1)..(187): Xaa is any amino acid
MSASKFTKRKFKMSEKVLMKGNEAIAESAIRAGCGAYFGYPITPQNEIPAYMARHMLDRGRIFIQAESEIAAIIMVYGAACSGVRAMTSSSSPGISLKQEGISYAAGADVPLVVANINRGGPGLGNIAPAQSDYFQSTRGGGHGDYRCIVLAPKNVQECADLTYLAFDLAEKYRMPVIIHADGMMGR

SEQ ID NO: 3937 - DNA, 837 bp, Unknown
  Obtained from environmental sample
  misc_feature (1)..(837): n is a, c, g, or t
gtgacaactcttactgcgttccttgactggctgcaaaaagaacggggatgttccgtcgctacaaggaataacaggcttgccgccgtccacgcgttttttcgctacgttcaatcacgggaaccgggactgctgcttgcatgccggcaaatacttctcctgccgcttaaaaaatatcaaacgcccattgtccggcacttgaccccggagcaaacacgcgacctgcttgccgcaccgggttttgcaacccgctcaaaccgccgtaatacgacactattgagcgtactgtatgattccggcgcgcgggtgcaggagctttgtgatttacgcgtccgtgatgttcgtctcgaccacccttccatcattacactgaccggcaaagggcgtaaaacaagacatgtgcccctcatggcagacaccgtgaaactgctgcgatcctacatggaagaaaactccctgttccaaaacggccgccaagacgcgccgctgttctgtaaccagcgccgttcaaaactgacccgcacaggcgttaatcacatcctgtgcaaatattccagcacattgccgataaaatatcctgatatatcaaaaaagcttacgccccatgtgctcaggcattctaaggcaatgcatctgtatcaagccggcgtgagccttatatatatacgtgatatcctcgggcacgttgatatcgctactactgatatctacgccagagccgacaccgagtccaaacgcaaggcgcttgagaatatttacccgggtataacgcctgttgattcttcgttgcctgattggaaccgcgatttaaatttgcttgattacttgaacggcctttaa

SEQ ID NO: 3938 - protein, 278 aa, Unknown
  Obtained from environmental sample
  DOMAIN (74)...(246): Phage integrase family
  misc_feature (1)..(278): Xaa is any amino acid
MTTLTAFLDWLQKERGCSVATRNNRLAAVHAFFRYVQSREPGLLLACRQILLLPLKKYQTPIVRHLTPEQTRDLLAAPGFATRSNRRNTTLLSVLYDSGARVQELCDLRVRDVRLDHPSIITLTGKGRKTRHVPLMADTVKLLRSYMEENSLFQNGRQDAPLFCNQRRSKLTRTGVNHILCKYSSTLPIKYPDISKKLTPHVLRHSKAMHLYQAGVSLIYIRDILGHVDIATTDIYARADTESKRKALENIYPGITPVDSSLPDWNRDLNLLDYLNGL

SEQ ID NO: 3939 - DNA, 474 bp, Unknown
  Obtained from environmental sample
  misc_feature (1)..(474): n is a, c, g, or t
atgtgtgctgttttaattgtcagcaatgctgcaagacaggtttctatttttactatgcccgttacaatatatttaatcggcggcggatttgtcttgagttttattttctcttcttacgaaggcagtatattaaaatcggtattaaacagctgtcagaatatcattaccgttgttcttggagtagtaaacgtattttccgatataatgtcatatatcaggctttgggcggtaggacttgccggagcggctatcgcgcaaacaataaacggcatggcgggtccgctgcttggcggctttatgatttttgcgggaattatactgctgattttcggacacggtttaaacatggtgcttaacgtgttatcggtactggttcacggagtgcgtcttaacacattggaattttcagggcatgtaggtcttgcctggtcaggtacggcttataagccttttaaagaaaaagaaattaaataa

SEQ ID NO: 3940 - protein, 157 aa, Unknown
  Obtained from environmental sample
  misc_feature (1)..(157): Xaa is any amino acid
MCAVLIVSNAARQVSIFTMPVTIYLIGGGFVLSFIFSSYEGSILKSVLNSCQNIITVVLGVVNVFSDIMSYIRLWAVGLAGAAIAQTINGMAGPLLGGFMIFAGIILLIFGHGLNMVLNVLSVLVHGVRLNTLEFSGHVGLAWSGTAYKPFKEKEIK

SEQ ID NO: 3941 - DNA, 381 bp, Unknown
  Obtained from environmental sample
  misc_feature (1)..(381): n is a, c, g, or t
atgaatttaggattactaggagccgggttggtactcggtattgcggctgttggatcgggattcggcattggtatcgccgcacaggcggctatcggcgcgtggaaaaagtgttatttaacaaataaacctgcgccaatgacattgctggtatttatcggcgctccgttaacgcaggttttctacgcttatattatgatgggcagtataaagaatgcggcggcgaatatggaatacagtttgctgaactttggttttagtatcgcgtccgcggtagccattgctttctcggctatcttccagggaaaagccggcgcgtgcgccgccgatgccttggctgaatccggaaaggctttgcccagtacgtttccccatcggcgttaa

SEQ ID NO: 3942 - protein, 126 aa, Unknown
  Obtained from environmental sample
  SIGNAL (1)...(29)
  misc_feature (1)..(126): Xaa is any amino acid
MNLGLLGAGLVLGIAAVGSGFGIGIAAQAAIGAWKKCYLTNKPAPMTLLVFIGAPLTQVFYAYIMMGSIKNAAANMEYSLLNFGFSIASAVAIAFSAIFQGKAGACAADALAESGKALPSTFPHRR

SEQ ID NO: 3943 - DNA, 537 bp, Unknown
  Obtained from environmental sample
  misc_feature (1)..(537): n is a, c, g, or t
atggcgactggctggtatgtcctgcatacatattcaggatatgaaaataaaatagaaaaaactatccgcatgatgatcgaaaacggagaattggacagaaatgtagtctgtgatatcaaagttcccagtgaagaggttgtcgaggtaaaagacggcaaaaaacgcacacagacaaggaaatttctgccgggttatatccttgtagagatgaatctgccggatgcggaaatgggctggaaagcgccctgctcgaaaataaagaaaattcaaggcgtaacaggttttgtcggaacaccggcagatcgtaaaccgcagccgctgtcaggcgacgaagcccgcgcaatacttcaaaaatccggtgaaattaaaggtgaaagaacggtccgcgcaaggcagacatttgcggcgggagagcaggtcaaaattattgacgggccgtttgagtcatttgtcggaactatagaagagttaatcacgagaaaaataaacttaggtaatggtcggaatttttggcagaaatgcgcctgtggaaagtga

SEQ ID NO: 3944 - protein, 178 aa, Unknown
  Obtained from environmental sample
  DOMAIN (3)...(110): Transcription termination factor nusG
  misc_feature (1)..(178): Xaa is any amino acid
MATGWYVLHTYSGYENKIEKTIRMMIENGELDRNVVCDIKVPSEEVVEVKDGKKRTQTRKFLPGYILVEMNLPDAEMGWKAPCSKIKKIQGVTGFVGTPADRKPQPLSGDEARAILQKSGEIKGERTVRARQTFAAGEQVKIIDGPFESFVGTIEELITRKINLGNGRNFWQKCACGK

SEQ ID NO: 3945 - DNA, 522 bp, Unknown
  Obtained from environmental sample
  misc_feature (1)..(522): n is a, c, g, or t
atgcttcgcacgcacaccagtggcactcaaattcactacatggaaacccacaagcccccaataagaatgatagccctagggcatgtgttcagagttgatgccgatgccactcacgcacctatgtttcagcaatgcgaaggtttagttgtggacgaaaacataacatttgctcaattaaaaggaacgctggctctgtttgccaagaattttttcggcgaaaacgcgaaaaccagattccgcccaagctttttcccgttcaccgaaccgagcgcagaactagatgtaagctgtgttttctgtgatggcaaagggtgccgcaaatgcaaaggtacaggctggatggaaataggcgggtgcggttcggtggacccggcggtttttaaaaatgttggcatagacagcgaaaaatacatcggcttcgcctttggctttggcttagaccgcatagccatgctaaagcaccacataccggaaatttctttgctaacttcaaatgaccaaagatttttagaacaattctaa

SEQ ID NO: 3946 - protein, 173 aa, Unknown
  Obtained from environmental sample
  DOMAIN (1)...(173): tRNA synthetases class II core domain (F)
  misc_feature (1)..(173): Xaa is any amino acid
MLRTHTSGTQIHYMETHKPPIRMIALGHVFRVDADATHAPMFQQCEGLVVDENITFAQLKGTLALFAKNFFGENAKTRFRPSFFPFTEPSAELDVSCVFCDGKGCRKCKGTGWMEIGGCGSVDPAVFKNVGIDSEKYIGFAFGFGLDRIAMLKHHIPEISLLTSNDQRFLEQF

SEQ ID NO: 3947 - DNA, 471 bp, Unknown
  Obtained from environmental sample
  misc_feature (1)..(471): n is a, c, g, or t
ttggtcagaattcggcacgagaaaaatagcgtgaagcttttagaaaaaggcacgccttgccagttggctgttagccttgttgcagcagataacgaaaccagagaaagccttatgcctatcaacaaaatgtggaacttaacggagcttttaaatgcagtggatggctatttggcacagagcggcgagtgggttaccctggaatatattttgataaagggcaaaacatgcacagagacagcggctaaaaatttaatccgcattgtgaaacccagacgctgcaaggtaaatgccattgttttgaacaacaatgaaaaccctgaattgcaagctccttccgaacaggaagtgaatgagtttttagagattgtacgggcaaaatccgtgcaaataaatatcagaaattcaagaggctgcgatatttttgccgcctgcggacagttagcgaatgttttaaataaaaggatgccgtaa

SEQ ID NO: 3948 - protein, 156 aa, Unknown
  Obtained from environmental sample
  misc_feature (1)..(156): Xaa is any amino acid
MVRIRHEKNSVKLLEKGTPCQLAVSLVAADNETRESLMPINKMWNLTELLNAVDGYLAQSGEWVTLEYILIKGKTCTETAAKNLIRIVKPRRCKVNAIVLNNNENPELQAPSEQEVNEFLEIVRAKSVQINIRNSRGCDIFAACGQLANVLNKRMP

SEQ ID NO: 3949 - DNA, 405 bp, Unknown
  Obtained from environmental sample
  misc_feature (1)..(405): n is a, c, g, or t
gtgaaattaatggcgattttgtatattatcggcacgcctatcggaaatctgggcgatattagcttccgggcggcggaaattttcaaaacggtgggcctggtggcgtgcgaggacacgcggcgcaccctcaagctcctgaaccatctgggaatccgggtgaaaacgctctcctgccgttcccaaaacgaggaatttgccgcgaaaaaagttattgccgccctcgatcaggggctgacggtggcctatgccagcgacgccggaacccccgccctgagcgaccccggcgcggttttggcaagccttgccgccgccgccgggcatgaggttatccccgttccggggccttccgcctttgccgcgctgttgagcgtcgccggaagcacggacaaaacacgttgtttttga

SEQ ID NO: 3950 - protein, 134 aa, Unknown
  Obtained from environmental sample
  misc_feature (1)..(134): Xaa is any amino acid
MKLMAILYIIGTPIGNLGDISFRAAEIFKTVGLVACEDTRRTLKLLNHLGIRVKTLSCRSQNEEFAAKKVIAALDQGLTVAYASDAGTPALSDPGAVLASLAAAAGHEVIPVPGPSAFAALLSVAGSTDKTRCF

SEQ ID NO: 3951 - DNA, 696 bp, Unknown
  Obtained from environmental sample
  misc_feature (1)..(696): n is a, c, g, or t
atggacgcggatataatagtctcattgaaccatttcaaggggcatgagggcaccggcttcggcggcgcaataaaaaacctgggtatgggctcgggcagccgggccggcaagatggcaatgcacaatgacggcaaaccccaggttaacaaaaaagcctgcgttagctgtaaaatctgcgcccgtttctgcgcccatgacgctattgtttttgatgacggcaaagcgttcattgaccagaaaaaatgcgcgggctgcgggcgctgtataggttcatgcagtaaaaacgccattgaaaccaactgggacaccaataatcaaaagctttgctgtaaaatagttgaatacgcaaaagcggcgcttaacgaccgcccgaattttcatattaatgtcgtaaaccaggtttcgccctactgcgactgccacagtgaaagcgacgccgccgtggttcccgacatcggcatattcgcgagtttcgatccggtggccctggacaaggcctgcgttgacgcggtaaacgccgcccccgccatcaagaccactattatcggcgaacgcaagtgcggccacaaggacacggctggcaacgacgatcattttaccaacatccaccccacaaccgactggcgcgaacagatttcttatgcggaaaaaatcggactgggcagcggtgagtatgaactggttacggtgaaatga

SEQ ID NO: 3952 - protein, 231 aa, Unknown
  Obtained from environmental sample
  DOMAIN (46)...(69): 4Fe-4S binding domain
  misc_feature (1)..(231): Xaa is any amino acid
MDADIIVSLNHFKGHEGTGFGGAIKNLGMGSGSRAGKMAMHNDGKPQVNKKACVSCKICARFCAHDAIVFDDGKAFIDQKKCAGCGRCIGSCSKNAIETNWDTNNQKLCCKIVEYAKAALNDRPNFHINVVNQVSPYCDCHSESDAAVVPDIGIFASFDPVALDKACVDAVNAAPAIKTTIIGERKCGHKDTAGNDDHFTNIHPTTDWREQISYAEKIGLGSGEYELVTVK

SEQ ID NO: 3953 - DNA, 672 bp, Unknown
  Obtained from environmental sample
  misc_feature (1)..(672): n is a, c, g, or t
gtgtctcaaatagcaatggaacaaagcaatcaaactattggcgaagaaatagccaattcggcgcttcatttttttggtgcccttctgggaattcttggcttggtcattctggtaaaccacgcccgctcctccctgccggtatatgtgatttttgcctcaacaatgatctttatgttttccgcgtcggctacctatcacgccgtaatttccggaaagataaaacagtttttccgcgttattgaccatcagtccatttatatatttatcgccggtacctatacgcctttttgccttttggcgctcaaggggtcccttggcatggctttgttcgtttttgagtgggttatggccttgaccggggtaatactttcagccgttcagtttcgcttcataaaaaaaattgaaatggtcatttttatccttatgggatgggcaattatcggcgggtgtgtaccccttgcgcactcgctttcactgcggagcgttgttcttctatttggcggaggcgtgctatacaccgccgggactttctggtatcgcgccggaaagccaaagcccggtctccgacagggccgcttattctgcggccacgttatctggcatctttttgtccttgccggagcggcctgccactggtttgccgtatggtttttattacttgagaaacattaa

SEQ ID NO: 3954 - protein, 223 aa, Unknown
  Obtained from environmental sample
  DOMAIN (11)...(212): Haemolysin-III related
  misc_feature (1)..(223): Xaa is any amino acid
MSQIAMEQSNQTIGEEIANSALHFFGALLGILGLVILVNHARSSLPVYVIFASTMIFMFSASATYHAVISGKIKQFFRVIDHQSIYIFIAGTYTPFCLLALKGSLGMALFVFEWVMALTGVILSAVQFRFIKKIEMVIFILMGWAIIGGCVPLAHSLSLRSVVLLFGGGVLYTAGTFWYRAGKPKPGLRQGRLFCGHVIWHLFVLAGAACHWFAVWFLLLEKH

SEQ ID NO: 3955 - DNA, 372 bp, Unknown
  Obtained from environmental sample
  misc_feature (1)..(372): n is a, c, g, or t
atgggcgagggcgtaaaaatcatcgcgctgaaccgtaaggcgcggcacgattattccgttgatgaaacttatgaatgcggcatagaattattggggacggaagtaaaatcgtttcgcgacggaaaaatttcatttcccgattcgtgggcggaagtggtaaacggcgaagtttggctgcgctcattgatagttgcggaaaatcccttctcatcggtttttaaccacgagccggacagaaaaaagcgcctgctcttgcacaaagaggaaataaaaaggattcatcgaaaggtagaagaaaaggggtatacattaatcccgctgtcattttattttaaaaaacagcagggtaaaagtggaaatcgggctgtgtaa

SEQ ID NO: 3956 - protein, 123 aa, Unknown
  Obtained from environmental sample
  DOMAIN (6)...(73): SmpB protein
  misc_feature (1)..(123): Xaa is any amino acid
MGEGVKIIALNRKARHDYSVDETYECGIELLGTEVKSFRDGKISFPDSWAEVVNGEVWLRSLIVAENPFSSVFNHEPDRKKRLLLHKEEIKRIHRKVEEKGYTLIPLSFYFKKQQGKSGNRAV

SEQ ID NO: 3957 - DNA, 468 bp, Unknown
  Obtained from environmental sample
  misc_feature (1)..(468): n is a, c, g, or t
gtgaacatggcgcttgataaatccaagtacattaaccagtttgtcgaagaagggctggagaacctgtctaatattgaaaagcttctttttgaaataaaagacggctcattagtccaggataatcttgtcacccttatgcgcgctcttcataccttaaaaggctccgcgcgcatgctggagtttaaaaatatagaagccgtttcccacgcgcttgaaactgttttttcctcattaaaagaagagcgtataagcctgaatgacaaggctgtaaaacttattcttgccggattggacgaagtaaaagaaggggttaataaagtaaaatccggcgaaaaggacgatataagagccgatgtatttaaaaaggaactgtcggcccttggcgcccttgaaaatatgaaataccgggtacggacgaaagttccggacagaaagcaaaggcggacagcgggaaacatgaagatataa

SEQ ID NO: 3958 - protein, 155 aa, Unknown
  Obtained from environmental sample
  DOMAIN (9)...(110): Hpt domain
  misc_feature (1)..(155): Xaa is any amino acid
MNMALDKSKYINQFVEEGLENLSNIEKLLFEIKDGSLVQDNLVTLMRALHTLKGSARMLEFKNIEAVSHALETVFSSLKEERISLNDKAVKLILAGLDEVKEGVNKVKSGEKDDIRADVFKKELSALGALENMKYRVRTKVPDRKQRRTAGNMKI

SEQ ID NO: 3959 - DNA, 489 bp, Unknown
  Obtained from environmental sample
  misc_feature (1)..(489): n is a, c, g, or t
gtgataaaaggacgtaggaattttgcaatcttttccataatagcttgcgttttattatggggcttttcctttatttcaattaaagagtctctgccggttttcccgcccatgacgctgggagccgtgcgttttataatcgccattgctgcgctttttttaatgtatcgcttttccccggaatggcggggcgcaaacaaaatgcttaaatcggatatgttcctgttaataggctcaggtttgtcaggagttactttttattttttctttgaaaacaacggcgttatgagggttaccgcctcggaggcttccattattacggcggcaattcccgtgctcacaatgatcgccgattggctcgcggcaaaatcatcgttccaaaaaaaacgcgcggatggtaacgcgtgtgataacatgtcatataacaatgcgccgcgtcttggctggcagtcatggctgggggcgtttatttccatgccggagtcgcgttag

SEQ ID NO: 3960 - protein, 162 aa, Unknown
  Obtained from environmental sample
  SIGNAL (1)...(28)
  DOMAIN (18)...(135): Integral membrane protein DUF6
  misc_feature (1)..(162): Xaa is any amino acid
MIKGRRNFAIFSIIACVLLWGFSFISIKESLPVFPPMTLGAVRFIIAIAALFLMYRFSPEWRGANKMLKSDMFLLIGSGLSGVTFYFFFENNGVMRVTASEASIITAAIPVLTMIADWLAAKSSFQKKRADGNACDNMSYNNAPRLGWQSWLGAFISMPESR

SEQ ID NO: 3961 - DNA, 786 bp, Unknown
  Obtained from environmental sample
  misc_feature (1)..(786): n is a, c, g, or t
ttgataatatggtctttaatcgtactttttccactctgggtaatggtcattaattcatttaaagatcggctttcgatttatcaaaaccctttcgggcttcccaaagaatggaactacatcaactatggcgcagtattgggagacggggacttccttgtttatttcagaaacagttttgtggtcgttgttctttctctggctctgcttctggctacaggcgctctggctgcctacgcattggctaactggcgggggaaattgccgcgcttgctgtactttttctttattgccggaatgatgctcccaatcaaaatcgcttcaataagaatcctggaacttgtccgctttcttggcctgattaacacaatatggtcgttgattccggtctataccgcaatgggcatacctatcgccgtgttcatactcaccgagtttatacggcagattccatacgagcttaccgaagcgggaataattgacggtgcaggccgtttcggcgttttaatgcaaataatttcgccgctgttacggccggccctagcgaccacggcgatatacaacctggttcccttttggaacgacctttggttccccctgatttttatcaccgacgacagggcaaaaaccctgcttctgggtgttacccgcctctttggtcagtaccaaaccgactggtcnaaggtgctggcagtgctgaccctctcggcgattccggttattttcctatacctgatgatgagcaaacagtttatcaagggattgacagccggagcggtgaagggataa

SEQ ID NO: 3962 - protein, 261 aa, Unknown
  Obtained from environmental sample
  DOMAIN (51)...(256): Binding-protein-dependent transport system inner membrane component
  misc_feature (1)..(261): Xaa is any amino acid
MIIWSLIVLFPLWVMVINSFKDRLSIYQNPFGLPKEWNYINYGAVLGDGDFLVYFRNSFVVVVLSLALLLATGALAAYALANWRGKLPRLLYFFFIAGMMLPIKIASIRILELVRFLGLINTIWSLIPVYTAMGIPIAVFILTEFIRQIPYELTEAGIIDGAGRFGVLMQIISPLLRPALATTAIYNLVPFWNDLWFPLIFITDDRAKTLLLGVTRLFGQYQTDWSKVLAVLTLSAIPVIFLYLMMSKQFIKGLTAGAVKG

SEQ ID NO: 3963 - DNA, 390 bp, Unknown
  Obtained from environmental sample
  misc_feature (1)..(390): n is a, c, g, or t
atgggtaatattcccgttagggagcctcgcaaggaaaatgtatccagcggcatgggcgatataataaaccagatcgccgtttatagaaatttttcaaacgcgataggctattcatttttattttattcaactgaaatggcaaaaaatgatcaaatcaagttattgtctattgaaggtatttatccatcaagggaaacaatacaggatggaagctatccgttttctgacagtttttacgcgatttacaatgatactgatgaaaaaaatgagaatattgaattatttattgaatggatgctatcaagccagggtcaggaactaatttcaaagactgggtatataccgataaatttagattttacaaaatcactttctttaccgaaaaactag

SEQ ID NO: 3964 - protein, 129 aa, Unknown
  Obtained from environmental sample
  misc_feature (1)..(129): Xaa is any amino acid
MGNIPVREPRKENVSSGMGDIINQIAVYRNFSNAIGYSFLFYSTEMAKNDQIKLLSIEGIYPSRETIQDGSYPFSDSFYAIYNDTDEKNENIELFIEWMLSSQGQELISKTGYIPINLDFTKSLSLPKN

SEQ ID NO: 3965 - DNA, 363 bp, Unknown
  Obtained from environmental sample
  misc_feature (1)..(363): n is a, c, g, or t
gtggacctcgaaggaatgaacggcgtagatccgaaaggtatagctgggcttaaagccatctatcatgagaattggtttgattatataaaagccgcaggcatcatatctcttttttctttaatcaattcaaaaatggttgaggaggtcgctaagtacggctcccaggatatggcggccggggttattacgtctaacgccgagtttattaaagacttaggaggcaaccttgtcagtcgcgccatgaacatacagcctacattaacggttgatagcggcgaaaggatcaatgtcatgcttaataaaaatatctatttgcctccttatagcaattttgaagtaaatcagaggtatgtattgccgtga

SEQ ID NO: 3966 - protein, 120 aa, Unknown
  Obtained from environmental sample
  DOMAIN (1)...(109): Bacterial conjugation TrbI-like protein
  misc_feature (1)..(120): Xaa is any amino acid
MDLEGMNGVDPKGIAGLKAIYHENWFDYIKAAGIISLFSLINSKMVEEVAKYGSQDMAAGVITSNAEFIKDLGGNLVSRAMNIQPTLTVDSGERINVMLNKNIYLPPYSNFEVNQRYVLP

SEQ ID NO: 3967 - DNA, 585 bp, Unknown
  Obtained from environmental sample
  misc_feature (1)..(585): n is a, c, g, or t
atgccaatgataggcggaaacgcaaattacgttggatatgcggtcccggcgctaacgccggtcgcgttatattttacaggccttgcaataaaaaacgagaagttacaaatgacaggtttggcattaacccagtcgcttatgcttacaatgttaattcagacgccatttaaaattgctaccgggcgtacatggccgggaatagttgatggctgggattcgcctttaagcaagcgaagcgacaggacagatgattatagcggcgagtttaactggttcgatttagatgccgtaggaggctggccaagcggtcatacagcaaacgcgttttccgccgcggctacgatagcgcagatttacaacgacaatacagtgttaaaagtcgcggtatatacctacgcctcgctgattggtctgggcatgtccgtatacgatcattgggcgtctgatgtaatttccggcgcgttaattggatttgcgataggcacaacggtaggaagaagttaccgaagctcaattgacgaaaaagaaaataaggtaatgttctatgcaacgcccaattcagtgggtgtggtaataaggaaatga

SEQ ID NO: 3968 - protein, 194 aa, Unknown
  Obtained from environmental sample
  DOMAIN (38)...(173): PAP2 superfamily
  misc_feature (1)..(194): Xaa is any amino acid
MPMIGGNANYVGYAVPALTPVALYFTGLAIKNEKLQMTGLALTQSLMLTMLIQTPFKIATGRTWPGIVDGWDSPLSKRSDRTDDYSGEFNWFDLDAVGGWPSGHTANAFSAAATIAQIYNDNTVLKVAVYTYASLIGLGMSVYDHWASDVISGALIGFAIGTTVGRSYRSSIDEKENKVMFYATPNSVGVVIRK

SEQ ID NO: 3969 - DNA, 879 bp, Unknown
  Obtained from environmental sample
  misc_feature (1)..(879): n is a, c, g, or t
ttgaacggtacgaaaaacgcaggatgttatttgaaatgctccaacgggcagcggctgtatgatacaatacggctattcagatttaggaggaaacgtttgaacaggcaatttatcgtaaaatactggtacgccaacgcttatgagcagtttgagaatcaaaccaacgatgtagagttcctgttaaaagtcttgcgcgagcagaccgggggaacaccgcaaaacatcctggaagtcgcttgcggcggcgggcgtatcagtgtcccgcttgcacaggcggggcatactgtcaccgggttcgatgcggatgaatatatgcttctacgctgttaccgacggatgcggggtattccgaacataacatgctatcaagccgacgcgttggataatgattggggcgcggattttgacgtcgttgtcatggctgggaacatcctcatcaacatccaaaccgaaacggattatgccgaggcgcaacggatattcatccgcaaagcagcgttggcgctccgtccgggtgggcatctgtttttagactacgaccagcactcagaaacgtcggcgattaaattttttaaccgcttgggtgagagcggccgcttgggtgacgattctgtatattccgacgatttaggaacaagtgggaaatttttaaactacggcagtgtgtatgaccccgtgacgcgcgtttgcgcttgggcaagccataaagatctgctgacgaacaacggggagcgtattatcgaatcaacggtggggcataagcacatcccgacgctgaaacaggtttacgggtggctttccgattcaggcttcacgttgatagaagctaccgaaactataccgacgagccattgtacgaagatgagtctgattttgtag

SEQ ID NO: 3970 - protein, 292 aa, Unknown
  Obtained from environmental sample
  DOMAIN (58)...(192): Methyltransferase small domain
  misc_feature (1)..(292): Xaa is any amino acid
MNGTKNAGCYLKCSNGQRLYDTIRLFRFRRKRLNRQFIVKYWYANAYEQFENQTNDVEFLLKVLREQTGGTPQNILEVACGGGRISVPLAQAGHTVTGFDADEYMLLRCYRRMRGIPNITCYQADALDNDWGADFDVVVMAGNILINIQTETDYAEAQRIFIRKAALALRPGGHLFLDYDQHSETSAIKFFNRLGESGRLGDDSVYSDDLGTSGKFLNYGSVYDPVTRVCAWASHKDLLTNNGERIIESTVGHKHIPTLKQVYGWLSDSGFTLIEATETIPTSHCTKMSLIL

SEQ ID NO: 3971 - DNA, 666 bp, Unknown
  Obtained from environmental sample
  misc_feature (1)..(666): n is a, c, g, or t
atgaaatcattatcgtctcatgcaaataccattataaaaataggccctaaaatgagcaatatgactgacatcctcgggggcgagcgctttattaccactgaactaatcgaaaaaggctggtcggaagataagaaatactgcgtcaccaaggccgacggaacgaaatatttgcttcgtattacgccgattgaacggtacgaaaaacgcaggatgttgtttggaatgctccaacgggcagccgcgcttgatgttcccatgtgcctgcccatagagttcggtacttgtactgacggcgtttattccctccagagttggattgacggcgaagatttggaatcggttttgccgctgctgcccgaaacagaacagtatgttttgggattgaagtccggcgagattttaagaaaaatgcactctatacccgcaccggaggggcaaattgaatgggcgtctcggttcaaccgtaagacggacatcaaaattcaaaaatatagagagtgcggacagcgctttgagggcgatgaatatgtcattgaatatatagaaaaaaatcgcgggctgcttgagaatcgtccccaatgttttcagcatggcgactaccatgtcggcaacatgatgctgaacgcggagaaatgccttggaaaaggcatgactcggccgatctga

SEQ ID NO: 3972 - protein, 221 aa, Unknown
  Obtained from environmental sample
  DOMAIN (32)...(221): Phosphotransferase enzyme family
  misc_feature (1)..(221): Xaa is any amino acid
MKSLSSHANTIIKIGPKMSNMTDILGGERFITTELIEKGWSEDKKYCVTKADGTKYLLRITPIERYEKRRMLFGMLQRAAALDVPMCLPIEFGTCTDGVYSLQSWIDGEDLESVLPLLPETEQYVLGLKSGEILRKMHSIPAPEGQIEWASRFNRKTDIKIQKYRECGQRFEGDEYVIEYIEKNRGLLENRPQCFQHGDYHVGNMMLNAEKCLGKGMTRPI

SEQ ID NO: 3973 - DNA, 909 bp, Unknown
  Obtained from environmental sample
  misc_feature (1)..(909): n is a, c, g, or t
ttggcgcagaagatcatagaaaagagcatcccgcaggttttggagaacaagcgcgtagtgaacctcgatatggcctctatggtcgccggcacgaagtaccgcgggcagtttgaggagcgcctgaaagcgctcatgttggaacttcagaagaacgaaaacgtggtaatattcatagacgagttgcacacgatagtcggcgccggcggctcggagggcagtttagacgcctcaaacatcttcaagcccgcgctctcacgcggcgagatacagtgcgtgggcgccacaacactggacgagtaccgcaaatacatagagaaagacggcgcgctcgccagacgcttccaaacgataatggtcgatccgccaagcgtaagcgagacgatacagatactctccggattgcgccacaactacgaggagcaccacaaggttacatatacggataaagcaatcgcggcggcggtcaagttatccgagcggtacatctccgaccgcttcttgccggacaaggcgattgacgtgattgacgaggccggggcgcggaagcggctgtcgagtatggagataccgacggagatacgcgagattgaaaaagaaatcgccgaggtgctccgcgacaaagaggtggcggtggagcatcaggactttgagaccgccgctacattgcgcgataggcaggataagttgaacggcacgcttcttgaggcgaaggcgctgtggcggaggtctaaggccgaggcgcggcttctagtcgatgagtctacgataacggaggtcatcgccgtgatgacgggcatcccgcttgcgcggcttgccgaggaggaagcaaaaaagtactgcacctggaagacaaacttccccgcgggtcattcgcccagacaaagccctcggcgccctgccgcggagtaa

SEQ ID NO: 3974 - protein, 302 aa, Unknown
  Obtained from environmental sample
  DOMAIN (8)...(176): ATPase family associated with various cellular activities (AAA)
  misc_feature (1)..(302): Xaa is any amino acid
MAQKIIEKSIPQVLENKRVVNLDMASMVAGTKYRGQFEERLKALMLELQKNENVVIFIDELHTIVGAGGSEGSLDASNIFKPALSRGEIQCVGATTLDEYRKYIEKDGALARRFQTIMVDPPSVSETIQILSGLRHNYEEHHKVTYTDKAIAAAVKLSERYISDRFLPDKAIDVIDEAGARKRLSSMEIPTEIREIEKEIAEVLRDKEVAVEHQDFETAATLRDRQDKLNGTLLEAKALWRRSKAEARLLVDESTITEVIAVMTGIPLARLAEEEAKKYCTWKTNFPAGHSPRQSPRRPAAE

SEQ ID NO: 3975 - DNA, 654 bp, Unknown
  Obtained from environmental sample
  misc_feature (1)..(654): n is a, c, g, or t
ttgccgcaagttcttgtgtatcccgccgtaatattggttttgatgatgctgttgtttatgtttatgccgaagggtagtgcgcttgccgcggcggaaatagtccttttggcggtttttgtctggatgttgatgttctttcgggacccccggcgggatattccccttgatgagaaggttctgctttccccggcggacggcacgataacggatattgccgaaactgaaatccccgaactggacggaaaggcgctgcgtatagggatgttcctcagtatttttaatgttcatttgaacaggatgccttgctcggtccgcgttgaaacggttcaataccacaaaggtcggttcaaaaacgccatgtcgcctgagtcgggcagggttaacgaatccaacagcgtggtgatgaccaggattgtcgaaccaaaagaccggctgttggtaaggcaggtcagcggggccatagcccgccgcattgtttgtaaagcggaaccagggcgggaatatgctcagggtctggcatttggcatgattaaatttggttcccgaacggagttgtacgtccctttgcaggaagggaagtatgacatagcggtcaaaatcggcgacaaagtttgcgcgggcatcagcccattagttgtgtataaacatgagtga

SEQ ID NO: 3976 - protein, 217 aa, Unknown
  Obtained from environmental sample
  SIGNAL (1)...(29)
  DOMAIN (38)...(212): Phosphatidylserine decarboxylase
  misc_feature (1)..(217): Xaa is any amino acid
MPQVLVYPAVILVLMMLLFMFMPKGSALAAAEIVLLAVFVWMLMFFRDPRRDIPLDEKVLLSPADGTITDIAETEIPELDGKALRIGMFLSIFNVHLNRMPCSVRVETVQYHKGRFKNAMSPESGRVNESNSVVMTRIVEPKDRLLVRQVSGAIARRIVCKAEPGREYAQGLAFGMIKFGSRTELYVPLQEGKYDIAVKIGDKVCAGISPLVVYKHE

SEQ ID NO: 3977 - DNA, 474 bp, Unknown
  Obtained from environmental sample
  misc_feature (1)..(474): n is a, c, g, or t
atgcacaatgaaagcaaaagagcccttgccgaaaaggattatatgctactcaagcaaaaagaagaggcagaaaaaaagttggaggcattgcgcagcaaaaccattagcgtttacaaagatgctagaggcaccattctttcaatgagcgatcttctgtttgaatttggaaaagcagaattgaagcccgaattgaaggaaaatcttgccgaaattgctggcatcctcaaaaatttgctaaccgatgccaccgttattgttgaaggtcacaccgacaacgtaggcaaggcagatgccaatctaaaattgagtcaacaaagggctggcgaggttgtgaaatacttaacgagcagaggcgttgataaaaaacgcttaaaatccgtaggctatggtttaacaaagccaatagcagacaataataccgaagaaggcaaagcaaaaaaccgcagggttgagcttgttataaaagataagtaa

SEQ ID NO: 3978 - protein, 157 aa, Unknown
  Obtained from environmental sample
  DOMAIN (52)...(148): OmpA family
  misc_feature (1)..(157): Xaa is any amino acid
MHNESKRALAEKDYMLLKQKEEAEKKLEALRSKTISVYKDARGTILSMSDLLFEFGKAELKPELKENLAEIAGILKNLLTDATVIVEGHTDNVGKADANLKLSQQRAGEVVKYLTSRGVDKKRLKSVGYGLTKPIADNNTEEGKAKNRRVELVIKDK

SEQ ID NO: 3979 - DNA, 570 bp, Unknown
  Obtained from environmental sample
  misc_feature (1)..(570): n is a, c, g, or t
gtgatcagaatcggccgaggcggaactcgcgaaattgagggaggagaccgccgccaagtcgctgaggcgtccagaatatataactccctcatggaaaaaatgcgtgacgacacagatacgaagttggataagtggataggttacttcgggaacagcatcggcaatatcgttgagttggtgcttatccccgggataaagaagaaaatgaacgatttggggcacaatttcaacgctctgtcgccacgcaagcagtattacagcaaggacggaaagacttacgcggaggttgacctgctccttgaaaacggcgaggaagttatggtcgtagaggtgaaaacgcagttgtcggtaaaagaagttgagcgccaaatcaaaaggcttgagttgctacggaaaaatgaagccggaaacctgaaaggaaagacaatttactcggcggtcgccggattgcagatagacaaagacgctcgcgagatggctcttggtcttggaatgtacgtagtggaaatggtagaggacacgaagagcgtcaacgtgattaaaccgtccggaaagttgggtacgtggtag

SEQ ID NO: 3980 - protein, 189 aa, Unknown
  Obtained from environmental sample
  misc_feature (1)..(189): Xaa is any amino acid
MIRIGRGGTREIEGGDRRQVAEASRIYNSLMEKMRDDTDTKLDKWIGYFGNSIGNIVELVLIPGIKKKMNDLGHNFNALSPRKQYYSKDGKTYAEVDLLLENGEEVMVVEVKTQLSVKEVERQIKRLELLRKNEAGNLKGKTIYSAVAGLQIDKDAREMALGLGMYVVEMVEDTKSVNVIKPSGKLGTW

SEQ ID NO: 3981 - DNA, 585 bp, Unknown
  Obtained from environmental sample
  misc_feature (1)..(585): n is a, c, g, or t
atgagggcctgtgagatatgcttctgcatagggcccgcggggacgggcaaaacgtacctggccgtagccgaggcgctgcggctggttttgtcgaaaagcctccgcaagctggtgctgacgcggcccgtggtcgaggccggtgaaaacctgggcttccttcccggcgaccttgcccagaaaataagcccgtacctgcgccccctgtacgacgcgatggaatccctcgtcccctacgaaatcatacacagaatggaagacacgcgggctattgaaatcgcgcctttggcctatatgcgcgggcgcagcctgaatgactgcgcggttatcctcgacgaggcgcagaataccacaaaagaacaaatgaaaatgttcctgacaagaatcggcgcgggcgcgcgcgcggttatcaccggggacgtaacccagatcgatttgccgggaagaaccgaatccgggctgcttcacgcggcggatattctgaaagatgtcgacgggcttcatttttcatatctccataccgccgacgtcgtgcgcaacccgcttataaaaaaaataatacaggcttacgatgaaaaaaaaccctaa

SEQ ID NO: 3982 - protein, 194 aa, Unknown
  Obtained from environmental sample
  DOMAIN (1)...(190): PhoH-like protein
  misc_feature (1)..(194): Xaa is any amino acid
MRACEICFCIGPAGTGKTYLAVAEALRLVLSKSLRKLVLTRPVVEAGENLGFLPGDLAQKISPYLRPLYDAMESLVPYEIIHRMEDTRAIEIAPLAYMRGRSLNDCAVILDEAQNTTKEQMKMFLTRIGAGARAVITGDVTQIDLPGRTESGLLHAADILKDVDGLHFSYLHTADVVRNPLIKKIIQAYDEKKP

SEQ ID NO: 3983 - DNA, 861 bp, Unknown
  Obtained from environmental sample
  misc_feature (1)..(861): n is a, c, g, or t
atggacctcatcaaggcggggctggcaatcggcggcgccaactgtatagccatcgtggtgatccttttaatgcgggctgcggccataggcgaatatccgtccatgctgttctgggccgccattaacggcattgtgtcggggatgctggttctcggcgtactgccgcctttggagcatattatgaaagccgccaccactttcaggctgatcgaacttgctgacctcaacgcgcctatcctgcgaaagctctttaccaccgcgcccggcacttacagccattcgctgatggtggcgacgcttgccgagcaggcatgccaggatattggggcaaacgccctgctcgcgagggttggcggttattaccatgacatcggcaaaatggataatcccgattacttcatagagaatcagaccgaccacaaccggcatgacgatattgccccgaggctttcggcgacggttatacgcagccatttgaagctgggcatcgaaaaagcaagaagcctggggctgccggcggatgtcatagacattatagcggaacaccacggcaactcccttataatgtggttttacaaaaaagcctcccagcaggaagatcaggttaattccgaggatttcgcctatccgggaaccccgccccgttccagggaatccgccgtggttatgcttgccgacgttacggaagccgcggtcaggacgatgataaagcccacggtggcaaagatggaaaaatttatccagcagctttttgacgataaagttgaggccggacagcttgcccagtccgatcttactttccgcgaccttgagacgattaaaaaagcttttataaaagtgcggcggctcggccgaatctga

SEQ ID NO: 3984 - protein, 286 aa, Unknown
  Obtained from environmental sample
  DOMAIN (90)...(231): HD domain
  misc_feature (1)..(286): Xaa is any amino acid
MDLIKAGLAIGGANCIAIVVILLMRAAAIGEYPSMLFWAAINGIVSGMLVLGVLPPLEHIMKAATTFRLIELADLNAPILRKLFTTAPGTYSHSLMVATLAEQACQDIGANALLARVGGYYHDIGKMDNPDYFIENQTDHNRHDDIAPRLSATVIRSHLKLGIEKARSLGLPADVIDIIAEHHGNSLIMWFYKKASQQEDQVNSEDFAYPGTPPRSRESAVVMLADVTEAAVRTMIKPTVAKMEKFIQQLFDDKVEAGQLAQSDLTFRDLETIKKAFIKVRRLGRI

SEQ ID NO: 3985 - DNA, 786 bp, Unknown
  Obtained from environmental sample
  misc_feature (1)..(786): n is a, c, g, or t
atgtcttcaaaaaccgccatgcgatattttacagacgaaggaattacggcaggctggaacctgggtaatactcttgatgctgttaataactggagttataaaagtcctgtagcggaagaggaatgctggggtaacccaaaggccaatcaggcgatatttaacggaattaaagagcggggttttaatattgtccgtataccttgtacctggaccgggcatattggccccgcgcctggttataaagtttcacaagaacggctgcggcgtgctgccgtagtggccggttatgcgagagaagccggtctgaaagcgataataaatttacaccatgatgacggcgaagatttgggcggctggcttttgttggggaatgccgtcgcaagtcaaaataaccttgatcaaataacggacaaatttgaaaaagtatggacacagatagcggaatattttaaggattacggagactggctgatatttgaaagtatgaatgaggtacatgatgaaaactggggctggagccagacttttcaaaataatccgaaattatttattgatatagttaatgggtggaatcagcgttttaccgacgcggtgcgtgcgaccggcggtaataacgcccaacgttttttaatatatccttcttatgcctctaatcctgaatgtaccattcctgacggcaaggtcggtgcggcggaagccggaaaatattttaaactgccgactgacagcgccggtaatggcaggcaaattgttacttttcattattatgattctttccgaatttga

SEQ ID NO: 3986 - protein, 261 aa, Unknown
  Obtained from environmental sample
  DOMAIN (22)...(261): Cellulase (glycosyl hydrolase family 5)
  misc_feature (1)..(261): Xaa is any amino acid
MSSKTAMRYFTDEGITAGWNLGNTLDAVNNWSYKSPVAEEECWGNPKANQAIFNGIKERGFNIVRIPCTWTGHIGPAPGYKVSQERLRRAAVVAGYAREAGLKAIINLHHDDGEDLGGWLLLGNAVASQNNLDQITDKFEKVWTQIAEYFKDYGDWLIFESMNEVHDENWGWSQTFQNNPKLFIDIVNGWNQRFTDAVRATGGNNAQRFLIYPSYASNPECTIPDGKVGAAEAGKYFKLPTDSAGNGRQIVTFHYYDSFRI

SEQ ID NO: 3987 - DNA, 699 bp, Unknown
  Obtained from environmental sample
  misc_feature (1)..(699): n is a, c, g, or t
ttggccgagcggcacgagataccgccggatatttttgaaaaggcgcaaaaacagggaaggacaaagccttggggcacggcccacgcgctgctctgcgcggcggacaggatcgacgcgccgttcgcggttatcaacgccgatgatttttacgggcgcgaagctttcgaggtcctcggcaaatatcttcgcggttctgatgccggcggctcgcccgtgggagaggcggccatagtgccgtaccgcctggataaaacgttaagcccccagggaactgtcgcgcgcgggttatgcgaaatcaaagacgattacctcgtcacggttgaagagcttaccgccataggcgaaaaggacggcgctattgtcaacacaaatccggacggctcaatccggcggcttgcccccgacagccccgtgtcgatgaatttctggggtttttccccgggcatactccccgaattcaggaaatatttcgacgaattcttaaaaacttttgccgccgatattcccgcgcaaatcaagagcgaatgttttatccccaaagcggcggatcattttattaaacagggcatcgcgaggatcaaagttctgagggcggattccgactggtttggcgtaacttaccgggaagaccgcgaagcggcggtcaggaaactcgccggtttgacacaggccggcgtttacccggaaacgttgtggtag

SEQ ID NO: 3988 - protein, 232 aa, Unknown
  Obtained from environmental sample
  misc_feature (1)..(232): Xaa is any amino acid
MAERHEIPPDIFEKAQKQGRTKPWGTAHALLCAADRIDAPFAVINADDFYGREAFEVLGKYLRGSDAGGSPVGEAAIVPYRLDKTLSPQGTVARGLCEIKDDYLVTVEELTAIGEKDGAIVNTNPDGSIRRLAPDSPVSMNFWGFSPGILPEFRKYFDEFLKTFAADIPAQIKSECFIPKAADHFIKQGIARIKVLRADSDWFGVTYREDREAAVRKLAGLTQAGVYPETLW

SEQ ID NO: 3989 - DNA, 876 bp, Unknown
  Obtained from environmental sample
  misc_feature (1)..(876): n is a, c, g, or t
gtggatatctacgcaagccgcccacgaatcaccggcgtccagttcgcgcaaatagcccgcgacggtttttgggagatgctgcccgaaaatttcagtcaggtgcgcccacagcgcgtgacgcgcgacgggaaggactggtacaggtatcgctataccgttgcctggctctttccgctgacgagcggtgaaagggttattcccccgtttgccgtccgggttgactacgaccagttctggatgcgctcgcaggttttccagacggagcccctgcggcttatggtattgcccttgcctgcgggcgccgggaaatttttttcaggcgcggtgggcaattttgagatcaacgcgaatcttgaggaaccggcggacggtttcgtcaaggataaaccctttacgctcgttctcactgtcagcggcgtcgggaatatccgttcgctggatgcgccgtctttctccgctactcctgatttcaggatcatgcctccgcagcatacgaccgaggtgcggattaaggacggcagggtaagcgggtaccagagttaccgctatttcatttatccgctgcgaaccggcagtcttgcgctgccggaagccaaactcgaggcctttgatccgatccaggcaaaatattataatcttgcctgtacgctccccccgcttgtgatcgctccatcaaataatgcggccaaaaacgaagacaagccgcgcgtacggatgcagcccagctatgatttttcggttcccgaatctgattttcctcccaattcgcttccgctcccgttcccgccggcgatgcttcctgctgcttggcgcggcaaggatttctggtttgcggggatcctgcggggatcgaaaaccgccggcaggctcttctga

SEQ ID NO: 3990 - protein, 291 aa, Unknown
  Obtained from environmental sample
  misc_feature (1)..(291): Xaa is any amino acid
MDIYASRPRITGVQFAQIARDGFWEMLPENFSQVRPQRVTRDGKDWYRYRYTVAWLFPLTSGERVIPPFAVRVDYDQFWMRSQVFQTEPLRLMVLPLPAGAGKFFSGAVGNFEINANLEEPADGFVKDKPFTLVLTVSGVGNIRSLDAPSFSATPDFRIMPPQHTTEVRIKDGRVSGYQSYRYFIYPLRTGSLALPEAKLEAFDPIQAKYYNLACTLPPLVIAPSNNAAKNEDKPRVRMQPSYDFSVPESDFPPNSLPLPFPPAMLPAAWRGKDFWFAGILRGSKTAGRLF

SEQ ID NO: 3991 - DNA, 828 bp, Unknown
  Obtained from environmental sample
  misc_feature (1)..(828): n is a, c, g, or t
gtggtgctggacgcgtgcagggacaacccttttaaaaatcttcccggcggaagccgggggctttcccgaggtttcgttactgttgaacacccgccacaggatatttttgttatgttttccacttcgcccggcacaaccgcggctgacggcgacaacggacagaacagcccctttgccgaggcctttctcaaatacatggactccgacgagattcttcctgtaatggcgggacttgtaacccgcgaaactatgcgcctaacgggcggtaaacagcggccttaccaaaacggcagcatagtgagcgaactctattattctctctcatcaggcgcgcccgcgcgcgatctgcccgctggatcaagctccgcatctctttctgccgcgccttcgggtgcgcctgcaggaaatccgccttctgttgccgtaccttccccggtaatggcagctatccccgcaggtaatttttttatgggcagccctgtaatagagcttgatcgggatccgcttggagaaaccaggcaccgagtcaatatgagcgccttttacattgcctcaaaagaattaagcgtcggcgagttccgccgttttgtcgaagacacaggccatattaccacagccgaagccgacgacggggcgcaagcctatgatgaggcgaaaaacgaatgggttttccgcgccggggcaaactggcgtaatcccggtttcaggcagggggacgatcatcctgtggtttgcgttagctggtttgacgcggtgaaatactgcaactggctttccgccaaagaaggtctaaaaccggcngtatatcattatcggccgaaccgttaa

SEQ ID NO: 3992 - protein, 275 aa, Unknown
  Obtained from environmental sample
  DOMAIN (143)...(275): Domain of unknown function (DUF323)
  misc_feature (1)..(275): Xaa is any amino acid
MVLDACRDNPFKNLPGGSRGLSRGFVTVEHPPQDIFVMFSTSPGTTAADGDNGQNSPFAEAFLKYMDSDEILPVMAGLVTRETMRLTGGKQRPYQNGSIVSELYYSLSSGAPARDLPAGSSSASLSAAPSGAPAGNPPSVAVPSPVMAAIPAGNFFMGSPVIELDRDPLGETRHRVNMSAFYIASKELSVGEFRRFVEDTGHITTAEADDGAQAYDEAKNEWVFRAGANWRNPGFRQGDDHPVVCVSWFDAVKYCNWLSAKEGLKPAVYHYRPNR

SEQ ID NO: 3993 - DNA, 843 bp, Unknown
  Obtained from environmental sample
  misc_feature (1)..(843): n is a, c, g, or t
ttggaaattctttctacccgcgcggggtttaacagcgcggttaggcatataaagaaaacaatggatattgcgtcaaaaacaaatgcaaatcttggcgatattatttttgaattggatgatgaagaattaacaagcggtaaaacaggcttgcttttaagaatgttattggtcgataaacttggttacaaaacagcgtccgctaatctttcttcaacagttaatgatctttccgttttggcgaaagaattcggaaaatggaacggagttgatcttgtagccgcttatttccatccggaaatggggcttttaatagcgaatccaaaagtagcggaggagcttgccggttttggtcagcttcgtcaaagcgaattaatggtagtatatgccggtcttcagggcaaggaaacagacgagaattgccagaaagccgcggaattagctttaaggctttttgaaggttccagggttacagccccgtcgttccttacaagagggaaatacacggttaaaaaagtttccaaaccccagaaagtcagtgaaacacaagcagtaaaaaaagtaaaagcaaaaacagcatccaaaggaaaagccgcgtctaaacgcgcagcggcggcgcccgctcccgctgtaaaaaaagcggcgacaatagtacagaaatcatcgggaggaccggcaaggatgaccccccgctatgcggttatagtacaaaatgagcttttccataacgganacgtggaagcgtggaagagaatcattgcaagttacagggcaaaacatcccagcctagaagtttttatttactatgagcaggaaagaatacatgacattaactcgttgttttaa

SEQ ID NO: 3994 - protein, 280 aa, Unknown
  Obtained from environmental sample
  misc_feature (1)..(280): Xaa is any amino acid
MEILSTRAGFNSAVRHIKKTMDIASKTNANLGDIIFELDDEELTSGKTGLLLRMLLVDKLGYKTASANLSSTVNDLSVLAKEFGKWNGVDLVAAYFHPEMGLLIANPKVAEELAGFGQLRQSELMVVYAGLQGKETDENCQKAAELALRLFEGSRVTAPSFLTRGKYTVKKVSKPQKVSETQAVKKVKAKTASKGKAASKRAAAAPAPAVKKAATIVQKSSGGPARMTPRYAVIVQNELFHNGXVEAWKRIIASYRAKHPSLEVFIYYEQERIHDINSLF

SEQ ID NO: 3995 - DNA, 309 bp, Unknown
  Obtained from environmental sample
  misc_feature (1)..(309): n is a, c, g, or t
atggtcagattcggccgagattacgaaaaaatgtacgagtcgcggatgttttttgtggacaaactgattggaatgggcgcgaggatcgtgctgtgcgacccgcaccgcgccgttgtttccggcccgtcaagattacatggctccgaactgattagtcccgacgtgcgcgccggaatggcgatgcttatcgccgccctgtgcgccgaaggcaagagcgttatacgcaatgtctaccagattgagcgcggctacgaacaccttgccgaaaggcttgcgtctcttggcgcaagaatatcaaggatagagtaa

SEQ ID NO: 3996 - protein, 102 aa, Unknown
  Obtained from environmental sample
  misc_feature (1)..(102): Xaa is any amino acid
MVRFGRDYEKMYESRMFFVDKLIGMGARIVLCDPHRAVVSGPSRLHGSELISPDVRAGMAMLIAALCAEGKSVIRNVYQIERGYEHLAERLASLGARISRIE

SEQ ID NO: 3997 - DNA, 522 bp, Unknown
  Obtained from environmental sample
  misc_feature (1)..(522): n is a, c, g, or t
ttggccaccattcacagaaaaggagtcacaatgtccagcccacttattggcgtgctgatgggttccaagtcagactgggaaacgatgaagcactgcgcccaaacgctgcaagaccttggcatcccttttgaggcgcacgtggccagcgcccaccgcacccctgacaaggtgtcggagttctgcaaaggagcggaagccaagggcatcaaggtgataatcactgcagccggcggcgctgcccacttggctggggtgtgcgccagcaagacccatctgccgatattgggcatccccatgaaaggctgggccacagagggcatagattcgcttcttagcacagtccaaatgcctagtggcataccagtaggcacactggcgataggcaagccaggggccatcaacgctgccctgctggctgcatccatcctcgcgctgtccgatgcggccataagggaaaaatacttggcctatcgcaaaactgccacagaaaaggcactggcagacgatgagttggggttgtaa

SEQ ID NO: 3998 - protein, 173 aa, Unknown
  Obtained from environmental sample
  DOMAIN (14)...(172): AIR carboxylase
  misc_feature (1)..(173): Xaa is any amino acid
MATIHRKGVTMSSPLIGVLMGSKSDWETMKHCAQTLQDLGIPFEAHVASAHRTPDKVSEFCKGAEAKGIKVIITAAGGAAHLAGVCASKTHLPILGIPMKGWATEGIDSLLSTVQMPSGIPVGTLAIGKPGAINAALLAASILALSDAAIREKYLAYRKTATEKALADDELGL

SEQ ID NO: 3999 - DNA, 381 bp, Unknown
  Obtained from environmental sample
  misc_feature (1)..(381): n is a, c, g, or t
ttggtggattttcaccaacccccggcggcaacccgctggtatcaggacaagctccgcgcgctgttaaaaatgggcgtggactgctttaaaacggatttcggcgagcgtatccctaccgacgtggtttattataatcaggctgaccccggcgggtatgcacaattattacacgctgctgtacaaccgcgcggtgttcgagctgctgacagaggaacgcggcaaaacggaagccgtgctgtttgcccgcagcgcgacggctggcgggcagagcttcccggtgcattggagcggcgactgtttctccgtctacacggctatgagcgaatgcctgcggggcgggctgtcgctggcgctgtgcgggttcggtttctggagccatga

SEQ ID NO: 4000 - protein, 126 aa, Unknown
  Obtained from environmental sample
  misc_feature (1)..(126): Xaa is any amino acid
MVDFHQPPAATRWYQDKLRALLKMGVDCFKTDFGERIPTDVVYYNQADPGGYAQLLHAAVQPRGVRAADRGTRQNGSRAVCPQRDGWRAELPGALERRLFLRLHGYERMPAGRAVAGAVRVRFLEP

SEQ ID NO: 4001 - DNA, 822 bp, Unknown
  Obtained from environmental sample
  misc_feature (1)..(822): n is a, c, g, or t
gtgcggggttcgtcaagaccgtatcttccggacttaattatcggcattaacagagaacgtaaaacattacaggaacgtatcagttatcttggaagggaaatcgcgcggataaaaccgtggggagagtttgatccctcatccataaaagagctgtctctcaaactgcctgtttttttatatgaacttaccaatgaagcgttttccgcaataagcgaagacgtgcgttatataattattgataaaaataaagcggttattcgctttatggtctttgatgcggaactgcccggacttacgccaataactcttcctgaaaaatctttaagcgctcttttaaacgaaatagatgaaataaagatggatattgaagaaattgacgaaagaatgaaaacatttacagatcgcgttccggcactgcgcaaggaaatggagtctgttgaaaaagaaattgaatttgataacgcctctgccgttatggaagatgtcggcgatatacctgccgaatacggactctgctatttaacaggatatgttcctgcggaagatatgaaccgcttgaaaaccgcagcgtccgcaaacggctgggcgctttctgttgtcgatcctgatgaaacggatgatgccgtgccgacaaaacttaaaaacaataaatttgtaaatctgttaaatccgattacagacttccttgggatagttccgggataccgtgaagttgacatttcgttatggtttcttttcttcttctgtattttctttggaatgatcttcggagacgcggcttacggtattattctttcgcttattgcggttgttggcatttaa

SEQ ID NO: 4002 - protein, 273 aa, Unknown
  Obtained from environmental sample
  misc_feature (1)..(273): Xaa is any amino acid
MRGSSRPYLPDLIIGINRERKTLQERISYLGREIARIKPWGEFDPSSIKELSLKLPVFLYELTNEAFSAISEDVRYIIIDKNKAVIRFMVFDAELPGLTPITLPEKSLSALLNEIDEIKMDIEEIDERMKTFTDRVPALRKEMESVEKEIEFDNASAVMEDVGDIPAEYGLCYLTGYVPAEDMNRLKTAASANGWALSVVDPDETDDAVPTKLKNNKFVNLLNPITDFLGIVPGYREVDISLWFLFFFCIFFGMIFGDAAYGIILSLIAVVGI

SEQ ID NO: 4003 - DNA, 744 bp, Unknown
  Obtained from environmental sample
  misc_feature (1)..(744): n is a, c, g, or t
atggcttctgccggaaatgtgccgctctacggcgacttaaccgttgacgagtatttaagctttgcggcggatgcgcgttttattcccgtacaggaacgccccgcggcaattaacgcaagccttgaagcgtgcggcttaacaaattaccgcggtcgcaagatagagacgctttccaaaggctaccgtcagcgcacgggacttgcgcaggcaatccttcacgacccgccgattttaatccttgacgagccgacgacgggtcttgatccgaatcaaattatagaaattcgctctctcataaaagaacttggaaagcgcaagactgtaattctttctacgcatattttgcaggaagtagaggcaatctgcactcaggttttaattattaacgatgggcgtattgcggcgcaaggcagtcccgaagaaattgccggaacaatgaaggggggcgatacttgggaacttatcctgaaaggagcgggctacgatgttgatacaggcgcgatcagcggcaagttgtcttcgttaggcaacatttctaatacggcggtggaaaacacggcggacggatatgtttgcgccaatttctttattccggcggaaacggacggcgcgaatacgggagagcgtatttttgattgggctgtttcgcagaatttaaaaatactcggtatgagcagaaaaaaaatcagtatagaagatatctttgtaaaacttacaagcgatgaaaaggagcgcaataaatga

SEQ ID NO: 4004 - protein, 247 aa, Unknown
  Obtained from environmental sample
  DOMAIN (4)...(131): ABC transporter
  misc_feature (1)..(247): Xaa is any amino acid
MASAGNVPLYGDLTVDEYLSFAADARFIPVQERPAAINASLEACGLTNYRGRKIETLSKGYRQRTGLAQAILHDPPILILDEPTTGLDPNQIIEIRSLIKELGKRKTVILSTHILQEVEAICTQVLIINDGRIAAQGSPEEIAGTMKGGDTWELILKGAGYDVDTGAISGKLSSLGNISNTAVENTADGYVCANFFIPAETDGANTGERIFDWAVSQNLKILGMSRKKISIEDIFVKLTSDEKERNK

SEQ ID NO: 4005 - DNA, 615 bp, Unknown
  Obtained from environmental sample
  misc_feature (1)..(615): n is a, c, g, or t
ttgggcgtttcgggcgtacaatgccaactggagtgttgtgccatggttctgttggacggggaaaaactatccgccgggcggctggcggccattgcagggggcgaatcagtcgcgctggacgaggcggccttggccaaggtcaaggaaaaccgcgccgtcattgaccgcatcctgctcgaaaagagggtggtctatggcatcaacaccggcttcggccagttcgccacagtggtgataccggccgaccaactggcggtgttgcaacttaatttggtgcgaagccacgccgccggtgtgggcgagcctttgccccccgcgcagacccgcgcactgatggctgcccgcataaactgcctgctgaaggcccactccggcatccgcgtggagccaatccgcctgctggcggagtgtctgaaccgcaatgtggttccggtcatacccagcatgggcagcgtgggggcgtccggcgacctggcccctttggcccacatggccctgctgctgataggcgaaggcctggcctgggaaggaaccgggcacattcaaggtggcgaggcactaaaaaaggccgggctggacccatccagttgcaccccaaagagggcctggcgctga

SEQ ID NO: 4006 - protein, 204 aa, Unknown
  Obtained from environmental sample
  DOMAIN (15)...(204): Phenylalanine and histidine ammonia-lyase
  misc_feature (1)..(204): Xaa is any amino acid
MGVSGVQCQLECCAMVLLDGEKLSAGRLAAIAGGESVALDEAALAKVKENRAVIDRILLEKRVVYGINTGFGQFATVVIPADQLAVLQLNLVRSHAAGVGEPLPPAQTRALMAARINCLLKAHSGIRVEPIRLLAECLNRNVVPVIPSMGSVGASGDLAPLAHMALLLIGEGLAWEGTGHIQGGEALKKAGLDPSSCTPKRAWR

SEQ ID NO: 4007 - DNA, 912 bp, Unknown
  Obtained from environmental sample
  misc_feature (1)..(912): n is a, c, g, or t
atgagatatttagttcccggcgattatatggccgaccctgccgttcacgtctttaacggaaaattgttcatttatccctcgcacgactgggaaagtgatattcccgaaaacgataacggcgaccactttaacatgaaggattaccatgtgttttcgatggatgacatcgaaggcgcggttaccgatcacggcgttgttctggaagtgaaaaatattccctgggcaggacgccagttgtgggattccgatgtcgcctgcaaaaacgggaagtattatatgtattttccgctgaaagataaaaccgacattttccggatcggcgtggcggtcagcgacaaacccgaaggccccttcactccccgcgacaaccccatcaaaggaagttacagcatagatcccgccgtttttgaagagggcggtaaatattatatgtacttcggcggattatggggcgggcagttacagcgctaccgcaataataaagcgctggaatccgccgttcttcccgaaggcggtgatccggcgttatgcgcaaagatcgtcagactgagcgacgatatgcttgaatttgccgaagaaccccgcgatgtggttatacttgatgaaaagggcgcaccgatgaccgcgggcgatagtcaacgccgcttttttgaagcgtcatggatgcacaaatacaatggcaaatattatttttcctattctaccggcgacacgcaccttttgtgttacgcgattggtgacaatccctacgggccgttcacctatcanggagtgattctaactcgggtggtaggctggacaacccatcatgccatcgttgagttcaagggtaaaatgtatctgtttcacacgactgcgttccttcggcggcaaacatggctgcgtagtttgaagttactgagcttgatatga

SEQ ID NO: 4008 - protein, 303 aa, Unknown
  Obtained from environmental sample
  DOMAIN (10)...(303): Glycosyl hydrolases family 43
  misc_feature (1)..(303): Xaa is any amino acid
MRYLVPGDYMADPAVHVFNGKLFIYPSHDWESDIPENDNGDHFNMKDYHVFSMDDIEGAVTDHGVVLEVKNIPWAGRQLWDSDVACKNGKYYMYFPLKDKTDIFRIGVAVSDKPEGPFTPRDNPIKGSYSIDPAVFEEGGKYYMYFGGLWGGQLQRYRNNKALESAVLPEGGDPALCAKIVRLSDDMLEFAEEPRDVVILDEKGAPMTAGDSQRRFFEASWMHKYNGKYYFSYSTGDTHLLCYAIGDNPYGPFTYXGVILTRVVGWTTHHAIVEFKGKMYLFHTTAFLRRQTWLRSLKLLSLI

SEQ ID NO: 4009 - DNA, 378 bp, Unknown
  Obtained from environmental sample
  misc_feature (1)..(378): n is a, c, g, or t
ttggaactggccgcaaaggacgacgcgtgggacaaggaagtagacagccgtcaggtaaagcttgcccgtgaaagcggaggctgtgtagtcggttcgcgtctcgcgatttggatgctggaagaagcggacctgaaagtgtatcttagggcaaagcctgagacaagggcggccagaatcgttaaacgcgaaggcggggatataaaagaaattgccgcctttaccgccgaaagggacagccacgataacagccgctatatccgcatatacaatatagataataacaaatatgaatttgccaaccttatcattgataccgataatatcaaccctgacgaaatagccgatttgattattaaagccgcggaaaaaattgtttaa

SEQ ID NO: 4010 - protein, 125 aa, Unknown
  Obtained from environmental sample
  DOMAIN (1)...(119): Cytidylate kinase
  misc_feature (1)..(125): Xaa is any amino acid
MELAAKDDAWDKEVDSRQVKLARESGGCVVGSRLAIWMLEEADLKVYLRAKPETRAARIVKREGGDIKEIAAFTAERDSHDNSRYIRIYNIDNNKYEFANLIIDTDNINPDEIADLIIKAAEKIV

SEQ ID NO: 4011 - DNA, 540 bp, Unknown
  Obtained from environmental sample
  misc_feature (1)..(540): n is a, c, g, or t
atgcattaccgctatgcgttccgcgagatttttcaattcccggacatttccgggccaattgtgcgaaagcagcagttccatcgcatcgttttccagccgcaggttttcaatcccctgctctttcagaaaatacatgagcaagaggctaatatcctctttccgttcccgaagcgggggaatatgaatcgggatgacattcagcctgaagtacagatcctgccggaacagaccctgggcgcaggctttttccaggtctttgttggatgccgcgataaggcggacatcggtttctatggtcttttcaccgcctaccctctcaattttttgttcctggataacccgcagtacctttgcctgcgccgaaagcgacatatcgccaatctcgtcaagaaaaagcgtgccgccgccggcaatttcaaagcgccctttccgactggagaccgcgtcggtaaaagcgcctttttcatggccgaaaagctcgctttccaaaagggtgtcaggtatggcggcacagttcaatcccacaaaagggcgatctga

SEQ ID NO: 4012 - protein, 179 aa, Unknown
  Obtained from environmental sample
  misc_feature (1)..(179): Xaa is any amino acid
MHYRYAFREIFQFPDISGPIVRKQQFHRIVFQPQVFNPLLFQKIHEQEANILFPFPKRGNMNRDDIQPEVQILPEQTLGAGFFQVFVGCRDKADIGFYGLFTAYPLNFLFLDNPQYLCLRRKRHIANLVKKKRAAAGNFKAPFPTGDRVGKSAFFMAEKLAFQKGVRYGGTVQSHKRAI

SEQ ID NO: 4013 - DNA, 318 bp, Unknown
  Obtained from environmental sample
  misc_feature (1)..(318): n is a, c, g, or t
ttgggccttgatgtaggcccaaagaccctcgccaagtacaaggacgtaatcgccaaagccaaaaccattgtatggaacggcccggtaggcgtttttgaatttgacgcgtttgccaaaggcactgaagcagttgcgaagctcgtggcggaagccaccggcaaaggtgtcatcaccgtagtaggcggcggcgactccgtagcggcggtaaacaagttccacctcgccgacaaaatgagccatgtctccaccggaggcggagcgtccctggaactgctggaaggcaagaaactgcccggcatcgaagtttgtaggggttaa

SEQ ID NO: 4014 - protein, 105 aa, Unknown
  Obtained from environmental sample
  DOMAIN (1)...(103): Phosphoglycerate kinase
  misc_feature (1)..(105): Xaa is any amino acid
MGLDVGPKTLAKYKDVIAKAKTIVWNGPVGVFEFDAFAKGTEAVAKLVAEATGKGVITVVGGGDSVAAVNKFHLADKMSHVSTGGGASLELLEGKKLPGIEVCRG

SEQ ID NO: 4015 - DNA, 837 bp, Unknown
  Obtained from environmental sample
  misc_feature (1)..(837): n is a, c, g, or t
ttgacttttgggtattacgacaaggttcccattacctatgtgccgggtaacttttttgcccaatactacgatatggtggcccgttacaggcagaacacggaaagtgataattatggctatttggggtaccagatatggcgcgagtcttacgaagccgccgccgtccatacggctgttcttaaagaaatgaaggatgccggttataccgcgcctgtaaaaaaggtggacagggaagtggccggccttccccagttccaggagaacggccgtttttccccggctctttacaaaaggatggataacaattcgcgcctgtccctttggcggcaggtgcaggaagaaattgccgagagacattttcgttccgacctaaccgggcttctcaaacccggcgcggaggccgagtttatcggaagaatggaagcggtccagcggagtttcaggatgacggtttttgaagtggacgcctatccggaagaggaatacgaagcctatgcccgtgaacattcggagctgtttcgcaatatcaggctttcaatgataacgctaagttcaagcgaacgggaagcgcggcgggtgcttgattcgataaagaaaggcgaaaccacttttgaagacgcggcgagggcccactccaaagacatgtacgccgacaggggaggggacatgggaatgaaaatgttccatgaattaagcgttgatatccccgaagaagacacgcgcgatattataatttccctggcggccggcgattacagcaatgtgataaagacagcggcgggctggtttttcttcgctgcgaggatgcggcgcaggaagccgatttatccgatctga

SEQ ID NO: 4016 - protein, 278 aa, Unknown
  Obtained from environmental sample
  DOMAIN (181)...(267): PPIC-type PPIASE domain
  misc_feature (1)..(278): Xaa is any amino acid
MTFGYYDKVPITYVPGNFFAQYYDMVARYRQNTESDNYGYLGYQIWRESYEAAAVHTAVLKEMKDAGYTAPVKKVDREVAGLPQFQENGRFSPALYKRMDNNSRLSLWRQVQEEIAERHFRSDLTGLLKPGAEAEFIGRMEAVQRSFRMTVFEVDAYPEEEYEAYAREHSELFRNIRLSMITLSSSEREARRVLDSIKKGETTFEDAARAHSKDMYADRGGDMGMKMFHELSVDIPEEDTRDIIISLAAGDYSNVIKTAAGWFFFAARMRRRKPIYPI

SEQ ID NO: 4017 - DNA, 456 bp, Unknown
  Obtained from environmental sample
  misc_feature (1)..(456): n is a, c, g, or t
atggctttagaaactgttatgagcgcccaggaaaaagcggctaccgcccaatgggtggatgcggcaaataaaaaactcagccttgaactcaataaaggcaatattgcggcaaaccagaatcttggaaaagacgattttttaaagctccttttgacccagttgacccatcaggacccttcggctcccatggaggacaaggaatttatcgcccagatggcccagttttcaagccttgagcagatgaccaacatggcggcggatttcgcgaaaatggcccgcatgctcaaagttaccgaagcttcgggcgctttgggcagggctgtcgagataaacctggatgactattcggttcagggcatagtccaggccgtaacaagggaagaagcgccccagatccttgtgaacggaaggttctacgattgggagcgggtaagcacagtttatgacgagttttaa

SEQ ID NO: 4018 - protein, 151 aa, Unknown
  Obtained from environmental sample
  DOMAIN (17)...(151): Flagellar hook capping protein
  misc_feature (1)..(151): Xaa is any amino acid
MALETVMSAQEKAATAQWVDAANKKLSLELNKGNIAANQNLGKDDFLKLLLTQLTHQDPSAPMEDKEFIAQMAQFSSLEQMTNMAADFAKMARMLKVTEASGALGRAVEINLDDYSVQGIVQAVTREEAPQILVNGRFYDWERVSTVYDEF

SEQ ID NO: 4019 - DNA, 864 bp, Unknown
  Obtained from environmental sample
  misc_feature (1)..(864): n is a, c, g, or t
atgatggcggatcggcgctcaaaaccggcttggcgcgtccaaaacacctacggttttttcttttacgcgggtcacggggtgcagtctggcgctgataactttttaatccccgtggacgccaatataccctcggaaaattaccttagaacacggacactttcggttcagaccatgctggatgagctgaacgacgcggggaacgagctcaacgtgattgtccttgactcatgccgggacaatccctttagctggaggcgttccacaagccgcggccttaccgtggtaagttctcccccggccaacagcatcattgtgtatgccaccagggcgggctccaccgctgctgacggcgagggcaggaacggcctctttacaagccatctcctgaataaccttaaaacccctggccttgaagtaaccgaggtgttccgtcgtaccggcgcggacgttgctcgtgccagtaacgaccagcagcgcccgggtgtgtacaacgagttttacggaaccgcctatctcggctcgccacccgccgtggcagtccagccaacaccgcagcccgcccctgccccaacggtacagctaacgccttcaccccagccaagcccaacgcctgcgccgcaaccaactcccgctccggcagcgcagcctgccgcagtgcctgtacgccctgtcgcgcctgaaatggttcgcgtaaacggaggaaccttccagatgggcagtcccgctaatgaggctggccgtggcggtgatgaaactcgacacaaggtaacggttagctctttttacattggaaaatacgaggtaacccaaaaggaaatatcagaaatgatgggaacgaaccccagcaaatttatagggggataa

SEQ ID NO: 4020 - protein, 287 aa, Unknown
  Obtained from environmental sample
  DOMAIN (5)...(172): Caspase domain
  misc_feature (1)..(287): Xaa is any amino acid
MMADRRSKPAWRVQNTYGFFFYAGHGVQSGADNFLIPVDANIPSENYLRTRTLSVQTMLDELNDAGNELNVIVLDSCRDNPFSWRRSTSRGLTVVSSPPANSIIVYATRAGSTAADGEGRNGLFTSHLLNNLKTPGLEVTEVFRRTGADVARASNDQQRPGVYNEFYGTAYLGSPPAVAVQPTPQPAPAPTVQLTPSPQPSPTPAPQPTPAPAAQPAAVPVRPVAPEMVRVNGGTFQMGSPANEAGRGGDETRHKVTVSSFYIGKYEVTQKEISEMMGTNPSKFIGG

SEQ ID NO: 4021 - DNA, 459 bp, Unknown
  Obtained from environmental sample
  misc_feature (1)..(459): n is a, c, g, or t
ttgcacgcatccgaagtctaccgctgggacaaaatttcagggggcagcactaatgtgaccggtattttcgttgacgtgccttacgagcttttgattcctgattgggaaggatatttatcaaaaggaaaacacttaaacggtccgtcaaaaactatgtctgaaaacgcgtctttggcgcttttatcatttaaggtgaaatcagccgcggtaataccggtacatatcaacaatgttttttggggctttacgcttttcgccgatatgaaaaacgaacgttattttgaagatgatataattgaaatgctgcgctcggcgtcttttttattcgctaacgctttcatccgcgccgaagtggattatgacgcgcttaccggcattcataacaggcggttctttgatgaaaatatgaagcgcgtaataagttccctgtcccgctcggaaagttnattagtatgctga

SEQ ID NO: 4022 - protein, 152 aa, Unknown
  Obtained from environmental sample
  misc_feature (1)..(152): Xaa is any amino acid
MHASEVYRWDKISGGSTNVTGIFVDVPYELLIPDWEGYLSKGKHLNGPSKTMSENASLALLSFKVKSAAVIPVHINNVFWGFTLFADMKNERYFEDDIIEMLRSASFLFANAFIRAEVDYDALTGIHNRRFFDENMKRVISSLSRSESXLVC

SEQ ID NO: 4023 - DNA, 822 bp, Unknown
  Obtained from environmental sample
  misc_feature (1)..(822): n is a, c, g, or t
atggcggtcattggcgcgccgctatacgtggaaggccgcctatggggggtggtntgcgtcgagcaaaactacacgccccgccattggacggagagagagcaagaattcgtctccgtgacggctagcaccatagcaggcataattatgcgcgacatctacacaataaaactcaaagaggcgttgcataaagcgaccgaggcgagcaaggccaagggcgaattcctatccaacatgagccacgagatgcgcaccccgttaaacgctataaccggcatgacggcgatcggcaaaaacgcgactgatatggaacgcaaagactacgctctcggcaagatacaagacgcctccacacacctgctcggcctgatcaacgacatactcgatatgtcgaagatcgaggcgaatatgctgaaattgtcggctgtcgagttcagtttcgaaaagatcctcaaaagagttgtagagatggtcaacttcagggtggacgaaaaataccagaaattcacagtgcgcatcgacaaagcgattcccggcaccttgttcggggacgaccagcggctggttcaggttattatcaacctgcttggaaacgccataaagttcaccccggaaaacggctccatctcccttgacacgcgcttcttgggcgaagacggcggcgtctgcaccatagaaatctcggtaagcgacacaggcataggcataagcccagaacagcagaagcacctgttccagtccttccagcaggccgacggcagcacggtccgcaaattcgggggcaccgggctcggccttgccatatccaaaaatatagggagatga

SEQ ID NO: 4024 - protein, 273 aa, Unknown
  Obtained from environmental sample
  DOMAIN (182)...(273): Histidine kinase-, DNA gyrase B-, and HSP90-like ATPase
  misc_feature (1)..(273): Xaa is any amino acid
MAVIGAPLYVEGRLWGVVCVEQNYTPRHWTEREQEFVSVTASTIAGIIMRDIYTIKLKEALHKATEASKAKGEFLSNMSHEMRTPLNAITGMTAIGKNATDMERKDYALGKIQDASTHLLGLINDILDMSKIEANMLKLSAVEFSFEKILKRVVEMVNFRVDEKYQKFTVRIDKAIPGTLFGDDQRLVQVIINLLGNAIKFTPENGSISLDTRFLGEDGGVCTIEISVSDTGIGISPEQQKHLFQSFQQADGSTVRKFGGTGLGLAISKNIGR

SEQ ID NO: 4025 - DNA, 435 bp, Unknown
  Obtained from environmental sample
  misc_feature (1)..(435): n is a, c, g, or t
ttgcaggggcttgaaactctgtctttccgcatagagcgccatatcgaaaacacaaaagccgttattaagtggctggaaaaacatccgtccgtggagcgcgtaaaccatccttcactgcccggccataaggatcacaaattgtacgacaagtatttccccaaaggcgcgggttctatttttacatttgagataaaaggcaacgcggagaaagccaaacgcttcaccgaggaacttaaattattctcgctgcttgccaacgtggcggacgttaaatcgctggtaatacatcctgccaccacgacccactcgcaaatgagcgaaaaagaacttcttgattcgggcatcaaacccaacactgttcgtctttccataggcgccgagcatattgacgacattattgacgatctgaagcagggctttgaagcggttaagtga

SEQ ID NO: 4026 - protein, 144 aa, Unknown
  Obtained from environmental sample
  DOMAIN (1)...(141): Cys/Met metabolism PLP-dependent enzyme
  misc_feature (1)..(144): Xaa is any amino acid
MQGLETLSFRIERHIENTKAVIKWLEKHPSVERVNHPSLPGHKDHKLYDKYFPKGAGSIFTFEIKGNAEKAKRFTEELKLFSLLANVADVKSLVIHPATTTHSQMSEKELLDSGIKPNTVRLSIGAEHIDDIIDDLKQGFEAVK

SEQ ID NO: 4027 - DNA, 912 bp, Unknown
  Obtained from environmental sample
  misc_feature (1)..(912): n is a, c, g, or t
ttgaccgttgcagcggatgaaaccccgggaaccttgaccgttaaagcaacttctacggaggacactaccaagtccggcactgcaacagttaccattattattcctaccgttagcggcgtaactgttagccccgcaacagcaagcgtagaacaaggcggaacccggcaatttaccgcaacggtaaccggaaccaataatccggcgcagactgtaacatggagcgtaacaggcggtaaatcaaccattgacagttttggaactctgaccgttgcggcggatgaaactgcggcaagcctgaccgttacggcaaaatctacggcggatactgcaaagtccggcacggcaattgttaccgttaccaaaaaagttaaagaacctttgaccggggcggtaagcataaccggaaccccccaggtcgggtactcgctgaccgtgaataccaataacctgaaaggaagcgggacaataagctatcagtggaaacgtggagataccgcttcagccgcgggtacgaatatccccggggcgaccgccggcgcctatacattggttgatgccgataaggacaaatacatcagcgtaacggttacccgggccgataatgacgggaacgtaagcagcgcggctgttggcaaggtcatagccgcccctgccaataccaattctttgacaacaacaatcacggtgagcgatggcatcagaagcgaaaacgtcagtttcaccggctcaggcggcgctcttaccctgcctaaaggcggcagcattaccataacggtaagcggcgcgtatcaggcttaccgctggtttattgacaacgcggcggacgacgaaccgggcgcaagccttacattacaaggcaaagattatactgcgggaacaactcaccgcattctggctcgtgccgaattctga

SEQ ID NO: 4028 - protein, 303 aa, Unknown
  Obtained from environmental sample
  misc_feature (1)..(303): Xaa is any amino acid
MTVAADETPGTLTVKATSTEDTTKSGTATVTIIIPTVSGVTVSPATASVEQGGTRQFTATVTGTNNPAQTVTWSVTGGKSTIDSFGTLTVAADETAASLTVTAKSTADTAKSGTAIVTVTKKVKEPLTGAVSITGTPQVGYSLTVNTNNLKGSGTISYQWKRGDTASAAGTNIPGATAGAYTLVDADKDKYISVTVTRADNDGNVSSAAVGKVIAAPANTNSLTTTITVSDGIRSENVSFTGSGGALTLPKGGSITITVSGAYQAYRWFIDNAADDEPGASLTLQGKDYTAGTTHRILARAEF

SEQ ID NO: 4029 - DNA, 708 bp, Unknown
  Obtained from environmental sample
  misc_feature (1)..(708): n is a, c, g, or t
ttgtcggaatttttgcctggctggtatttgagcgtttcaaaagacgatttgccacgcgagatagttatggaattttcgcttggcgaggagcaagaggcatttgaggaattgctcgcaactttggcgggtcacaaaattcaggctgaggttccgcacagaggcgaaaaacatggatatttgcaagtggcaaaagcgaatgcagaaatgcttttggttgagctgcaggcaaaaggcgcaaaatacgatgaaatgaacagaagcgtttttgagttgcaaaaggaattgaatttaaacaacccgccgctctgcatagaatgttttgatatttcgcatttgagcggagaggaacctgtggcgagcatggttcgttttgtgaatggtttccccagcaaaagcgattacagaaaatacaaggttaaaatagcaatgggcggagatgactatacaagcatgaaggaaattttaacccgcagacttacaaggctcaaagcagagaaatccgtttttccagatttgctccttatagacggcggcaaggggcaggtcaatgctgcttttgaagttttaaaagaaatgaaattgacagatattccagtaattggtcttgccaagcgttttgaagaaattggtttcccggggcgaaaaccctccattaccctaaaacggagccaccccgctttgcaacttttgcaaagagcccgagattag

SEQ ID NO: 4030 - protein, 235 aa, Unknown
  Obtained from environmental sample
  DOMAIN (91)...(235): UvrC Helix-hairpin-helix N-terminal
  misc_feature (1)..(235): Xaa is any amino acid
MSEFLPGWYLSVSKDDLPREIVMEFSLGEEQEAFEELLATLAGHKIQAEVPHRGEKHGYLQVAKANAEMLLVELQAKGAKYDEMNRSVFELQKELNLNNPPLCIECFDISHLSGEEPVASMVRFVNGFPSKSDYRKYKVKIAMGGDDYTSMKEILTRRLTRLKAEKSVFPDLLLIDGGKGQVNAAFEVLKEMKLTDIPVIGLAKRFEEIGFPGRKPSITLKRSHPALQLLQRARD

SEQ ID NO: 4031 - DNA, 864 bp, Unknown
  Obtained from environmental sample
  misc_feature (1)..(864): n is a, c, g, or t
ttgtcggaacacacgacttttaagttgggaggtcccgccgattgcagaatatgcccggaaggagaattttttcccgctttctcagccgctttgatctcccgcgcccgtaaagagggaatccccgtatttatacttggcggcggcgcgaacatagttgtaagcgacaaaggcatccgcggtattacgcttgacacatgcgcgtggaagggagcggaagtaaaagataacacgatttcttttaacagcggaacaagcatggacgaagcctccgaattcgccgccgcctgttctcttagcggtttggagtttcttgccggaatgcccggcaccgtcggaggcgcggtatggatgaacgcccgctgttacggcagtgaaattgccgacgtactggcatggacgcaaataattgattttagcggctcgggcgcgcctgaagaaaagcgcgtaccggcggacaaggccgcattcggctacaaacgcagtccgtttcagggaaaagacaacctaatcctaagcgccgccttcaatttaaaacccgccgattccaatgagataaaaagcaaaatggaaaagaacaggcgggacaggctggagaaggggcattatcgtttcccctgcgccggttcagctttcaaaaacaaccatgatttcggcaaacccacaggccaaataattgacgagttgggcctaaggggccttcaaaaaggcggcgcccaaatagcccccttccacggcaacatcatcataaacacaggaaaagcgacagcagaagacatccgcgccctaatggacgaagtcgccgccaaagtgaaagaaaagacaggttttaccctggaatcggaaatattgtttatcggcgaataa

SEQ ID NO: 4032 - protein, 287 aa, Unknown
  Obtained from environmental sample
  DOMAIN (19)...(148): FAD binding domain
  misc_feature (1)..(287): Xaa is any amino acid
MSEHTTFKLGGPADCRICPEGEFFPAFSAALISRARKEGIPVFILGGGANIVVSDKGIRGITLDTCAWKGAEVKDNTISFNSGTSMDEASEFAAACSLSGLEFLAGMPGTVGGAVWMNARCYGSEIADVLAWTQIIDFSGSGAPEEKRVPADKAAFGYKRSPFQGKDNLILSAAFNLKPADSNEIKSKMEKNRRDRLEKGHYRFPCAGSAFKNNHDFGKPTGQIIDELGLRGLQKGGAQIAPFHGNIIINTGKATAEDIRALMDEVAAKVKEKTGFTLESEILFIGE

SEQ ID NO: 4033 - DNA, 540 bp, Unknown
  Obtained from environmental sample
  misc_feature (1)..(540): n is a, c, g, or t
gtgggcatgcaagcgacttgttttgtccaggagcggggtaatttgcgcatccgcctggcgggggacgacaggtggatcgacgaaaaggagtttaacgcccaaaggggatttaaccataacctgagccggcttatggacgaagactcttatccgaccctggaagccgcaggaagggccgccgcttacaatgacctcggtttgtccgcccccgtttcacttcagtttcaggcatccagggcggggtcgataaggtatcctgattatcttgcacacgaaaaagcccgcctggaagttctgcgtggagcgtttccacatgaaggccgttactccgctcttttggcaaggcacacccagggttactatgtgcctgaatccaggattcttcccctgggggacaacagggacaactccagggacggtcgttactttggcccggtaaaggtttcaaaaattactggtaaaggttccataatcaactggccgggcgattttgggctaaggcgtttcgcggcttttgatcgactcggatttattaaatag

SEQ ID NO: 4034 - protein, 179 aa, Unknown
  Obtained from environmental sample
  misc_feature (1)..(179): Xaa is any amino acid
MGMQATCFVQERGNLRIRLAGDDRWIDEKEFNAQRGFNHNLSRLMDEDSYPTLEAAGRAAAYNDLGLSAPVSLQFQASRAGSIRYPDYLAHEKARLEVLRGAFPHEGRYSALLARHTQGYYVPESRILPLGDNRDNSRDGRYFGPVKVSKITGKGSIINWPGDFGLRRFAAFDRLGFIK

SEQ ID NO: 4035 - DNA, 843 bp, Unknown
  Obtained from environmental sample
  misc_feature (1)..(843): n is a, c, g, or t
ttgtggatttttccaatcccgggcgctgttaaatggtatttaagttatctggaaaaactatggantatgggagttgactgttttaagaccgacttcggcgagcgtattcccgaagacgcggttttttttgacggaggcgacccggaacgccatcataatttttatgcatatctgtacaataagagcgtatntgagcttttggaaaaaaagcgcgggaaaggggaggcgtgcctgtttgcccgttccgcggccgcctgctgccagaaatttcctttgcattggggaggcgactgcgaatcaacatttgaggcgatggcggaaactttgcgcggcgggctttctctgggactttcaggttttggcttttggagccatgatatcggcggttttgagggagtgccgaacgccgcgcttttcaaacgctggcttgctttcggtcttttatcttcccattcaaggcttcacggcagttattcttaccgcgtcccgtggaatgtggacgaagaatccgcggaagtttgccggtttttcacggaattgaaatcacgattaatgccgcatattctggaagccgcgcgggaggcacatgaaaaaggcattccggtattacgcgccatgtttattgagtatccagatgacccggcgtgcgcgtatctggacagacagtacatgcttggaagcaaactgttggccgctcccgtattcaatgaagacggagaagttacctactatctgccggaaggcgggtggaagcaatttataacaggtgaaaaggtaaaaggcgggcgttggataactgaaaaacacgggtttttcagtttgcctttgtttgaaaagatatag

SEQ ID NO: 4036 - protein, 280 aa, Unknown
  Obtained from environmental sample
  DOMAIN (2)...(280): Glycosyl hydrolases family 31
  misc_feature (1)..(280): Xaa is any amino acid
MWIFPIPGAVKWYLSYLEKLWXMGVDCFKTDFGERIPEDAVFFDGGDPERHHNFYAYLYNKSVXELLEKKRGKGEACLFARSAAACCQKFPLHWGGDCESTFEAMAETLRGGLSLGLSGFGFWSHDIGGFEGVPNAALFKRWLAFGLLSSHSRLHGSYSYRVPWNVDEESAEVCRFFTELKSRLMPHILEAAREAHEKGIPVLRAMFIEYPDDPACAYLDRQYMLGSKLLAAPVFNEDGEVTYYLPEGGWKQFITGEKVKGGRWITEKHGFFSLPLFEKI

SEQ ID NO: 4037 - DNA, 591 bp, Unknown
  Obtained from environmental sample
  misc_feature (1)..(591): n is a, c, g, or t
ttgctgtcgggcgagggcattatcggcataataatcggtttttacctgacgttgattttcgcgaccttttccacggccggccagtttttctcattgcaaatgggccttggcgcgtcggaaacattcgatcccctggcgcaggttgaaaacccgctgatgggccagtactttaaccttgtttccatgcttgttttcctggtcgtgggcggtttcaggcagttgttcctgggcgggttttggcgatccgtgcagagtatcaacatagcgatgcttgttgagggcagggagcatgttgtcggaatgatggcgtcaggtcttgccaaactgtttctggacgcgatggttatatccctgccaattcttggaacccttttccttacctcgctctcaacagggcttatttccaaggcggcgccccagatcaacatactctcggaagggttccccatcgcgattcttaccgcgtatcttttactgttcgcgactcttcctttcctgctggaaaccttttcggatgtcataaccgcgggttttgccaacatacagcgcctctacaccataattgggcagcaaataggaggcagcttgtga

SEQ ID NO: 4038 - protein, 196 aa, Unknown
  Obtained from environmental sample
  DOMAIN (1)...(182): Bacterial export proteins, family 1
  misc_feature (1)..(196): Xaa is any amino acid
MLSGEGIIGIIIGFYLTLIFATFSTAGQFFSLQMGLGASETFDPLAQVENPLMGQYFNLVSMLVFLVVGGFRQLFLGGFWRSVQSINIAMLVEGREHVVGMMASGLAKLFLDAMVISLPILGTLFLTSLSTGLISKAAPQINILSEGFPIAILTAYLLLFATLPFLLETFSDVITAGFANIQRLYTIIGQQIGGSL

SEQ ID NO: 4039 - DNA, 450 bp, Unknown
  Obtained from environmental sample
  misc_feature (1)..(450): n is a, c, g, or t
gtgccggccccggcggtttccgtttttagtatattcagggtgcttctgacactcgccgtgatcgcggcggcaatctacggattggtctatttccttaaattcagacgggcttcacgcgccaaggtggaacaggaccctttcctgaaagttctcgcgagcgccccgcttgtgacaagccgcagtgtacatgtagtctctgtcgggccgcaggcctggcttgtgggttccgccgaaaacggggtaaacctgataagcgaaatatcggacaaggacacaataaacgctatgctccttgaggactccaaaagaatcgccacgccaaccgagggcgcggctgggcctttacttgattttaaggctattctgggaaagctgggaatcaccgcaaagcccgaaaactcaggcccggatcaaatacgcaagcgtagcgaaaggcttaaagggctatga

SEQ ID NO: 4040 - protein, 149 aa, Unknown
  Obtained from environmental sample
  SIGNAL (1)...(22)
  misc_feature (1)..(149): Xaa is any amino acid
MPAPAVSVFSIFRVLLTLAVIAAAIYGLVYFLKFRRASRAKVEQDPFLKVLASAPLVTSRSVHVVSVGPQAWLVGSAENGVNLISEISDKDTINAMLLEDSKRIATPTEGAAGPLLDFKAILGKLGITAKPENSGPDQIRKRSERLKGL

SEQ ID NO: 4041 - DNA, 855 bp, Unknown
  Obtained from environmental sample
  misc_feature (1)..(855): n is a, c, g, or t
atgaagggcatttcaattttagcaaatagtaaacatacagagttatatcaactatcgcttgaaaaaattatggatagtagcgatggtatagtcattgttcctataaattttttgtcggcagaaaattcaagatatattcgtgagacatttttagagaagttcgaaattgttaaagccaattatttcacgcaacaagtatttcccgatactacttacaatgtaatttcattttattacaaacagaaaaaacaaaaaaactccacaatgaaaattgattggacaattttccctgaaaacaaaagaaccgaaataactatacatcgcggtcataactggcaaattggtggagaatttttgagcaagattaatgaatcggggaatcgattgaaaatctctagacttgaagaaaaagacttgcaaaacggaaacattaaaattaaagcggcttacaaccaccttgacgaccaccgagaattttttgtaaataaaagtttttatgaaagaataaaaaacaatatcattattttgaaagctattgatacaggaacaaatgacgggaaaatatgtcttgatgacattcgcaaatatggctgtgatgctcttatcagtataaaaacatcccgaaatcaaattcaaattatgtttccacgtgctataactatttcagaacaagaaaagataataaaattgttcaatgacgaattggaaaaaacgagaagcgaatattattctttgtttatgacaaattatcgcgataaagatagaaagcggatttcgtttaattttgcgtacaatttgataaattatgtatatttttcaaaaatgaaaggagtaaaaaatggcactgaaagataa

SEQ ID NO: 4042 - protein, 284 aa, Unknown
  Obtained from environmental sample
  misc_feature (1)..(284): Xaa is any amino acid
MKGISILANSKHTELYQLSLEKIMDSSDGIVIVPINFLSAENSRYIRETFLEKFEIVKANYFTQQVFPDTTYNVISFYYKQKKQKNSTMKIDWTIFPENKRTEITIHRGHNWQIGGEFLSKINESGNRLKISRLEEKDLQNGNIKIKAAYNHLDDHREFFVNKSFYERIKNNIIILKAIDTGTNDGKICLDDIRKYGCDALISIKTSRNQIQIMFPRAITISEQEKIIKLFNDELEKTRSEYYSLFMTNYRDKDRKRISFNFAYNLINYVYFSKMKGVKNGTER

SEQ ID NO: 4043 - DNA, 444 bp, Unknown
  Obtained from environmental sample
  misc_feature (1)..(444): n is a, c, g, or t
gtgcccgctgaccctcgaccacgccgccgcggccgtcatgctgcagtctgtcagcgccgattgggttcaggtgcagggcaccgcgctggccgaggtcataaagcaggccgtacgcgccatggggggcgcgaccaagaggaacaaagtgctcgtcatactatccgacggcgaagaccacgagggcggcgtgaccgacgccgcaaagacggcggcgcaggagggcgtgataatatacaccataggcataggctccgaagcgggcgtacccatacccgtgagcaagggcggcggcagcgtggtatacaaaaaagacaaaaacggaaacttggttatgacgcgcctaaactccgtaacgctggaaaaaatcgccatagagtccggcggcaaatacttccactccggaacagacctcgacttgacgagaatctacaacgaaatatctaa

SEQ ID NO: 4044 - protein, 147 aa, Unknown
  Obtained from environmental sample
  misc_feature (1)..(147): Xaa is any amino acid
MPADPRPRRRGRHAAVCQRRLGSGAGHRAGRGHKAGRTRHGGRDQEEQSARHTIRRRRPRGRRDRRRKDGGAGGRDNIHHRHRLRSGRTHTREQGRRQRGIQKRQKRKLGYDAPKLRNAGKNRHRVRRQILPLRNRPRLDENLQRNI

SEQ ID NO: 4045 - DNA, 522 bp, Unknown
  Obtained from environmental sample
  misc_feature (1)..(522): n is a, c, g, or t
atgatcggcgagtttcgtaaagcccgatattccgatatttttaaaaaagagcttatccctcttgcggatattgttacgccgaaccagtttgagcttgaagctataacgggaataaatacgcaaaatttagacgacgcgataaaagcggtaaaaattctgcatgaaatgggaccctctataattcttgtaacaagctacaaagaaaaagaaggcgaactttcgatgattgcctccgataaaaaagaaatatataagattacaacgccggaattgccgcttggcaagggcgttgcgggaacaggagacatgactacggcggtatttttatcgagatatttggaaacaaaagaccttaaaaagactctggaactttgtaccgcctccgttttcggaattttagacgcaagttttaaggcggcggacgcaaaaagcggcgcgttaatagaactgaaaatcatagacacccagcaggagcttgtctctccttccaattcatttaaggctgaaaaattaaccgcgtga

SEQ ID NO: 4046 - protein, 173 aa, Unknown
  Obtained from environmental sample
  misc_feature (1)..(173): Xaa is any amino acid
MIGEFRKARYSDIFKKELIPLADIVTPNQFELEAITGINTQNLDDAIKAVKILHEMGPSIILVTSYKEKEGELSMIASDKKEIYKITTPELPLGKGVAGTGDMTTAVFLSRYLETKDLKKTLELCTASVFGILDASFKAADAKSGALIELKIIDTQQELVSPSNSFKAEKLTA

SEQ ID NO: 4047 - DNA, 603 bp, Unknown
  Obtained from environmental sample
  misc_feature (1)..(603): n is a, c, g, or t
atggcgaaggtaaagctcaccaagaatgagcttaaaaaacaaaaagattccctgaagatgtttcagcgctatctgcccacgctgatgcttaaaaagcagcagttacagggagagatacgggttaccgaaatgcggataaaaaagctgctcagcgaaaaggagcagttggatgaaacctttaaaacatgggtcgctgtttttggcgaacgggaaatttttaccgcggatatcctgaagatcagccgcctgaacacggcgcaggggaatattgccggcgtggcgatacctatttttcagaatgccgaatttaccattgcctcctacgatctggcccgcaagcccctgtggcttgatattgccgttgaaaaaatgaaacaggtaattctccttgaccttgaggcgcagatactcgaagagcagcgcaagcggctcgatcgtgaattgcgcataacaacccagcgggttaatctgtttgaaaaaattaaaatccccgagaccaaggggcacatcaaaaaaatccaggtttatctgggcgatcagcaaacctccgcggtagtgcggggaaaaatcgccaagagcggactggttaaggcggcgcaataa

SEQ ID NO: 4048 - protein, 200 aa, Unknown
  Obtained from environmental sample
  DOMAIN (2)...(196): ATP synthase subunit D
  misc_feature (1)..(200): Xaa is any amino acid
MAKVKLTKNELKKQKDSLKMFQRYLPTLMLKKQQLQGEIRVTEMRIKKLLSEKEQLDETFKTWVAVFGEREIFTADILKISRLNTAQGNIAGVAIPIFQNAEFTIASYDLARKPLWLDIAVEKMKQVILLDLEAQILEEQRKRLDRELRITTQRVNLFEKIKIPETKGHIKKIQVYLGDQQTSAVVRGKIAKSGLVKAAQ

SEQ ID NO: 4049 - DNA, 306 bp, Unknown
  Obtained from environmental sample
  misc_feature (1)..(306): n is a, c, g, or t
atggtactcggcattgccaatgtgttttccgatataatgtcctatatacggctctgggccgttggtcttgcggggggagctatctcctcaacagttgaccagatggcgggtcccatgctggggcatttgttcttcttcatttttgggattattctgctggtattcgggcacggtttgaatctggtgctcaatatgctgtccgtattggtacacggcgtccgtttgaataccctggaattttcaggccatgtggggctgacctgggcgggtactccgtatcggccctttgcggaaaagaaagagtag

SEQ ID NO: 4050 - protein, 101 aa, Unknown
  Obtained from environmental sample
  misc_feature (1)..(101): Xaa is any amino acid
MVLGIANVFSDIMSYIRLWAVGLAGGAISSTVDQMAGPMLGHLFFFIFGIILLVFGHGLNLVLNMLSVLVHGVRLNTLEFSGHVGLTWAGTPYRPFAEKKE

SEQ ID NO: 4051 - DNA, 576 bp, Unknown
  Obtained from environmental sample
  misc_feature (1)..(576): n is a, c, g, or t
atgataggtcaaaggaaatctgttacgcagcgaacctttattacaggttttgtcctggtagctttgtttgcggcgttgatttcggctggagctctcattactgttcccataggaccagttcccattgtgcttcaaaacttctttacactcctttccggccttgtacttgggccatttatgggggtagcggctgtagcgctttttatagcagcgggcatcatcggcgtgcctgtgttttcaaataatggctctcctatgggcattgcgcggctaatggggcctacaggcggcttttatttgggttaccttctgggtgcgattgtagccgggcttgtcatcggctttccaaaacaaggtgaaagaataagggtatggcgtctggcgcttgccgtttttcttggcagttttgttgtctacatacccggtcttatccgtttgaaattctttttggaaacctggcctaaaacttttgccgccggatttttcccgtttttgataggtgacgccattaagggagttgcggcggcgctgatcgcgccgcgtctgcgaaggactgctgcgaggcagttgcaatag

SEQ ID NO: 4052 - protein, 191 aa, Unknown
  Obtained from environmental sample
  SIGNAL (1)...(30)
  DOMAIN (33)...(186): BioY family
  misc_feature (1)..(191): Xaa is any amino acid
MIGQRKSVTQRTFITGFVLVALFAALISAGALITVPIGPVPIVLQNFFTLLSGLVLGPFMGVAAVALFIAAGIIGVPVFSNNGSPMGIARLMGPTGGFYLGYLLGAIVAGLVIGFPKQGERIRVWRLALAVFLGSFVVYIPGLIRLKFFLETWPKTFAAGFFPFLIGDAIKGVAAALIAPRLRRTAARQLQ

SEQ ID NO: 4053 - DNA, 330 bp, Unknown
  Obtained from environmental sample
  misc_feature (1)..(330): n is a, c, g, or t
atggtcagattcggccgaggcgcgccaagtagattccgtccatacaggcgcattgtttcaggccgcctgtacaatgagggcgtcgtggcgaagctgtttaccgtcatcgcgccaaggatgaaggaccggaacggcggttatacaaggatactcaagatcggccagcgtcttggagacgccgcgcagatggttattttggaattggtcgactatactcttgatgttgaaggcggagccaagaagaaagaagccaaggcaaaagacaaagccgacaagaaagaaaaagataaaaaagaaaaagacaaaaaagaaaaagaagagaagaaataa

SEQ ID NO: 4054 - protein, 109 aa, Unknown
  Obtained from environmental sample
  DOMAIN (1)...(69): Ribosomal protein L17
  misc_feature (1)..(109): Xaa is any amino acid
MVRFGRGAPSRFRPYRRIVSGRLYNEGVVAKLFTVIAPRMKDRNGGYTRILKIGQRLGDAAQMVILELVDYTLDVEGGAKKKEAKAKDKADKKEKDKKEKDKKEKEEKK

SEQ ID NO: 4055 - DNA, 462 bp, Unknown
  Obtained from environmental sample
  misc_feature (1)..(462): n is a, c, g, or t
ttgaggcgcgccccgtgtttcatctgggatggggcgaggtcataccttagcttgtgggaagggaatgaggaatttcaacggggtttgcggattgtgcgggatggcgggcaatatatttcgccgaaggttcaacgcctgattgaccattatgatgaatggccggacaccaaaaacaaaatgaccagacggcagaaggtatgccttgtcatgctgtgcagcgggtgtatcattgaccaaatcggggaaacattgcatatatccaaaaaaacggtttataaccacctgaacagtttatactgcgcctttcatgcgcacaaccgtgcggagatggttgcgcttgcgtacgagatgggattgataactacaaaagatattcagttatacaacaggaaaaaagaactcttgccgcttcctgaatggacaggtgataaacggcaatacgacaagttttattttgattga

SEQ ID NO: 4056 - protein, 153 aa, Unknown
  Obtained from environmental sample
  DOMAIN (57)...(114): Bacterial regulatory proteins, luxR family
  misc_feature (1)..(153): Xaa is any amino acid
MRRAPCFIWDGARSYLSLWEGNEEFQRGLRIVRDGGQYISPKVQRLIDHYDEWPDTKNKMTRRQKVCLVMLCSGCIIDQIGETLHISKKTVYNHLNSLYCAFHAHNRAEMVALAYEMGLITTKDIQLYNRKKELLPLPEWTGDKRQYDKFYFD

SEQ ID NO: 4057 - DNA, 456 bp, Unknown
  Obtained from environmental sample
  misc_feature (1)..(456): n is a, c, g, or t
atgatactcgatttgcttccgtataaagctccgcaaaaacagcctgtcagaaagctgggcatactgcgtatcgttatttttgcgctttcattaacttatttttttattgtgtttgtccgttacagggctaatatcgaaaaaattatgtacgtcagttttttggcgggaaatattatttattacggtatcggaattttgtttgcgtttttgttcaaagataacagggctttctgtaaatatttttgcccgatcaccgtgttcttaaaacctgcgagctattttgccctttcgagaagaagagtaaatcaggaaaagtgtattgcgtgcaataaatgcgtaaaaatatgccccatgggcgttgatatgcttgataaaaaattcagccgtaaaaacggaaccgaatgtatccaatgtatgaaatgtgtaatggaatgccctaagcaggcattggtatag

SEQ ID NO: 4058 - protein, 151 aa, Unknown
  Obtained from environmental sample
  DOMAIN (128)...(151): 4Fe-4S binding domain
  misc_feature (1)..(151): Xaa is any amino acid
MILDLLPYKAPQKQPVRKLGILRIVIFALSLTYFFIVFVRYRANIEKIMYVSFLAGNIIYYGIGILFAFLFKDNRAFCKYFCPITVFLKPASYFALSRRRVNQEKCIACNKCVKICPMGVDMLDKKFSRKNGTECIQCMKCVMECPKQALV

SEQ ID NO: 4059 - DNA, 888 bp, Unknown
  Obtained from environmental sample
  misc_feature (1)..(888): n is a, c, g, or t
gtgcatggccttattcggcttagcgtgaatctcctgaccctgaccggcgttataatgggtttgggcatgaccgtggacggttccatagtgatgcttgaaaatattcatagttaccgcatgcgcggcgcaaaaccggaaattgtcgcgatactcggaagcagggaaatgctcagggcaattatcgcttcggcggcaaccaccctttgcgtatttattcccccaattatttacaagaacagtctggaaatgattgggcaatttgccagtgatttgatttttacaatagtaatttccgtgacctgttctcttgtcgtagcggttaccctcgtacccagcctgtgcggcagcatctttaaactggacacaagaaaacaaaagcccctgaagatacctccgctcagggctatggacaacgcgtttgagggagtgttcgtcgccatagaaaacggctacaaaagggcgcttggctactgcctttcgcacaggcttctgatagtaacgcttgccgttgtgcttctgctgttttccctgatgcagttcagtagtatcgggatgaacatgtttttccgaaccagaaccgatgacaacgtgaatatcaacgtttccatgccccttggcactactatagaagaaacagaaagagttctttttgaattggaagaaataattaaagatgagatcgatggatacaaaagcgtcattcttaccgcaaggcggagtggaggcacccagggttcaattcagattacgcttccagagccgaccaggcagatcgataccccggatactatcatcaacaagctaactccttataccaattccataccgggtgcaagggtgagttttcgggcgggtcgtttcgtaggctcaggtctcggccgattctga

SEQ ID NO: 4060 - protein, 295 aa, Unknown
  Obtained from environmental sample
  misc_feature (1)..(295): Xaa is any amino acid
MHGLIRLSVNLLTLTGVIMGLGMTVDGSIVMLENIHSYRMRGAKPEIVAILGSREMLRAIIASAATTLCVFIPPIIYKNSLEMIGQFASDLIFTIVISVTCSLVVAVTLVPSLCGSIFKLDTRKQKPLKIPPLRAMDNAFEGVFVAIENGYKRALGYCLSHRLLIVTLAVVLLLFSLMQFSSIGMNMFFRTRTDDNVNINVSMPLGTTIEETERVLFELEEIIKDEIDGYKSVILTARRSGGTQGSIQITLPEPTRQIDTPDTIINKLTPYTNSIPGARVSFRAGRFVGSGLGRF

SEQ ID NO: 4061 - DNA, 516 bp, Unknown
  Obtained from environmental sample
  misc_feature (1)..(516): n is a, c, g, or t
ttgaatgcatattggggtcggggttggtgttatgagcaaaaaagggaatgggatcagatgttagcggattatactgcggctctcagaataaatcctgatcagatagaactaatagttggtattggtggttattataaaatgataggggattatgaacgtgcaataactcaacttagtgaagcaataaaaattaaacctgattatgccagagcatattataatcgcggtgatacctataggatgctgagcgattatgataaagcaattaccgattgcgataccgcaatcaggcttgatccaaaacatgcttatacttatggggtacgcggagaggcatatcgcatgaagggaaactatacaaaggcattaagcgacttaaacgaatgtatcagattagaacctaactggtcctgggcatacgatgtacgtgccagggtttacaaagcgcagggcaaaaacagtttggctgacgccgataccgcaacgtataacagattaagagcggcaggctactga

SEQ ID NO: 4062 - protein, 171 aa, Unknown
  Obtained from environmental sample
  DOMAIN (103)...(136): Tetratricopeptide repeat
  misc_feature (1)..(171): Xaa is any amino acid
MNAYWGRGWCYEQKREWDQMLADYTAALRINPDQIELIVGIGGYYKMIGDYERAITQLSEAIKIKPDYARAYYNRGDTYRMLSDYDKAITDCDTAIRLDPKHAYTYGVRGEAYRMKGNYTKALSDLNECIRLEPNWSWAYDVRARVYKAQGKNSLADADTATYNRLRAAGY

SEQ ID NO: 4063 - DNA, 801 bp, Unknown
  Obtained from environmental sample
  misc_feature (1)..(801): n is a, c, g, or t
ttggaaattattgaccggccccagccgcgcattcgctacgacttgtttattatacaggtgcaggaaagcagcaacttaaactggagcgcccaggccgaagcaaggttcgtccggcccggcgacagaacaatggttacagggcaattgggaaatctgctcaatttgaactttgacattataaccgtatttggctatcaattcgcggcgaaactgaaccttgccatatccgacaaccaggcaaacgtatttgccgacacaacgctctttggcctttcggggcaggaaattaaatttcagaataccagcacttaccgttaccgggattccaacattgatcctgataccggcaagccgatttataccggcgttacaagggaaattgtttcgggcttggtactcgaaataaaaggctgggtttccggggacggaatgatcactaccaatgtaacagcatctgtgtccaagcgtggagttgaagtttcttccgctgccggaaatccgccgcccacctcagagagggttttaacaactcaggttcgtgcgagatccggcgaaacggttgtattgagcgggttacggcaaaacgattcaagtatcgtcgaacagcggctcccgctgctttcaaaaatccccttgttgggctggcttttcaaaagcaaaaataattcgaccgagaacacgcaaatgataatttaccttgtgccccatgttgatattgccaacgatgaatataccgtgagcggtttaaagacgcctcaatatacagcccgctttgtaaaccgtaccctggagggaaaatga

SEQ ID NO: 4064 - protein, 266 aa, Unknown
  Obtained from environmental sample
  DOMAIN (12)...(239): Bacterial type II and III secretion system protein
  misc_feature (1)..(266): Xaa is any amino acid
MEIIDRPQPRIRYDLFIIQVQESSNLNWSAQAEARFVRPGDRTMVTGQLGNLLNLNFDIITVFGYQFAAKLNLAISDNQANVFADTTLFGLSGQEIKFQNTSTYRYRDSNIDPDTGKPIYTGVTREIVSGLVLEIKGWVSGDGMITTNVTASVSKRGVEVSSAAGNPPPTSERVLTTQVRARSGETVVLSGLRQNDSSIVEQRLPLLSKIPLLGWLFKSKNNSTENTQMIIYLVPHVDIANDEYTVSGLKTPQYTARFVNRTLEGK

SEQ ID NO: 4065 - DNA, 576 bp, Unknown
  Obtained from environmental sample
  misc_feature (1)..(576): n is a, c, g, or t
gtgtcggctggctacagccacaccctcgccatcaagggggacggcagcctctgggcgtgggggggcaacggcaacggtaggctcggcctcggcgacacaaacaccagaaacacacccacacgcgtgggcaccgatgccaactgggcggcagtgtccgcgggcggcaaccacacgcttgccctcaagacggacggcagcctctgggcgtgggggggcaaccactacggccagctcggaatcggtgccagcgactcctatgcacacagcaccccagtccaggcgggcacagccaaagttccccctgctgctgccgtaactgatgttgggctgccaacaaagtacaccatcgcggtcggtgtcaggataccgctcacggccgctgtttggcctacgaacgccacctacaaaaacgtcacatgggagacaaactacggtaacgtcaccatcagctccatcaccgggtcaaatggtgactatcacccggcgcggtcgtcggcactaccgtgtttaaagttacaacggcttacgggtggccagacggccccatgcaccgttcacacgtctttggcggtttga

SEQ ID NO: 4066 - protein, 191 aa, Unknown
  Obtained from environmental sample
  DOMAIN (14)...(61): Regulator of chromosome condensation (RCC1)
  misc_feature (1)..(191): Xaa is any amino acid
MSAGYSHTLAIKGDGSLWAWGGNGNGRLGLGDTNTRNTPTRVGTDANWAAVSAGGNHTLALKTDGSLWAWGGNHYGQLGIGASDSYAHSTPVQAGTAKVPPAAAVTDVGLPTKYTIAVGVRIPLTAAVWPTNATYKNVTWETNYGNVTISSITGSNGDYHPARSSALPCLKLQRLTGGQTAPCTVHTSLAV

SEQ ID NO: 4067 - DNA, 858 bp, Unknown
  Obtained from environmental sample
  misc_feature (1)..(858): n is a, c, g, or t
atgaccaaggcagtatacagtccggaggagcttgttcttcttgaagagagtgtgatgatcaacgctcccacggattttgcgacgcaaaatgaagctgtctccaataacgaggaagaatccgaagcggatcatcagccggttgaggtgtacacaggcccgaccgtcgaggaactacgccgtgaggccgaagcgttcaaagccgattgggaaattgaaaagaataagatgatcgaggccgcccaggctgaagccactgagattatacaactggcggatatggcggtcgcgaaggaaaagcaaaagaaaacgcaggaagcggaggccgctcttacccaggcaaaggaagaagcggaaaggctggtaagcgaggcgaagcagacggccgaaaaacttgaagcggacatgcgcgcggcccttgatgacgagaagaacgccgcccttaaccaggccagggaagaaggcaggaacgacggctatgccgaaggcaaggccgaggtagaccgccttatagagcggacccatgttgtccttgaacgggcgcaggacaagcgcggtgaaatccttgtccagaccgaagaggaagtgatcaggctggtactgctcatggtcaggaaagttgtcaaggtaatttcggaaaaccagcgcgaggtggtcatttccaacgtggttgaggcgctgaagaaagttaaagaccggggcaatataattatccgcgttaatctagcggatgtaaaactgactaccgaacatacaaaagattttatcaaaatgctggaaggggtaaagtcggtccaggtggcggaagatcttccgtggnatcanngcgctgcgtcattgaaacggattttggcgaaatag

SEQ ID NO: 4068 - protein, 285 aa, Unknown
  Obtained from environmental sample
  misc_feature (1)..(285): Xaa is any amino acid
MTKAVYSPEELVLLEESVMINAPTDFATQNEAVSNNEEESEADHQPVEVYTGPTVEELRREAEAFKADWEIEKNKMIEAAQAEATEIIQLADMAVAKEKQKKTQEAEAALTQAKEEAERLVSEAKQTAEKLEADMRAALDDEKNAALNQAREEGRNDGYAEGKAEVDRLIERTHVVLERAQDKRGEILVQTEEEVIRLVLLMVRKVVKVISENQREVVISNVVEALKKVKDRGNIIIRVNLADVKLTTEHTKDFIKMLEGVKSVQVAEDLPWXXXAASLKRILAK

SEQ ID NO: 4069 - DNA, 747 bp, Unknown
  Obtained from environmental sample
  misc_feature (1)..(747): n is a, c, g, or t
atggcttgttcctgcgtggacggcagccgcgaggcggcgctcgccgagttcaaaaagctgcttgctgaggccggcgcggacggcggggcgcagaaggcgctggtcaacgacttagtccccgccggcggtctggcggtgctcgtggtgcccatagactccggcgcgcccaagggccgcctgatcctaccccaagcgcaggcgttgcgcgacctgctcgatggcggcgcggtggcgacggtcgtcagggataccgagttaaaggcgtcgctggcgatgttcagcagaaagccggatctcgtggtctgcgactcgcaggcggtgaagagggtggtcgaggacacgccgcccgacgtgcgttgcactaccttctccatcctcttcgcccgtcagaagggcgacttggcggaggcgctgaggggggccaaggccatagcgaaccttacaaccgaagatagggtgttgatagccgaagcctgcacacaccacgccgccgacagcgacataggccgcataaagataccgaatatgctgcgtaagcacgtgggcggggatatacagatagacgtcttcagcgggcgggattatccgcaagatttagagcgttacgcgttgataattcactgcggcgcctgtatgataacggcgagggagatgtcggcgcggataaggctggcggtgggcaagagcgtgccgattacgaattacggggaggcgatatcgtattttcaggggtgctggatagagtga

SEQ ID NO: 4070 - protein, 248 aa, Unknown
  Obtained from environmental sample
  misc_feature (1)..(248): Xaa is any amino acid
MACSCVDGSREAALAEFKKLLAEAGADGGAQKALVNDLVPAGGLAVLVVPIDSGAPKGRLILPQAQALRDLLDGGAVATVVRDTELKASLAMFSRKPDLVVCDSQAVKRVVEDTPPDVRCTTFSILFARQKGDLAEALRGAKAIANLTTEDRVLIAEACTHHAADSDIGRIKIPNMLRKHVGGDIQIDVFSGRDYPQDLERYALIIHCGACMITAREMSARIRLAVGKSVPITNYGEAISYFQGCWIE

SEQ ID NO: 4071 - DNA, 441 bp, Unknown
  Obtained from environmental sample
  misc_feature (1)..(441): n is a, c, g, or t
atggactgcggttcaaaagagctaaagtattcaaacggcgaaagcgtgagggcggactgggccaggatttccggcacggtatttaacggcgcttccaacattgcccaggccggaggcatggcggcgctggacgatgaaggcctaaaggaaataaaggccctttgcgacttttaccttggaaacgcaaggcttatcagggacgcactcctaaagctgggaatcacctgcgttggtggaaacaactccccttacatctggggccatttccccggaaaggacagttgggaagttttttcggaactcctggaaaagtgccaggtggttaccacccccggttcaggctttggcccggctggtcagtcatttatacggttttcggcctttgggcatcgcggcgatatggaagaagcgtgcgcaagactggaacggctggaaatgtag

SEQ ID NO: 4072 - protein, 146 aa, Unknown
  Obtained from environmental sample
  misc_feature (1)..(146): Xaa is any amino acid
MDCGSKELKYSNGESVRADWARISGTVFNGASNIAQAGGMAALDDEGLKEIKALCDFYLGNARLIRDALLKLGITCVGGNNSPYIWGHFPGKDSWEVFSELLEKCQVVTTPGSGFGPAGQSFIRFSAFGHRGDMEEACARLERLEM

SEQ ID NO: 4073 - DNA, 609 bp, Unknown
  Obtained from environmental sample
  misc_feature (1)..(609): n is a, c, g, or t
atgacgcgctcgcaaaaaacattaggcgatttaagcactcttctgggcattaaagaaacagccgacggaaccctgcgcgaagttgacgacgtgcgcaaactttccgcgtatctttctcaggccgtggagcctataaaagagatgggcgttcttcttgattcgcaaagcgctcttcttaccgaaattcccagcatttggcctgttaagggcggcataggaagcatctcgatgttcttcggccagaatattaaccctataagcggacagtactatattcacaagggaattgatatttccacccaccgcgccggcgatcaggttttggcgacagcggacggccaggtagtggctaccgaatacaccaacgacttcggcaattttgttattatcaggcacaagcacggttattacacccgttacgcgcacttgcagagcagcagggtaaaactcggacagagcgttcagcagggcgaggttataggttatataggaaataccggcatatcaacgggaccccacctgcattacgaagttcatataggttcagatgttgtagatccctatcgctatattacccttcgttccagagttgccaaacaaggacattaa

SEQ ID NO: 4074 - protein, 202 aa, Unknown
  Obtained from environmental sample
  DOMAIN (91)...(187): Peptidase family M23
  misc_feature (1)..(202): Xaa is any amino acid
MTRSQKTLGDLSTLLGIKETADGTLREVDDVRKLSAYLSQAVEPIKEMGVLLDSQSALLTEIPSIWPVKGGIGSISMFFGQNINPISGQYYIHKGIDISTHRAGDQVLATADGQVVATEYTNDFGNFVIIRHKHGYYTRYAHLQSSRVKLGQSVQQGEVIGYIGNTGISTGPHLHYEVHIGSDVVDPYRYITLRSRVAKQGH

SEQ ID NO: 4075 - DNA, 798 bp, Unknown
  Obtained from environmental sample
  misc_feature (1)..(798): n is a, c, g, or t
atgatgagcgacacgagggcgctccaggcaggaacgagccattttctggggcaaaatttcgcgcgcgcgttcggcattcgctttcagaacaaagcgggcgatttggaggactgttggacgaccagttggggcgtctcgacgcgcttgatcggggcgattatcatgacgcactcggacgacgacgggctgattctgccgcccagggtcgctccgacgaaggttgcggttttgcccataggaacggacgaacgttttcttgacgaggcgctgctacccagggcgaaggagttctccgcccaattgaacgaggccttgcgggggctccataccgtggtcgacacgcagtttcacatgagaccgggggaccgttttttccatcatttacaaagaggagtgcctctgcgcctggaattgggtgagaaggacatgaaggccggcacggcgcgggccgtgcgccgtgacaccggagaaaaaatcgacgtcgccttcgacgtcctcatgcccacggttctgaaaattctggacgatattcagacctcgctctactcaaaggccaaggctttccgggaggctcacacgtcgtttgtcggaagctatgaggagctgaaagcgatgcttgaggaaaagggcggatttgtcgaggcctatttcgcgggaacccccgaggacgagcgtcgcgtgaaagaggaaaccggcggggcgaccccgcgctgtattcccttggccgaccgctccacgggcaagtgcgttctcaccggtaaggaagggcgaaagacaatcttcgcgaaggcatattaa

SEQ ID NO: 4076 - protein, 265 aa, Unknown
  Obtained from environmental sample
  DOMAIN (73)...(173): Anticodon binding domain
  misc_feature (1)..(265): Xaa is any amino acid
MMSDTRALQAGTSHFLGQNFARAFGIRFQNKAGDLEDCWTTSWGVSTRLIGAIIMTHSDDDGLILPPRVAPTKVAVLPIGTDERFLDEALLPRAKEFSAQLNEALRGLHTVVDTQFHMRPGDRFFHHLQRGVPLRLELGEKDMKAGTARAVRRDTGEKIDVAFDVLMPTVLKILDDIQTSLYSKAKAFREAHTSFVGSYEELKAMLEEKGGFVEAYFAGTPEDERRVKEETGGATPRCIPLADRSTGKCVLTGKEGRKTIFAKAY

SEQ ID NO: 4077 - DNA, 459 bp, Unknown
  Obtained from environmental sample
  misc_feature (1)..(459): n is a, c, g, or t
atggcaagttggtcatggataatcaccataacatggatgaccatgctatttttggcatccttccgactttatggcttagtttgtatgtttacgcctattattattgctttggcgggttacggtaaaatgagttgtgcaaggatttgtccgcgtggttcatttctgggattggctgcccgtccgtttgctttttnttcgctgaaacgtccttctataatgaataaaaggggttttaagttctttttatgggctttgatgatgggctcatttattgggcttatgatatgggttattccaaaaggcgatataaatcaaattgggtttactattcttgtttttatggaaacagcaacagtaattggtttaatttgcggaattctatttacgccgcgcgcgtggtgtaccgtttgtccaatgggttttaccacagaaagaatacgcggctttcaatataattaa

SEQ ID NO: 4078 - protein, 152 aa, Unknown
  Obtained from environmental sample
  misc_feature (1)..(152): Xaa is any amino acid
MASWSWIITITWMTMLFLASFRLYGLVCMFTPIIIALAGYGKMSCARICPRGSFLGLAARPFAFXSLKRPSIMNKRGFKFFLWALMMGSFIGLMIWVIPKGDINQIGFTILVFMETATVIGLICGILFTPRAWCTVCPMGFTTERIRGFQYN

SEQ ID NO: 4079 - DNA, 525 bp, Unknown
  Obtained from environmental sample
  misc_feature (1)..(525): n is a, c, g, or t
gtggagcgaggcgctctttaccgtcgtgccagccaggagcacggggcgcagcttcgccacgggcgtaacgaccccggtgcgccccaccgaccaatcgatcccctccagcagagtggcggctctctccggcgcgtacttgtaggccaccacccagcgcggcgacttcgacgtcgatccgagccggttctgttgctcgaaggagtccacctttataacaacgccgtctaccgggaagggcagttcgtgtcgtttgctctcccactcgccgcagaacgacatgatctcgtccacgccggacagcaggtcggagcggtcgactacgggaaacccgagttttgcgagaaacgccgcgttgtcgcgcaaacttttggccctgtcgggatcggacgagatcaggaagtaggcggcgaagctgagtttgcgccgggccgtctccgccggatcgagaagtttaagcgttccggagaccgtgttgcgcgggttctgcatgggccgcaggcccgcctccaccaggctgtcgtttag

SEQ ID NO: 4080 - protein, 174 aa, Unknown
  Obtained from environmental sample
  misc_feature (1)..(174): Xaa is any amino acid
MERGALYRRASQEHGAQLRHGRNDPGAPHRPIDPLQQSGGSLRRVLVGHHPARRLRRRSEPVLLLEGVHLYNNAVYREGQFVSFALPLAAERHDLVHAGQQVGAVDYGKPEFCEKRRVVAQTFGPVGIGRDQEVGGEAEFAPGRLRRIEKFKRSGDRVARVLHGPQARLHQAVV

SEQ ID NO: 4081 - DNA, 558 bp, Unknown
  Obtained from environmental sample
  misc_feature (1)..(558): n is a, c, g, or t
atgcaggttccttttcaatattcgctccatattcaggaaaaaccgggcgcggcgcctgaacacagggaatttctcgcgaaggaaggcacagacccgcgtgaagagcttgcggtacgcctttgtgctgatattccccaaaacgtctgtgtgcttgcgtataacatgggttttgaaaaaggatgcattaaagaaatagcgcgttggcttgaaaaacgggaaaaaaatgacatagccgcgcatttaatgaatatacactataacttcaaagaccttatgaaacctttccagcgacgcgattactacagttttgaattagacggttccttctcaattaaaaaagtattgccagccctatgccctgacgaccctgatcttgattacaaaaaacttgattctgtgcataacggcgtcgaagcccagaacgcctattccgatctggcggggaaaagtcctgatgaacgggagcgtatacggacggcattactcgcctattgcagacttgacaccctcgctatggtaaaaattcttgaaaaactgatgaatatccataataaataa

SEQ ID NO: 4082 - protein, 185 aa, Unknown
  Obtained from environmental sample
  misc_feature (1)..(185): Xaa is any amino acid
MQVPFQYSLHIQEKPGAAPEHREFLAKEGTDPREELAVRLCADIPQNVCVLAYNMGFEKGCIKEIARWLEKREKNDIAAHLMNIHYNFKDLMKPFQRRDYYSFELDGSFSIKKVLPALCPDDPDLDYKKLDSVHNGVEAQNAYSDLAGKSPDERERIRTALLAYCRLDTLAMVKILEKLMNIHNK

SEQ ID NO: 4083 - DNA, 825 bp, Unknown
  Obtained from environmental sample
  misc_feature (1)..(825): n is a, c, g, or t
atgaaggaatacattaccggggtaatgacccatttcaaggggaaggtttattcatgggatgtactgaatgaagctttccctgacaacgcaagatcctcgtcaaactggaaagacgcgattcgtaaaggcgccggcggggaagggcaggacgcgaatccctggtatatagcaatcggcccggattttgtatacgaggccttcctggccgcgcgtttggccgatcccgccgctatactgtactacaacgactacaacaccgataactttaacagagccatgttaatttatgacatggtgaaggaagtgaatgacaagtatttggctttagcttccggcagtaaacccgcaggcgatcccgccggcagactgcttattgaaggcattgggatgcaggaacaccacaataccaacgtgacggccgcgtcaatcaggaataccatagctctgttcagacagctgggagttaaactttctgtcagcgagcttgacatactatgccagggatatggcgaatacacttccaatcccgtctccaacaataatcccgaaacacccaacaatacagtaaccaacaatgggtttgtgaaagcggcccaattatacggcgaatacatgaagctgtacattgaaaacaaggacattattgagcgcgtgtccctgtggggcgttattgacagccaaagctggcgaggcagaggcctgccgctgctctttaataaagaaggcaaagccaagccagcgtactataaaatgattgcggctttggaatatggactgggggctgggggctgggtagaaattagggaagtgagaagtgagaagtga

SEQ ID NO: 4084 - protein, 274 aa, Unknown
  Obtained from environmental sample
  DOMAIN (1)...(255): Glycosyl hydrolase family 10
  misc_feature (1)..(274): Xaa is any amino acid
MKEYITGVMTHFKGKVYSWDVLNEAFPDNARSSSNWKDAIRKGAGGEGQDANPWYIAIGPDFVYEAFLAARLADPAAILYYNDYNTDNFNRAMLIYDMVKEVNDKYLALASGSKPAGDPAGRLLIEGIGMQEHHNTNVTAASIRNTIALFRQLGVKLSVSELDILCQGYGEYTSNPVSNNNPETPNNTVTNNGFVKAAQLYGEYMKLYIENKDIIERVSLWGVIDSQSWRGRGLPLLFNKEGKAKPAYYKMIAALEYGLGAGGWVEIREVRSEK

SEQ ID NO: 4085 - DNA, 954 bp, Unknown
  Obtained from environmental sample
  misc_feature (1)..(954): n is a, c, g, or t
gtggacacatgtcttaacggtttgcaatccatagaaatggtaaaacgttcagttttagaaaagcgcgattacgacattgtattcatggatcacatgatgccggaaatggacggaatagaaacaaccgccgctatccgagcatgggaaaaagaacaaaacgcgagtttcaccgaaggtgaaactcgaagcaataatagaaatttgcgtaagcaaattcctattattgcattgaccgctaacgcggttgtgggaatgcgggaaatgtttatcgaaaacggcttcaatgattttatctccaaaccaatagatgtttccaaattggatgaaatgcttgaacgctggatacctaaggataagaaagaaaaaaattccgttcgatctattagacaaactcaagtagcggatgggaatgcgcctgagactgcggaaggaaacaaattatattccattcccggcgttgatacggcaaagggcatcgccatgaccggcggaactttggatgcatataagagcgtattaaaaatattctgccaggacgtggaagacagactgccgatgcttcatactattccgttagcggagactctgcctgaattcgcaacccaatttcatgcgctaaaaagcgcgtccggaagtctgggagcgtcggaaatttccgcacaagccgcaaagcttgaagccgcaagcaaagacgcggatatgttatttatctacgaacatttgcttgtatttgtacatgatattatagagttggcgcacaatattaaagaagctcttgaacacagcgagcctgaaaataactcagactcctcatcgctcattgctcattccccattatttgaagaacttgccgaggctttaaagaaaaagaattcctcggatatagaccgcattatcgccgcgttaggcgaagagccgcggatcaaaaacaaaacggctctcggccgattctga

SEQ ID NO: 4086 - protein, 317 aa, Unknown
  Obtained from environmental sample
  DOMAIN (1)...(112): Response regulator receiver domain
  misc_feature (1)..(317): Xaa is any amino acid
MDTCLNGLQSIEMVKRSVLEKRDYDIVFMDHMMPEMDGIETTAAIRAWEKEQNASFTEGETRSNNRNLRKQIPIIALTANAVVGMREMFIENGFNDFISKPIDVSKLDEMLERWIPKDKKEKNSVRSIRQTQVADGNAPETAEGNKLYSIPGVDTAKGIAMTGGTLDAYKSVLKIFCQDVEDRLPMLHTIPLAETLPEFATQFHALKSASGSLGASEISAQAAKLEAASKDADMLFIYEHLLVFVHDIIELAHNIKEALEHSEPENNSDSSSLIAHSPLFEELAEALKKKNSSDIDRIIAALGEEPRIKNKTALGRF

SEQ ID NO: 4087 - DNA, 834 bp, Unknown
  Obtained from environmental sample
  misc_feature (1)..(834): n is a, c, g, or t
atggcggagaacgacacaaagggcatactgctcgccgactccgcaaaagcgaacgcctatacccaaagcgacttagactacctgacaaataccgccaaaattctgggacaggccatctactacgcctacatgaacaccatgaacagcttggaccaccaacggctgacggccatgaacagcatagaaaaagacttctggaaagatctggatttcgacaccgtcatgaacaagctgtgcgagaccatctccgacgcggtaccctgcgacaggctaaccataagcctgaaggacgaggacaatatgtacgcgaaggtggtaaggacatacggcgacagcgccggatatttcaaagacttggagttcgcgatcggcgacggcagccccaaaacgcttgtaagcctcgcctactccacggatatcggcttcttcaggaattttaacgaggagcgctacgagttccgctacacggagaacgaaccgcaaaaccacgggttcggatcgttcatggtcttgccgataggcatagacaaacgcataggtatgatactgatagaatcaaaggtgaaaaacgcgttcgcccgtttcaacttagacctgctgtcccgcctgagccaaagcgccggaatagcgctcgaaaagatatttatcatacgtaaaactaacgacttggcctcccacgacgtcctgaccggattgtttaaccgccaacacttccaaaagatactgacgaccaaaatcgccgcgagcaaacgctacgaacacccgatttcatttgtcatgtgcgacatagacttcttaaaaagtcaacgacaactacggcctcggcccatctga

SEQ ID NO: 4088 - protein, 277 aa, Unknown
  Obtained from environmental sample
  DOMAIN (70)...(211): GAF domain
  misc_feature (1)..(277): Xaa is any amino acid
MAENDTKGILLADSAKANAYTQSDLDYLTNTAKILGQAIYYAYMNTMNSLDHQRLTAMNSIEKDFWKDLDFDTVMNKLCETISDAVPCDRLTISLKDEDNMYAKVVRTYGDSAGYFKDLEFAIGDGSPKTLVSLAYSTDIGFFRNFNEERYEFRYTENEPQNHGFGSFMVLPIGIDKRIGMILIESKVKNAFARFNLDLLSRLSQSAGIALEKIFIIRKTNDLASHDVLTGLFNRQHFQKILTTKIAASKRYEHPISFVMCDIDFLKSQRQLRPRPI

SEQ ID NO: 4089 - DNA, 390 bp, Unknown
  Obtained from environmental sample
  misc_feature (1)..(390): n is a, c, g, or t
atgaagatgctgggaaatgtcagcggtaaaaacgttttaatggccgacgatatgctgggcacaggcggtacccttttaaaagcgatggccttccttaaagaccagggcgccggaaaggtaatctgcgccataagccttcctctcttttccggggaagcgataaacttttttgacgaagcctataagaacgggcttttctatcgaatcatcggaacaaacgctgtgtatcatgaagaagtcctcaagcgggaatggtacatcagcgttaacataacaagacttttcgccaaaacaatctcccggttgcatagggggctttcattaagctcgattttggacaaccgggacataatcgtaaagcacttccatgaaaaccccgaaaagacctag

SEQ ID NO: 4090 - protein, 129 aa, Unknown
  Obtained from environmental sample
  misc_feature (1)..(129): Xaa is any amino acid
MKMLGNVSGKNVLMADDMLGTGGTLLKAMAFLKDQGAGKVICAISLPLFSGEAINFFDEAYKNGLFYRIIGTNAVYHEEVLKREWYISVNITRLFAKTISRLHRGLSLSSILDNRDIIVKHFHENPEKT

SEQ ID NO: 4091 - DNA, 681 bp, Unknown
  Obtained from environmental sample
  misc_feature (1)..(681): n is a, c, g, or t
atggcggacaacggcactatttttcttgacgagataggggacatgccgctcgcgctgcaggcgaaactcctgcgcgtgatacaggaaagggcttttgagaaggtcggttcggataatacaattacagttaacacgaggatactcgccgccacaaacaggaatataaaaacgatgacggataaaggcgaattccgcaatgacctgtattaccgcctgaacgtggttcctctgcacgtgccgccgctccgccagcgcgccgaagacatacccgaactcgcccgttttttcatgttaaaatacatgaagcagaataaaaaagaattcaccgggttttcacaggacgcgctggaggccatacttacctattcatggcccggcaatatacgtgaattggaaaattgcattgagagggcctgcgtaatcgcctccgggaaatggattaagaaggaagatctcctgctcaacgcagcgggggcggggcagggcggcgccgccggaggcgccctgggcggggacagaaacctaaaaacagctacgaacgtattcagggcaaattttatacggaaagtgcttgatgaaaaccaatggaaccagacggaaacggcaaaggcgctggatattcaaagaacctatttatcaaggcttatgaaagatcttaatataaaaagggataaggagtga

SEQ ID NO: 4092 - protein, 226 aa, Unknown
  Obtained from environmental sample
  DOMAIN (183)...(219): Bacterial regulatory protein, Fis family
  misc_feature (1)..(226): Xaa is any amino acid
MADNGTIFLDEIGDMPLALQAKLLRVIQERAFEKVGSDNTITVNTRILAATNRNIKTMTDKGEFRNDLYYRLNVVPLHVPPLRQRAEDIPELARFFMLKYMKQNKKEFTGFSQDALEAILTYSWPGNIRELENCIERACVIASGKWIKKEDLLLNAAGAGQGGAAGGALGGDRNLKTATNVFRANFIRKVLDENQWNQTETAKALDIQRTYLSRLMKDLNIKRDKE

SEQ ID NO: 4093 - DNA, 708 bp, Unknown
  Obtained from environmental sample
  misc_feature (1)..(708): n is a, c, g, or t
atgattgaattaacagccgctagggatgatgccggacgcaggcttgaccgtatattacgaaaagcgctaccggatttatccttatcgctgatacaccggctattaagacaaaaaaagatacttgttgatgataaacctgtaatattacccaaccatcgtattgaacaagggatgataattaagataaatgcttctgttaccaatataaataatcaggttaacggaaataacgttaaccataaaaaaacgatggttaacaaaaataatctacatttgcaaacccaaaaccctgaaccccgaaccctgaaccctgaaccccttattttatggcaaggttccggcataattatcttcaacaaaccgcaggggctttcaactcacgggccggacagcctcgacagcattgtcaatgcttggggcgcgggtggtgaaaagcccctaccccgctctctttcatttaaacccagccccctgcaccgcctggacaagccgacatcaggcgccattgttttttcgcaaacgcttgaaggcgcgaaacttttcagcgctttgttaagagaacggaaactggaaaaaacttacattgccattgtcgaaggacgtctggaaagtgaaaagggagaaatgaaaagtgaaaaaagcaaatacggtgaaattatatggcgcgattcgctggaacatgataaagacgtacataaacattcataa

SEQ ID NO: 4094 - protein, 235 aa, Unknown
  Obtained from environmental sample
  DOMAIN (13)...(60): S4 domain
  misc_feature (1)..(235): Xaa is any amino acid
MIELTAARDDAGRRLDRILRKALPDLSLSLIHRLLRQKKILVDDKPVILPNHRIEQGMIIKINASVTNINNQVNGNNVNHKKTMVNKNNLHLQTQNPEPRTLNPEPLILWQGSGIIIFNKPQGLSTHGPDSLDSIVNAWGAGGEKPLPRSLSFKPSPLHRLDKPTSGAIVFSQTLEGAKLFSALLRERKLEKTYIAIVEGRLESEKGEMKSEKSKYGEIIWRDSLEHDKDVHKHS

SEQ ID NO: 4095 - DNA, 453 bp, Unknown
  Obtained from environmental sample
  misc_feature (1)..(453): n is a, c, g, or t
gtgccggagcgttttgtctcgtctatcaggccggggcttggcgccgtggtgaggcttgaagcgcttcccggcgaaacctttccggcggagatagacgaggtaaaccccgtgcttgatccggcgagcagaaccctgcggataaggctccgctttaccggcaggggcgcggcggattccagaattaaagcggggatgttcgcgacaatcagcctggtcaccaggaccagggccaacgtgccgatcatacccagaacctcggtaatcaatacctacggttcatggatagcctttattatagatgaaaataataccgcccgccggcgcatgctggaactgggcatagaaaacgaaagattttttgaagtaataagcggcatcagcctcggagaacgggttgtaaccgcggggcagaattttcttacggacggcgaccctgtccgcatagtggaataa

SEQ ID NO: 4096 - protein, 150 aa, Unknown
  Obtained from environmental sample
  misc_feature (1)..(150): Xaa is any amino acid
MPERFVSSIRPGLGAVVRLEALPGETFPAEIDEVNPVLDPASRTLRIRLRFTGRGAADSRIKAGMFATISLVTRTRANVPIIPRTSVINTYGSWIAFIIDENNTARRRMLELGIENERFFEVISGISLGERVVTAGQNFLTDGDPVRIVE

SEQ ID NO: 4097 - DNA, 702 bp, Unknown
  Obtained from environmental sample
  misc_feature (1)..(702): n is a, c, g, or t
ttgaggtggatccgcacttgccctccgtggaagttccggtcgggtttacgggccggcggacgtacctttcgcacttgggtggaaagggctcttgccacgcggtacgtggaggttacgcccgaacttgacgagaggcttgagtacgagttgggcgttatcaactgcatgaacttcgccggatattttctcattgtccaagacttcgtgccccaggcccgggagacgggcgtgatggtcggatgccgcgggtccgcggcggggagtttggtcctctacgccatccgcataacggatgtagacccgattaagttcgacctcttctttgagcgcttcctgaatcccgagcgcctatccgtgcccgactcccacctgtacgttgctgaccgtgatatgtatatgttgattgactacttggttgaaaagtaccggcgtgaggcggtttgccagattataaacttcggctccttgaattcaaagatggtcattcatgacgtggcgcgagtgaacgagctctccgtgggtgagataaactgcttgccgacgcttataacccaatacacgctggcggcctcattcgtgcttgttgactggcagggcaaaccgaggaacgactttccgccgatctccgcgataatcggcgagactgattttgactggtaccacacccgccgtacttctctcacgaccacggttatgatctga

SEQ ID NO: 4098 - protein, 233 aa, Unknown
  Obtained from environmental sample
  DOMAIN (1)...(228): Bacterial DNA polymerase III alpha subunit
  misc_feature (1)..(233): Xaa is any amino acid
MRWIRTCPPWKFRSGLRAGGRTFRTWVERALATRYVEVTPELDERLEYELGVINCMNFAGYFLIVQDFVPQARETGVMVGCRGSAAGSLVLYAIRITDVDPIKFDLFFERFLNPERLSVPDSHLYVADRDMYMLIDYLVEKYRREAVCQIINFGSLNSKMVIHDVARVNELSVGEINCLPTLITQYTLAASFVLVDWQGKPRNDFPPISAIIGETDFDWYHTRRTSLTTTVMI

SEQ ID NO: 4099 - DNA, 606 bp, Unknown
  Obtained from environmental sample
  misc_feature (1)..(606): n is a, c, g, or t
gtgcgccgccgaccttacagcgtcattctctttgacgaaatcgaaaaggcgcaccctgaggttttcaatgtctttcttcaaatactggacgacggacgactaaccgatggacaaggccgcgttgttgattttaagaacgtcatcatcataatgaccagcaaccttggttccgatctaatccttgaggcaaaaaaactggacgcgataagggatgcgctgatggagcttcttaaacagagcttccgtccggaatttcttaatcgaattgacgagaccgtgatcttcaaccggcttggcaaggaagagattggtaaaatcgtggacattcagctcgcgttcttatcctcccgcctggccgaacgcaaggtggagctaaagcttaccaaggcggcaaaggaactccttgccgagcggggctacgatccgcttttcggcgcaaggcccctgaaacgcgctattcaggccgacctggaaaatcctctggcaaaggcgatcatttcaggaaagataaaagaaggagataccgtaaccgccgacaagaattccgaaacgggaggcgaggcgctcgtattcaaaaaaagcgccgcttctaagcgggaaggctaa

SEQ ID NO: 4100 - protein, 201 aa, Unknown
  Obtained from environmental sample
  DOMAIN (1)...(92): ATPase family associated with various cellular activities (AAA)
  misc_feature (1)..(201): Xaa is any amino acid
MRRRPYSVILFDEIEKAHPEVFNVFLQILDDGRLTDGQGRVVDFKNVIIIMTSNLGSDLILEAKKLDAIRDALMELLKQSFRPEFLNRIDETVIFNRLGKEEIGKIVDIQLAFLSSRLAERKVELKLTKAAKELLAERGYDPLFGARPLKRAIQADLENPLAKAIISGKIKEGDTVTADKNSETGGEALVFKKSAASKREG

SEQ ID NO: 4101 - DNA, 477 bp, Unknown
  Obtained from environmental sample
  misc_feature (1)..(477): n is a, c, g, or t
ttggcaggctttggtagttcacggacaccgatcccccaaacgacaaacgccttgaggcaaggtagcccaccccgatcttcgcggagaaagccgtccacgcggcggatttcaactccagttcgtcggcgacctcgctgccgctgtaatagccgtcgtacagtttgccgatggacgggtcgccgcggtaaacaaacgaggcccccatgcccacacgcggcggaacgcggaagtcgtacgaggcccaagactcggcgcgtccaagcgacctgtagccgccgccgaaggacgcccggcgctcccgaagaaacggcaactgcgccggattgtaccacgagagcatgtagtcggggtcagccgacaccgccccgcccataccggacgcccacgccccggcgggcatacggaaaatcgcccccggaagaccggcgttccacgaggcgtttgagggttgacagaggagaaccgttatcgctatag

SEQ ID NO: 4102 - protein, 158 aa, Unknown
  Obtained from environmental sample
  misc_feature (1)..(158): Xaa is any amino acid
MAGFGSSRTPIPQTTNALRQGSPPRSSRRKPSTRRISTPVRRRPRCRCNSRRTVCRWTGRRGKQTRPPCPHAAERGSRTRPKTRRVQATCSRRRRTPGAPEETATAPDCTTRACSRGQPTPPRPYRTPTPRRAYGKSPPEDRRSTRRLRVDRGEPLSL

SEQ ID NO: 4103 - DNA, 408 bp, Unknown
  Obtained from environmental sample
  misc_feature (1)..(408): n is a, c, g, or t
ttgtgtatagctcaagttttaaagctggttttttatttgtttaccagtaaaagcagaaaaaaattggagatgatagagactataatttggcgtacgggcggaatgccctccagccattccgcggctgtatgcgctcttgccacatccgccggaatttacaggggtatagagtccgacttttttgttttttgtcttgtcttcgccatggtagttctgcgcgattctctgggagtcagaaggactgccggtctacaggcaaaagcgttaaacaaccttggaaaacaatcggcaaaatttacaggtttggaatttcgttcggtaaaggaaattcacggtcatactccgttggaagtattggtaggctcctgcctgggcattgcaatcacattttgtttttggctgttttag

SEQ ID NO: 4104 - protein, 135 aa, Unknown
  Obtained from environmental sample
  DOMAIN (1)...(135): Divergent PAP2 family
  misc_feature (1)..(135): Xaa is any amino acid
MCIAQVLKLVFYLFTSKSRKKLEMIETIIWRTGGMPSSHSAAVCALATSAGIYRGIESDFFVFCLVFAMVVLRDSLGVRRTAGLQAKALNNLGKQSAKFTGLEFRSVKEIHGHTPLEVLVGSCLGIAITFCFWLF

SEQ ID NO: 4105 - DNA, 861 bp, Unknown
  Obtained from environmental sample
  misc_feature (1)..(861): n is a, c, g, or t
atgatctccgactcgaaggcgcaggcggagaaaattattcaggacgctcaggacgcggcacagaatgaaattaacagtaaaaacaatgaagcccaaatattaaaacaacaggcggaagcagacgcgaaaaatatcattgaagacgcgaataaaaaatcccgcgatatggaaactgaagtaagaaaaacccttgacgacgaactaaaagcggcgcgggacaaaggcagggaagagggcaaacaatcgggctatgccgatggaaaagcggaagtggaaaggcttatttcccgtacgcagacaatgcttgaacgcgctcaggacaagagggggcagattcttgccgagacggaaaaagaaattgtcgatctcgtcttgatgatctcacgaaaagtaatcaaagttctttctgaaaatcaggaaggcgtaattatttccaatgtgatacaggcgttaagaaaggtaaagacaaaagggacgtgcattatcagggttaacatggatgatttacagcttgcgactgaacacaagcaagaatttataaaacttgtcgaaggcgtaaaagacattcaaatacatgaagacacaacagttgataagggcggatgcattatagaaactgatttcggcgagatagacgcgcgtatttccagccagcttgcggaattggaaacaaagatacttgagttgtcgcctattaaatcttcaaatccgccgattaaccgcacccctaatcttgaaaacgagttggccgcgtccacaagccttcttgataaaataaaaaagaatgatgaaatatcanataaagaanacgaagtaaaaaacaaatacgaagaaataaaacaaaaagaagaacaaaactaa

SEQ ID NO: 4106 - protein, 286 aa, Unknown
  Obtained from environmental sample
  DOMAIN (1)...(223): Flagellar assembly protein FliH
  misc_feature (1)..(286): Xaa is any amino acid
MISDSKAQAEKIIQDAQDAAQNEINSKNNEAQILKQQAEADAKNIIEDANKKSRDMETEVRKTLDDELKAARDKGREEGKQSGYADGKAEVERLISRTQTMLERAQDKRGQILAETEKEIVDLVLMISRKVIKVLSENQEGVIISNVIQALRKVKTKGTCIIRVNMDDLQLATEHKQEFIKLVEGVKDIQIHEDTTVDKGGCIIETDFGEIDARISSQLAELETKILELSPIKSSNPPINRTPNLENELAASTSLLDKIKKNDEISXKEXEVKNKYEEIKQKEEQN

SEQ ID NO: 4107 - DNA, 462 bp, Unknown
  Obtained from environmental sample
  misc_feature (1)..(462): n is a, c, g, or t
ttggagggagttactattaatacgctgcgggcaagcccttcggggcctaaatctttttcgataaagtcgttaacttcccgtccgcgctcgcctatcagggcgacgacgttgacatcggcgcttgtgttacgcgctatcatgccaagaagagtggacttgccgacgccggagcccgagaaaataccgaggcgctgtcccttgcctaccgccagaagcccgtctattgcgcgtatgcctgttgttatgcgttctgttatacgtcttctttttaagggatcgggagggcttgcgagggcgggatacatggcgacggcgtcaatatcgcctttgtcgtcaacgggatttccgaaagcgtctaacaccctgcctaaaagtttatttgataccggcacttcaaggcggcttcccagggcgattaccctgcatccgacttcaagcccgtctgtttcctcaacgccataa

SEQ ID NO: 4108 - protein, 153 aa, Unknown
  Obtained from environmental sample
  misc_feature (1)..(153): Xaa is any amino acid
MEGVTINTLRASPSGPKSFSIKSLTSRPRSPIRATTLTSALVLRAIMPRRVDLPTPEPEKIPRRCPLPTARSPSIARMPVVMRSVIRLLFKGSGGLARAGYMATASISPLSSTGFPKASNTLPKSLFDTGTSRRLPRAITLHPTSSPSVSSTP

SEQ ID NO: 4109 - DNA, 876 bp, Unknown
  Obtained from environmental sample
  misc_feature (1)..(876): n is a, c, g, or t
atgtcctggccggaagcggcaacgggaagcaccgaaattgcggaaatctgccaattcaacaccctgttcgacggctttattttcccctcttacggggaaaatcccggcgcggagttgcgaaagcgggtttacgacggcgctctcctgcgttacaaaacattggacgagataacgattaagcgcattgaatatgaattgaacataatagagaacgctggcttttcgccgtattttctccgcatggacgaaatcgtaaaaatggccagaaacatcaacggcgccgacagaacgtgcgggcggggttcgggggcggcttccatcgtttcatattcccttggaattaccaatgtcgatcctgtaaggcacaacctttattttgaacgctttcttaacccgtctcgctctgacccgccggacattgacgtagacttcgcctgggacgagcgggacgatttgattaaggcggtaatagaacggttcggcccggaatactgcgcaagggtggctaatcacaattttttccgcccccgctcggctttgcgcgaaacggcgaaggcttacggcttttcggacggagagatttccaggcatgaaaggcggctcttcgaattgcgcgaaagtgttgaagacgcagatcccctgtggaaagaggtatacaaaattgccgaacgtatagaagggcttccccgcggacttggaatgcactgcggaggccttgtaattacgccggagccgattagccgctttgcccctatcgaaaaatccgcagagggttttccccttctcgcgtgggagaaagaaaggactgaggccggcgggtttgtaaaaatcgatcttttgggaacaggtcgctggcgggtatccgcgacgcggtaa

SEQ ID NO: 4110 - protein, 291 aa, Unknown
  Obtained from environmental sample
  DOMAIN (1)...(291): Bacterial DNA polymerase III alpha subunit
  misc_feature (1)..(291): Xaa is any amino acid
MSWPEAATGSTEIAEICQFNTLFDGFIFPSYGENPGAELRKRVYDGALLRYKTLDEITIKRIEYELNIIENAGFSPYFLRMDEIVKMARNINGADRTCGRGSGAASIVSYSLGITNVDPVRHNLYFERFLNPSRSDPPDIDVDFAWDERDDLIKAVIERFGPEYCARVANHNFFRPRSALRETAKAYGFSDGEISRHERRLFELRESVEDADPLWKEVYKIAERIEGLPRGLGMHCGGLVITPEPISRFAPIEKSAEGFPLLAWEKERTEAGGFVKIDLLGTGRWRVSATR

SEQ ID NO: 4111 - DNA, 690 bp, Unknown
  Obtained from environmental sample
  misc_feature (1)..(690): n is a, c, g, or t
ttgtccgcttccggggcgaaaactgtcctgnaagagcgggagcgggcggggactttnncttcgctggatagcttttcaagaagggtaagccttaatcgtgatgatattgtcgccctttgccccgcaggggttttcgacagcatttcaggcggccttccacggcatttgcaggccaggatgctgttatcaatgaaaaatgagaaattagagattagcaatggagaattatttgcagcagatgacgcgcctgtttatggtgtaaagaagcctgttattgctccggctgcaaaaagtgtacctaaaacagaaaatgaccttttggaagaatacagggctttgggatttttacggaatagccacccgctggcgttatggagagaagaagtaatggctgtaacataccgcgttaaggcttcgcgtatcgccgagcatatcgggcaaagcgttaaaatgatcggctggcctgttacccaaaaagaagtctggactaaagacgggctgaccatgaatttcttaactttggaagatgagaccggcttgtacgaaacggttatttttccatatgtgtacgacaggtacggcaaactgctttttgaccaacagcctttattggtttatgggcgggtaacaaacgacgaaggggctttgtcggtggaaatagaccggctttttcaatatagttttaagtaa

SEQ ID NO: 4112 - protein, 229 aa, Unknown
  Obtained from environmental sample
  DOMAIN (149)...(226): OB-fold nucleic acid binding domain
  misc_feature (1)..(229): Xaa is any amino acid
MSASGAKTVLXERERAGTXXSLDSFSRRVSLNRDDIVALCPAGVFDSISGGLPRHLQARMLLSMKNEKLEISNGELFAADDAPVYGVKKPVIAPAAKSVPKTENDLLEEYRALGFLRNSHPLALWREEVMAVTYRVKASRIAEHIGQSVKMIGWPVTQKEVWTKDGLTMNFLTLEDETGLYETVIFPYVYDRYGKLLFDQQPLLVYGRVTNDEGALSVEIDRLFQYSFK

SEQ ID NO: 4113 - DNA, 483 bp, Unknown
  Obtained from environmental sample
  misc_feature (1)..(483): n is a, c, g, or t
gtgccgcgcatcgcttttgtcaacaaatgcgaccgtaccggggctaaccctttcaaggtacgcattcagttacgggaaaaacttggcctcaacgcggtgatgattcaaatccccatcgggctggaagacaaacttgaaggcgtggtagacctgatttccatgaaagcggtgtactttgacggcgatcagggtgaaaccttacgttacgcggaaattcccgcccatctcaaagctgacgcggaaaagtaccgcgaggaaatgcttgaagcggtttccatgttttcggatgagcttgccgaaaaatacctggggcggcggaaacaatcagtgaaagaactgattcacgcgggcaatcggcacaggggactctttgcagagcagtttgttacgggtaatgataggttccgccctataagttcaagggggattccaccactggcgggacggggtgaatttattacctgcccaatcctacgaaggtaa

SEQ ID NO: 4114 - protein, 160 aa, Unknown
  Obtained from environmental sample
  misc_feature (1)..(160): Xaa is any amino acid
MPRIAFVNKCDRTGANPFKVRIQLREKLGLNAVMIQIPIGLEDKLEGVVDLISMKAVYFDGDQGETLRYAEIPAHLKADAEKYREEMLEAVSMFSDELAEKYLGRRKQSVKELIHAGNRHRGLFAEQFVTGNDRFRPISSRGIPPLAGRGEFITCPILRR

SEQ ID NO: 4115 - DNA, 672 bp, Unknown
  Obtained from environmental sample
  misc_feature (1)..(672): n is a, c, g, or t
atgtttggacagaatacagccattggaattgatttgggaacttgcaataccctgatctatataaccggaaaagggatactgattaatgaaccatcagtagttgcggtagaaaagggaaccaataaggtaatggctgtcggggccgacgcaaaaaggatgctttttaagaccccgggatccatccatgccatcaggccgatgcggggcggggttatcgccgatctggaatcaacggaaaaaatgattcgctatttcatttcaaaagctttgccgcgctaccgggttttcaagccacggatggttataggaattccttccagcattacggaggtagaacgcagggcggttgaagaatgcgcttacaaggcaggggccagggaagttgtgattatccccgaaagccttgccgctgccataggcgctgaaattcccatccaggaacctgcagggcacatgatcatagacattggcggcggtacttcggaaatttccgtaatcagccttggggacatggtagtaaccaacgccatacgcacagcgggagacgattttgacgaagccataattaagtatgtcagaagcgaactcaacctgattatcggtggcggcggcgcggaaaggctaaaaattgaaattggcaacgcctttccggataaagagatgaaaagatga

SEQ ID NO: 4116 - protein, 223 aa, Unknown
  Obtained from environmental sample
  DOMAIN (5)...(223): MreB/Mbl protein
  misc_feature (1)..(223): Xaa is any amino acid
MFGQNTAIGIDLGTCNTLIYITGKGILINEPSVVAVEKGTNKVMAVGADAKRMLFKTPGSIHAIRPMRGGVIADLESTEKMIRYFISKALPRYRVFKPRMVIGIPSSITEVERRAVEECAYKAGAREVVIIPESLAAAIGAEIPIQEPAGHMIIDIGGGTSEISVISLGDMVVTNAIRTAGDDFDEAIIKYVRSELNLIIGGGGAERLKIEIGNAFPDKEMKR

SEQ ID NO: 4117 - DNA, 951 bp, Unknown
  Obtained from environmental sample
  misc_feature (1)..(951): n is a, c, g, or t
atggaactgggcgcagtaatcggcgctgtaccggaggcctgggtgcgccgcgaggaacccgctgcgggcgatctggtgattctcgttggaggcagaaccggcagggacggcattggaggcgcaacgggttcctccaaggttcacaccggagcgtccgtggaaagcgccggggcggaagtgcagaagggaaatgccgtagaagaacgaaaactccagcgcctttttcgcaaggccgaagtaacccgtttgattaagcgctgcaatgactttggcgcgggcggcgtttccgtggcggttggcgaacttgccaggggccttgagatcaatctggacgcggttccaaaaaaatacgccggccttgacggtacggagctggcaatttcggaatcccaggaaagaatggcggtgctttgttcagcctgcgacgcggaggctttcataaaagcagcggccgcggaaaacctcgaatcggttatcattgctaaagtaaacgatgaaaaccagaaccgcctccacatgaattggcgcggcaaaatcatagtggatatatcgcgggactttcttgataccaacggcgctccccgaagcgcaagagcattgttaccaagaactaaccacggagtacacggagttacacagagagaaaatttaaaataccctgatgatctccctgcgggagttctgatcgataatctggagcgggaactcgtgagtctacgcagcggaagccgccgggggttacaagagcgcttcgatggttcagtcggcgcgctttctgtgctatttccatggggcggcggcgaacagggaacgcccgaatgcggcatggcggccctgctcccgtccctggacaaacagagccgcaccgcgagccttatgaccttcggctacgatcccgttcttatgagccttgatccctacatggggctaaaggttcctcggccaatctga

SEQ ID NO: 4118 - protein, 316 aa, Unknown
  Obtained from environmental sample
  DOMAIN (21)...(174): AIR synthase related protein, C-terminal domain
  misc_feature (1)..(316): Xaa is any amino acid
MELGAVIGAVPEAWVRREEPAAGDLVILVGGRTGRDGIGGATGSSKVHTGASVESAGAEVQKGNAVEERKLQRLFRKAEVTRLIKRCNDFGAGGVSVAVGELARGLEINLDAVPKKYAGLDGTELAISESQERMAVLCSACDAEAFIKAAAAENLESVIIAKVNDENQNRLHMNWRGKIIVDISRDFLDTNGAPRSARALLPRTNHGVHGVTQRENLKYPDDLPAGVLIDNLERELVSLRSGSRRGLQERFDGSVGALSVLFPWGGGEQGTPECGMAALLPSLDKQSRTASLMTFGYDPVLMSLDPYMGLKVPRPI

SEQ ID NO: 4119 - DNA, 642 bp, Unknown
  Obtained from environmental sample
  misc_feature (1)..(642): n is a, c, g, or t
atgaacacaaagtatatcaatacaaccctgttctctttttctgtcgcaaggcatccggtggatagtttctatgatttgaaaataaaacgaaaaggctctttaccgggagcgatagttaattttttatttatcttcgcggcttatttaattaaccagacatccaagggctttatcatacagttcatagaaattgaggatatggatttcaatgtgatcatcggcggatttatcggaatatacctgttatttgtattttgcaattaccttgtcacttcaattaatgacggggaaggtgaaattgacgatatttttaaattggtttcctacgccatgctgccgctttccgttactttattggctgtaacgttaatttcgcatgtaacgaccgagaacgaaaccttcctgcttgtttttatgttaattggaggcttcgcctggagcgcggcgctcttatggcttggtttgcaggaagtgcataattacagtttcagcaataccttcaagagtttgcttttcaccgctgtgtttatgttaatcgttcttgttgttctttttaacatgaccattttattcagccagtttgtgcagttctttgaggcgattataagggaggcgtatgcgaatatcacgaaaatgtactag

SEQ ID NO: 4120 - protein, 213 aa, Unknown
  Obtained from environmental sample
  misc_feature (1)..(213): Xaa is any amino acid
MNTKYINTTLFSFSVARHPVDSFYDLKIKRKGSLPGAIVNFLFIFAAYLINQTSKGFIIQFIEIEDMDFNVIIGGFIGIYLLFVFCNYLVTSINDGEGEIDDIFKLVSYAMLPLSVTLLAVTLISHVTTENETFLLVFMLIGGFAWSAALLWLGLQEVHNYSFSNTFKSLLFTAVFMLIVLVVLFNMTILFSQFVQFFEAIIREAYANITKMY

SEQ ID NO: 4121 - DNA, 582 bp, Unknown
  Obtained from environmental sample
  misc_feature (1)..(582): n is a, c, g, or t
atgaagggcgcggtgcggagagccgaagaaatttccgcgcagacaggcggcgttattctccagcagtttgaaaatcccgccaatcccgccatccaccagaaaactaccgctgaggaaatttggaacgacacggaaggagatgtggatatttttattgccggagtcggaaccggcggaacagtcgcaggcgtagggacttatctgaaggagaaaaaacccggcgtacagatcatcgcggttgaaccttttgaaagccctgtcctttcaggaggcacgccggggccgcacaaaattcagggcataggcgcgggctttataccaaaggtctttaagcgtgaagttgttgatgaagtttacactgtgaaaggaaccgaagcggttgaaacttcccgtgaattgggacgcaaagaaggtttgctggttggtatttcttccggcgcggcggcttttgccgcattgcaaatttccaggcgtccggaaaacgccggaaaaaacatcgtcgccattctgccggatacgggcgagcgttatctgtcaacggttctttacgattataacgttttgcaggggggaaatacatga

SEQ ID NO: 4122 - protein, 193 aa, Unknown
  Obtained from environmental sample
  DOMAIN (1)...(173): Pyridoxal-phosphate dependent enzyme
  misc_feature (1)..(193): Xaa is any amino acid
MKGAVRRAEEISAQTGGVILQQFENPANPAIHQKTTAEEIWNDTEGDVDIFIAGVGTGGTVAGVGTYLKEKKPGVQIIAVEPFESPVLSGGTPGPHKIQGIGAGFIPKVFKREVVDEVYTVKGTEAVETSRELGRKEGLLVGISSGAAAFAALQISRRPENAGKNIVAILPDTGERYLSTVLYDYNVLQGGNT

SEQ ID NO: 4123 - DNA, 879 bp, Unknown
  Obtained from environmental sample
  misc_feature (1)..(879): n is a, c, g, or t
atgagttattatgatcaaaaaataccgcctgtgcgcgaccagcgtttgcagcttgcggacagtttttcgggacacgcctgtaatttactggattgcgcaagggagggatgccttcttcagaagaaacgttctttctggcaggcgggcgcgtgtcagatgtcattaacgctgatgatggccacgacggtcaggaactcggttgtcattgtacactcgcccggcggttgctcttcgatgatgatggccataagtatgccatcccataaaggacggattcaacgagggtatccttcctcgctcggaaactggatttccaccgacttaaacgaggcggacgtaatcggcggcggcgagcgtaaactaaaagaagcgattgaatatgccgatcgggaattccgcccggagattatcttcgtggtatccacctgtgcgcccaatatcataggggacgatgtcgccgaagtcatcgcgcagaccaggggaacggtttccgcagaggttgcagggcttcactgtccgggtttcaagtcccgcgtcgtcgcaagcgcgtatgattccttctaccacggcctgctcaaagacattccccttgagcctgaaccgtggaaggattatgtgcctatcgaaccttcctgtccggaatacgatatgcagcaggcgaaagaacgctatcaggattcgcatacggtaaatctgtggaatgcgacatcaatcggctgtcaggatgaagcggagatagaacggctgcttaaagcgctgggtctgaacgtcagagtgttcgcggagttttcaagccttgacgattttcgcaaaatttcccgcgctgcgctcaatgtcagtatgtgcgacgcccacgatgactatatgttgaaattctaa

SEQ ID NO: 4124 - protein, 292 aa, Unknown
  Obtained from environmental sample
  misc_feature (1)..(292): Xaa is any amino acid
MSYYDQKIPPVRDQRLQLADSFSGHACNLLDCAREGCLLQKKRSFWQAGACQMSLTLMMATTVRNSVVIVHSPGGCSSMMMAISMPSHKGRIQRGYPSSLGNWISTDLNEADVIGGGERKLKEAIEYADREFRPEIIFVVSTCAPNIIGDDVAEVIAQTRGTVSAEVAGLHCPGFKSRVVASAYDSFYHGLLKDIPLEPEPWKDYVPIEPSCPEYDMQQAKERYQDSHTVNLWNATSIGCQDEAEIERLLKALGLNVRVFAEFSSLDDFRKISRAALNVSMCDAHDDYMLKF

SEQ ID NO: 4125 - DNA, 852 bp, Unknown
  Obtained from environmental sample
  misc_feature (1)..(852): n is a, c, g, or t
gtggctttacgcaacaggatgcggcggctcaagctggatcccgaactgcgcgacgacgtggctccaaaaaatatacttatgatcgggcctaccggcgttgggaaaacggagattgccaggaggctcgcgaaactcgcgggttccccttttatcaaggtagaagccaccaagtataccgaagtgggctacgtgggccgggatgttgagtccatggtgcgcgatcttatggcttccggtttccagatggtaaaacaggaaatgcaggaatcctttgtcgctgaagcagacaaacgcgccgaggaaattcttttggacctgctcctgcccggcaccggcaaaaagtccaaagtaaaaaagtcaacgccggcgccggttgtaaggcccgtgggttctttttcattcggcccggaaaacggccagggcgcgggccttatcgggaccgcaattcaggtggggatcccttcttttgtaaaccagggcgaggagaaggccgaggacgaggcggacaagcaggaaaacccccagccagccgattccacaacagatacgtccacgacaagggagaaattcagggccatgctccgtgagggcaaacttgaggataaaaccgtagagcttatggtcaaccagaacccccagtttccgccttttgaaatgatgggcgtaagcatggaagacatggaatcgagcctttccggtttcgcgaacttttttggcgggggcaagaaaaagaaagttgttacaatagcccgagcacgggaaataatcagggccgaggaactggaaaaattgatcgaccgcgacagggtgagcgacgaggcccgccagcgggtgaggctcggccgaatctga

SEQ ID NO: 4126 - protein, 283 aa, Unknown
  Obtained from environmental sample
  DOMAIN (21)...(126): ATPase family associated with various cellular activities (AAA)
  misc_feature (1)..(283): Xaa is any amino acid
MALRNRMRRLKLDPELRDDVAPKNILMIGPTGVGKTEIARRLAKLAGSPFIKVEATKYTEVGYVGRDVESMVRDLMASGFQMVKQEMQESFVAEADKRAEEILLDLLLPGTGKKSKVKKSTPAPVVRPVGSFSFGPENGQGAGLIGTAIQVGIPSFVNQGEEKAEDEADKQENPQPADSTTDTSTTREKFRAMLREGKLEDKTVELMVNQNPQFPPFEMMGVSMEDMESSLSGFANFFGGGKKKKVVTIARAREIIRAEELEKLIDRDRVSDEARQRVRLGRI

SEQ ID NO: 4127 - DNA, 609 bp, Unknown
  Obtained from environmental sample
  misc_feature (1)..(609): n is a, c, g, or t
ttgatcgcgagactatgcgcttcggtatcggctgtcggcgcgggacttatcctcagcctctttttggcgctggggaagatgtcgaaaaatacggtgataaataaaatttgcagcgcctatgtgtttttctttaggggaacgccgctcttaatgcagctctattttgtttattacgctctcccaatgattattccggcgctgacaattaacagccgtttccttgcggcgtttatcgccttctcgctaaactcgggcgcttactgcgcggaaataatcagggcggcaattcaaagcatagacaaagggcagtttgaggcttcccgcgctctgggattatcttacgcgcaaacaatgcgttttgtaattattcctcagtctatccgcagattaattcccccggtcggcaatgaatttattatgatgttaaaagacgcgtctttggtttcgatgattgcgttagttgacattacaaaagctacaagaaatatcgaaggctcaacaagatcggctcttgtgtacattcccgccatgattctttatttgctcattacagccgtattctcttttattttccgtaaagcggaaaataaatattcggtatatgagtga

SEQ ID NO: 4128 - protein, 202 aa, Unknown
  Obtained from environmental sample
  SIGNAL (1)...(28)
  DOMAIN (5)...(200): Binding-protein-dependent transport system inner membrane component
  misc_feature (1)..(202): Xaa is any amino acid
MIARLCASVSAVGAGLILSLFLALGKMSKNTVINKICSAYVFFFRGTPLLMQLYFVYYALPMIIPALTINSRFLAAFIAFSLNSGAYCAEIIRAAIQSIDKGQFEASRALGLSYAQTMRFVIIPQSIRRLIPPVGNEFIMMLKDASLVSMIALVDITKATRNIEGSTRSALVYIPAMILYLLITAVFSFIFRKAENKYSVYE

SEQ ID NO: 4129 - DNA, 375 bp, Unknown
  Obtained from environmental sample
  misc_feature (1)..(375): n is a, c, g, or t
ttgtcaaattccgtgatatttacgggatatttacgctggcccgatgaaatccgccaggtttacagggcggctgatatttttatgagcgcctctcacagcgaagttcacccgattacatttattgaggctatggcggcgggacttcctgttgtcgccgccgcagatccaagcattgagggaatgattgtaaatgacgataacggctgggctgtagaaaatgacaagttgatgtgggaaaaagccattgatgttttggcggataaagataaaaaaatgaaaatgggaaaacgttccgatgaaatatcaagaacctactccgttgatacttttatcagaagaatgcttgatgtttatgaagaatacaggaagcggtaa

SEQ ID NO: 4130 - protein, 124 aa, Unknown
  Obtained from environmental sample
  misc_feature (1)..(124): Xaa is any amino acid
MSNSVIFTGYLRWPDEIRQVYRAADIFMSASHSEVHPITFIEAMAAGLPVVAAADPSIEGMIVNDDNGWAVENDKLMWEKAIDVLADKDKKMKMGKRSDEISRTYSVDTFIRRMLDVYEEYRKR

SEQ ID NO: 4131 - DNA, 807 bp, Unknown
  Obtained from environmental sample
  misc_feature (1)..(807): n is a, c, g, or t
atgggcggacgctccgaaggaatggcgtccgcttttgcggcggtttcggacgatgtttcatntattgaatttaaccccgccggctcttccatgctttcaaagtcggaaatcgctttttttcacaacaactggatagcggacagcaagatggagggacttgtttatgccacccgttttggtgattttgggcttgccgccggcgcgaaatggctgtatacgccttttacagaatacaatatctacgctcaaagagtttccaacggctacttttcggaaggcgcggcaatactaaacatttcctataatttattctcgggatattatttcggcgggctttcatttggtataaatttaaaaggcgctttccgtatcatgccggattacaccatggacgatgatataatcgcgggtggttcggggatgtcccagtccgccgtaatgggaatggcggacgccggattattaacgcggtttaatttcttaaaagcttattcttcaaaagaaaaaaacacttctttcgcccttgtaataaaaaacatcggcccgcccgcgcttggagaaccgctgcccgccgccgcgggagcggctttgtcgtacaaaccgttcaagcctttaacgctggcgtttgatttttatatgccgcttaacattatggagttcgaactttccgaaaaaccgtattttgcgtttgggacggcagttaatataacaaaatttttatccatgcgcgccggagccatggtaaaagccnggcggcagccgcgttacagtcggcagcgctctaaatctggacaagattgcggttga

SEQ ID NO: 4132 - protein, 268 aa, Unknown
  Obtained from environmental sample
  DOMAIN (1)...(257): Uncharacterised protein family (UPF0164)
  misc_feature (1)..(268): Xaa is any amino acid
MGGRSEGMASAFAAVSDDVSXIEFNPAGSSMLSKSEIAFFHNNWIADSKMEGLVYATRFGDFGLAAGAKWLYTPFTEYNIYAQRVSNGYFSEGAAILNISYNLFSGYYFGGLSFGINLKGAFRIMPDYTMDDDIIAGGSGMSQSAVMGMADAGLLTRFNFLKAYSSKEKNTSFALVIKNIGPPALGEPLPAAAGAALSYKPFKPLTLAFDFYMPLNIMEFELSEKPYFAFGTAVNITKFLSMRAGAMVKAXRQPRYSRQRSKSGQDCG

SEQ ID NO: 4133 - DNA, 522 bp, Unknown
  Obtained from environmental sample
  misc_feature (1)..(522): n is a, c, g, or t
ttggcggaggcaaaggctaaagcggcccaaatagtgaaagaagcggaagcaaacgccgcgtctaagcttgaaaaagccgataaagactcgcaggcttacgcagagcgaagcgaaaagacccttacacaagcggctcgagacgttgtgcttgccgtctctcagggcgtggaaaagtccgtgcttggtgtgctggctctaaatgtggaaaaatccttgaccccagagcttatgcaaaagctgctcttaacgctagcaagcggttatgtaggcaagcaggcaacggtttccctttcagaagaagattcaaaaaagcttgcctcgtttataaccggagagtttcaaaaaaagctgggagcaggagtcactgttcaaagcgatagcggaattttcgcaggtttcaggctctcatttgataacggcaaggttagccaagaatggacaaaagaggctatagcagaggctctgtctgcaatacttcgtcctgctcttgcaaaaatagttcagcaggcagttaagggctag

SEQ ID NO: 4134 - protein, 173 aa, Unknown
  Obtained from environmental sample
  DOMAIN (1)...(168): ATP synthase (E/31 kDa) subunit
  misc_feature (1)..(173): Xaa is any amino acid
MAEAKAKAAQIVKEAEANAASKLEKADKDSQAYAERSEKTLTQAARDVVLAVSQGVEKSVLGVLALNVEKSLTPELMQKLLLTLASGYVGKQATVSLSEEDSKKLASFITGEFQKKLGAGVTVQSDSGIFAGFRLSFDNGKVSQEWTKEAIAEALSAILRPALAKIVQQAVKG

SEQ ID NO: 4135 - DNA, 318 bp, Unknown
  Obtained from environmental sample
  misc_feature (1)..(318): n is a, c, g, or t
atggcccatgggccgctggaaaaattcgccaataacatcaaacttcttttttcttttgttaaggattatgcgagtggtagatataaagaagtaccatggacaacaatagcggctataattggttcgttgatatacatttttagtccgattgacttgattccggacttcatacctgtacttggattaactgacgatgccgcagtacttggtctttgtttagccggtatagcgagcgacttaaaaaaatatgaaatatggaaaagtcaatatgttgagtttgaagtaattgaaggaaaaaatgaaagcatggatgtataa

SEQ ID NO: 4136 - protein, 105 aa, Unknown
  Obtained from environmental sample
  DOMAIN (23)...(80): Protein of unknown function (DUF1232)
  misc_feature (1)..(105): Xaa is any amino acid
MAHGPLEKFANNIKLLFSFVKDYASGRYKEVPWTTIAAIIGSLIYIFSPIDLIPDFIPVLGLTDDAAVLGLCLAGIASDLKKYEIWKSQYVEFEVIEGKNESMDV

SEQ ID NO: 4137 - DNA, 885 bp, Unknown
  Obtained from environmental sample
  misc_feature (1)..(885): n is a, c, g, or t
ttgtttatcggcgaggttcgcgacaaattaagcgtcggccgctcagcgccgggcggcgccgtcgctccgtcgaccgtcggtccgcagagcggccttacgggcggcgcggggctcccgccgcccgtccaggagttcggctccgacgccgatcggttcggcggttccgacggcgatcagttcagcggctccgacgtcgtgggacagctcgaccaaatattcggcggcgcgcaggaacagatggcgcctatgcccatgcctccgcccatgcctatgggggcgcagatgcctccgcccatgcctatgggggcgcagatgcctccgcctatgcctccgcccatgcctatggaggcgcagatgcctccgcctatgcccccgcccatgcctatgccggagcaggcctacgatgccgcggcggcgggttccggcgacggccatccgagcggcgacgacgtagccggccagctcgacgcgctattcggcgaggaggcgcaactaggggctatgccgagcgccgcgccgaccgacgatgtcctcttaggcgccgccccggaccaagagggtcaacccagcggcgacgacgtcgccgggcatctcgacgcgctcttcggcggcgcggaggcggaagcggcggagctggccggcgcgcccatgctgaccgaagattccataatggcgggcgagccggacgcgtcgtcggctatgggcggccgggactcggacgaccggctcagcggcgacgaccttgccgggcggctcgacgcgatgttcggcgaaccgtcctcctcgttgcctgaggcggaggccgtcccggtgaggggatcgggacgcccgccgcggacgtcgccgccaagagggccgccccagtggcgagactttagcgggtga

SEQ ID NO: 4138 - protein, 294 aa, Unknown
  Obtained from environmental sample
  misc_feature (1)..(294): Xaa is any amino acid
MFIGEVRDKLSVGRSAPGGAVAPSTVGPQSGLTGGAGLPPPVQEFGSDADRFGGSDGDQFSGSDVVGQLDQIFGGAQEQMAPMPMPPPMPMGAQMPPPMPMGAQMPPPMPPPMPMEAQMPPPMPPPMPMPEQAYDAAAAGSGDGHPSGDDVAGQLDALFGEEAQLGAMPSAAPTDDVLLGAAPDQEGQPSGDDVAGHLDALFGGAEAEAAELAGAPMLTEDSIMAGEPDASSAMGGRDSDDRLSGDDLAGRLDAMFGEPSSSLPEAEAVPVRGSGRPPRTSPPRGPPQWRDFSG

SEQ ID NO: 4139 - DNA, 831 bp, Unknown
  Obtained from environmental sample
  misc_feature (1)..(831): n is a, c, g, or t
atgttcggcggagccgccgccgcaaccgccgccgcggcctccaaagcgctccccacgtccgcggaaacggacggcgccgcctccgccgaaatggacgaggccgccatagccgccgcgtacggcatggccaacgaaccagcgctggtcgtcgacggaaccgacgccgcgccggcggaagaggccgcgccgccgcaagacgcagcgcccgccggaatactcccggactccatagtcctagacgaaaacggcatagacatagcgcggaccccgaccccggaagacatagaagaccgcatagacacgctcttcggccaatcggatccctccgtccccaaagaaccgttggtcgtagacgaagacgaagccaaaatcgaagccgccgcaaccggcgcccccggcaatgacaaaacggcgaaagcggatatagaacaagaagacccgaggacggtgacggaccgcatccctatagataacgacgaggacccgtcgttcctaagcgccggaataaccgaagcggccgccggcgaggccgtagggatgatagacggcgaggatatgagcggcgacgacgtgaaagcgcgcctgtcggagatgttcggaacttcggagtcggatactactacggcaatggctgttgacgatgttatgtcggtcgatatcgacggagcggatgccgttgccaatacagacggcgtggccggtgctgacgacgtcgttaatatagacggaatggccggtgctgacgatgttattaatacagacggtataatcggtactgacgacgtcgttaatatagacggaatggtcggtgctgacgacgtcgttaaatag

SEQ ID NO: 4140 - protein, 276 aa, Unknown
  Obtained from environmental sample
  SIGNAL (1)...(21)
  misc_feature (1)..(276): Xaa is any amino acid
MFGGAAAATAAAASKALPTSAETDGAASAEMDEAAIAAAYGMANEPALVVDGTDAAPAEEAAPPQDAAPAGILPDSIVLDENGIDIARTPTPEDIEDRIDTLFGQSDPSVPKEPLVVDEDEAKIEAAATGAPGNDKTAKADIEQEDPRTVTDRIPIDNDEDPSFLSAGITEAAAGEAVGMIDGEDMSGDDVKARLSEMFGTSESDTTTAMAVDDVMSVDIDGADAVANTDGVAGADDVVNIDGMAGADDVINTDGIIGTDDVVNIDGMVGADDVVK

SEQ ID NO: 4141 - DNA, 600 bp, Unknown
  Obtained from environmental sample
  misc_feature (1)..(600): n is a, c, g, or t
gtgtctaaaccgaacggttcccttcaaagcaaattgcttcccatcagccgccgcgatatggacgagcgcggctgggaagaatgtgatttcatctttgtttcaggcgacgcctatgtagaccacccttcttttgcggcggcgcttttatgccgcgcgttggaagcggcgggttttcgcgccggaataatcccccaacctgattggaaaaatccctcatcatataccgtattgggacgacctcgtcttgcttttctggtcggcgcgggcaatatggattccatggtcgcgcactacaccgccgcaaaacgtaaacgctccgacgacgcgtattcgccgataggaaaaagcggtctgcgccccgatcgcgccactttggtttatgtcgaggggatcaggcgcgcgtacaaagatgtgccggtaattatcggcgggatcgaggcaagccttcggcgctttgcccattacgattactggtcggacactgtacgccgctcgattctgcttgattcaaaagcggatatgctggtctatggaatgggagaaaagccgctgctgaatatagcgcgccggttagcggagggtcaagtattggcagtataa

SEQ ID NO: 4142 - protein, 199 aa, Unknown
  Obtained from environmental sample
  DOMAIN (12)...(198): Radical SAM N-terminal
  misc_feature (1)..(199): Xaa is any amino acid
MSKPNGSLQSKLLPISRRDMDERGWEECDFIFVSGDAYVDHPSFAAALLCRALEAAGFRAGIIPQPDWKNPSSYTVLGRPRLAFLVGAGNMDSMVAHYTAAKRKRSDDAYSPIGKSGLRPDRATLVYVEGIRRAYKDVPVIIGGIEASLRRFAHYDYWSDTVRRSILLDSKADMLVYGMGEKPLLNIARRLAEGQVLAV

SEQ ID NO: 4143 - DNA, 432 bp, Unknown
  Obtained from environmental sample
  misc_feature (1)..(432): n is a, c, g, or t
ttgnactttccaaaccagaggaaaatgagcttttacgaatcttttgaacctcacaaccctatacacacatcaatggctgatccttacgacagtcacttgcgaaaaattctaattgatgaatgcaaggcgttgaattacccgtatcacgaaaaaggaacggtaataacaattgaagggcccagattttcaagccgtgcggaatctttcatgttccgcgcatggggtgcggacataatcaatatgtcagttgccacagaaacagtcttggcaaacgagacggaaattccttatgcggcagtagccatgagtactgattacgattgctggaaaacaggcgaagaaagcgtaacatgggaagccgtcctaaaagtttttgccgacaacgccaataaagtgacaaccctcttaaaaaatattattccaaaaatataa

SEQ ID NO: 4144 - protein, 143 aa, Unknown
  Obtained from environmental sample
  DOMAIN (2)...(142): Phosphorylase family 2
  misc_feature (1)..(143): Xaa is any amino acid
MXFPNQRKMSFYESFEPHNPIHTSMADPYDSHLRKILIDECKALNYPYHEKGTVITIEGPRFSSRAESFMFRAWGADIINMSVATETVLANETEIPYAAVAMSTDYDCWKTGEESVTWEAVLKVFADNANKVTTLLKNIIPKI

SEQ ID NO: 4145 - DNA, 822 bp, Unknown
  Obtained from environmental sample
  misc_feature (1)..(822): n is a, c, g, or t
atgaagaaatatgtaacagatgtcgtgactcattttaaaggaaaggtttactcatgggacgttttaaacgaagctttcccggacggtgtaggcgagggcgccgactggaaaaccgcaatgcgcccgcaaaacccgtggtttaaggctatcggttcagattttgtatatgaggcgtttcttgccgcgcgtaaggcagaccctgacgcaaaattgtattacaacgattacaacacaaatgagatcggcaaagcggcaatgatccacaatatggtgcgcgatgtgaatcaaaagtattctacttccggtgataaacctgccggggaagcttccggcagacttcttatcgaaggaataggaatgcaggagcaccacaataccggcgtagcgccggagaacgtaagagccgctttaactaagttcaaagcgttaaccggcataaaaatagctgtttccgaacttgacgtacttggtcagagttggggtgaattcagttctgtcggtcaaggcgcaaacaaacaaagcaactcaaccgtaaccaacgatcaattattaacgcaggcggatctgtataagcgatatatggaagtttataaagaatttgataacattgaacgtataacattctggggcattaccgataacagcagttggcgttcagccggcttaccgcttttgtttgacaaagacggcaaagccaaacccgcatattacaagtttgtgggaagcaacgccaacgccttagaaaaaaataaaaaacataaagagcgtggtaattccacgctctttttttactatcggcttgccctttccgttacgnaataa

SEQ ID NO: 4146 - protein, 273 aa, Unknown
  Obtained from environmental sample
  DOMAIN (1)...(243): Glycosyl hydrolase family 10
  misc_feature (1)..(273): Xaa is any amino acid
MKKYVTDVVTHFKGKVYSWDVLNEAFPDGVGEGADWKTAMRPQNPWFKAIGSDFVYEAFLAARKADPDAKLYYNDYNTNEIGKAAMIHNMVRDVNQKYSTSGDKPAGEASGRLLIEGIGMQEHHNTGVAPENVRAALTKFKALTGIKIAVSELDVLGQSWGEFSSVGQGANKQSNSTVTNDQLLTQADLYKRYMEVYKEFDNIERITFWGITDNSSWRSAGLPLLFDKDGKAKPAYYKFVGSNANALEKNKKHKERGNSTLFFYYRLALSVTX

SEQ ID NO: 4147 - DNA, 933 bp, Unknown
  Obtained from environmental sample
  misc_feature (1)..(933): n is a, c, g, or t
atgttatatgacattaaacggttatgttgggacgaaaccctgcttagggcgttggatattccgaaagcatgtctgcctgaagtgcgtaacagcagcgatatatacgggtacgttaacattcaagggagagaagtcccaattgccggcatagcgggagaccagcaagcggctttattcgggcaatgttgctttgcatccggagacaccaaaaacacatatgggacaggatgttttttactcatgaatacaggagaaaaaccgatagaaagcaaaaacggcctgctcaccaccattgggatcgggcttaagggcgaaatacagtatgctctggagggaagcgtttttatcggcggtgcggtgattcagtggatcagggatgaattgcgtttcattaccgaaagccgcgatgcggaatactacgccaaaaaagtcagcgacaccggaggcgtttatctggtaccggcatttacagggcttggcgcaccgtactgggatatgtacgcccgaggatgtctcgtgggtatcaccaggggaacaagcagggaacacatcatacgcgcggcgggcgaaagcattgcttaccagagttacgatcttgtatgcgcaatgcagaaagatacaggcatatcgcttaagcagctgcaagtagacgggggcgcttcacgggattcgtttctcatgcagttccagtcagatattctgggtgtgccggtggttcgccctgtaatacgcgagtcaacagcgctgggagcggtatatctggcagggcttgcaacaggagtatggaagaacagggaggagatcaagaatttttggagacaggatgcggtattcacatccaatatggatacggtagtccggaaacaacttttatccggatggcataaggctgtaggccgaagcccttatttgggcaacagacgactagtatga

SEQ ID NO: 4148 - protein, 310 aa, Unknown
  Obtained from environmental sample
  DOMAIN (63)...(289): FGGY family of carbohydrate kinases, C-terminal domain
  misc_feature (1)..(310): Xaa is any amino acid
MLYDIKRLCWDETLLRALDIPKACLPEVRNSSDIYGYVNIQGREVPIAGIAGDQQAALFGQCCFASGDTKNTYGTGCFLLMNTGEKPIESKNGLLTTIGIGLKGEIQYALEGSVFIGGAVIQWIRDELRFITESRDAEYYAKKVSDTGGVYLVPAFTGLGAPYWDMYARGCLVGITRGTSREHIIRAAGESIAYQSYDLVCAMQKDTGISLKQLQVDGGASRDSFLMQFQSDILGVPVVRPVIRESTALGAVYLAGLATGVWKNREEIKNFWRQDAVFTSNMDTVVRKQLLSGWHKAVGRSPYLGNRRLV

SEQ ID NO: 4149 - DNA, 786 bp, Unknown
  Obtained from environmental sample
  misc_feature (1)..(786): n is a, c, g, or t
ttgtttttggaggaaacggaattgtataatatcgacaagctttttgaagcggttggcgcgaagggccatgtgtgcgtgggccttgatacttcggcggaatatgtcccccctgcggaacggaagcgggccgcatccgacgctgaggcggttctggcttttaacagggctcttattgacgctacctttgacgcctgcgcctgctacaaggtacagatcgcctactacgaggaaatgggactggaaggacttggttgttacgcaaaaaccctgcggtatatacgcgaaataggcggcctggttatagccgatataaaacgcggcgacattgccgataccgccctgcgttacgcgaaagcccatttcgcaggcgacttcgaggcggattttgtcacgctttccccctacatgggcatggactcaatcgagccctggctttcttacgctgaaaaaaacggcaaaggcgcttttgtgttgatgaggacgagcaataaaggcatgcgtgattttgagtatcttgaaattgcggccggcaaaaaacgcgtgtaccacgcggttggtgacaaacttgcggcgcttgcagcctcgcattgcggtaaatacggctacggggcctttggcgcggttgtgggctgtactgaaagggatgaagcagccgaaattcgcaaaaattattccaatctttttttccttatacccggctacggagcgcagggaggcgcggcggatgacgctgctctgcttttgcgcgagggaaancggcggggtagtgctcgtgccgaattctga

SEQ ID NO: 4150 - protein, 261 aa, Unknown
  Obtained from environmental sample
  DOMAIN (22)...(261): Orotidine 5'-phosphate decarboxylase / HUMPS family
  misc_feature (1)..(261): Xaa is any amino acid
MFLEETELYNIDKLFEAVGAKGHVCVGLDTSAEYVPPAERKRAASDAEAVLAFNRALIDATFDACACYKVQIAYYEEMGLEGLGCYAKTLRYIREIGGLVIADIKRGDIADTALRYAKAHFAGDFEADFVTLSPYMGMDSIEPWLSYAEKNGKGAFVLMRTSNKGMRDFEYLEIAAGKKRVYHAVGDKLAALAASHCGKYGYGAFGAVVGCTERDEAAEIRKNYSNLFFLIPGYGAQGGAADDAALLLREGXRRGSARAEF

SEQ ID NO: 4151 - DNA, 339 bp, Unknown
  Obtained from environmental sample
  misc_feature (1)..(339): n is a, c, g, or t
atgcgccaccttgtcttcccggcctccattggtgacacagccacgcttaaggcaatggaacttgcctggatacaatacggcatgctgttggatcctcacggcgctgtggctctggccgcagcgagggattttttcaatcaggataaaaattccaataatcacataattgttcttgcgacaggtcatcctgccagagaagcggctatagttgaagaggcaacgcagcaaaaggtctctctgccggaaaaacttgccctgctgaagaaagaagcggagccaatcgcggtaatcgatccgcatcttggtactttagaggggctattggcgagttgcctgtga

SEQ ID NO: 4152 - protein, 112 aa, Unknown
  Obtained from environmental sample
  misc_feature (1)..(112): Xaa is any amino acid
MRHLVFPASIGDTATLKAMELAWIQYGMLLDPHGAVALAAARDFFNQDKNSNNHIIVLATGHPAREAAIVEEATQQKVSLPEKLALLKKEAEPIAVIDPHLGTLEGLLASCL

SEQ ID NO: 4153 - DNA, 408 bp, Unknown
  Obtained from environmental sample
  misc_feature (1)..(408): n is a, c, g, or t
atgatcggcagagtggaacaagaccctcaaaaccacggtgtaagactcaacggctgcaccacgctcaatgagacgaattattttgcccttaacctctgcgccaacttggaaatcgttctcaacggaatcccacggatcgtcttccaagtgcttcatagaaagagaaatgcggcgtctctcgctatctacagcaagcacaacgcattcaaccttatcgcctttcttaatcatctcgcccgggtgctcaattttctttgtccagctcatatcagaaacgtgaatcaagccgtcaacgccttctttaatttcaacaaaggcaccgaatgttgcaatggaacgaacctcgccagtgacctttgcgccaggcaaaagctcgctttcaatggattcccacgggtctgtttctaa

SEQ ID NO: 4154 - protein, 135 aa, Unknown
  Obtained from environmental sample
  misc_feature (1)..(135): Xaa is any amino acid
MIGRVEQDPQNHGVRLNGCTTLNETNYFALNLCANLEIVLNGIPRIVFQVLHRKRNAASLAIYSKHNAFNLIAFLNHLARVLNFLCPAHIRNVNQAVNAFFNFNKGTECCNGTNLASDLCARQKLAFNGFPRVCF

SEQ ID NO: 4155 - DNA, 396 bp, Unknown
  Obtained from environmental sample
  misc_feature (1)..(396): n is a, c, g, or t
ttgccgagggcggagcctattgaaggcaaggcgatatggatagttgacgacatgattgacactgctgcgtctgtggaagagcttatcaaggctttaagcgtccttaatcctaaagaaatcaatataattgcggtgcacgcccttttttccccgccggcggcaaaaaggcttaacaggcttgaaagcgagggattgcttcaccgcatcatagttgccgatacggtagggacttataatttccttgagacaattcccagcctggaagtggttccttcaactgagctgtcggcaaggatcatcagcagccttgaaacaaatgaatcaatagcaaaaataatgcgggtttttagcgcggaaaaatacctaaaatccccaagtttgttcagtaacgagtaa

SEQ ID NO: 4156 - protein, 131 aa, Unknown
  Obtained from environmental sample
  misc_feature (1)..(131): Xaa is any amino acid
MPRAEPIEGKAIWIVDDMIDTAASVEELIKALSVLNPKEINIIAVHALFSPPAAKRLNRLESEGLLHRIIVADTVGTYNFLETIPSLEVVPSTELSARIISSLETNESIAKIMRVFSAEKYLKSPSLFSNE

SEQ ID NO: 4157 - DNA, 369 bp, Unknown
  Obtained from environmental sample
  misc_feature (1)..(369): n is a, c, g, or t
atgaaaagccagtctcagggaaaaatttcggcgtacaggaacgcactggaaaaagtcattgagaggtatcccggactgagcacaagggactttctttccatggctaaaggcaataaacaaaaagcggattcctttttggcccaaaaagcggcggaaaccatggatgaaaatatggatggggccctttcttccgtcgatgtgaaggttcttgttgccgacaggatcgattcgctggatatgctcagggtggaaaaaattgtccttgatgtaatggccgggcagttgaaatggataaacattttcggtgcgatccttggcgctttgattggcttaatggaagttcttatttcttactttactcgttactga

SEQ ID NO: 4158 - protein, 122 aa, Unknown
  Obtained from environmental sample
  misc_feature (1)..(122): Xaa is any amino acid
MKSQSQGKISAYRNALEKVIERYPGLSTRDFLSMAKGNKQKADSFLAQKAAETMDENMDGALSSVDVKVLVADRIDSLDMLRVEKIVLDVMAGQLKWINIFGAILGALIGLMEVLISYFTRY

SEQ ID NO: 4159 - DNA, 921 bp, Unknown
  Obtained from environmental sample
  misc_feature (1)..(921): n is a, c, g, or t
ttgccgaaagaaaatcagtcagattttgattcttccattacgccttcttttggcatacttttcggccaggcgaatgaaattgtttattacccaagaactaaaaaaattctcagcgagcttcaatggaatataaagccgcttttttacgccggcttggcagcaggtttagggccgacagatatttttcgcaaacacggttttatcggaaacctttcttttaaaatgggacttccgcaaaaaacaggaatcatagaagacagggactgggatgacaggtactggtgggtagacagcggtacgcttacaaattattcgcgccatgataacttttccgaaaggtcagttctggcggatctctcgcttggctattcttttccgttgtttaattttatcgcgcttgggataaatcttgatttttcatttatgcattattactggattgcaaaggatggttactatcaataccttagtccagggcagacctgggctgatgaaatcaagaaaatacctgtgaaaggaagcgtgattgaatactcgcaaaattggttcattctttctcccggtgtttttatcaattttcgccctggccgtttattttcactatacggaaatttttattgcagccccttaatttattgcgccgacagggacgatcatctgcttagaaaaacaatatttcaggattatcttttttacggccaatatttgagaggaggcggaggcataactttttcacccaagaacaatctggatattattctttttcttttgtacagttccataaccgattccagaggagatacctattccagaggggatgccgatacaaattttgcaaaagatgcgggagttgcaggaggaggatattcggcttttgaatttggactttcggccaggctgcgctttattaaccggcgctag

SEQ ID NO: 4160 - protein, 306 aa, Unknown
  Obtained from environmental sample
  DOMAIN (4)...(302): Omptin family
  misc_feature (1)..(306): Xaa is any amino acid
MPKENQSDFDSSITPSFGILFGQANEIVYYPRTKKILSELQWNIKPLFYAGLAAGLGPTDIFRKHGFIGNLSFKMGLPQKTGIIEDRDWDDRYWWVDSGTLTNYSRHDNFSERSVLADLSLGYSFPLFNFIALGINLDFSFMHYYWIAKDGYYQYLSPGQTWADEIKKIPVKGSVIEYSQNWFILSPGVFINFRPGRLFSLYGNFYCSPLIYCADRDDHLLRKTIFQDYLFYGQYLRGGGGITFSPKNNLDIILFLLYSSITDSRGDTYSRGDADTNFAKDAGVAGGGYSAFEFGLSARLRFINRR

SEQ ID NO: 4161 - DNA, 696 bp, Unknown
  Obtained from environmental sample
  misc_feature (1)..(696): n is a, c, g, or t
atgtcgcaaaaacgcacattggtatcttttgactgggctataaaatatctgcttaaaaacaaggcggattatattatacttgaaggctttttaataacgttgcttggcaaggaaataaaaattaaaaatctaactgatagcgaaagcaatagagaagtcaaaggcaggaaatacaaccgtgtagatgtgctggcggaggaaagcgatgggactttgataatagtggaacttcaattcactcctgaaatagactattttcaccgtatgcttttcggttcaagcaaagctattacggaacatttaggcgagggaatgccttatgccgatgtgagaaaagtgtattccgttaatgtggtatattttgaccttggttctggtaaggattatatttactatggttcaacaacttttaagggtttgcattacaacgatgagctagaacttaccgagaagcagaaagccgagtttgcgaagctggaaataaaggatatttaccctgagtattatattttgaagatagatcgttttaagaatatagtccaaaacaagatagacgagtggatatattttttgaagaattcagagataaagccagagttcaaagcccctggcttaaacgaagccataaacaagctgaattataatggtttgagttggaagatcagcaagcttctcggccgatctgatcattgttaa

SEQ ID NO: 4162 - protein, 231 aa, Unknown
  Obtained from environmental sample
  misc_feature (1)..(231): Xaa is any amino acid
MSQKRTLVSFDWAIKYLLKNKADYIILEGFLITLLGKEIKIKNLTDSESNREVKGRKYNRVDVLAEESDGTLIIVELQFTPEIDYFHRMLFGSSKAITEHLGEGMPYADVRKVYSVNVVYFDLGSGKDYIYYGSTTFKGLHYNDELELTEKQKAEFAKLEIKDIYPEYYILKIDRFKNIVQNKIDEWIYFLKNSEIKPEFKAPGLNEAINKLNYNGLSWKISKLLGRSDHC

SEQ ID NO: 4163 - DNA, 681 bp, Unknown
  Obtained from environmental sample
  misc_feature (1)..(681): n is a, c, g, or t
atgggcggggatttacttcggagagaaaatttaagacttatgtacaatgttgtacggaaacagcgtttcataacaattctccttgtcttatgcgttagtatatttacagtgaacgcgggtgatgaaagacctttgcgttccgccgaacccaagccccagagcgatgtttccggctattcacctaacgttaattacggcgtattcaactttgacggctacgcgctgttgactaaagtatcgcttgaaaatccgctgacaatgcggtacatagactattattcaagccccgcaggaatcgcctacttaaattcagtccttgagcgcgggaatgtttatatgccttttatcagggaggaaatcgaaaaacgtaatctgccgcttgagcttctttatatccctgtaattgaatccggttttcagataacggcaaaaagcaaatccggcgctgtggggctttggcagtttatgatgaacagcatttcgccgttcggaataaaggttaatgactatattgatgaaaggcgggactttgtcaaatccacaaaaggagctttgcaaaaacttgaagacaactacaaagtattagggaactgggaactggctattgccgcatataactgcgggcttggtcaaattacaggacgatacaaaaaacaaaaatcaacgatttttgggggctga

SEQ ID NO: 4164 - protein, 226 aa, Unknown
  Obtained from environmental sample
  DOMAIN (113)...(224): Transglycosylase SLT domain
  misc_feature (1)..(226): Xaa is any amino acid
MGGDLLRRENLRLMYNVVRKQRFITILLVLCVSIFTVNAGDERPLRSAEPKPQSDVSGYSPNVNYGVFNFDGYALLTKVSLENPLTMRYIDYYSSPAGIAYLNSVLERGNVYMPFIREEIEKRNLPLELLYIPVIESGFQITAKSKSGAVGLWQFMMNSISPFGIKVNDYIDERRDFVKSTKGALQKLEDNYKVLGNWELAIAAYNCGLGQITGRYKKQKSTIFGG

SEQ ID NO: 4165 - DNA, 771 bp, Unknown
  Obtained from environmental sample
  misc_feature (1)..(771): n is a, c, g, or t
atgagtctaagtattgtatgcgaacttgaaaaaaacactgttgttacggatgaatattttattttacaattttcatggaaaaaacccattccaagagccggtcaattttttatgataaaacccctgcgcacaagcgttttgttaccgcgtcccatcagcgtatttgagtatgttcaccaaacaagtaccattaaatttcttatacaaaaaaaaggcaggggtacggaagagctttcctgcgttcagacgggggagaaaattcaactaacgggaccttttggcaactgttgggctgatttccttcccgaaaacggaaaggccgcccttgtcggcggtagtgcgggagtcgcccctcttgtggccctggtttctgaaaaaccggattattattttcattttttcgcgggttttagaaaagggttcaaggagaaggaacaggaagacgccattatgggtcacgccgttaattcaaaacgtttttccatttcagcggaagacggcggaaacgcccttattggaaaaattaccgactttcttttctcccctcaggattttgacgtaattttaggttgcggcccgactcccatgttgagcgtccttaagaaaaaatgcgaagataaaaacgtcccctgttttatttctttggaaaataaattcgcctgcggcacgggcgcgtgtatgggatgtacaattgtaacaacaaatggaaaccgccgctgttgcatggaaggtccaattttctccgctcgtgaggtgttttttaatgagtga

SEQ ID NO: 4166 - protein, 256 aa, Unknown
  Obtained from environmental sample
  DOMAIN (6)...(97): Oxidoreductase FAD-binding domain
  misc_feature (1)..(256): Xaa is any amino acid
MSLSIVCELEKNTVVTDEYFILQFSWKKPIPRAGQFFMIKPLRTSVLLPRPISVFEYVHQTSTIKFLIQKKGRGTEELSCVQTGEKIQLTGPFGNCWADFLPENGKAALVGGSAGVAPLVALVSEKPDYYFHFFAGFRKGFKEKEQEDAIMGHAVNSKRFSISAEDGGNALIGKITDFLFSPQDFDVILGCGPTPMLSVLKKKCEDKNVPCFISLENKFACGTGACMGCTIVTTNGNRRCCMEGPIFSAREVFFNE

SEQ ID NO: 4167 - DNA, 657 bp, Unknown
  Obtained from environmental sample
  misc_feature (1)..(657): n is a, c, g, or t
ttgagaaataccgcatcattcaagaccacttgtttgaatccgattttgacagagaaatcaagaaaatcaaaaaagaaaccacccatgataataagcgcaagcagaaggactgatattcccgcatactattcggagtggtttctcaaccgcctgaaagaaaaatttgtctacgtaagaaatcccataaatatgcgtcgagtcagtgaaataaatctcaaccctgagattgttgattgtattgttttctggagcaaaaacccaaagccaatgatcgacaagcttcagtcaaatagtaccccacttaaagattatagctattattttcagtttacccttaacccctatgggccggatgttgaagcgagattgccgcccaaaactgaaataatcgacacttttaagaaattatccgacatgatttgtccgcagaaagttgtttggcgatatgatccaatcttgattaatggcaaatacaatacggcatatcatattgatgaatttgggagggtagccggtgttcttaaaggatatactgaaaaagtaacaatcagttttatcgatttctacaaaaagatagctgaaaacataaaactgttagaggtagttgaaacatcaactgaagagaagaacgtcatgcccaaatctcggccgatctga

SEQ ID NO: 4168 - protein, 218 aa, Unknown
  Obtained from environmental sample
  misc_feature (1)..(218): Xaa is any amino acid
MRNTASFKTTCLNPILTEKSRKSKKKPPMIISASRRTDIPAYYSEWFLNRLKEKFVYVRNPINMRRVSEINLNPEIVDCIVFWSKNPKPMIDKLQSNSTPLKDYSYYFQFTLNPYGPDVEARLPPKTEIIDTFKKLSDMICPQKVVWRYDPILINGKYNTAYHIDEFGRVAGVLKGYTEKVTISFIDFYKKIAENIKLLEVVETSTEEKNVMPKSRPI

SEQ ID NO: 4169 - DNA, 432 bp, Unknown
  Obtained from environmental sample
  misc_feature (1)..(432): n is a, c, g, or t
gtgatttatgacggggccgatgccgccaaagagcacatggggttgactacatggaaaaacagccctcagggaaaaattgtcaaaactgatgtggccgtcgctaaaaactacttgactgaggcagaactggaatctctgggacgcatagtcaacgcctatctcgatttagctgaagaccgcgcaaaaaaacatatcccaatgactatggaagattgggctaaacgtcttgaccgctttcttgaggccgatgatcggtatattcttcaagactcaggtaagataagcgccaagatcgcaaaagaattcgccgaaagcgaatttgagaaataccgcatcattcaagaccacttgtttgaatccgattttgacagagaaatcaagaaaatcaaaaaagaaaccacccatgataataagcgcaagcagaaggactga

SEQ ID NO: 4170 - protein, 143 aa, Unknown
  Obtained from environmental sample
  misc_feature (1)..(143): Xaa is any amino acid
MIYDGADAAKEHMGLTTWKNSPQGKIVKTDVAVAKNYLTEAELESLGRIVNAYLDLAEDRAKKHIPMTMEDWAKRLDRFLEADDRYILQDSGKISAKIAKEFAESEFEKYRIIQDHLFESDFDREIKKIKKETTHDNKRKQKD

SEQ ID NO: 4171 - DNA, 645 bp, Unknown
  Obtained from environmental sample
  misc_feature (1)..(645): n is a, c, g, or t
atgaataaaatgaaattaacacctaacattccgcagtattgggaaatgatgtatgaacagggaaaagacgattgggatttaggaaaagtaactcccgctttgcttgatttttttaaacatccgaactgcccaaaagacggcgatgttcttgttccaggcgcaggcagaggctgggatgcagaggcatgggcaaagcgcgggcataacgtaatagctattgatttctgttcgtatgcgtttgatattttggaaaaactatctgataaaaggaataatttaaaagcactgaatacggatatgtttttgttaaacccgtccggtaaaaatatacccggaaaaaaatttgacatcatttacgattatttcagttttaattccattcaccccggcaggcgtgatgaatatatagaaatgttgctcagaatgataaaaaacaatgggcttgtaattggatttttttgcccactaaacgatgaacgctacggcgataatccgccctatagcatatctaaagaagagcttgaagttaggtttaatggaatttttaatattgagaataaaattgtgcccgaaaacagtgctacagacagagtaggcaacagagcgggcatagaggaaatttggcttttgaggaaaatagtatga

SEQ ID NO: 4172 - protein, 214 aa, Unknown
  Obtained from environmental sample
  DOMAIN (50)...(149): Methyltransferase domain
  misc_feature (1)..(214): Xaa is any amino acid
MNKMKLTPNIPQYWEMMYEQGKDDWDLGKVTPALLDFFKHPNCPKDGDVLVPGAGRGWDAEAWAKRGHNVIAIDFCSYAFDILEKLSDKRNNLKALNTDMFLLNPSGKNIPGKKFDIIYDYFSFNSIHPGRRDEYIEMLLRMIKNNGLVIGFFCPLNDERYGDNPPYSISKEELEVRFNGIFNIENKIVPENSATDRVGNRAGIEEIWLLRKIV

SEQ ID NO: 4173 - DNA, 375 bp, Unknown
  Obtained from environmental sample
  misc_feature (1)..(375): n is a, c, g, or t
atgatcgccgagggcattattcgtatcctcacagacagaggcacggaatattgcggcaaggtcgaagcccacgattatgaactgtaccttggtgtaaacggaattgagcatacaaaaaccaaggcccggcacccccagacgaacggcatttgcgaacgtttccataaaaccgtgtcgcacgaattttatcaggttgctttccggcgcaagctgtatcactctctggaggaattgcagactgacctggatatctggatggacaactacaacacggaaagaacccatcaggggaaaatgtgctgcggcagaacgcctatacagacactccttgacggaaaacgactttggagggaaaaggtcgggcagctcaattaa

SEQ ID NO: 4174 - protein, 124 aa, Unknown
  Obtained from environmental sample
  misc_feature (1)..(124): Xaa is any amino acid
MIAEGIIRILTDRGTEYCGKVEAHDYELYLGVNGIEHTKTKARHPQTNGICERFHKTVSHEFYQVAFRRKLYHSLEELQTDLDIWMDNYNTERTHQGKMCCGRTPIQTLLDGKRLWREKVGQLN

SEQ ID NO: 4175 - DNA, 693 bp, Unknown
  Obtained from environmental sample
  misc_feature (1)..(693): n is a, c, g, or t
atgcaaataaaaaatggtaaattagcagctttgatagctcgattttccttcctgggcaactataaagagtccgggaaggataccgtttttattgtcgtagccagtcttctgacaatccttgtactgttaataccaacaggctttgaaggaagcggagtttactctaatgctgtacgcgccaaggttagggtagtagaagtcaataatgaaaggcttaaaataatcggtcctgtcaggcagggagaacaacagcttgaagtggaaatactttcaaaacgtttcaggggacagattcactacacgtcaaataacatgatcggaaaaatggaacttgacaaggcttatgtaaaaggcaatatagcgtttgcggtaattaatttgacggaagacggccaaatcgccaatgtacagatcatcgatcattaccgcacggacaagactattattcttggagcgcttttcatcgtcgccatgattatcatcatgggctggatgggctttaaaatactgataacttttgtcttttccgcggcaatgcttgtgagagttctgtatccgatgattcttcgcggctgggacccaatcatcggcgcgttgataattacaatgttgattaccgcgctgattatgttccttgtagcggacttacgcggcgcgcccttactgcctttctgggcgcgtcaggcggggtaa

SEQ ID NO: 4176 - protein, 230 aa, Unknown
  Obtained from environmental sample
  misc_feature (1)..(230): Xaa is any amino acid
MQIKNGKLAALIARFSFLGNYKESGKDTVFIVVASLLTILVLLIPTGFEGSGVYSNAVRAKVRVVEVNNERLKIIGPVRQGEQQLEVEILSKRFRGQIHYTSNNMIGKMELDKAYVKGNIAFAVINLTEDGQIANVQIIDHYRTDKTIILGALFIVAMIIIMGWMGFKILITFVFSAAMLVRVLYPMILRGWDPIIGALIITMLITALIMFLVADLRGAPLLPFWARQAG

SEQ ID NO: 4177 - DNA, 903 bp, Unknown
  Obtained from environmental sample
  misc_feature (1)..(903): n is a, c, g, or t
atgctgacaaacgccgtcaaatacacgcgccagggaagcattgaactcatcgtgcgcagtactcgcgacggtaattccgtgtggatggacgtttccgtaaaggatagcggaatcggtatacgtaaagaagacatagacaaacttttctcggattacaatcaggtcgataccaaagccaacaggagcattgagggaacggggttgggtcttgccattacaaagagactcatagcgatgatggacggggaaattagagtggaaagcatctacggtaaaggctctacgttccatctgcatttcaggcagggctatgtcaacgatacaattataggatcagataccgcaagtaaacttcgttgtttctgctatgccgatgaaaaacgtattagcaccaaaaaatttaccaggatcaatttgaactatgcaaaggtgctggtagtggacgatatgcagaccaatctggacgtagcaatgggcattttacacggttataaaatgcaggttgactgtttagacaacgggcgtgacgccgttgagcggatacgcgcgggaactccggtttataatgcggtatttatggatcacatgatgcccggaatggatggcatagaaacagtggacaagattcgcgcgttaggcacggaatacgcgaaaaatttaacaataatcgccctgaccgccaacgccatacatggaacagacaagatgttctatgaacacggcttccaggcgtttataaccaaacccatcgacgtaatggaaatggataccgttatcagaaaatgggtacgcgatcccacccgtgatgaagtgctggtttctgacgagtcttccacgagcggtgtttcttctgaaaatttggtaattgatataccgggagtagatactaaaaagagggcttag

SEQ ID NO: 4178 - protein, 300 aa, Unknown
  Obtained from environmental sample
  DOMAIN (142)...(260): Response regulator receiver domain
  misc_feature (1)..(300): Xaa is any amino acid
MLTNAVKYTRQGSIELIVRSTRDGNSVWMDVSVKDSGIGIRKEDIDKLFSDYNQVDTKANRSIEGTGLGLAITKRLIAMMDGEIRVESIYGKGSTFHLHFRQGYVNDTIIGSDTASKLRCFCYADEKRISTKKFTRINLNYAKVLVVDDMQTNLDVAMGILHGYKMQVDCLDNGRDAVERIRAGTPVYNAVFMDHMMPGMDGIETVDKIRALGTEYAKNLTIIALTANAIHGTDKMFYEHGFQAFITKPIDVMEMDTVIRKWVRDPTRDEVLVSDESSTSGVSSENLVIDIPGVDTKKRA

SEQ ID NO: 4179 - DNA, 711 bp, Unknown
  Obtained from environmental sample
  misc_feature (1)..(711): n is a, c, g, or t
atggaagtttcccttggggggggccttgccattttgagcccaccgggaatactagcttttccattaagccgggggatttacccctgtcttttaattagccacgcgaaagagcttttgaaaagaagttcattctattttagcaacagaattgtgatggtgtatctttatttatgtaggatttggaatgccttgtttgccgcttttgtgtgcgcgtattccttttttattgtaagaaacagctatgaaataaattattataacgctttatttctctctcttggcatattgtttttggtagcttttgccaatgcccacaacgatattgtggatttagaaatagataaaataaaccgcccaaagagacctttgccaagtggcaaaattagcactggggcagtttataggctgcttggtgcactgttttttttcactatgttttttagcgtgctggcggggtttaaatttgcattgctgttttttgttgctagtttattgagcgcggcatataaccgttttttaaaagctttgccccttgtggggaattttactgtttctttgctttcaacaatgcctgtggttattccaatggtaaattttggagagttccagagggaactctctgtactggcattttttgcctttatgctcacttttgcgcgggaaataacaaaagatatagaagacatggagggtgataaatctcaaaattga

SEQ ID NO: 4180 - protein, 236 aa, Unknown
  Obtained from environmental sample
  SIGNAL (1)...(19)
  DOMAIN (60)...(236): UbiA prenyltransferase family
  misc_feature (1)..(236): Xaa is any amino acid
MEVSLGGGLAILSPPGILAFPLSRGIYPCLLISHAKELLKRSSFYFSNRIVMVYLYLCRIWNALFAAFVCAYSFFIVRNSYEINYYNALFLSLGILFLVAFANAHNDIVDLEIDKINRPKRPLPSGKISTGAVYRLLGALFFFTMFFSVLAGFKFALLFFVASLLSAAYNRFLKALPLVGNFTVSLLSTMPVVIPMVNFGEFQRELSVLAFFAFMLTFAREITKDIEDMEGDKSQN

SEQ ID NO: 4181 - DNA, 888 bp, Unknown
  Obtained from environmental sample
  misc_feature (1)..(888): n is a, c, g, or t
gtggaaccgggggtttatctgtggcgggacggcgaaaatcgcattatttacgtgggaaaagccttaaatcttaaaaacaggttgaactcttacttctctggctctaaggacgttaaaactgcggccttgatcagccacagcaaaaccatcgagaccatcattgtttccaacgaatacgaagccctgctccttgaaaacaccctgataaaacagcacagcccaaggtacaacatcaaccttaaagacggcaaaacctatcccgttgtccggatcacgtcaggagaatttcccagggttttccgtaccaggcacattgtggaagacgggagccagtatttcggcccctttccgaatgtgcaggttctggatgagactcttgcggtgatagaaaaactctttcccttgcgaaaatgcagaacaatgaaaaagcgcgaaaatccctgcatgtactaccacataaaccgctgccttgcgccgtgctgcggcagggtggaagaaccggcgtatcaagcccaggtcgaaagggtgcgtaaactcctggccggagagacttccgccctaataggggatttaaatgcccaaatgcaggcggcggctgtggccctgaaattcgaggaggccgccggtttcaggaacgcaattcgggcgattgaaagcctttcgggaaacaactccgttgccgacatggatccagaaaaccgcgactacattgcctgggcggaggaaggcatcttcaccactttttcagttctttcaatgcggggcggcagaatgactggcagggagctttttaactcccgctccgccgcgaaagaagacgagtcccttgtaacattcctggccgcttactatttctccgngacgcctccccgccccggatttacctga

SEQ ID NO: 4182 - protein, 295 aa, Unknown
  Obtained from environmental sample
  DOMAIN (185)...(220): UvrB/uvrC motif
  misc_feature (1)..(295): Xaa is any amino acid
MEPGVYLWRDGENRIIYVGKALNLKNRLNSYFSGSKDVKTAALISHSKTIETIIVSNEYEALLLENTLIKQHSPRYNINLKDGKTYPVVRITSGEFPRVFRTRHIVEDGSQYFGPFPNVQVLDETLAVIEKLFPLRKCRTMKKRENPCMYYHINRCLAPCCGRVEEPAYQAQVERVRKLLAGETSALIGDLNAQMQAAAVALKFEEAAGFRNAIRAIESLSGNNSVADMDPENRDYIAWAEEGIFTTFSVLSMRGGRMTGRELFNSRSAAKEDESLVTFLAAYYFSXTPPRPGFT

SEQ ID NO: 4183 - DNA, 795 bp, Unknown
  Obtained from environmental sample
  misc_feature (1)..(795): n is a, c, g, or t
gtggcaatgatggccgactcgacttcccgcggggcgaaagccctgcgcgaaatgtccggccgtctggaagaaatgccgggcgaagaaggctatccggcctatctcggctcgcgcctcgcggaattctatgagcgcgccggacggacaatcggtctgggcgcggacggccgcgaaggcaccttgagcgtcatcggcgccgtgtcgcctcccggcggcgacctttccgagccggtcacgcaaaacactttgcgcgtagtcaaagttttctgggggctggattccgcgctggcctatgcccggcattttccggcgattaactggctcaaaagctattcattatatatagacaatctggatgaatattacacggccgaggtggatgaagaatggccgcagctgcgcgtacaggcggtcagcctgctccagcaggaatcggaattgcaggaaatggtgcgtttggtcgggctggacgcgctgtccggccgcgaacagctggtgctggaagccgcgcgttccatccgcgaggactatttgcatcaagttgcttttgatgacacggacacctacacttctttccgcaaacaatatttgatgctcaaagctgtactggctttttatcaagccgggctgaaattgctggagcaaaacaaagatgtactgccgagtttcaagcatcctgtccgggccaaaatcgcccgggttaaatacacgccggaaaacaaactgtctgaactggaaaacctggccgccgaagtagtgcaggccatagccgctaaaagcaggaggaaaagatga

SEQ ID NO: 4184 - protein, 264 aa, Unknown
  Obtained from environmental sample
  DOMAIN (1)...(112): ATP synthase alpha/beta family, nucleotide-binding domain
  misc_feature (1)..(264): Xaa is any amino acid
MAMMADSTSRGAKALREMSGRLEEMPGEEGYPAYLGSRLAEFYERAGRTIGLGADGREGTLSVIGAVSPPGGDLSEPVTQNTLRVVKVFWGLDSALAYARHFPAINWLKSYSLYIDNLDEYYTAEVDEEWPQLRVQAVSLLQQESELQEMVRLVGLDALSGREQLVLEAARSIREDYLHQVAFDDTDTYTSFRKQYLMLKAVLAFYQAGLKLLEQNKDVLPSFKHPVRAKIARVKYTPENKLSELENLAAEVVQAIAAKSRRKR

SEQ ID NO: 4185 - DNA, 732 bp, Unknown
  Obtained from environmental sample
  misc_feature (1)..(732): n is a, c, g, or t
atggtatattggctgcgaggcgttaagccgaagcatttcgtttgttattacttcagacgcaagttccttattatcaccatccgtgtcgtcggaaacaacggtttccggcgcgtccgtatcctcgccaacgattcccggcgcgcccgtatcccattcgtcaaacgcgggcaacttcggttctacgggcgcgggatccgccggtttaaccgggacgggcgccggttccacgggcgcgggcgccgcaggtttgacgggcgcgggcgccgccggtttaacagggacgggtatcggttctacaggcgcgggctctgccggtttgactggtacaggatccaccggtttgaccggtgcggactctggttcgacgggcacgggttctgccggtttaacgggcgtgggatccgccggtttgaccggcgcaggcgccggctcgacgagcgggggcgccgatacaacaggcgcaggcgtcggttcgacgggcgcgggcgccggtacaacaggcgcaggcgtcggttcaacgggcgggggcgccggtacaacaggcgcaggcgtcggttcgacgggcgcgggcgccggcacaacaggcgcaggcacagttggctcgacaggcgtgggcgccggttcgacaggggcgggatccgctggatcgacgcggttgggggccgccggtttaacgataatgggagtcgtcggttcgatgggaaggaagtgaacggcggtgctcggccataa

SEQ ID NO: 4186 - protein, 243 aa, Unknown
  Obtained from environmental sample
  misc_feature (1)..(243): Xaa is any amino acid
MVYWLRGVKPKHFVCYYFRRKFLIITIRVVGNNGFRRVRILANDSRRARIPFVKRGQLRFYGRGIRRFNRDGRRFHGRGRRRFDGRGRRRFNRDGYRFYRRGLCRFDWYRIHRFDRCGLWFDGHGFCRFNGRGIRRFDRRRRRLDERGRRYNRRRRRFDGRGRRYNRRRRRFNGRGRRYNRRRRRFDGRGRRHNRRRHSWLDRRGRRFDRGGIRWIDAVGGRRFNDNGSRRFDGKEVNGGARP

(The sequence listing continues in the following parts.)
